United States Patent Application Publication US 2026/0258424 A1 - sequence listing, part 4

SEQ ID NO: 3217 - protein, 2021 aa, synthetic construct
MPAAKRVKLDGGDKKYSIGLDIGTNSVGWAVITDEYKVPSKKFKVLGNTDRHSIKKNLIGALLFDSGETAEATRLKRTARRRYTRRKNRICYLQEIFSNEMAKVDDSFFHRLEESFLVEEDKKHERHPIFGNIVDEVAYHEKYPTIYHLRKKLVDSTDKADLRLIYLALAHMIKFRGHFLIEGDLNPDNSDVDKLFIQLVQTYNQLFEENPINASGVDAKAILSARLSKSRRLENLIAQLPGEKKNGLFGNLIALSLGLTPNFKSNFDLAEDAKLQLSKDTYDDDLDNLLAQIGDQYADLFLAAKNLSDAILLSDILRVNTEITKAPLSASMIKRYDEHHQDLTLLKALVRQQLPEKYKEIFFDQSKNGYAGYIDGGASQEEFYKFIKPILEKMDGTEELLVKLNREDLLRKQRTFDNGSIPHQIHLGELHAILRRQEDFYPFLKDNREKIEKILTFRIPYYVGPLARGNSRFAWMTRKSEETITPWNFEEVVDKGASAQSFIERMTNFDKNLPNEKVLPKHSLLYEYFTVYNELTKVKYVTEGMRKPAFLSGEQKKAIVDLLFKTNRKVTVKQLKEDYFKKIECFDSVEISGVEDRFNASLGTYHDLLKIIKDKDFLDNEENEDILEDIVLTLTLFEDREMIEERLKTYAHLFDDKVMKQLKRRRYTGWGRLSRKLINGIRDKQSGKTILDFLKSDGFANRNFMQLIHDDSLTFKEDIQKAQVSGQGDSLHEHIANLAGSPAIKKGILQTVKVVDELVKVMGRHKPENIVIEMARENQTTQKGQKNSRERMKRIEEGIKELGSQILKEHPVENTQLQNEKLYLYYLQNGRDMYVDQELDINRLSDYDVDHIVPQSFLKDDSIDNKVLTRSDKARGKSDNVPSEEVVKKMKNYWRQLLNAKLITQRKFDNLTKAERGGLSELDKAGFIKRQLVETRQITKHVAQILDSRMNTKYDENDKLIREVKVITLKSKLVSDFRKDFQFYKVREINNYHHAHDAYLNAVVGTALIKKYPKLESEFVYGDYKVYDVRKMIAKSEQEIGKATAKYFFYSNIMNFFKTEITLANGEIRKRPLIETNGETGEIVWDKGRDFATVRKVLSMPQVNIVKKTEVQTGGFSKESILPKRNSDKLIARKKDWDPKKYGGFDSPTVAYSVLVVAKVEKGKSKKLKSVKELLGITIMERSSFEKNPIDFLEAKGYKEVKKDLIIKLPKYSLFELENGRKRMLASAGELQKGNELALPSKYVNFLYLASHYEKLKGSPEDNEQKQLFVEQHKHYLDEIIEQISEFSKRVILADANLDKVLSAYNKHRDKPIREQAENIIHLFTLTNLGAPAAFKYFDTTIDRKRYTSTKEVLDATLIHQSITGLYETRIDLSQLGGDGGPAPEAAAKGGGRDIMKDIKVRLMTDSPDDSQDLMIGAIESNLFADQISWKSDQPVWLNQWPLKQEKLQALQQLVTEQLQLGHLEESNSPWNTPVFVIKKKSGKWRLLQDLRAVNATMHDMGALQPGLPSPVAVPKGWEIIIIDLQDCFFNIKLHPEDCKRFAFSVPSPNFKRPYQRFQWKVLPQGMKNSPTLCQKFVDKAILTVRDKYQDSYIVHYMDDILLAHPSRSIVDEILTSMIQALNKHGLVVSTEKIQKYDNLKYLGTHIQGDSVSYQKLQIRTDKLRTLNDFQKLLGNINWIRPFLKLTTGELKPLFEILNGDSNPISTRKLTPEACKALQLMNERLSTARVKRLDLSQPWSLCILKTEYTPTACLWQDGVVEWIHLPHISPKVITPYDIFCTQLIIKGRHRSKELFSKDPDYIVVPYTKVQFDLLLQEKEDWPISLLGFLGEVHFHLPKDPLLTFTLQTAIIFPHMTSTTPLEKGIVIFTDGSANGRSVTYIQGREPIIKENTQNTAQQAEIVAVITAFEEVSQPFNLYTDSKYVTGLFPEIETATLSPRTKIYTELKHLQRLIHKRQEKFYIGHIRGHTGLPGPLAQGNAYADSLTRILTAGKRTADGSEFEKRTADGSEFESPKKKAKVE

SEQ ID NO: 3218 - protein, 2018 aa, synthetic construct
MPAAKRVKLDGGDKKYSIGLDIGTNSVGWAVITDEYKVPSKKFKVLGNTDRHSIKKNLIGALLFDSGETAEATRLKRTARRRYTRRKNRICYLQEIFSNEMAKVDDSFFHRLEESFLVEEDKKHERHPIFGNIVDEVAYHEKYPTIYHLRKKLVDSTDKADLRLIYLALAHMIKFRGHFLIEGDLNPDNSDVDKLFIQLVQTYNQLFEENPINASGVDAKAILSARLSKSRRLENLIAQLPGEKKNGLFGNLIALSLGLTPNFKSNFDLAEDAKLQLSKDTYDDDLDNLLAQIGDQYADLFLAAKNLSDAILLSDILRVNTEITKAPLSASMIKRYDEHHQDLTLLKALVRQQLPEKYKEIFFDQSKNGYAGYIDGGASQEEFYKFIKPILEKMDGTEELLVKLNREDLLRKQRTFDNGSIPHQIHLGELHAILRRQEDFYPFLKDNREKIEKILTFRIPYYVGPLARGNSRFAWMTRKSEETITPWNFEEVVDKGASAQSFIERMTNFDKNLPNEKVLPKHSLLYEYFTVYNELTKVKYVTEGMRKPAFLSGEQKKAIVDLLFKTNRKVTVKQLKEDYFKKIECFDSVEISGVEDRFNASLGTYHDLLKIIKDKDFLDNEENEDILEDIVLTLTLFEDREMIEERLKTYAHLFDDKVMKQLKRRRYTGWGRLSRKLINGIRDKQSGKTILDFLKSDGFANRNFMQLIHDDSLTFKEDIQKAQVSGQGDSLHEHIANLAGSPAIKKGILQTVKVVDELVKVMGRHKPENIVIEMARENQTTQKGQKNSRERMKRIEEGIKELGSQILKEHPVENTQLQNEKLYLYYLQNGRDMYVDQELDINRLSDYDVDHIVPQSFLKDDSIDNKVLTRSDKARGKSDNVPSEEVVKKMKNYWRQLLNAKLITQRKFDNLTKAERGGLSELDKAGFIKRQLVETRQITKHVAQILDSRMNTKYDENDKLIREVKVITLKSKLVSDFRKDFQFYKVREINNYHHAHDAYLNAVVGTALIKKYPKLESEFVYGDYKVYDVRKMIAKSEQEIGKATAKYFFYSNIMNFFKTEITLANGEIRKRPLIETNGETGEIVWDKGRDFATVRKVLSMPQVNIVKKTEVQTGGFSKESILPKRNSDKLIARKKDWDPKKYGGFDSPTVAYSVLVVAKVEKGKSKKLKSVKELLGITIMERSSFEKNPIDFLEAKGYKEVKKDLIIKLPKYSLFELENGRKRMLASAGELQKGNELALPSKYVNFLYLASHYEKLKGSPEDNEQKQLFVEQHKHYLDEIIEQISEFSKRVILADANLDKVLSAYNKHRDKPIREQAENIIHLFTLTNLGAPAAFKYFDTTIDRKRYTSTKEVLDATLIHQSITGLYETRIDLSQLGGDGGPAPAPGGGRDIMKDIKVRLMTDSPDDSQDLMIGAIESNLFADQISWKSDQPVWLNQWPLKQEKLQALQQLVTEQLQLGHLEESNSPWNTPVFVIKKKSGKWRLLQDLRAVNATMHDMGALQPGLPSPVAVPKGWEIIIIDLQDCFFNIKLHPEDCKRFAFSVPSPNFKRPYQRFQWKVLPQGMKNSPTLCQKFVDKAILTVRDKYQDSYIVHYMDDILLAHPSRSIVDEILTSMIQALNKHGLVVSTEKIQKYDNLKYLGTHIQGDSVSYQKLQIRTDKLRTLNDFQKLLGNINWIRPFLKLTTGELKPLFEILNGDSNPISTRKLTPEACKALQLMNERLSTARVKRLDLSQPWSLCILKTEYTPTACLWQDGVVEWIHLPHISPKVITPYDIFCTQLIIKGRHRSKELFSKDPDYIVVPYTKVQFDLLLQEKEDWPISLLGFLGEVHFHLPKDPLLTFTLQTAIIFPHMTSTTPLEKGIVIFTDGSANGRSVTYIQGREPIIKENTQNTAQQAEIVAVITAFEEVSQPFNLYTDSKYVTGLFPEIETATLSPRTKIYTELKHLQRLIHKRQEKFYIGHIRGHTGLPGPLAQGNAYADSLTRILTAGKRTADGSEFEKRTADGSEFESPKKKAKVE

SEQ ID NO: 3219 - protein, 2025 aa, synthetic construct
MPAAKRVKLDGGDKKYSIGLDIGTNSVGWAVITDEYKVPSKKFKVLGNTDRHSIKKNLIGALLFDSGETAEATRLKRTARRRYTRRKNRICYLQEIFSNEMAKVDDSFFHRLEESFLVEEDKKHERHPIFGNIVDEVAYHEKYPTIYHLRKKLVDSTDKADLRLIYLALAHMIKFRGHFLIEGDLNPDNSDVDKLFIQLVQTYNQLFEENPINASGVDAKAILSARLSKSRRLENLIAQLPGEKKNGLFGNLIALSLGLTPNFKSNFDLAEDAKLQLSKDTYDDDLDNLLAQIGDQYADLFLAAKNLSDAILLSDILRVNTEITKAPLSASMIKRYDEHHQDLTLLKALVRQQLPEKYKEIFFDQSKNGYAGYIDGGASQEEFYKFIKPILEKMDGTEELLVKLNREDLLRKQRTFDNGSIPHQIHLGELHAILRRQEDFYPFLKDNREKIEKILTFRIPYYVGPLARGNSRFAWMTRKSEETITPWNFEEVVDKGASAQSFIERMTNFDKNLPNEKVLPKHSLLYEYFTVYNELTKVKYVTEGMRKPAFLSGEQKKAIVDLLFKTNRKVTVKQLKEDYFKKIECFDSVEISGVEDRFNASLGTYHDLLKIIKDKDFLDNEENEDILEDIVLTLTLFEDREMIEERLKTYAHLFDDKVMKQLKRRRYTGWGRLSRKLINGIRDKQSGKTILDFLKSDGFANRNFMQLIHDDSLTFKEDIQKAQVSGQGDSLHEHIANLAGSPAIKKGILQTVKVVDELVKVMGRHKPENIVIEMARENQTTQKGQKNSRERMKRIEEGIKELGSQILKEHPVENTQLQNEKLYLYYLQNGRDMYVDQELDINRLSDYDVDHIVPQSFLKDDSIDNKVLTRSDKARGKSDNVPSEEVVKKMKNYWRQLLNAKLITQRKFDNLTKAERGGLSELDKAGFIKRQLVETRQITKHVAQILDSRMNTKYDENDKLIREVKVITLKSKLVSDFRKDFQFYKVREINNYHHAHDAYLNAVVGTALIKKYPKLESEFVYGDYKVYDVRKMIAKSEQEIGKATAKYFFYSNIMNFFKTEITLANGEIRKRPLIETNGETGEIVWDKGRDFATVRKVLSMPQVNIVKKTEVQTGGFSKESILPKRNSDKLIARKKDWDPKKYGGFDSPTVAYSVLVVAKVEKGKSKKLKSVKELLGITIMERSSFEKNPIDFLEAKGYKEVKKDLIIKLPKYSLFELENGRKRMLASAGELQKGNELALPSKYVNFLYLASHYEKLKGSPEDNEQKQLFVEQHKHYLDEIIEQISEFSKRVILADANLDKVLSAYNKHRDKPIREQAENIIHLFTLTNLGAPAAFKYFDTTIDRKRYTSTKEVLDATLIHQSITGLYETRIDLSQLGGDGGGSAGSAAGSGEFGGGRDIMKDIKVRLMTDSPDDSQDLMIGAIESNLFADQISWKSDQPVWLNQWPLKQEKLQALQQLVTEQLQLGHLEESNSPWNTPVFVIKKKSGKWRLLQDLRAVNATMHDMGALQPGLPSPVAVPKGWEIIIIDLQDCFFNIKLHPEDCKRFAFSVPSPNFKRPYQRFQWKVLPQGMKNSPTLCQKFVDKAILTVRDKYQDSYIVHYMDDILLAHPSRSIVDEILTSMIQALNKHGLVVSTEKIQKYDNLKYLGTHIQGDSVSYQKLQIRTDKLRTLNDFQKLLGNINWIRPFLKLTTGELKPLFEILNGDSNPISTRKLTPEACKALQLMNERLSTARVKRLDLSQPWSLCILKTEYTPTACLWQDGVVEWIHLPHISPKVITPYDIFCTQLIIKGRHRSKELFSKDPDYIVVPYTKVQFDLLLQEKEDWPISLLGFLGEVHFHLPKDPLLTFTLQTAIIFPHMTSTTPLEKGIVIFTDGSANGRSVTYIQGREPIIKENTQNTAQQAEIVAVITAFEEVSQPFNLYTDSKYVTGLFPEIETATLSPRTKIYTELKHLQRLIHKRQEKFYIGHIRGHTGLPGPLAQGNAYADSLTRILTAGKRTADGSEFEKRTADGSEFESPKKKAKVE

SEQ ID NO: 3220 - protein, 2022 aa, synthetic construct
MPAAKRVKLDGGDKKYSIGLDIGTNSVGWAVITDEYKVPSKKFKVLGNTDRHSIKKNLIGALLFDSGETAEATRLKRTARRRYTRRKNRICYLQEIFSNEMAKVDDSFFHRLEESFLVEEDKKHERHPIFGNIVDEVAYHEKYPTIYHLRKKLVDSTDKADLRLIYLALAHMIKFRGHFLIEGDLNPDNSDVDKLFIQLVQTYNQLFEENPINASGVDAKAILSARLSKSRRLENLIAQLPGEKKNGLFGNLIALSLGLTPNFKSNFDLAEDAKLQLSKDTYDDDLDNLLAQIGDQYADLFLAAKNLSDAILLSDILRVNTEITKAPLSASMIKRYDEHHQDLTLLKALVRQQLPEKYKEIFFDQSKNGYAGYIDGGASQEEFYKFIKPILEKMDGTEELLVKLNREDLLRKQRTFDNGSIPHQIHLGELHAILRRQEDFYPFLKDNREKIEKILTFRIPYYVGPLARGNSRFAWMTRKSEETITPWNFEEVVDKGASAQSFIERMTNFDKNLPNEKVLPKHSLLYEYFTVYNELTKVKYVTEGMRKPAFLSGEQKKAIVDLLFKTNRKVTVKQLKEDYFKKIECFDSVEISGVEDRFNASLGTYHDLLKIIKDKDFLDNEENEDILEDIVLTLTLFEDREMIEERLKTYAHLFDDKVMKQLKRRRYTGWGRLSRKLINGIRDKQSGKTILDFLKSDGFANRNFMQLIHDDSLTFKEDIQKAQVSGQGDSLHEHIANLAGSPAIKKGILQTVKVVDELVKVMGRHKPENIVIEMARENQTTQKGQKNSRERMKRIEEGIKELGSQILKEHPVENTQLQNEKLYLYYLQNGRDMYVDQELDINRLSDYDVDHIVPQSFLKDDSIDNKVLTRSDKARGKSDNVPSEEVVKKMKNYWRQLLNAKLITQRKFDNLTKAERGGLSELDKAGFIKRQLVETRQITKHVAQILDSRMNTKYDENDKLIREVKVITLKSKLVSDFRKDFQFYKVREINNYHHAHDAYLNAVVGTALIKKYPKLESEFVYGDYKVYDVRKMIAKSEQEIGKATAKYFFYSNIMNFFKTEITLANGEIRKRPLIETNGETGEIVWDKGRDFATVRKVLSMPQVNIVKKTEVQTGGFSKESILPKRNSDKLIARKKDWDPKKYGGFDSPTVAYSVLVVAKVEKGKSKKLKSVKELLGITIMERSSFEKNPIDFLEAKGYKEVKKDLIIKLPKYSLFELENGRKRMLASAGELQKGNELALPSKYVNFLYLASHYEKLKGSPEDNEQKQLFVEQHKHYLDEIIEQISEFSKRVILADANLDKVLSAYNKHRDKPIREQAENIIHLFTLTNLGAPAAFKYFDTTIDRKRYTSTKEVLDATLIHQSITGLYETRIDLSQLGGDGGPAPGGGGGSGGGRDIMKDIKVRLMTDSPDDSQDLMIGAIESNLFADQISWKSDQPVWLNQWPLKQEKLQALQQLVTEQLQLGHLEESNSPWNTPVFVIKKKSGKWRLLQDLRAVNATMHDMGALQPGLPSPVAVPKGWEIIIIDLQDCFFNIKLHPEDCKRFAFSVPSPNFKRPYQRFQWKVLPQGMKNSPTLCQKFVDKAILTVRDKYQDSYIVHYMDDILLAHPSRSIVDEILTSMIQALNKHGLVVSTEKIQKYDNLKYLGTHIQGDSVSYQKLQIRTDKLRTLNDFQKLLGNINWIRPFLKLTTGELKPLFEILNGDSNPISTRKLTPEACKALQLMNERLSTARVKRLDLSQPWSLCILKTEYTPTACLWQDGVVEWIHLPHISPKVITPYDIFCTQLIIKGRHRSKELFSKDPDYIVVPYTKVQFDLLLQEKEDWPISLLGFLGEVHFHLPKDPLLTFTLQTAIIFPHMTSTTPLEKGIVIFTDGSANGRSVTYIQGREPIIKENTQNTAQQAEIVAVITAFEEVSQPFNLYTDSKYVTGLFPEIETATLSPRTKIYTELKHLQRLIHKRQEKFYIGHIRGHTGLPGPLAQGNAYADSLTRILTAGKRTADGSEFEKRTADGSEFESPKKKAKVE

SEQ ID NO: 3221 - protein, 2022 aa, synthetic construct
MPAAKRVKLDGGDKKYSIGLDIGTNSVGWAVITDEYKVPSKKFKVLGNTDRHSIKKNLIGALLFDSGETAEATRLKRTARRRYTRRKNRICYLQEIFSNEMAKVDDSFFHRLEESFLVEEDKKHERHPIFGNIVDEVAYHEKYPTIYHLRKKLVDSTDKADLRLIYLALAHMIKFRGHFLIEGDLNPDNSDVDKLFIQLVQTYNQLFEENPINASGVDAKAILSARLSKSRRLENLIAQLPGEKKNGLFGNLIALSLGLTPNFKSNFDLAEDAKLQLSKDTYDDDLDNLLAQIGDQYADLFLAAKNLSDAILLSDILRVNTEITKAPLSASMIKRYDEHHQDLTLLKALVRQQLPEKYKEIFFDQSKNGYAGYIDGGASQEEFYKFIKPILEKMDGTEELLVKLNREDLLRKQRTFDNGSIPHQIHLGELHAILRRQEDFYPFLKDNREKIEKILTFRIPYYVGPLARGNSRFAWMTRKSEETITPWNFEEVVDKGASAQSFIERMTNFDKNLPNEKVLPKHSLLYEYFTVYNELTKVKYVTEGMRKPAFLSGEQKKAIVDLLFKTNRKVTVKQLKEDYFKKIECFDSVEISGVEDRFNASLGTYHDLLKIIKDKDFLDNEENEDILEDIVLTLTLFEDREMIEERLKTYAHLFDDKVMKQLKRRRYTGWGRLSRKLINGIRDKQSGKTILDFLKSDGFANRNFMQLIHDDSLTFKEDIQKAQVSGQGDSLHEHIANLAGSPAIKKGILQTVKVVDELVKVMGRHKPENIVIEMARENQTTQKGQKNSRERMKRIEEGIKELGSQILKEHPVENTQLQNEKLYLYYLQNGRDMYVDQELDINRLSDYDVDHIVPQSFLKDDSIDNKVLTRSDKARGKSDNVPSEEVVKKMKNYWRQLLNAKLITQRKFDNLTKAERGGLSELDKAGFIKRQLVETRQITKHVAQILDSRMNTKYDENDKLIREVKVITLKSKLVSDFRKDFQFYKVREINNYHHAHDAYLNAVVGTALIKKYPKLESEFVYGDYKVYDVRKMIAKSEQEIGKATAKYFFYSNIMNFFKTEITLANGEIRKRPLIETNGETGEIVWDKGRDFATVRKVLSMPQVNIVKKTEVQTGGFSKESILPKRNSDKLIARKKDWDPKKYGGFDSPTVAYSVLVVAKVEKGKSKKLKSVKELLGITIMERSSFEKNPIDFLEAKGYKEVKKDLIIKLPKYSLFELENGRKRMLASAGELQKGNELALPSKYVNFLYLASHYEKLKGSPEDNEQKQLFVEQHKHYLDEIIEQISEFSKRVILADANLDKVLSAYNKHRDKPIREQAENIIHLFTLTNLGAPAAFKYFDTTIDRKRYTSTKEVLDATLIHQSITGLYETRIDLSQLGGDGGPAPAPAPAPGGGRDIMKDIKVRLMTDSPDDSQDLMIGAIESNLFADQISWKSDQPVWLNQWPLKQEKLQALQQLVTEQLQLGHLEESNSPWNTPVFVIKKKSGKWRLLQDLRAVNATMHDMGALQPGLPSPVAVPKGWEIIIIDLQDCFFNIKLHPEDCKRFAFSVPSPNFKRPYQRFQWKVLPQGMKNSPTLCQKFVDKAILTVRDKYQDSYIVHYMDDILLAHPSRSIVDEILTSMIQALNKHGLVVSTEKIQKYDNLKYLGTHIQGDSVSYQKLQIRTDKLRTLNDFQKLLGNINWIRPFLKLTTGELKPLFEILNGDSNPISTRKLTPEACKALQLMNERLSTARVKRLDLSQPWSLCILKTEYTPTACLWQDGVVEWIHLPHISPKVITPYDIFCTQLIIKGRHRSKELFSKDPDYIVVPYTKVQFDLLLQEKEDWPISLLGFLGEVHFHLPKDPLLTFTLQTAIIFPHMTSTTPLEKGIVIFTDGSANGRSVTYIQGREPIIKENTQNTAQQAEIVAVITAFEEVSQPFNLYTDSKYVTGLFPEIETATLSPRTKIYTELKHLQRLIHKRQEKFYIGHIRGHTGLPGPLAQGNAYADSLTRILTAGKRTADGSEFEKRTADGSEFESPKKKAKVE

SEQ ID NO: 3222 - protein, 2024 aa, synthetic construct
MPAAKRVKLDGGDKKYSIGLDIGTNSVGWAVITDEYKVPSKKFKVLGNTDRHSIKKNLIGALLFDSGETAEATRLKRTARRRYTRRKNRICYLQEIFSNEMAKVDDSFFHRLEESFLVEEDKKHERHPIFGNIVDEVAYHEKYPTIYHLRKKLVDSTDKADLRLIYLALAHMIKFRGHFLIEGDLNPDNSDVDKLFIQLVQTYNQLFEENPINASGVDAKAILSARLSKSRRLENLIAQLPGEKKNGLFGNLIALSLGLTPNFKSNFDLAEDAKLQLSKDTYDDDLDNLLAQIGDQYADLFLAAKNLSDAILLSDILRVNTEITKAPLSASMIKRYDEHHQDLTLLKALVRQQLPEKYKEIFFDQSKNGYAGYIDGGASQEEFYKFIKPILEKMDGTEELLVKLNREDLLRKQRTFDNGSIPHQIHLGELHAILRRQEDFYPFLKDNREKIEKILTFRIPYYVGPLARGNSRFAWMTRKSEETITPWNFEEVVDKGASAQSFIERMTNFDKNLPNEKVLPKHSLLYEYFTVYNELTKVKYVTEGMRKPAFLSGEQKKAIVDLLFKTNRKVTVKQLKEDYFKKIECFDSVEISGVEDRFNASLGTYHDLLKIIKDKDFLDNEENEDILEDIVLTLTLFEDREMIEERLKTYAHLFDDKVMKQLKRRRYTGWGRLSRKLINGIRDKQSGKTILDFLKSDGFANRNFMQLIHDDSLTFKEDIQKAQVSGQGDSLHEHIANLAGSPAIKKGILQTVKVVDELVKVMGRHKPENIVIEMARENQTTQKGQKNSRERMKRIEEGIKELGSQILKEHPVENTQLQNEKLYLYYLQNGRDMYVDQELDINRLSDYDVDHIVPQSFLKDDSIDNKVLTRSDKARGKSDNVPSEEVVKKMKNYWRQLLNAKLITQRKFDNLTKAERGGLSELDKAGFIKRQLVETRQITKHVAQILDSRMNTKYDENDKLIREVKVITLKSKLVSDFRKDFQFYKVREINNYHHAHDAYLNAVVGTALIKKYPKLESEFVYGDYKVYDVRKMIAKSEQEIGKATAKYFFYSNIMNFFKTEITLANGEIRKRPLIETNGETGEIVWDKGRDFATVRKVLSMPQVNIVKKTEVQTGGFSKESILPKRNSDKLIARKKDWDPKKYGGFDSPTVAYSVLVVAKVEKGKSKKLKSVKELLGITIMERSSFEKNPIDFLEAKGYKEVKKDLIIKLPKYSLFELENGRKRMLASAGELQKGNELALPSKYVNFLYLASHYEKLKGSPEDNEQKQLFVEQHKHYLDEIIEQISEFSKRVILADANLDKVLSAYNKHRDKPIREQAENIIHLFTLTNLGAPAAFKYFDTTIDRKRYTSTKEVLDATLIHQSITGLYETRIDLSQLGGDGGPAPEAAAKGGSGGGRDIMKDIKVRLMTDSPDDSQDLMIGAIESNLFADQISWKSDQPVWLNQWPLKQEKLQALQQLVTEQLQLGHLEESNSPWNTPVFVIKKKSGKWRLLQDLRAVNATMHDMGALQPGLPSPVAVPKGWEIIIIDLQDCFFNIKLHPEDCKRFAFSVPSPNFKRPYQRFQWKVLPQGMKNSPTLCQKFVDKAILTVRDKYQDSYIVHYMDDILLAHPSRSIVDEILTSMIQALNKHGLVVSTEKIQKYDNLKYLGTHIQGDSVSYQKLQIRTDKLRTLNDFQKLLGNINWIRPFLKLTTGELKPLFEILNGDSNPISTRKLTPEACKALQLMNERLSTARVKRLDLSQPWSLCILKTEYTPTACLWQDGVVEWIHLPHISPKVITPYDIFCTQLIIKGRHRSKELFSKDPDYIVVPYTKVQFDLLLQEKEDWPISLLGFLGEVHFHLPKDPLLTFTLQTAIIFPHMTSTTPLEKGIVIFTDGSANGRSVTYIQGREPIIKENTQNTAQQAEIVAVITAFEEVSQPFNLYTDSKYVTGLFPEIETATLSPRTKIYTELKHLQRLIHKRQEKFYIGHIRGHTGLPGPLAQGNAYADSLTRILTAGKRTADGSEFEKRTADGSEFESPKKKAKVE

SEQ ID NO: 3223 - protein, 2022 aa, synthetic construct
MPAAKRVKLDGGDKKYSIGLDIGTNSVGWAVITDEYKVPSKKFKVLGNTDRHSIKKNLIGALLFDSGETAEATRLKRTARRRYTRRKNRICYLQEIFSNEMAKVDDSFFHRLEESFLVEEDKKHERHPIFGNIVDEVAYHEKYPTIYHLRKKLVDSTDKADLRLIYLALAHMIKFRGHFLIEGDLNPDNSDVDKLFIQLVQTYNQLFEENPINASGVDAKAILSARLSKSRRLENLIAQLPGEKKNGLFGNLIALSLGLTPNFKSNFDLAEDAKLQLSKDTYDDDLDNLLAQIGDQYADLFLAAKNLSDAILLSDILRVNTEITKAPLSASMIKRYDEHHQDLTLLKALVRQQLPEKYKEIFFDQSKNGYAGYIDGGASQEEFYKFIKPILEKMDGTEELLVKLNREDLLRKQRTFDNGSIPHQIHLGELHAILRRQEDFYPFLKDNREKIEKILTFRIPYYVGPLARGNSRFAWMTRKSEETITPWNFEEVVDKGASAQSFIERMTNFDKNLPNEKVLPKHSLLYEYFTVYNELTKVKYVTEGMRKPAFLSGEQKKAIVDLLFKTNRKVTVKQLKEDYFKKIECFDSVEISGVEDRFNASLGTYHDLLKIIKDKDFLDNEENEDILEDIVLTLTLFEDREMIEERLKTYAHLFDDKVMKQLKRRRYTGWGRLSRKLINGIRDKQSGKTILDFLKSDGFANRNFMQLIHDDSLTFKEDIQKAQVSGQGDSLHEHIANLAGSPAIKKGILQTVKVVDELVKVMGRHKPENIVIEMARENQTTQKGQKNSRERMKRIEEGIKELGSQILKEHPVENTQLQNEKLYLYYLQNGRDMYVDQELDINRLSDYDVDHIVPQSFLKDDSIDNKVLTRSDKARGKSDNVPSEEVVKKMKNYWRQLLNAKLITQRKFDNLTKAERGGLSELDKAGFIKRQLVETRQITKHVAQILDSRMNTKYDENDKLIREVKVITLKSKLVSDFRKDFQFYKVREINNYHHAHDAYLNAVVGTALIKKYPKLESEFVYGDYKVYDVRKMIAKSEQEIGKATAKYFFYSNIMNFFKTEITLANGEIRKRPLIETNGETGEIVWDKGRDFATVRKVLSMPQVNIVKKTEVQTGGFSKESILPKRNSDKLIARKKDWDPKKYGGFDSPTVAYSVLVVAKVEKGKSKKLKSVKELLGITIMERSSFEKNPIDFLEAKGYKEVKKDLIIKLPKYSLFELENGRKRMLASAGELQKGNELALPSKYVNFLYLASHYEKLKGSPEDNEQKQLFVEQHKHYLDEIIEQISEFSKRVILADANLDKVLSAYNKHRDKPIREQAENIIHLFTLTNLGAPAAFKYFDTTIDRKRYTSTKEVLDATLIHQSITGLYETRIDLSQLGGDGGGGGPAPGSSGGGRDIMKDIKVRLMTDSPDDSQDLMIGAIESNLFADQISWKSDQPVWLNQWPLKQEKLQALQQLVTEQLQLGHLEESNSPWNTPVFVIKKKSGKWRLLQDLRAVNATMHDMGALQPGLPSPVAVPKGWEIIIIDLQDCFFNIKLHPEDCKRFAFSVPSPNFKRPYQRFQWKVLPQGMKNSPTLCQKFVDKAILTVRDKYQDSYIVHYMDDILLAHPSRSIVDEILTSMIQALNKHGLVVSTEKIQKYDNLKYLGTHIQGDSVSYQKLQIRTDKLRTLNDFQKLLGNINWIRPFLKLTTGELKPLFEILNGDSNPISTRKLTPEACKALQLMNERLSTARVKRLDLSQPWSLCILKTEYTPTACLWQDGVVEWIHLPHISPKVITPYDIFCTQLIIKGRHRSKELFSKDPDYIVVPYTKVQFDLLLQEKEDWPISLLGFLGEVHFHLPKDPLLTFTLQTAIIFPHMTSTTPLEKGIVIFTDGSANGRSVTYIQGREPIIKENTQNTAQQAEIVAVITAFEEVSQPFNLYTDSKYVTGLFPEIETATLSPRTKIYTELKHLQRLIHKRQEKFYIGHIRGHTGLPGPLAQGNAYADSLTRILTAGKRTADGSEFEKRTADGSEFESPKKKAKVE

SEQ ID NO: 3224 - protein, 2022 aa, synthetic construct
MPAAKRVKLDGGDKKYSIGLDIGTNSVGWAVITDEYKVPSKKFKVLGNTDRHSIKKNLIGALLFDSGETAEATRLKRTARRRYTRRKNRICYLQEIFSNEMAKVDDSFFHRLEESFLVEEDKKHERHPIFGNIVDEVAYHEKYPTIYHLRKKLVDSTDKADLRLIYLALAHMIKFRGHFLIEGDLNPDNSDVDKLFIQLVQTYNQLFEENPINASGVDAKAILSARLSKSRRLENLIAQLPGEKKNGLFGNLIALSLGLTPNFKSNFDLAEDAKLQLSKDTYDDDLDNLLAQIGDQYADLFLAAKNLSDAILLSDILRVNTEITKAPLSASMIKRYDEHHQDLTLLKALVRQQLPEKYKEIFFDQSKNGYAGYIDGGASQEEFYKFIKPILEKMDGTEELLVKLNREDLLRKQRTFDNGSIPHQIHLGELHAILRRQEDFYPFLKDNREKIEKILTFRIPYYVGPLARGNSRFAWMTRKSEETITPWNFEEVVDKGASAQSFIERMTNFDKNLPNEKVLPKHSLLYEYFTVYNELTKVKYVTEGMRKPAFLSGEQKKAIVDLLFKTNRKVTVKQLKEDYFKKIECFDSVEISGVEDRFNASLGTYHDLLKIIKDKDFLDNEENEDILEDIVLTLTLFEDREMIEERLKTYAHLFDDKVMKQLKRRRYTGWGRLSRKLINGIRDKQSGKTILDFLKSDGFANRNFMQLIHDDSLTFKEDIQKAQVSGQGDSLHEHIANLAGSPAIKKGILQTVKVVDELVKVMGRHKPENIVIEMARENQTTQKGQKNSRERMKRIEEGIKELGSQILKEHPVENTQLQNEKLYLYYLQNGRDMYVDQELDINRLSDYDVDHIVPQSFLKDDSIDNKVLTRSDKARGKSDNVPSEEVVKKMKNYWRQLLNAKLITQRKFDNLTKAERGGLSELDKAGFIKRQLVETRQITKHVAQILDSRMNTKYDENDKLIREVKVITLKSKLVSDFRKDFQFYKVREINNYHHAHDAYLNAVVGTALIKKYPKLESEFVYGDYKVYDVRKMIAKSEQEIGKATAKYFFYSNIMNFFKTEITLANGEIRKRPLIETNGETGEIVWDKGRDFATVRKVLSMPQVNIVKKTEVQTGGFSKESILPKRNSDKLIARKKDWDPKKYGGFDSPTVAYSVLVVAKVEKGKSKKLKSVKELLGITIMERSSFEKNPIDFLEAKGYKEVKKDLIIKLPKYSLFELENGRKRMLASAGELQKGNELALPSKYVNFLYLASHYEKLKGSPEDNEQKQLFVEQHKHYLDEIIEQISEFSKRVILADANLDKVLSAYNKHRDKPIREQAENIIHLFTLTNLGAPAAFKYFDTTIDRKRYTSTKEVLDATLIHQSITGLYETRIDLSQLGGDGGGGSPAPGGGGGGRDIMKDIKVRLMTDSPDDSQDLMIGAIESNLFADQISWKSDQPVWLNQWPLKQEKLQALQQLVTEQLQLGHLEESNSPWNTPVFVIKKKSGKWRLLQDLRAVNATMHDMGALQPGLPSPVAVPKGWEIIIIDLQDCFFNIKLHPEDCKRFAFSVPSPNFKRPYQRFQWKVLPQGMKNSPTLCQKFVDKAILTVRDKYQDSYIVHYMDDILLAHPSRSIVDEILTSMIQALNKHGLVVSTEKIQKYDNLKYLGTHIQGDSVSYQKLQIRTDKLRTLNDFQKLLGNINWIRPFLKLTTGELKPLFEILNGDSNPISTRKLTPEACKALQLMNERLSTARVKRLDLSQPWSLCILKTEYTPTACLWQDGVVEWIHLPHISPKVITPYDIFCTQLIIKGRHRSKELFSKDPDYIVVPYTKVQFDLLLQEKEDWPISLLGFLGEVHFHLPKDPLLTFTLQTAIIFPHMTSTTPLEKGIVIFTDGSANGRSVTYIQGREPIIKENTQNTAQQAEIVAVITAFEEVSQPFNLYTDSKYVTGLFPEIETATLSPRTKIYTELKHLQRLIHKRQEKFYIGHIRGHTGLPGPLAQGNAYADSLTRILTAGKRTADGSEFEKRTADGSEFESPKKKAKVE

SEQ ID NO: 3225 - protein, 2019 aa, synthetic construct
MPAAKRVKLDGGDKKYSIGLDIGTNSVGWAVITDEYKVPSKKFKVLGNTDRHSIKKNLIGALLFDSGETAEATRLKRTARRRYTRRKNRICYLQEIFSNEMAKVDDSFFHRLEESFLVEEDKKHERHPIFGNIVDEVAYHEKYPTIYHLRKKLVDSTDKADLRLIYLALAHMIKFRGHFLIEGDLNPDNSDVDKLFIQLVQTYNQLFEENPINASGVDAKAILSARLSKSRRLENLIAQLPGEKKNGLFGNLIALSLGLTPNFKSNFDLAEDAKLQLSKDTYDDDLDNLLAQIGDQYADLFLAAKNLSDAILLSDILRVNTEITKAPLSASMIKRYDEHHQDLTLLKALVRQQLPEKYKEIFFDQSKNGYAGYIDGGASQEEFYKFIKPILEKMDGTEELLVKLNREDLLRKQRTFDNGSIPHQIHLGELHAILRRQEDFYPFLKDNREKIEKILTFRIPYYVGPLARGNSRFAWMTRKSEETITPWNFEEVVDKGASAQSFIERMTNFDKNLPNEKVLPKHSLLYEYFTVYNELTKVKYVTEGMRKPAFLSGEQKKAIVDLLFKTNRKVTVKQLKEDYFKKIECFDSVEISGVEDRFNASLGTYHDLLKIIKDKDFLDNEENEDILEDIVLTLTLFEDREMIEERLKTYAHLFDDKVMKQLKRRRYTGWGRLSRKLINGIRDKQSGKTILDFLKSDGFANRNFMQLIHDDSLTFKEDIQKAQVSGQGDSLHEHIANLAGSPAIKKGILQTVKVVDELVKVMGRHKPENIVIEMARENQTTQKGQKNSRERMKRIEEGIKELGSQILKEHPVENTQLQNEKLYLYYLQNGRDMYVDQELDINRLSDYDVDHIVPQSFLKDDSIDNKVLTRSDKARGKSDNVPSEEVVKKMKNYWRQLLNAKLITQRKFDNLTKAERGGLSELDKAGFIKRQLVETRQITKHVAQILDSRMNTKYDENDKLIREVKVITLKSKLVSDFRKDFQFYKVREINNYHHAHDAYLNAVVGTALIKKYPKLESEFVYGDYKVYDVRKMIAKSEQEIGKATAKYFFYSNIMNFFKTEITLANGEIRKRPLIETNGETGEIVWDKGRDFATVRKVLSMPQVNIVKKTEVQTGGFSKESILPKRNSDKLIARKKDWDPKKYGGFDSPTVAYSVLVVAKVEKGKSKKLKSVKELLGITIMERSSFEKNPIDFLEAKGYKEVKKDLIIKLPKYSLFELENGRKRMLASAGELQKGNELALPSKYVNFLYLASHYEKLKGSPEDNEQKQLFVEQHKHYLDEIIEQISEFSKRVILADANLDKVLSAYNKHRDKPIREQAENIIHLFTLTNLGAPAAFKYFDTTIDRKRYTSTKEVLDATLIHQSITGLYETRIDLSQLGGDGGGGGGGSGGGRDIMKDIKVRLMTDSPDDSQDLMIGAIESNLFADQISWKSDQPVWLNQWPLKQEKLQALQQLVTEQLQLGHLEESNSPWNTPVFVIKKKSGKWRLLQDLRAVNATMHDMGALQPGLPSPVAVPKGWEIIIIDLQDCFFNIKLHPEDCKRFAFSVPSPNFKRPYQRFQWKVLPQGMKNSPTLCQKFVDKAILTVRDKYQDSYIVHYMDDILLAHPSRSIVDEILTSMIQALNKHGLVVSTEKIQKYDNLKYLGTHIQGDSVSYQKLQIRTDKLRTLNDFQKLLGNINWIRPFLKLTTGELKPLFEILNGDSNPISTRKLTPEACKALQLMNERLSTARVKRLDLSQPWSLCILKTEYTPTACLWQDGVVEWIHLPHISPKVITPYDIFCTQLIIKGRHRSKELFSKDPDYIVVPYTKVQFDLLLQEKEDWPISLLGFLGEVHFHLPKDPLLTFTLQTAIIFPHMTSTTPLEKGIVIFTDGSANGRSVTYIQGREPIIKENTQNTAQQAEIVAVITAFEEVSQPFNLYTDSKYVTGLFPEIETATLSPRTKIYTELKHLQRLIHKRQEKFYIGHIRGHTGLPGPLAQGNAYADSLTRILTAGKRTADGSEFEKRTADGSEFESPKKKAKVE

SEQ ID NO: 3226 - protein, 2024 aa, synthetic construct
MPAAKRVKLDGGDKKYSIGLDIGTNSVGWAVITDEYKVPSKKFKVLGNTDRHSIKKNLIGALLFDSGETAEATRLKRTARRRYTRRKNRICYLQEIFSNEMAKVDDSFFHRLEESFLVEEDKKHERHPIFGNIVDEVAYHEKYPTIYHLRKKLVDSTDKADLRLIYLALAHMIKFRGHFLIEGDLNPDNSDVDKLFIQLVQTYNQLFEENPINASGVDAKAILSARLSKSRRLENLIAQLPGEKKNGLFGNLIALSLGLTPNFKSNFDLAEDAKLQLSKDTYDDDLDNLLAQIGDQYADLFLAAKNLSDAILLSDILRVNTEITKAPLSASMIKRYDEHHQDLTLLKALVRQQLPEKYKEIFFDQSKNGYAGYIDGGASQEEFYKFIKPILEKMDGTEELLVKLNREDLLRKQRTFDNGSIPHQIHLGELHAILRRQEDFYPFLKDNREKIEKILTFRIPYYVGPLARGNSRFAWMTRKSEETITPWNFEEVVDKGASAQSFIERMTNFDKNLPNEKVLPKHSLLYEYFTVYNELTKVKYVTEGMRKPAFLSGEQKKAIVDLLFKTNRKVTVKQLKEDYFKKIECFDSVEISGVEDRFNASLGTYHDLLKIIKDKDFLDNEENEDILEDIVLTLTLFEDREMIEERLKTYAHLFDDKVMKQLKRRRYTGWGRLSRKLINGIRDKQSGKTILDFLKSDGFANRNFMQLIHDDSLTFKEDIQKAQVSGQGDSLHEHIANLAGSPAIKKGILQTVKVVDELVKVMGRHKPENIVIEMARENQTTQKGQKNSRERMKRIEEGIKELGSQILKEHPVENTQLQNEKLYLYYLQNGRDMYVDQELDINRLSDYDVDHIVPQSFLKDDSIDNKVLTRSDKARGKSDNVPSEEVVKKMKNYWRQLLNAKLITQRKFDNLTKAERGGLSELDKAGFIKRQLVETRQITKHVAQILDSRMNTKYDENDKLIREVKVITLKSKLVSDFRKDFQFYKVREINNYHHAHDAYLNAVVGTALIKKYPKLESEFVYGDYKVYDVRKMIAKSEQEIGKATAKYFFYSNIMNFFKTEITLANGEIRKRPLIETNGETGEIVWDKGRDFATVRKVLSMPQVNIVKKTEVQTGGFSKESILPKRNSDKLIARKKDWDPKKYGGFDSPTVAYSVLVVAKVEKGKSKKLKSVKELLGITIMERSSFEKNPIDFLEAKGYKEVKKDLIIKLPKYSLFELENGRKRMLASAGELQKGNELALPSKYVNFLYLASHYEKLKGSPEDNEQKQLFVEQHKHYLDEIIEQISEFSKRVILADANLDKVLSAYNKHRDKPIREQAENIIHLFTLTNLGAPAAFKYFDTTIDRKRYTSTKEVLDATLIHQSITGLYETRIDLSQLGGDGGEAAAKGGGGGSGGGRDIMKDIKVRLMTDSPDDSQDLMIGAIESNLFADQISWKSDQPVWLNQWPLKQEKLQALQQLVTEQLQLGHLEESNSPWNTPVFVIKKKSGKWRLLQDLRAVNATMHDMGALQPGLPSPVAVPKGWEIIIIDLQDCFFNIKLHPEDCKRFAFSVPSPNFKRPYQRFQWKVLPQGMKNSPTLCQKFVDKAILTVRDKYQDSYIVHYMDDILLAHPSRSIVDEILTSMIQALNKHGLVVSTEKIQKYDNLKYLGTHIQGDSVSYQKLQIRTDKLRTLNDFQKLLGNINWIRPFLKLTTGELKPLFEILNGDSNPISTRKLTPEACKALQLMNERLSTARVKRLDLSQPWSLCILKTEYTPTACLWQDGVVEWIHLPHISPKVITPYDIFCTQLIIKGRHRSKELFSKDPDYIVVPYTKVQFDLLLQEKEDWPISLLGFLGEVHFHLPKDPLLTFTLQTAIIFPHMTSTTPLEKGIVIFTDGSANGRSVTYIQGREPIIKENTQNTAQQAEIVAVITAFEEVSQPFNLYTDSKYVTGLFPEIETATLSPRTKIYTELKHLQRLIHKRQEKFYIGHIRGHTGLPGPLAQGNAYADSLTRILTAGKRTADGSEFEKRTADGSEFESPKKKAKVE

SEQ ID NO: 3227 - protein, 2019 aa, synthetic construct
MPAAKRVKLDGGDKKYSIGLDIGTNSVGWAVITDEYKVPSKKFKVLGNTDRHSIKKNLIGALLFDSGETAEATRLKRTARRRYTRRKNRICYLQEIFSNEMAKVDDSFFHRLEESFLVEEDKKHERHPIFGNIVDEVAYHEKYPTIYHLRKKLVDSTDKADLRLIYLALAHMIKFRGHFLIEGDLNPDNSDVDKLFIQLVQTYNQLFEENPINASGVDAKAILSARLSKSRRLENLIAQLPGEKKNGLFGNLIALSLGLTPNFKSNFDLAEDAKLQLSKDTYDDDLDNLLAQIGDQYADLFLAAKNLSDAILLSDILRVNTEITKAPLSASMIKRYDEHHQDLTLLKALVRQQLPEKYKEIFFDQSKNGYAGYIDGGASQEEFYKFIKPILEKMDGTEELLVKLNREDLLRKQRTFDNGSIPHQIHLGELHAILRRQEDFYPFLKDNREKIEKILTFRIPYYVGPLARGNSRFAWMTRKSEETITPWNFEEVVDKGASAQSFIERMTNFDKNLPNEKVLPKHSLLYEYFTVYNELTKVKYVTEGMRKPAFLSGEQKKAIVDLLFKTNRKVTVKQLKEDYFKKIECFDSVEISGVEDRFNASLGTYHDLLKIIKDKDFLDNEENEDILEDIVLTLTLFEDREMIEERLKTYAHLFDDKVMKQLKRRRYTGWGRLSRKLINGIRDKQSGKTILDFLKSDGFANRNFMQLIHDDSLTFKEDIQKAQVSGQGDSLHEHIANLAGSPAIKKGILQTVKVVDELVKVMGRHKPENIVIEMARENQTTQKGQKNSRERMKRIEEGIKELGSQILKEHPVENTQLQNEKLYLYYLQNGRDMYVDQELDINRLSDYDVDHIVPQSFLKDDSIDNKVLTRSDKARGKSDNVPSEEVVKKMKNYWRQLLNAKLITQRKFDNLTKAERGGLSELDKAGFIKRQLVETRQITKHVAQILDSRMNTKYDENDKLIREVKVITLKSKLVSDFRKDFQFYKVREINNYHHAHDAYLNAVVGTALIKKYPKLESEFVYGDYKVYDVRKMIAKSEQEIGKATAKYFFYSNIMNFFKTEITLANGEIRKRPLIETNGETGEIVWDKGRDFATVRKVLSMPQVNIVKKTEVQTGGFSKESILPKRNSDKLIARKKDWDPKKYGGFDSPTVAYSVLVVAKVEKGKSKKLKSVKELLGITIMERSSFEKNPIDFLEAKGYKEVKKDLIIKLPKYSLFELENGRKRMLASAGELQKGNELALPSKYVNFLYLASHYEKLKGSPEDNEQKQLFVEQHKHYLDEIIEQISEFSKRVILADANLDKVLSAYNKHRDKPIREQAENIIHLFTLTNLGAPAAFKYFDTTIDRKRYTSTKEVLDATLIHQSITGLYETRIDLSQLGGDGGGGSPAPGGGRDIMKDIKVRLMTDSPDDSQDLMIGAIESNLFADQISWKSDQPVWLNQWPLKQEKLQALQQLVTEQLQLGHLEESNSPWNTPVFVIKKKSGKWRLLQDLRAVNATMHDMGALQPGLPSPVAVPKGWEIIIIDLQDCFFNIKLHPEDCKRFAFSVPSPNFKRPYQRFQWKVLPQGMKNSPTLCQKFVDKAILTVRDKYQDSYIVHYMDDILLAHPSRSIVDEILTSMIQALNKHGLVVSTEKIQKYDNLKYLGTHIQGDSVSYQKLQIRTDKLRTLNDFQKLLGNINWIRPFLKLTTGELKPLFEILNGDSNPISTRKLTPEACKALQLMNERLSTARVKRLDLSQPWSLCILKTEYTPTACLWQDGVVEWIHLPHISPKVITPYDIFCTQLIIKGRHRSKELFSKDPDYIVVPYTKVQFDLLLQEKEDWPISLLGFLGEVHFHLPKDPLLTFTLQTAIIFPHMTSTTPLEKGIVIFTDGSANGRSVTYIQGREPIIKENTQNTAQQAEIVAVITAFEEVSQPFNLYTDSKYVTGLFPEIETATLSPRTKIYTELKHLQRLIHKRQEKFYIGHIRGHTGLPGPLAQGNAYADSLTRILTAGKRTADGSEFEKRTADGSEFESPKKKAKVE

SEQ ID NO: 3228 - protein, 2024 aa, synthetic construct
MPAAKRVKLDGGDKKYSIGLDIGTNSVGWAVITDEYKVPSKKFKVLGNTDRHSIKKNLIGALLFDSGETAEATRLKRTARRRYTRRKNRICYLQEIFSNEMAKVDDSFFHRLEESFLVEEDKKHERHPIFGNIVDEVAYHEKYPTIYHLRKKLVDSTDKADLRLIYLALAHMIKFRGHFLIEGDLNPDNSDVDKLFIQLVQTYNQLFEENPINASGVDAKAILSARLSKSRRLENLIAQLPGEKKNGLFGNLIALSLGLTPNFKSNFDLAEDAKLQLSKDTYDDDLDNLLAQIGDQYADLFLAAKNLSDAILLSDILRVNTEITKAPLSASMIKRYDEHHQDLTLLKALVRQQLPEKYKEIFFDQSKNGYAGYIDGGASQEEFYKFIKPILEKMDGTEELLVKLNREDLLRKQRTFDNGSIPHQIHLGELHAILRRQEDFYPFLKDNREKIEKILTFRIPYYVGPLARGNSRFAWMTRKSEETITPWNFEEVVDKGASAQSFIERMTNFDKNLPNEKVLPKHSLLYEYFTVYNELTKVKYVTEGMRKPAFLSGEQKKAIVDLLFKTNRKVTVKQLKEDYFKKIECFDSVEISGVEDRFNASLGTYHDLLKIIKDKDFLDNEENEDILEDIVLTLTLFEDREMIEERLKTYAHLFDDKVMKQLKRRRYTGWGRLSRKLINGIRDKQSGKTILDFLKSDGFANRNFMQLIHDDSLTFKEDIQKAQVSGQGDSLHEHIANLAGSPAIKKGILQTVKVVDELVKVMGRHKPENIVIEMARENQTTQKGQKNSRERMKRIEEGIKELGSQILKEHPVENTQLQNEKLYLYYLQNGRDMYVDQELDINRLSDYDVDHIVPQSFLKDDSIDNKVLTRSDKARGKSDNVPSEEVVKKMKNYWRQLLNAKLITQRKFDNLTKAERGGLSELDKAGFIKRQLVETRQITKHVAQILDSRMNTKYDENDKLIREVKVITLKSKLVSDFRKDFQFYKVREINNYHHAHDAYLNAVVGTALIKKYPKLESEFVYGDYKVYDVRKMIAKSEQEIGKATAKYFFYSNIMNFFKTEITLANGEIRKRPLIETNGETGEIVWDKGRDFATVRKVLSMPQVNIVKKTEVQTGGFSKESILPKRNSDKLIARKKDWDPKKYGGFDSPTVAYSVLVVAKVEKGKSKKLKSVKELLGITIMERSSFEKNPIDFLEAKGYKEVKKDLIIKLPKYSLFELENGRKRMLASAGELQKGNELALPSKYVNFLYLASHYEKLKGSPEDNEQKQLFVEQHKHYLDEIIEQISEFSKRVILADANLDKVLSAYNKHRDKPIREQAENIIHLFTLTNLGAPAAFKYFDTTIDRKRYTSTKEVLDATLIHQSITGLYETRIDLSQLGGDGGEAAAKGGSGGGGGGRDIMKDIKVRLMTDSPDDSQDLMIGAIESNLFADQISWKSDQPVWLNQWPLKQEKLQALQQLVTEQLQLGHLEESNSPWNTPVFVIKKKSGKWRLLQDLRAVNATMHDMGALQPGLPSPVAVPKGWEIIIIDLQDCFFNIKLHPEDCKRFAFSVPSPNFKRPYQRFQWKVLPQGMKNSPTLCQKFVDKAILTVRDKYQDSYIVHYMDDILLAHPSRSIVDEILTSMIQALNKHGLVVSTEKIQKYDNLKYLGTHIQGDSVSYQKLQIRTDKLRTLNDFQKLLGNINWIRPFLKLTTGELKPLFEILNGDSNPISTRKLTPEACKALQLMNERLSTARVKRLDLSQPWSLCILKTEYTPTACLWQDGVVEWIHLPHISPKVITPYDIFCTQLIIKGRHRSKELFSKDPDYIVVPYTKVQFDLLLQEKEDWPISLLGFLGEVHFHLPKDPLLTFTLQTAIIFPHMTSTTPLEKGIVIFTDGSANGRSVTYIQGREPIIKENTQNTAQQAEIVAVITAFEEVSQPFNLYTDSKYVTGLFPEIETATLSPRTKIYTELKHLQRLIHKRQEKFYIGHIRGHTGLPGPLAQGNAYADSLTRILTAGKRTADGSEFEKRTADGSEFESPKKKAKVE

SEQ ID NO: 3229 - protein, 2022 aa, synthetic construct
MPAAKRVKLDGGDKKYSIGLDIGTNSVGWAVITDEYKVPSKKFKVLGNTDRHSIKKNLIGALLFDSGETAEATRLKRTARRRYTRRKNRICYLQEIFSNEMAKVDDSFFHRLEESFLVEEDKKHERHPIFGNIVDEVAYHEKYPTIYHLRKKLVDSTDKADLRLIYLALAHMIKFRGHFLIEGDLNPDNSDVDKLFIQLVQTYNQLFEENPINASGVDAKAILSARLSKSRRLENLIAQLPGEKKNGLFGNLIALSLGLTPNFKSNFDLAEDAKLQLSKDTYDDDLDNLLAQIGDQYADLFLAAKNLSDAILLSDILRVNTEITKAPLSASMIKRYDEHHQDLTLLKALVRQQLPEKYKEIFFDQSKNGYAGYIDGGASQEEFYKFIKPILEKMDGTEELLVKLNREDLLRKQRTFDNGSIPHQIHLGELHAILRRQEDFYPFLKDNREKIEKILTFRIPYYVGPLARGNSRFAWMTRKSEETITPWNFEEVVDKGASAQSFIERMTNFDKNLPNEKVLPKHSLLYEYFTVYNELTKVKYVTEGMRKPAFLSGEQKKAIVDLLFKTNRKVTVKQLKEDYFKKIECFDSVEISGVEDRFNASLGTYHDLLKIIKDKDFLDNEENEDILEDIVLTLTLFEDREMIEERLKTYAHLFDDKVMKQLKRRRYTGWGRLSRKLINGIRDKQSGKTILDFLKSDGFANRNFMQLIHDDSLTFKEDIQKAQVSGQGDSLHEHIANLAGSPAIKKGILQTVKVVDELVKVMGRHKPENIVIEMARENQTTQKGQKNSRERMKRIEEGIKELGSQILKEHPVENTQLQNEKLYLYYLQNGRDMYVDQELDINRLSDYDVDHIVPQSFLKDDSIDNKVLTRSDKARGKSDNVPSEEVVKKMKNYWRQLLNAKLITQRKFDNLTKAERGGLSELDKAGFIKRQLVETRQITKHVAQILDSRMNTKYDENDKLIREVKVITLKSKLVSDFRKDFQFYKVREINNYHHAHDAYLNAVVGTALIKKYPKLESEFVYGDYKVYDVRKMIAKSEQEIGKATAKYFFYSNIMNFFKTEITLANGEIRKRPLIETNGETGEIVWDKGRDFATVRKVLSMPQVNIVKKTEVQTGGFSKESILPKRNSDKLIARKKDWDPKKYGGFDSPTVAYSVLVVAKVEKGKSKKLKSVKELLGITIMERSSFEKNPIDFLEAKGYKEVKKDLIIKLPKYSLFELENGRKRMLASAGELQKGNELALPSKYVNFLYLASHYEKLKGSPEDNEQKQLFVEQHKHYLDEIIEQISEFSKRVILADANLDKVLSAYNKHRDKPIREQAENIIHLFTLTNLGAPAAFKYFDTTIDRKRYTSTKEVLDATLIHQSITGLYETRIDLSQLGGDGGGGSPAPGSSGGGRDIMKDIKVRLMTDSPDDSQDLMIGAIESNLFADQISWKSDQPVWLNQWPLKQEKLQALQQLVTEQLQLGHLEESNSPWNTPVFVIKKKSGKWRLLQDLRAVNATMHDMGALQPGLPSPVAVPKGWEIIIIDLQDCFFNIKLHPEDCKRFAFSVPSPNFKRPYQRFQWKVLPQGMKNSPTLCQKFVDKAILTVRDKYQDSYIVHYMDDILLAHPSRSIVDEILTSMIQALNKHGLVVSTEKIQKYDNLKYLGTHIQGDSVSYQKLQIRTDKLRTLNDFQKLLGNINWIRPFLKLTTGELKPLFEILNGDSNPISTRKLTPEACKALQLMNERLSTARVKRLDLSQPWSLCILKTEYTPTACLWQDGVVEWIHLPHISPKVITPYDIFCTQLIIKGRHRSKELFSKDPDYIVVPYTKVQFDLLLQEKEDWPISLLGFLGEVHFHLPKDPLLTFTLQTAIIFPHMTSTTPLEKGIVIFTDGSANGRSVTYIQGREPIIKENTQNTAQQAEIVAVITAFEEVSQPFNLYTDSKYVTGLFPEIETATLSPRTKIYTELKHLQRLIHKRQEKFYIGHIRGHTGLPGPLAQGNAYADSLTRILTAGKRTADGSEFEKRTADGSEFESPKKKAKVE

SEQ ID NO: 3230 - protein, 2024 aa, synthetic construct
MPAAKRVKLDGGDKKYSIGLDIGTNSVGWAVITDEYKVPSKKFKVLGNTDRHSIKKNLIGALLFDSGETAEATRLKRTARRRYTRRKNRICYLQEIFSNEMAKVDDSFFHRLEESFLVEEDKKHERHPIFGNIVDEVAYHEKYPTIYHLRKKLVDSTDKADLRLIYLALAHMIKFRGHFLIEGDLNPDNSDVDKLFIQLVQTYNQLFEENPINASGVDAKAILSARLSKSRRLENLIAQLPGEKKNGLFGNLIALSLGLTPNFKSNFDLAEDAKLQLSKDTYDDDLDNLLAQIGDQYADLFLAAKNLSDAILLSDILRVNTEITKAPLSASMIKRYDEHHQDLTLLKALVRQQLPEKYKEIFFDQSKNGYAGYIDGGASQEEFYKFIKPILEKMDGTEELLVKLNREDLLRKQRTFDNGSIPHQIHLGELHAILRRQEDFYPFLKDNREKIEKILTFRIPYYVGPLARGNSRFAWMTRKSEETITPWNFEEVVDKGASAQSFIERMTNFDKNLPNEKVLPKHSLLYEYFTVYNELTKVKYVTEGMRKPAFLSGEQKKAIVDLLFKTNRKVTVKQLKEDYFKKIECFDSVEISGVEDRFNASLGTYHDLLKIIKDKDFLDNEENEDILEDIVLTLTLFEDREMIEERLKTYAHLFDDKVMKQLKRRRYTGWGRLSRKLINGIRDKQSGKTILDFLKSDGFANRNFMQLIHDDSLTFKEDIQKAQVSGQGDSLHEHIANLAGSPAIKKGILQTVKVVDELVKVMGRHKPENIVIEMARENQTTQKGQKNSRERMKRIEEGIKELGSQILKEHPVENTQLQNEKLYLYYLQNGRDMYVDQELDINRLSDYDVDHIVPQSFLKDDSIDNKVLTRSDKARGKSDNVPSEEVVKKMKNYWRQLLNAKLITQRKFDNLTKAERGGLSELDKAGFIKRQLVETRQITKHVAQILDSRMNTKYDENDKLIREVKVITLKSKLVSDFRKDFQFYKVREINNYHHAHDAYLNAVVGTALIKKYPKLESEFVYGDYKVYDVRKMIAKSEQEIGKATAKYFFYSNIMNFFKTEITLANGEIRKRPLIETNGETGEIVWDKGRDFATVRKVLSMPQVNIVKKTEVQTGGFSKESILPKRNSDKLIARKKDWDPKKYGGFDSPTVAYSVLVVAKVEKGKSKKLKSVKELLGITIMERSSFEKNPIDFLEAKGYKEVKKDLIIKLPKYSLFELENGRKRMLASAGELQKGNELALPSKYVNFLYLASHYEKLKGSPEDNEQKQLFVEQHKHYLDEIIEQISEFSKRVILADANLDKVLSAYNKHRDKPIREQAENIIHLFTLTNLGAPAAFKYFDTTIDRKRYTSTKEVLDATLIHQSITGLYETRIDLSQLGGDGGEAAAKGGSGSSGGGRDIMKDIKVRLMTDSPDDSQDLMIGAIESNLFADQISWKSDQPVWLNQWPLKQEKLQALQQLVTEQLQLGHLEESNSPWNTPVFVIKKKSGKWRLLQDLRAVNATMHDMGALQPGLPSPVAVPKGWEIIIIDLQDCFFNIKLHPEDCKRFAFSVPSPNFKRPYQRFQWKVLPQGMKNSPTLCQKFVDKAILTVRDKYQDSYIVHYMDDILLAHPSRSIVDEILTSMIQALNKHGLVVSTEKIQKYDNLKYLGTHIQGDSVSYQKLQIRTDKLRTLNDFQKLLGNINWIRPFLKLTTGELKPLFEILNGDSNPISTRKLTPEACKALQLMNERLSTARVKRLDLSQPWSLCILKTEYTPTACLWQDGVVEWIHLPHISPKVITPYDIFCTQLIIKGRHRSKELFSKDPDYIVVPYTKVQFDLLLQEKEDWPISLLGFLGEVHFHLPKDPLLTFTLQTAIIFPHMTSTTPLEKGIVIFTDGSANGRSVTYIQGREPIIKENTQNTAQQAEIVAVITAFEEVSQPFNLYTDSKYVTGLFPEIETATLSPRTKIYTELKHLQRLIHKRQEKFYIGHIRGHTGLPGPLAQGNAYADSLTRILTAGKRTADGSEFEKRTADGSEFESPKKKAKVE

SEQ ID NO: 3231 - protein, 2022 aa, synthetic construct
MPAAKRVKLDGGDKKYSIGLDIGTNSVGWAVITDEYKVPSKKFKVLGNTDRHSIKKNLIGALLFDSGETAEATRLKRTARRRYTRRKNRICYLQEIFSNEMAKVDDSFFHRLEESFLVEEDKKHERHPIFGNIVDEVAYHEKYPTIYHLRKKLVDSTDKADLRLIYLALAHMIKFRGHFLIEGDLNPDNSDVDKLFIQLVQTYNQLFEENPINASGVDAKAILSARLSKSRRLENLIAQLPGEKKNGLFGNLIALSLGLTPNFKSNFDLAEDAKLQLSKDTYDDDLDNLLAQIGDQYADLFLAAKNLSDAILLSDILRVNTEITKAPLSASMIKRYDEHHQDLTLLKALVRQQLPEKYKEIFFDQSKNGYAGYIDGGASQEEFYKFIKPILEKMDGTEELLVKLNREDLLRKQRTFDNGSIPHQIHLGELHAILRRQEDFYPFLKDNREKIEKILTFRIPYYVGPLARGNSRFAWMTRKSEETITPWNFEEVVDKGASAQSFIERMTNFDKNLPNEKVLPKHSLLYEYFTVYNELTKVKYVTEGMRKPAFLSGEQKKAIVDLLFKTNRKVTVKQLKEDYFKKIECFDSVEISGVEDRFNASLGTYHDLLKIIKDKDFLDNEENEDILEDIVLTLTLFEDREMIEERLKTYAHLFDDKVMKQLKRRRYTGWGRLSRKLINGIRDKQSGKTILDFLKSDGFANRNFMQLIHDDSLTFKEDIQKAQVSGQGDSLHEHIANLAGSPAIKKGILQTVKVVDELVKVMGRHKPENIVIEMARENQTTQKGQKNSRERMKRIEEGIKELGSQILKEHPVENTQLQNEKLYLYYLQNGRDMYVDQELDINRLSDYDVDHIVPQSFLKDDSIDNKVLTRSDKARGKSDNVPSEEVVKKMKNYWRQLLNAKLITQRKFDNLTKAERGGLSELDKAGFIKRQLVETRQITKHVAQILDSRMNTKYDENDKLIREVKVITLKSKLVSDFRKDFQFYKVREINNYHHAHDAYLNAVVGTALIKKYPKLESEFVYGDYKVYDVRKMIAKSEQEIGKATAKYFFYSNIMNFFKTEITLANGEIRKRPLIETNGETGEIVWDKGRDFATVRKVLSMPQVNIVKKTEVQTGGFSKESILPKRNSDKLIARKKDWDPKKYGGFDSPTVAYSVLVVAKVEKGKSKKLKSVKELLGITIMERSSFEKNPIDFLEAKGYKEVKKDLIIKLPKYSLFELENGRKRMLASAGELQKGNELALPSKYVNFLYLASHYEKLKGSPEDNEQKQLFVEQHKHYLDEIIEQISEFSKRVILADANLDKVLSAYNKHRDKPIREQAENIIHLFTLTNLGAPAAFKYFDTTIDRKRYTSTKEVLDATLIHQSITGLYETRIDLSQLGGDGGGGGGSSPAPGGGRDIMKDIKVRLMTDSPDDSQDLMIGAIESNLFADQISWKSDQPVWLNQWPLKQEKLQALQQLVTEQLQLGHLEESNSPWNTPVFVIKKKSGKWRLLQDLRAVNATMHDMGALQPGLPSPVAVPKGWEIIIIDLQDCFFNIKLHPEDCKRFAFSVPSPNFKRPYQRFQWKVLPQGMKNSPTLCQKFVDKAILTVRDKYQDSYIVHYMDDILLAHPSRSIVDEILTSMIQALNKHGLVVSTEKIQKYDNLKYLGTHIQGDSVSYQKLQIRTDKLRTLNDFQKLLGNINWIRPFLKLTTGELKPLFEILNGDSNPISTRKLTPEACKALQLMNERLSTARVKRLDLSQPWSLCILKTEYTPTACLWQDGVVEWIHLPHISPKVITPYDIFCTQLIIKGRHRSKELFSKDPDYIVVPYTKVQFDLLLQEKEDWPISLLGFLGEVHFHLPKDPLLTFTLQTAIIFPHMTSTTPLEKGIVIFTDGSANGRSVTYIQGREPIIKENTQNTAQQAEIVAVITAFEEVSQPFNLYTDSKYVTGLFPEIETATLSPRTKIYTELKHLQRLIHKRQEKFYIGHIRGHTGLPGPLAQGNAYADSLTRILTAGKRTADGSEFEKRTADGSEFESPKKKAKVE

SEQ ID NO: 3232 - protein, 2024 aa, synthetic construct
MPAAKRVKLDGGDKKYSIGLDIGTNSVGWAVITDEYKVPSKKFKVLGNTDRHSIKKNLIGALLFDSGETAEATRLKRTARRRYTRRKNRICYLQEIFSNEMAKVDDSFFHRLEESFLVEEDKKHERHPIFGNIVDEVAYHEKYPTIYHLRKKLVDSTDKADLRLIYLALAHMIKFRGHFLIEGDLNPDNSDVDKLFIQLVQTYNQLFEENPINASGVDAKAILSARLSKSRRLENLIAQLPGEKKNGLFGNLIALSLGLTPNFKSNFDLAEDAKLQLSKDTYDDDLDNLLAQIGDQYADLFLAAKNLSDAILLSDILRVNTEITKAPLSASMIKRYDEHHQDLTLLKALVRQQLPEKYKEIFFDQSKNGYAGYIDGGASQEEFYKFIKPILEKMDGTEELLVKLNREDLLRKQRTFDNGSIPHQIHLGELHAILRRQEDFYPFLKDNREKIEKILTFRIPYYVGPLARGNSRFAWMTRKSEETITPWNFEEVVDKGASAQSFIERMTNFDKNLPNEKVLPKHSLLYEYFTVYNELTKVKYVTEGMRKPAFLSGEQKKAIVDLLFKTNRKVTVKQLKEDYFKKIECFDSVEISGVEDRFNASLGTYHDLLKIIKDKDFLDNEENEDILEDIVLTLTLFEDREMIEERLKTYAHLFDDKVMKQLKRRRYTGWGRLSRKLINGIRDKQSGKTILDFLKSDGFANRNFMQLIHDDSLTFKEDIQKAQVSGQGDSLHEHIANLAGSPAIKKGILQTVKVVDELVKVMGRHKPENIVIEMARENQTTQKGQKNSRERMKRIEEGIKELGSQILKEHPVENTQLQNEKLYLYYLQNGRDMYVDQELDINRLSDYDVDHIVPQSFLKDDSIDNKVLTRSDKARGKSDNVPSEEVVKKMKNYWRQLLNAKLITQRKFDNLTKAERGGLSELDKAGFIKRQLVETRQITKHVAQILDSRMNTKYDENDKLIREVKVITLKSKLVSDFRKDFQFYKVREINNYHHAHDAYLNAVVGTALIKKYPKLESEFVYGDYKVYDVRKMIAKSEQEIGKATAKYFFYSNIMNFFKTEITLANGEIRKRPLIETNGETGEIVWDKGRDFATVRKVLSMPQVNIVKKTEVQTGGFSKESILPKRNSDKLIARKKDWDPKKYGGFDSPTVAYSVLVVAKVEKGKSKKLKSVKELLGITIMERSSFEKNPIDFLEAKGYKEVKKDLIIKLPKYSLFELENGRKRMLASAGELQKGNELALPSKYVNFLYLASHYEKLKGSPEDNEQKQLFVEQHKHYLDEIIEQISEFSKRVILADANLDKVLSAYNKHRDKPIREQAENIIHLFTLTNLGAPAAFKYFDTTIDRKRYTSTKEVLDATLIHQSITGLYETRIDLSQLGGDGGGSSPAPEAAAKGGGRDIMKDIKVRLMTDSPDDSQDLMIGAIESNLFADQISWKSDQPVWLNQWPLKQEKLQALQQLVTEQLQLGHLEESNSPWNTPVFVIKKKSGKWRLLQDLRAVNATMHDMGALQPGLPSPVAVPKGWEIIIIDLQDCFFNIKLHPEDCKRFAFSVPSPNFKRPYQRFQWKVLPQGMKNSPTLCQKFVDKAILTVRDKYQDSYIVHYMDDILLAHPSRSIVDEILTSMIQALNKHGLVVSTEKIQKYDNLKYLGTHIQGDSVSYQKLQIRTDKLRTLNDFQKLLGNINWIRPFLKLTTGELKPLFEILNGDSNPISTRKLTPEACKALQLMNERLSTARVKRLDLSQPWSLCILKTEYTPTACLWQDGVVEWIHLPHISPKVITPYDIFCTQLIIKGRHRSKELFSKDPDYIVVPYTKVQFDLLLQEKEDWPISLLGFLGEVHFHLPKDPLLTFTLQTAIIFPHMTSTTPLEKGIVIFTDGSANGRSVTYIQGREPIIKENTQNTAQQAEIVAVITAFEEVSQPFNLYTDSKYVTGLFPEIETATLSPRTKIYTELKHLQRLIHKRQEKFYIGHIRGHTGLPGPLAQGNAYADSLTRILTAGKRTADGSEFEKRTADGSEFESPKKKAKVE

SEQ ID NO: 3233 - protein, 2022 aa, synthetic construct
MPAAKRVKLDGGDKKYSIGLDIGTNSVGWAVITDEYKVPSKKFKVLGNTDRHSIKKNLIGALLFDSGETAEATRLKRTARRRYTRRKNRICYLQEIFSNEMAKVDDSFFHRLEESFLVEEDKKHERHPIFGNIVDEVAYHEKYPTIYHLRKKLVDSTDKADLRLIYLALAHMIKFRGHFLIEGDLNPDNSDVDKLFIQLVQTYNQLFEENPINASGVDAKAILSARLSKSRRLENLIAQLPGEKKNGLFGNLIALSLGLTPNFKSNFDLAEDAKLQLSKDTYDDDLDNLLAQIGDQYADLFLAAKNLSDAILLSDILRVNTEITKAPLSASMIKRYDEHHQDLTLLKALVRQQLPEKYKEIFFDQSKNGYAGYIDGGASQEEFYKFIKPILEKMDGTEELLVKLNREDLLRKQRTFDNGSIPHQIHLGELHAILRRQEDFYPFLKDNREKIEKILTFRIPYYVGPLARGNSRFAWMTRKSEETITPWNFEEVVDKGASAQSFIERMTNFDKNLPNEKVLPKHSLLYEYFTVYNELTKVKYVTEGMRKPAFLSGEQKKAIVDLLFKTNRKVTVKQLKEDYFKKIECFDSVEISGVEDRFNASLGTYHDLLKIIKDKDFLDNEENEDILEDIVLTLTLFEDREMIEERLKTYAHLFDDKVMKQLKRRRYTGWGRLSRKLINGIRDKQSGKTILDFLKSDGFANRNFMQLIHDDSLTFKEDIQKAQVSGQGDSLHEHIANLAGSPAIKKGILQTVKVVDELVKVMGRHKPENIVIEMARENQTTQKGQKNSRERMKRIEEGIKELGSQILKEHPVENTQLQNEKLYLYYLQNGRDMYVDQELDINRLSDYDVDHIVPQSFLKDDSIDNKVLTRSDKARGKSDNVPSEEVVKKMKNYWRQLLNAKLITQRKFDNLTKAERGGLSELDKAGFIKRQLVETRQITKHVAQILDSRMNTKYDENDKLIREVKVITLKSKLVSDFRKDFQFYKVREINNYHHAHDAYLNAVVGTALIKKYPKLESEFVYGDYKVYDVRKMIAKSEQEIGKATAKYFFYSNIMNFFKTEITLANGEIRKRPLIETNGETGEIVWDKGRDFATVRKVLSMPQVNIVKKTEVQTGGFSKESILPKRNSDKLIARKKDWDPKKYGGFDSPTVAYSVLVVAKVEKGKSKKLKSVKELLGITIMERSSFEKNPIDFLEAKGYKEVKKDLIIKLPKYSLFELENGRKRMLASAGELQKGNELALPSKYVNFLYLASHYEKLKGSPEDNEQKQLFVEQHKHYLDEIIEQISEFSKRVILADANLDKVLSAYNKHRDKPIREQAENIIHLFTLTNLGAPAAFKYFDTTIDRKRYTSTKEVLDATLIHQSITGLYETRIDLSQLGGDGGPAPGGGGSSGGGRDIMKDIKVRLMTDSPDDSQDLMIGAIESNLFADQISWKSDQPVWLNQWPLKQEKLQALQQLVTEQLQLGHLEESNSPWNTPVFVIKKKSGKWRLLQDLRAVNATMHDMGALQPGLPSPVAVPKGWEIIIIDLQDCFFNIKLHPEDCKRFAFSVPSPNFKRPYQRFQWKVLPQGMKNSPTLCQKFVDKAILTVRDKYQDSYIVHYMDDILLAHPSRSIVDEILTSMIQALNKHGLVVSTEKIQKYDNLKYLGTHIQGDSVSYQKLQIRTDKLRTLNDFQKLLGNINWIRPFLKLTTGELKPLFEILNGDSNPISTRKLTPEACKALQLMNERLSTARVKRLDLSQPWSLCILKTEYTPTACLWQDGVVEWIHLPHISPKVITPYDIFCTQLIIKGRHRSKELFSKDPDYIVVPYTKVQFDLLLQEKEDWPISLLGFLGEVHFHLPKDPLLTFTLQTAIIFPHMTSTTPLEKGIVIFTDGSANGRSVTYIQGREPIIKENTQNTAQQAEIVAVITAFEEVSQPFNLYTDSKYVTGLFPEIETATLSPRTKIYTELKHLQRLIHKRQEKFYIGHIRGHTGLPGPLAQGNAYADSLTRILTAGKRTADGSEFEKRTADGSEFESPKKKAKVE

SEQ ID NO: 3234 - protein, 2022 aa, synthetic construct
MPAAKRVKLDGGDKKYSIGLDIGTNSVGWAVITDEYKVPSKKFKVLGNTDRHSIKKNLIGALLFDSGETAEATRLKRTARRRYTRRKNRICYLQEIFSNEMAKVDDSFFHRLEESFLVEEDKKHERHPIFGNIVDEVAYHEKYPTIYHLRKKLVDSTDKADLRLIYLALAHMIKFRGHFLIEGDLNPDNSDVDKLFIQLVQTYNQLFEENPINASGVDAKAILSARLSKSRRLENLIAQLPGEKKNGLFGNLIALSLGLTPNFKSNFDLAEDAKLQLSKDTYDDDLDNLLAQIGDQYADLFLAAKNLSDAILLSDILRVNTEITKAPLSASMIKRYDEHHQDLTLLKALVRQQLPEKYKEIFFDQSKNGYAGYIDGGASQEEFYKFIKPILEKMDGTEELLVKLNREDLLRKQRTFDNGSIPHQIHLGELHAILRRQEDFYPFLKDNREKIEKILTFRIPYYVGPLARGNSRFAWMTRKSEETITPWNFEEVVDKGASAQSFIERMTNFDKNLPNEKVLPKHSLLYEYFTVYNELTKVKYVTEGMRKPAFLSGEQKKAIVDLLFKTNRKVTVKQLKEDYFKKIECFDSVEISGVEDRFNASLGTYHDLLKIIKDKDFLDNEENEDILEDIVLTLTLFEDREMIEERLKTYAHLFDDKVMKQLKRRRYTGWGRLSRKLINGIRDKQSGKTILDFLKSDGFANRNFMQLIHDDSLTFKEDIQKAQVSGQGDSLHEHIANLAGSPAIKKGILQTVKVVDELVKVMGRHKPENIVIEMARENQTTQKGQKNSRERMKRIEEGIKELGSQILKEHPVENTQLQNEKLYLYYLQNGRDMYVDQELDINRLSDYDVDHIVPQSFLKDDSIDNKVLTRSDKARGKSDNVPSEEVVKKMKNYWRQLLNAKLITQRKFDNLTKAERGGLSELDKAGFIKRQLVETRQITKHVAQILDSRMNTKYDENDKLIREVKVITLKSKLVSDFRKDFQFYKVREINNYHHAHDAYLNAVVGTALIKKYPKLESEFVYGDYKVYDVRKMIAKSEQEIGKATAKYFFYSNIMNFFKTEITLANGEIRKRPLIETNGETGEIVWDKGRDFATVRKVLSMPQVNIVKKTEVQTGGFSKESILPKRNSDKLIARKKDWDPKKYGGFDSPTVAYSVLVVAKVEKGKSKKLKSVKELLGITIMERSSFEKNPIDFLEAKGYKEVKKDLIIKLPKYSLFELENGRKRMLASAGELQKGNELALPSKYVNFLYLASHYEKLKGSPEDNEQKQLFVEQHKHYLDEIIEQISEFSKRVILADANLDKVLSAYNKHRDKPIREQAENIIHLFTLTNLGAPAAFKYFDTTIDRKRYTSTKEVLDATLIHQSITGLYETRIDLSQLGGDGGPAPGGSGGGGGGRDIMKDIKVRLMTDSPDDSQDLMIGAIESNLFADQISWKSDQPVWLNQWPLKQEKLQALQQLVTEQLQLGHLEESNSPWNTPVFVIKKKSGKWRLLQDLRAVNATMHDMGALQPGLPSPVAVPKGWEIIIIDLQDCFFNIKLHPEDCKRFAFSVPSPNFKRPYQRFQWKVLPQGMKNSPTLCQKFVDKAILTVRDKYQDSYIVHYMDDILLAHPSRSIVDEILTSMIQALNKHGLVVSTEKIQKYDNLKYLGTHIQGDSVSYQKLQIRTDKLRTLNDFQKLLGNINWIRPFLKLTTGELKPLFEILNGDSNPISTRKLTPEACKALQLMNERLSTARVKRLDLSQPWSLCILKTEYTPTACLWQDGVVEWIHLPHISPKVITPYDIFCTQLIIKGRHRSKELFSKDPDYIVVPYTKVQFDLLLQEKEDWPISLLGFLGEVHFHLPKDPLLTFTLQTAIIFPHMTSTTPLEKGIVIFTDGSANGRSVTYIQGREPIIKENTQNTAQQAEIVAVITAFEEVSQPFNLYTDSKYVTGLFPEIETATLSPRTKIYTELKHLQRLIHKRQEKFYIGHIRGHTGLPGPLAQGNAYADSLTRILTAGKRTADGSEFEKRTADGSEFESPKKKAKVE

SEQ ID NO: 3235 - protein, 2024 aa, synthetic construct
MPAAKRVKLDGGDKKYSIGLDIGTNSVGWAVITDEYKVPSKKFKVLGNTDRHSIKKNLIGALLFDSGETAEATRLKRTARRRYTRRKNRICYLQEIFSNEMAKVDDSFFHRLEESFLVEEDKKHERHPIFGNIVDEVAYHEKYPTIYHLRKKLVDSTDKADLRLIYLALAHMIKFRGHFLIEGDLNPDNSDVDKLFIQLVQTYNQLFEENPINASGVDAKAILSARLSKSRRLENLIAQLPGEKKNGLFGNLIALSLGLTPNFKSNFDLAEDAKLQLSKDTYDDDLDNLLAQIGDQYADLFLAAKNLSDAILLSDILRVNTEITKAPLSASMIKRYDEHHQDLTLLKALVRQQLPEKYKEIFFDQSKNGYAGYIDGGASQEEFYKFIKPILEKMDGTEELLVKLNREDLLRKQRTFDNGSIPHQIHLGELHAILRRQEDFYPFLKDNREKIEKILTFRIPYYVGPLARGNSRFAWMTRKSEETITPWNFEEVVDKGASAQSFIERMTNFDKNLPNEKVLPKHSLLYEYFTVYNELTKVKYVTEGMRKPAFLSGEQKKAIVDLLFKTNRKVTVKQLKEDYFKKIECFDSVEISGVEDRFNASLGTYHDLLKIIKDKDFLDNEENEDILEDIVLTLTLFEDREMIEERLKTYAHLFDDKVMKQLKRRRYTGWGRLSRKLINGIRDKQSGKTILDFLKSDGFANRNFMQLIHDDSLTFKEDIQKAQVSGQGDSLHEHIANLAGSPAIKKGILQTVKVVDELVKVMGRHKPENIVIEMARENQTTQKGQKNSRERMKRIEEGIKELGSQILKEHPVENTQLQNEKLYLYYLQNGRDMYVDQELDINRLSDYDVDHIVPQSFLKDDSIDNKVLTRSDKARGKSDNVPSEEVVKKMKNYWRQLLNAKLITQRKFDNLTKAERGGLSELDKAGFIKRQLVETRQITKHVAQILDSRMNTKYDENDKLIREVKVITLKSKLVSDFRKDFQFYKVREINNYHHAHDAYLNAVVGTALIKKYPKLESEFVYGDYKVYDVRKMIAKSEQEIGKATAKYFFYSNIMNFFKTEITLANGEIRKRPLIETNGETGEIVWDKGRDFATVRKVLSMPQVNIVKKTEVQTGGFSKESILPKRNSDKLIARKKDWDPKKYGGFDSPTVAYSVLVVAKVEKGKSKKLKSVKELLGITIMERSSFEKNPIDFLEAKGYKEVKKDLIIKLPKYSLFELENGRKRMLASAGELQKGNELALPSKYVNFLYLASHYEKLKGSPEDNEQKQLFVEQHKHYLDEIIEQISEFSKRVILADANLDKVLSAYNKHRDKPIREQAENIIHLFTLTNLGAPAAFKYFDTTIDRKRYTSTKEVLDATLIHQSITGLYETRIDLSQLGGDGGGGSEAAAKGGGGGGRDIMKDIKVRLMTDSPDDSQDLMIGAIESNLFADQISWKSDQPVWLNQWPLKQEKLQALQQLVTEQLQLGHLEESNSPWNTPVFVIKKKSGKWRLLQDLRAVNATMHDMGALQPGLPSPVAVPKGWEIIIIDLQDCFFNIKLHPEDCKRFAFSVPSPNFKRPYQRFQWKVLPQGMKNSPTLCQKFVDKAILTVRDKYQDSYIVHYMDDILLAHPSRSIVDEILTSMIQALNKHGLVVSTEKIQKYDNLKYLGTHIQGDSVSYQKLQIRTDKLRTLNDFQKLLGNINWIRPFLKLTTGELKPLFEILNGDSNPISTRKLTPEACKALQLMNERLSTARVKRLDLSQPWSLCILKTEYTPTACLWQDGVVEWIHLPHISPKVITPYDIFCTQLIIKGRHRSKELFSKDPDYIVVPYTKVQFDLLLQEKEDWPISLLGFLGEVHFHLPKDPLLTFTLQTAIIFPHMTSTTPLEKGIVIFTDGSANGRSVTYIQGREPIIKENTQNTAQQAEIVAVITAFEEVSQPFNLYTDSKYVTGLFPEIETATLSPRTKIYTELKHLQRLIHKRQEKFYIGHIRGHTGLPGPLAQGNAYADSLTRILTAGKRTADGSEFEKRTADGSEFESPKKKAKVE

SEQ ID NO: 3236 - protein, 2024 aa, synthetic construct
MPAAKRVKLDGGDKKYSIGLDIGTNSVGWAVITDEYKVPSKKFKVLGNTDRHSIKKNLIGALLFDSGETAEATRLKRTARRRYTRRKNRICYLQEIFSNEMAKVDDSFFHRLEESFLVEEDKKHERHPIFGNIVDEVAYHEKYPTIYHLRKKLVDSTDKADLRLIYLALAHMIKFRGHFLIEGDLNPDNSDVDKLFIQLVQTYNQLFEENPINASGVDAKAILSARLSKSRRLENLIAQLPGEKKNGLFGNLIALSLGLTPNFKSNFDLAEDAKLQLSKDTYDDDLDNLLAQIGDQYADLFLAAKNLSDAILLSDILRVNTEITKAPLSASMIKRYDEHHQDLTLLKALVRQQLPEKYKEIFFDQSKNGYAGYIDGGASQEEFYKFIKPILEKMDGTEELLVKLNREDLLRKQRTFDNGSIPHQIHLGELHAILRRQEDFYPFLKDNREKIEKILTFRIPYYVGPLARGNSRFAWMTRKSEETITPWNFEEVVDKGASAQSFIERMTNFDKNLPNEKVLPKHSLLYEYFTVYNELTKVKYVTEGMRKPAFLSGEQKKAIVDLLFKTNRKVTVKQLKEDYFKKIECFDSVEISGVEDRFNASLGTYHDLLKIIKDKDFLDNEENEDILEDIVLTLTLFEDREMIEERLKTYAHLFDDKVMKQLKRRRYTGWGRLSRKLINGIRDKQSGKTILDFLKSDGFANRNFMQLIHDDSLTFKEDIQKAQVSGQGDSLHEHIANLAGSPAIKKGILQTVKVVDELVKVMGRHKPENIVIEMARENQTTQKGQKNSRERMKRIEEGIKELGSQILKEHPVENTQLQNEKLYLYYLQNGRDMYVDQELDINRLSDYDVDHIVPQSFLKDDSIDNKVLTRSDKARGKSDNVPSEEVVKKMKNYWRQLLNAKLITQRKFDNLTKAERGGLSELDKAGFIKRQLVETRQITKHVAQILDSRMNTKYDENDKLIREVKVITLKSKLVSDFRKDFQFYKVREINNYHHAHDAYLNAVVGTALIKKYPKLESEFVYGDYKVYDVRKMIAKSEQEIGKATAKYFFYSNIMNFFKTEITLANGEIRKRPLIETNGETGEIVWDKGRDFATVRKVLSMPQVNIVKKTEVQTGGFSKESILPKRNSDKLIARKKDWDPKKYGGFDSPTVAYSVLVVAKVEKGKSKKLKSVKELLGITIMERSSFEKNPIDFLEAKGYKEVKKDLIIKLPKYSLFELENGRKRMLASAGELQKGNELALPSKYVNFLYLASHYEKLKGSPEDNEQKQLFVEQHKHYLDEIIEQISEFSKRVILADANLDKVLSAYNKHRDKPIREQAENIIHLFTLTNLGAPAAFKYFDTTIDRKRYTSTKEVLDATLIHQSITGLYETRIDLSQLGGDGGPAPEAAAKGSSGGGRDIMKDIKVRLMTDSPDDSQDLMIGAIESNLFADQISWKSDQPVWLNQWPLKQEKLQALQQLVTEQLQLGHLEESNSPWNTPVFVIKKKSGKWRLLQDLRAVNATMHDMGALQPGLPSPVAVPKGWEIIIIDLQDCFFNIKLHPEDCKRFAFSVPSPNFKRPYQRFQWKVLPQGMKNSPTLCQKFVDKAILTVRDKYQDSYIVHYMDDILLAHPSRSIVDEILTSMIQALNKHGLVVSTEKIQKYDNLKYLGTHIQGDSVSYQKLQIRTDKLRTLNDFQKLLGNINWIRPFLKLTTGELKPLFEILNGDSNPISTRKLTPEACKALQLMNERLSTARVKRLDLSQPWSLCILKTEYTPTACLWQDGVVEWIHLPHISPKVITPYDIFCTQLIIKGRHRSKELFSKDPDYIVVPYTKVQFDLLLQEKEDWPISLLGFLGEVHFHLPKDPLLTFTLQTAIIFPHMTSTTPLEKGIVIFTDGSANGRSVTYIQGREPIIKENTQNTAQQAEIVAVITAFEEVSQPFNLYTDSKYVTGLFPEIETATLSPRTKIYTELKHLQRLIHKRQEKFYIGHIRGHTGLPGPLAQGNAYADSLTRILTAGKRTADGSEFEKRTADGSEFESPKKKAKVE

SEQ ID NO: 3237 - protein, 2024 aa, synthetic construct
MPAAKRVKLDGGDKKYSIGLDIGTNSVGWAVITDEYKVPSKKFKVLGNTDRHSIKKNLIGALLFDSGETAEATRLKRTARRRYTRRKNRICYLQEIFSNEMAKVDDSFFHRLEESFLVEEDKKHERHPIFGNIVDEVAYHEKYPTIYHLRKKLVDSTDKADLRLIYLALAHMIKFRGHFLIEGDLNPDNSDVDKLFIQLVQTYNQLFEENPINASGVDAKAILSARLSKSRRLENLIAQLPGEKKNGLFGNLIALSLGLTPNFKSNFDLAEDAKLQLSKDTYDDDLDNLLAQIGDQYADLFLAAKNLSDAILLSDILRVNTEITKAPLSASMIKRYDEHHQDLTLLKALVRQQLPEKYKEIFFDQSKNGYAGYIDGGASQEEFYKFIKPILEKMDGTEELLVKLNREDLLRKQRTFDNGSIPHQIHLGELHAILRRQEDFYPFLKDNREKIEKILTFRIPYYVGPLARGNSRFAWMTRKSEETITPWNFEEVVDKGASAQSFIERMTNFDKNLPNEKVLPKHSLLYEYFTVYNELTKVKYVTEGMRKPAFLSGEQKKAIVDLLFKTNRKVTVKQLKEDYFKKIECFDSVEISGVEDRFNASLGTYHDLLKIIKDKDFLDNEENEDILEDIVLTLTLFEDREMIEERLKTYAHLFDDKVMKQLKRRRYTGWGRLSRKLINGIRDKQSGKTILDFLKSDGFANRNFMQLIHDDSLTFKEDIQKAQVSGQGDSLHEHIANLAGSPAIKKGILQTVKVVDELVKVMGRHKPENIVIEMARENQTTQKGQKNSRERMKRIEEGIKELGSQILKEHPVENTQLQNEKLYLYYLQNGRDMYVDQELDINRLSDYDVDHIVPQSFLKDDSIDNKVLTRSDKARGKSDNVPSEEVVKKMKNYWRQLLNAKLITQRKFDNLTKAERGGLSELDKAGFIKRQLVETRQITKHVAQILDSRMNTKYDENDKLIREVKVITLKSKLVSDFRKDFQFYKVREINNYHHAHDAYLNAVVGTALIKKYPKLESEFVYGDYKVYDVRKMIAKSEQEIGKATAKYFFYSNIMNFFKTEITLANGEIRKRPLIETNGETGEIVWDKGRDFATVRKVLSMPQVNIVKKTEVQTGGFSKESILPKRNSDKLIARKKDWDPKKYGGFDSPTVAYSVLVVAKVEKGKSKKLKSVKELLGITIMERSSFEKNPIDFLEAKGYKEVKKDLIIKLPKYSLFELENGRKRMLASAGELQKGNELALPSKYVNFLYLASHYEKLKGSPEDNEQKQLFVEQHKHYLDEIIEQISEFSKRVILADANLDKVLSAYNKHRDKPIREQAENIIHLFTLTNLGAPAAFKYFDTTIDRKRYTSTKEVLDATLIHQSITGLYETRIDLSQLGGDGGGGSEAAAKPAPGGGRDIMKDIKVRLMTDSPDDSQDLMIGAIESNLFADQISWKSDQPVWLNQWPLKQEKLQALQQLVTEQLQLGHLEESNSPWNTPVFVIKKKSGKWRLLQDLRAVNATMHDMGALQPGLPSPVAVPKGWEIIIIDLQDCFFNIKLHPEDCKRFAFSVPSPNFKRPYQRFQWKVLPQGMKNSPTLCQKFVDKAILTVRDKYQDSYIVHYMDDILLAHPSRSIVDEILTSMIQALNKHGLVVSTEKIQKYDNLKYLGTHIQGDSVSYQKLQIRTDKLRTLNDFQKLLGNINWIRPFLKLTTGELKPLFEILNGDSNPISTRKLTPEACKALQLMNERLSTARVKRLDLSQPWSLCILKTEYTPTACLWQDGVVEWIHLPHISPKVITPYDIFCTQLIIKGRHRSKELFSKDPDYIVVPYTKVQFDLLLQEKEDWPISLLGFLGEVHFHLPKDPLLTFTLQTAIIFPHMTSTTPLEKGIVIFTDGSANGRSVTYIQGREPIIKENTQNTAQQAEIVAVITAFEEVSQPFNLYTDSKYVTGLFPEIETATLSPRTKIYTELKHLQRLIHKRQEKFYIGHIRGHTGLPGPLAQGNAYADSLTRILTAGKRTADGSEFEKRTADGSEFESPKKKAKVE

SEQ ID NO: 3238 - protein, 2046 aa, synthetic construct
MPAAKRVKLDGGDKKYSIGLDIGTNSVGWAVITDEYKVPSKKFKVLGNTDRHSIKKNLIGALLFDSGETAEATRLKRTARRRYTRRKNRICYLQEIFSNEMAKVDDSFFHRLEESFLVEEDKKHERHPIFGNIVDEVAYHEKYPTIYHLRKKLVDSTDKADLRLIYLALAHMIKFRGHFLIEGDLNPDNSDVDKLFIQLVQTYNQLFEENPINASGVDAKAILSARLSKSRRLENLIAQLPGEKKNGLFGNLIALSLGLTPNFKSNFDLAEDAKLQLSKDTYDDDLDNLLAQIGDQYADLFLAAKNLSDAILLSDILRVNTEITKAPLSASMIKRYDEHHQDLTLLKALVRQQLPEKYKEIFFDQSKNGYAGYIDGGASQEEFYKFIKPILEKMDGTEELLVKLNREDLLRKQRTFDNGSIPHQIHLGELHAILRRQEDFYPFLKDNREKIEKILTFRIPYYVGPLARGNSRFAWMTRKSEETITPWNFEEVVDKGASAQSFIERMTNFDKNLPNEKVLPKHSLLYEYFTVYNELTKVKYVTEGMRKPAFLSGEQKKAIVDLLFKTNRKVTVKQLKEDYFKKIECFDSVEISGVEDRFNASLGTYHDLLKIIKDKDFLDNEENEDILEDIVLTLTLFEDREMIEERLKTYAHLFDDKVMKQLKRRRYTGWGRLSRKLINGIRDKQSGKTILDFLKSDGFANRNFMQLIHDDSLTFKEDIQKAQVSGQGDSLHEHIANLAGSPAIKKGILQTVKVVDELVKVMGRHKPENIVIEMARENQTTQKGQKNSRERMKRIEEGIKELGSQILKEHPVENTQLQNEKLYLYYLQNGRDMYVDQELDINRLSDYDVDHIVPQSFLKDDSIDNKVLTRSDKARGKSDNVPSEEVVKKMKNYWRQLLNAKLITQRKFDNLTKAERGGLSELDKAGFIKRQLVETRQITKHVAQILDSRMNTKYDENDKLIREVKVITLKSKLVSDFRKDFQFYKVREINNYHHAHDAYLNAVVGTALIKKYPKLESEFVYGDYKVYDVRKMIAKSEQEIGKATAKYFFYSNIMNFFKTEITLANGEIRKRPLIETNGETGEIVWDKGRDFATVRKVLSMPQVNIVKKTEVQTGGFSKESILPKRNSDKLIARKKDWDPKKYGGFDSPTVAYSVLVVAKVEKGKSKKLKSVKELLGITIMERSSFEKNPIDFLEAKGYKEVKKDLIIKLPKYSLFELENGRKRMLASAGELQKGNELALPSKYVNFLYLASHYEKLKGSPEDNEQKQLFVEQHKHYLDEIIEQISEFSKRVILADANLDKVLSAYNKHRDKPIREQAENIIHLFTLTNLGAPAAFKYFDTTIDRKRYTSTKEVLDATLIHQSITGLYETRIDLSQLGGDGGSGGSSGGSSGSETPGTSESATPESSGGSSGGSSGGGRDIMKDIKVRLMTDSPDDSQDLMIGAIESNLFADQISWKSDQPVWLNQWPLKQEKLQALQQLVTEQLQLGHLEESNSPWNTPVFVIKKKSGKWRLLQDLRAVNATMHDMGALQPGLPSPVAVPKGWEIIIIDLQDCFFNIKLHPEDCKRFAFSVPSPNFKRPYQRFQWKVLPQGMKNSPTLCQKFVDKAILTVRDKYQDSYIVHYMDDILLAHPSRSIVDEILTSMIQALNKHGLVVSTEKIQKYDNLKYLGTHIQGDSVSYQKLQIRTDKLRTLNDFQKLLGNINWIRPFLKLTTGELKPLFEILNGDSNPISTRKLTPEACKALQLMNERLSTARVKRLDLSQPWSLCILKTEYTPTACLWQDGVVEWIHLPHISPKVITPYDIFCTQLIIKGRHRSKELFSKDPDYIVVPYTKVQFDLLLQEKEDWPISLLGFLGEVHFHLPKDPLLTFTLQTAIIFPHMTSTTPLEKGIVIFTDGSANGRSVTYIQGREPIIKENTQNTAQQAEIVAVITAFEEVSQPFNLYTDSKYVTGLFPEIETATLSPRTKIYTELKHLQRLIHKRQEKFYIGHIRGHTGLPGPLAQGNAYADSLTRILTAGKRTADGSEFEKRTADGSEFESPKKKAKVE

SEQ ID NO: 3239 - protein, 2025 aa, synthetic construct
MPAAKRVKLDGGDKKYSIGLDIGTNSVGWAVITDEYKVPSKKFKVLGNTDRHSIKKNLIGALLFDSGETAEATRLKRTARRRYTRRKNRICYLQEIFSNEMAKVDDSFFHRLEESFLVEEDKKHERHPIFGNIVDEVAYHEKYPTIYHLRKKLVDSTDKADLRLIYLALAHMIKFRGHFLIEGDLNPDNSDVDKLFIQLVQTYNQLFEENPINASGVDAKAILSARLSKSRRLENLIAQLPGEKKNGLFGNLIALSLGLTPNFKSNFDLAEDAKLQLSKDTYDDDLDNLLAQIGDQYADLFLAAKNLSDAILLSDILRVNTEITKAPLSASMIKRYDEHHQDLTLLKALVRQQLPEKYKEIFFDQSKNGYAGYIDGGASQEEFYKFIKPILEKMDGTEELLVKLNREDLLRKQRTFDNGSIPHQIHLGELHAILRRQEDFYPFLKDNREKIEKILTFRIPYYVGPLARGNSRFAWMTRKSEETITPWNFEEVVDKGASAQSFIERMTNFDKNLPNEKVLPKHSLLYEYFTVYNELTKVKYVTEGMRKPAFLSGEQKKAIVDLLFKTNRKVTVKQLKEDYFKKIECFDSVEISGVEDRFNASLGTYHDLLKIIKDKDFLDNEENEDILEDIVLTLTLFEDREMIEERLKTYAHLFDDKVMKQLKRRRYTGWGRLSRKLINGIRDKQSGKTILDFLKSDGFANRNFMQLIHDDSLTFKEDIQKAQVSGQGDSLHEHIANLAGSPAIKKGILQTVKVVDELVKVMGRHKPENIVIEMARENQTTQKGQKNSRERMKRIEEGIKELGSQILKEHPVENTQLQNEKLYLYYLQNGRDMYVDQELDINRLSDYDVDHIVPQSFLKDDSIDNKVLTRSDKARGKSDNVPSEEVVKKMKNYWRQLLNAKLITQRKFDNLTKAERGGLSELDKAGFIKRQLVETRQITKHVAQILDSRMNTKYDENDKLIREVKVITLKSKLVSDFRKDFQFYKVREINNYHHAHDAYLNAVVGTALIKKYPKLESEFVYGDYKVYDVRKMIAKSEQEIGKATAKYFFYSNIMNFFKTEITLANGEIRKRPLIETNGETGEIVWDKGRDFATVRKVLSMPQVNIVKKTEVQTGGFSKESILPKRNSDKLIARKKDWDPKKYGGFDSPTVAYSVLVVAKVEKGKSKKLKSVKELLGITIMERSSFEKNPIDFLEAKGYKEVKKDLIIKLPKYSLFELENGRKRMLASAGELQKGNELALPSKYVNFLYLASHYEKLKGSPEDNEQKQLFVEQHKHYLDEIIEQISEFSKRVILADANLDKVLSAYNKHRDKPIREQAENIIHLFTLTNLGAPAAFKYFDTTIDRKRYTSTKEVLDATLIHQSITGLYETRIDLSQLGGDGGGSSGSSGSSGSSGGGRDIMKDIKVRLMTDSPDDSQDLMIGAIESNLFADQISWKSDQPVWLNQWPLKQEKLQALQQLVTEQLQLGHLEESNSPWNTPVFVIKKKSGKWRLLQDLRAVNATMHDMGALQPGLPSPVAVPKGWEIIIIDLQDCFFNIKLHPEDCKRFAFSVPSPNFKRPYQRFQWKVLPQGMKNSPTLCQKFVDKAILTVRDKYQDSYIVHYMDDILLAHPSRSIVDEILTSMIQALNKHGLVVSTEKIQKYDNLKYLGTHIQGDSVSYQKLQIRTDKLRTLNDFQKLLGNINWIRPFLKLTTGELKPLFEILNGDSNPISTRKLTPEACKALQLMNERLSTARVKRLDLSQPWSLCILKTEYTPTACLWQDGVVEWIHLPHISPKVITPYDIFCTQLIIKGRHRSKELFSKDPDYIVVPYTKVQFDLLLQEKEDWPISLLGFLGEVHFHLPKDPLLTFTLQTAIIFPHMTSTTPLEKGIVIFTDGSANGRSVTYIQGREPIIKENTQNTAQQAEIVAVITAFEEVSQPFNLYTDSKYVTGLFPEIETATLSPRTKIYTELKHLQRLIHKRQEKFYIGHIRGHTGLPGPLAQGNAYADSLTRILTAGKRTADGSEFEKRTADGSEFESPKKKAKVE

SEQ ID NO: 3240 - protein, 2022 aa, synthetic construct
MPAAKRVKLDGGDKKYSIGLDIGTNSVGWAVITDEYKVPSKKFKVLGNTDRHSIKKNLIGALLFDSGETAEATRLKRTARRRYTRRKNRICYLQEIFSNEMAKVDDSFFHRLEESFLVEEDKKHERHPIFGNIVDEVAYHEKYPTIYHLRKKLVDSTDKADLRLIYLALAHMIKFRGHFLIEGDLNPDNSDVDKLFIQLVQTYNQLFEENPINASGVDAKAILSARLSKSRRLENLIAQLPGEKKNGLFGNLIALSLGLTPNFKSNFDLAEDAKLQLSKDTYDDDLDNLLAQIGDQYADLFLAAKNLSDAILLSDILRVNTEITKAPLSASMIKRYDEHHQDLTLLKALVRQQLPEKYKEIFFDQSKNGYAGYIDGGASQEEFYKFIKPILEKMDGTEELLVKLNREDLLRKQRTFDNGSIPHQIHLGELHAILRRQEDFYPFLKDNREKIEKILTFRIPYYVGPLARGNSRFAWMTRKSEETITPWNFEEVVDKGASAQSFIERMTNFDKNLPNEKVLPKHSLLYEYFTVYNELTKVKYVTEGMRKPAFLSGEQKKAIVDLLFKTNRKVTVKQLKEDYFKKIECFDSVEISGVEDRFNASLGTYHDLLKIIKDKDFLDNEENEDILEDIVLTLTLFEDREMIEERLKTYAHLFDDKVMKQLKRRRYTGWGRLSRKLINGIRDKQSGKTILDFLKSDGFANRNFMQLIHDDSLTFKEDIQKAQVSGQGDSLHEHIANLAGSPAIKKGILQTVKVVDELVKVMGRHKPENIVIEMARENQTTQKGQKNSRERMKRIEEGIKELGSQILKEHPVENTQLQNEKLYLYYLQNGRDMYVDQELDINRLSDYDVDHIVPQSFLKDDSIDNKVLTRSDKARGKSDNVPSEEVVKKMKNYWRQLLNAKLITQRKFDNLTKAERGGLSELDKAGFIKRQLVETRQITKHVAQILDSRMNTKYDENDKLIREVKVITLKSKLVSDFRKDFQFYKVREINNYHHAHDAYLNAVVGTALIKKYPKLESEFVYGDYKVYDVRKMIAKSEQEIGKATAKYFFYSNIMNFFKTEITLANGEIRKRPLIETNGETGEIVWDKGRDFATVRKVLSMPQVNIVKKTEVQTGGFSKESILPKRNSDKLIARKKDWDPKKYGGFDSPTVAYSVLVVAKVEKGKSKKLKSVKELLGITIMERSSFEKNPIDFLEAKGYKEVKKDLIIKLPKYSLFELENGRKRMLASAGELQKGNELALPSKYVNFLYLASHYEKLKGSPEDNEQKQLFVEQHKHYLDEIIEQISEFSKRVILADANLDKVLSAYNKHRDKPIREQAENIIHLFTLTNLGAPAAFKYFDTTIDRKRYTSTKEVLDATLIHQSITGLYETRIDLSQLGGDGGGGGGGSGSSGGGRDIMKDIKVRLMTDSPDDSQDLMIGAIESNLFADQISWKSDQPVWLNQWPLKQEKLQALQQLVTEQLQLGHLEESNSPWNTPVFVIKKKSGKWRLLQDLRAVNATMHDMGALQPGLPSPVAVPKGWEIIIIDLQDCFFNIKLHPEDCKRFAFSVPSPNFKRPYQRFQWKVLPQGMKNSPTLCQKFVDKAILTVRDKYQDSYIVHYMDDILLAHPSRSIVDEILTSMIQALNKHGLVVSTEKIQKYDNLKYLGTHIQGDSVSYQKLQIRTDKLRTLNDFQKLLGNINWIRPFLKLTTGELKPLFEILNGDSNPISTRKLTPEACKALQLMNERLSTARVKRLDLSQPWSLCILKTEYTPTACLWQDGVVEWIHLPHISPKVITPYDIFCTQLIIKGRHRSKELFSKDPDYIVVPYTKVQFDLLLQEKEDWPISLLGFLGEVHFHLPKDPLLTFTLQTAIIFPHMTSTTPLEKGIVIFTDGSANGRSVTYIQGREPIIKENTQNTAQQAEIVAVITAFEEVSQPFNLYTDSKYVTGLFPEIETATLSPRTKIYTELKHLQRLIHKRQEKFYIGHIRGHTGLPGPLAQGNAYADSLTRILTAGKRTADGSEFEKRTADGSEFESPKKKAKVE

SEQ ID NO: 3241 - protein, 2022 aa, synthetic construct
MPAAKRVKLDGGDKKYSIGLDIGTNSVGWAVITDEYKVPSKKFKVLGNTDRHSIKKNLIGALLFDSGETAEATRLKRTARRRYTRRKNRICYLQEIFSNEMAKVDDSFFHRLEESFLVEEDKKHERHPIFGNIVDEVAYHEKYPTIYHLRKKLVDSTDKADLRLIYLALAHMIKFRGHFLIEGDLNPDNSDVDKLFIQLVQTYNQLFEENPINASGVDAKAILSARLSKSRRLENLIAQLPGEKKNGLFGNLIALSLGLTPNFKSNFDLAEDAKLQLSKDTYDDDLDNLLAQIGDQYADLFLAAKNLSDAILLSDILRVNTEITKAPLSASMIKRYDEHHQDLTLLKALVRQQLPEKYKEIFFDQSKNGYAGYIDGGASQEEFYKFIKPILEKMDGTEELLVKLNREDLLRKQRTFDNGSIPHQIHLGELHAILRRQEDFYPFLKDNREKIEKILTFRIPYYVGPLARGNSRFAWMTRKSEETITPWNFEEVVDKGASAQSFIERMTNFDKNLPNEKVLPKHSLLYEYFTVYNELTKVKYVTEGMRKPAFLSGEQKKAIVDLLFKTNRKVTVKQLKEDYFKKIECFDSVEISGVEDRFNASLGTYHDLLKIIKDKDFLDNEENEDILEDIVLTLTLFEDREMIEERLKTYAHLFDDKVMKQLKRRRYTGWGRLSRKLINGIRDKQSGKTILDFLKSDGFANRNFMQLIHDDSLTFKEDIQKAQVSGQGDSLHEHIANLAGSPAIKKGILQTVKVVDELVKVMGRHKPENIVIEMARENQTTQKGQKNSRERMKRIEEGIKELGSQILKEHPVENTQLQNEKLYLYYLQNGRDMYVDQELDINRLSDYDVDHIVPQSFLKDDSIDNKVLTRSDKARGKSDNVPSEEVVKKMKNYWRQLLNAKLITQRKFDNLTKAERGGLSELDKAGFIKRQLVETRQITKHVAQILDSRMNTKYDENDKLIREVKVITLKSKLVSDFRKDFQFYKVREINNYHHAHDAYLNAVVGTALIKKYPKLESEFVYGDYKVYDVRKMIAKSEQEIGKATAKYFFYSNIMNFFKTEITLANGEIRKRPLIETNGETGEIVWDKGRDFATVRKVLSMPQVNIVKKTEVQTGGFSKESILPKRNSDKLIARKKDWDPKKYGGFDSPTVAYSVLVVAKVEKGKSKKLKSVKELLGITIMERSSFEKNPIDFLEAKGYKEVKKDLIIKLPKYSLFELENGRKRMLASAGELQKGNELALPSKYVNFLYLASHYEKLKGSPEDNEQKQLFVEQHKHYLDEIIEQISEFSKRVILADANLDKVLSAYNKHRDKPIREQAENIIHLFTLTNLGAPAAFKYFDTTIDRKRYTSTKEVLDATLIHQSITGLYETRIDLSQLGGDGGGGGGSSGGSGGGRDIMKDIKVRLMTDSPDDSQDLMIGAIESNLFADQISWKSDQPVWLNQWPLKQEKLQALQQLVTEQLQLGHLEESNSPWNTPVFVIKKKSGKWRLLQDLRAVNATMHDMGALQPGLPSPVAVPKGWEIIIIDLQDCFFNIKLHPEDCKRFAFSVPSPNFKRPYQRFQWKVLPQGMKNSPTLCQKFVDKAILTVRDKYQDSYIVHYMDDILLAHPSRSIVDEILTSMIQALNKHGLVVSTEKIQKYDNLKYLGTHIQGDSVSYQKLQIRTDKLRTLNDFQKLLGNINWIRPFLKLTTGELKPLFEILNGDSNPISTRKLTPEACKALQLMNERLSTARVKRLDLSQPWSLCILKTEYTPTACLWQDGVVEWIHLPHISPKVITPYDIFCTQLIIKGRHRSKELFSKDPDYIVVPYTKVQFDLLLQEKEDWPISLLGFLGEVHFHLPKDPLLTFTLQTAIIFPHMTSTTPLEKGIVIFTDGSANGRSVTYIQGREPIIKENTQNTAQQAEIVAVITAFEEVSQPFNLYTDSKYVTGLFPEIETATLSPRTKIYTELKHLQRLIHKRQEKFYIGHIRGHTGLPGPLAQGNAYADSLTRILTAGKRTADGSEFEKRTADGSEFESPKKKAKVE

SEQ ID NO: 3242 - protein, 2019 aa, synthetic construct
MPAAKRVKLDGGDKKYSIGLDIGTNSVGWAVITDEYKVPSKKFKVLGNTDRHSIKKNLIGALLFDSGETAEATRLKRTARRRYTRRKNRICYLQEIFSNEMAKVDDSFFHRLEESFLVEEDKKHERHPIFGNIVDEVAYHEKYPTIYHLRKKLVDSTDKADLRLIYLALAHMIKFRGHFLIEGDLNPDNSDVDKLFIQLVQTYNQLFEENPINASGVDAKAILSARLSKSRRLENLIAQLPGEKKNGLFGNLIALSLGLTPNFKSNFDLAEDAKLQLSKDTYDDDLDNLLAQIGDQYADLFLAAKNLSDAILLSDILRVNTEITKAPLSASMIKRYDEHHQDLTLLKALVRQQLPEKYKEIFFDQSKNGYAGYIDGGASQEEFYKFIKPILEKMDGTEELLVKLNREDLLRKQRTFDNGSIPHQIHLGELHAILRRQEDFYPFLKDNREKIEKILTFRIPYYVGPLARGNSRFAWMTRKSEETITPWNFEEVVDKGASAQSFIERMTNFDKNLPNEKVLPKHSLLYEYFTVYNELTKVKYVTEGMRKPAFLSGEQKKAIVDLLFKTNRKVTVKQLKEDYFKKIECFDSVEISGVEDRFNASLGTYHDLLKIIKDKDFLDNEENEDILEDIVLTLTLFEDREMIEERLKTYAHLFDDKVMKQLKRRRYTGWGRLSRKLINGIRDKQSGKTILDFLKSDGFANRNFMQLIHDDSLTFKEDIQKAQVSGQGDSLHEHIANLAGSPAIKKGILQTVKVVDELVKVMGRHKPENIVIEMARENQTTQKGQKNSRERMKRIEEGIKELGSQILKEHPVENTQLQNEKLYLYYLQNGRDMYVDQELDINRLSDYDVDHIVPQSFLKDDSIDNKVLTRSDKARGKSDNVPSEEVVKKMKNYWRQLLNAKLITQRKFDNLTKAERGGLSELDKAGFIKRQLVETRQITKHVAQILDSRMNTKYDENDKLIREVKVITLKSKLVSDFRKDFQFYKVREINNYHHAHDAYLNAVVGTALIKKYPKLESEFVYGDYKVYDVRKMIAKSEQEIGKATAKYFFYSNIMNFFKTEITLANGEIRKRPLIETNGETGEIVWDKGRDFATVRKVLSMPQVNIVKKTEVQTGGFSKESILPKRNSDKLIARKKDWDPKKYGGFDSPTVAYSVLVVAKVEKGKSKKLKSVKELLGITIMERSSFEKNPIDFLEAKGYKEVKKDLIIKLPKYSLFELENGRKRMLASAGELQKGNELALPSKYVNFLYLASHYEKLKGSPEDNEQKQLFVEQHKHYLDEIIEQISEFSKRVILADANLDKVLSAYNKHRDKPIREQAENIIHLFTLTNLGAPAAFKYFDTTIDRKRYTSTKEVLDATLIHQSITGLYETRIDLSQLGGDGGGGSGSSGGGRDIMKDIKVRLMTDSPDDSQDLMIGAIESNLFADQISWKSDQPVWLNQWPLKQEKLQALQQLVTEQLQLGHLEESNSPWNTPVFVIKKKSGKWRLLQDLRAVNATMHDMGALQPGLPSPVAVPKGWEIIIIDLQDCFFNIKLHPEDCKRFAFSVPSPNFKRPYQRFQWKVLPQGMKNSPTLCQKFVDKAILTVRDKYQDSYIVHYMDDILLAHPSRSIVDEILTSMIQALNKHGLVVSTEKIQKYDNLKYLGTHIQGDSVSYQKLQIRTDKLRTLNDFQKLLGNINWIRPFLKLTTGELKPLFEILNPDSNPISTRKLTPEACKALQLMNERLSTARVKRLDLSQPWSLCILKTEYTPTACLWQDGVVEWIHLPHISPKVITPYDIFCTQLIIKGRHRSKELFSKDPDYIVVPYTKVQFDLLLQEKEDWPISLLGFLGEVHFHLPKDPLLTFTLQTAIIFPHMTSTTPLEKGIVIFTDGSANGRSVTYIQGREPIIKENTQNTAQQAEIVAVITAFEEVSQPFNLYTDSKYVTGLFPEIETATLSPRTKIYTELKHLQRLIHKRQEKFYIGHIRGHTGLPGPLAQGNAYADSLTRILTAGKRTADGSEFEKRTADGSEFESPKKKAKVE

SEQ ID NO: 3243 - protein, 2022 aa, synthetic construct
MPAAKRVKLDGGDKKYSIGLDIGTNSVGWAVITDEYKVPSKKFKVLGNTDRHSIKKNLIGALLFDSGETAEATRLKRTARRRYTRRKNRICYLQEIFSNEMAKVDDSFFHRLEESFLVEEDKKHERHPIFGNIVDEVAYHEKYPTIYHLRKKLVDSTDKADLRLIYLALAHMIKFRGHFLIEGDLNPDNSDVDKLFIQLVQTYNQLFEENPINASGVDAKAILSARLSKSRRLENLIAQLPGEKKNGLFGNLIALSLGLTPNFKSNFDLAEDAKLQLSKDTYDDDLDNLLAQIGDQYADLFLAAKNLSDAILLSDILRVNTEITKAPLSASMIKRYDEHHQDLTLLKALVRQQLPEKYKEIFFDQSKNGYAGYIDGGASQEEFYKFIKPILEKMDGTEELLVKLNREDLLRKQRTFDNGSIPHQIHLGELHAILRRQEDFYPFLKDNREKIEKILTFRIPYYVGPLARGNSRFAWMTRKSEETITPWNFEEVVDKGASAQSFIERMTNFDKNLPNEKVLPKHSLLYEYFTVYNELTKVKYVTEGMRKPAFLSGEQKKAIVDLLFKTNRKVTVKQLKEDYFKKIECFDSVEISGVEDRFNASLGTYHDLLKIIKDKDFLDNEENEDILEDIVLTLTLFEDREMIEERLKTYAHLFDDKVMKQLKRRRYTGWGRLSRKLINGIRDKQSGKTILDFLKSDGFANRNFMQLIHDDSLTFKEDIQKAQVSGQGDSLHEHIANLAGSPAIKKGILQTVKVVDELVKVMGRHKPENIVIEMARENQTTQKGQKNSRERMKRIEEGIKELGSQILKEHPVENTQLQNEKLYLYYLQNGRDMYVDQELDINRLSDYDVDHIVPQSFLKDDSIDNKVLTRSDKARGKSDNVPSEEVVKKMKNYWRQLLNAKLITQRKFDNLTKAERGGLSELDKAGFIKRQLVETRQITKHVAQILDSRMNTKYDENDKLIREVKVITLKSKLVSDFRKDFQFYKVREINNYHHAHDAYLNAVVGTALIKKYPKLESEFVYGDYKVYDVRKMIAKSEQEIGKATAKYFFYSNIMNFFKTEITLANGEIRKRPLIETNGETGEIVWDKGRDFATVRKVLSMPQVNIVKKTEVQTGGFSKESILPKRNSDKLIARKKDWDPKKYGGFDSPTVAYSVLVVAKVEKGKSKKLKSVKELLGITIMERSSFEKNPIDFLEAKGYKEVKKDLIIKLPKYSLFELENGRKRMLASAGELQKGNELALPSKYVNFLYLASHYEKLKGSPEDNEQKQLFVEQHKHYLDEIIEQISEFSKRVILADANLDKVLSAYNKHRDKPIREQAENIIHLFTLTNLGAPAAFKYFDTTIDRKRYTSTKEVLDATLIHQSITGLYETRIDLSQLGGDGGGGGGGSGSSGGGRDIMKDIKVRLMTDSPDDSQDLMIGAIESNLFADQISWKSDQPVWLNQWPLKQEKLQALQQLVTEQLQLGHLEESNSPWNTPVFVIKKKSGKWRLLQDLRAVNATMHDMGALQPGLPSPVAVPKGWEIIIIDLQDCFFNIKLHPEDCKRFAFSVPSPNFKRPYQRFQWKVLPQGMKNSPTLCQKFVDKAILTVRDKYQDSYIVHYMDDILLAHPSRSIVDEILTSMIQALNKHGLVVSTEKIQKYDNLKYLGTHIQGDSVSYQKLQIRTDKLRTLNDFQKLLGNINWIRPFLKLTTGELKPLFEILNPDSNPISTRKLTPEACKALQLMNERLSTARVKRLDLSQPWSLCILKTEYTPTACLWQDGVVEWIHLPHISPKVITPYDIFCTQLIIKGRHRSKELFSKDPDYIVVPYTKVQFDLLLQEKEDWPISLLGFLGEVHFHLPKDPLLTFTLQTAIIFPHMTSTTPLEKGIVIFTDGSANGRSVTYIQGREPIIKENTQNTAQQAEIVAVITAFEEVSQPFNLYTDSKYVTGLFPEIETATLSPRTKIYTELKHLQRLIHKRQEKFYIGHIRGHTGLPGPLAQGNAYADSLTRILTAGKRTADGSEFEKRTADGSEFESPKKKAKVE

SEQ ID NO: 3244 - protein, 2024 aa, synthetic construct
MPAAKRVKLDGGDKKYSIGLDIGTNSVGWAVITDEYKVPSKKFKVLGNTDRHSIKKNLIGALLFDSGETAEATRLKRTARRRYTRRKNRICYLQEIFSNEMAKVDDSFFHRLEESFLVEEDKKHERHPIFGNIVDEVAYHEKYPTIYHLRKKLVDSTDKADLRLIYLALAHMIKFRGHFLIEGDLNPDNSDVDKLFIQLVQTYNQLFEENPINASGVDAKAILSARLSKSRRLENLIAQLPGEKKNGLFGNLIALSLGLTPNFKSNFDLAEDAKLQLSKDTYDDDLDNLLAQIGDQYADLFLAAKNLSDAILLSDILRVNTEITKAPLSASMIKRYDEHHQDLTLLKALVRQQLPEKYKEIFFDQSKNGYAGYIDGGASQEEFYKFIKPILEKMDGTEELLVKLNREDLLRKQRTFDNGSIPHQIHLGELHAILRRQEDFYPFLKDNREKIEKILTFRIPYYVGPLARGNSRFAWMTRKSEETITPWNFEEVVDKGASAQSFIERMTNFDKNLPNEKVLPKHSLLYEYFTVYNELTKVKYVTEGMRKPAFLSGEQKKAIVDLLFKTNRKVTVKQLKEDYFKKIECFDSVEISGVEDRFNASLGTYHDLLKIIKDKDFLDNEENEDILEDIVLTLTLFEDREMIEERLKTYAHLFDDKVMKQLKRRRYTGWGRLSRKLINGIRDKQSGKTILDFLKSDGFANRNFMQLIHDDSLTFKEDIQKAQVSGQGDSLHEHIANLAGSPAIKKGILQTVKVVDELVKVMGRHKPENIVIEMARENQTTQKGQKNSRERMKRIEEGIKELGSQILKEHPVENTQLQNEKLYLYYLQNGRDMYVDQELDINRLSDYDVDHIVPQSFLKDDSIDNKVLTRSDKARGKSDNVPSEEVVKKMKNYWRQLLNAKLITQRKFDNLTKAERGGLSELDKAGFIKRQLVETRQITKHVAQILDSRMNTKYDENDKLIREVKVITLKSKLVSDFRKDFQFYKVREINNYHHAHDAYLNAVVGTALIKKYPKLESEFVYGDYKVYDVRKMIAKSEQEIGKATAKYFFYSNIMNFFKTEITLANGEIRKRPLIETNGETGEIVWDKGRDFATVRKVLSMPQVNIVKKTEVQTGGFSKESILPKRNSDKLIARKKDWDPKKYGGFDSPTVAYSVLVVAKVEKGKSKKLKSVKELLGITIMERSSFEKNPIDFLEAKGYKEVKKDLIIKLPKYSLFELENGRKRMLASAGELQKGNELALPSKYVNFLYLASHYEKLKGSPEDNEQKQLFVEQHKHYLDEIIEQISEFSKRVILADANLDKVLSAYNKHRDKPIREQAENIIHLFTLTNLGAPAAFKYFDTTIDRKRYTSTKEVLDATLIHQSITGLYETRIDLSQLGGDGGGSSEAAAKGGSGGGRDIMKDIKVRLMTDSPDDSQDLMIGAIESNLFADQISWKSDQPVWLNQWPLKQEKLQALQQLVTEQLQLGHLEESNSPWNTPVFVIKKKSGKWRLLQDLRAVNATMHDMGALQPGLPSPVAPPKGWEIIIIDLQDCFFNIKLHPEDCKRFAFSVPSPNFKRPYQRFQWKVLPQGMKNSPTLCQKFVDKAILTVRDKYQDSYIVHYMDDILLAHPSRSIVDEILTSMIQALNKHGLVVSTEKIQKYDNLKYLGTHIQGDSVSYQKLQIRTDKLRTLNDFQKLLGNINWIRPFLKLTTGELKPLFEILNPDSNPISTRKLTPEACKALQLMNERLSTARVKRLDLSQPWSLCILKTEYTPTACLWQDGVVEWIHLPHISPKVITPYDIFCTQLIIKGRHRSKELFSKDPDYIVVPYTKVQFDLLLQEKEDWPISLLGFLGEVHFHLPKDPLLTFTLQTAIIFPHMTSTTPLEKGIVIFTDGSANGRSVTYIQGREPIIKENTQNTAQQAEIVAVITAFEEVSQPFNLYTDSKYVTGLFPEIETATLSPRTKIYTELKHLQRLIHKRQEKFYIGHIRGHTGLPGPLAQGNAYADSLTRILTAGKRTADGSEFEKRTADGSEFESPKKKAKVE

SEQ ID NO: 3245 - protein, 2125 aa, synthetic construct
MPAAKRVKLDGGDKKYSIGLDIGTNSVGWAVITDEYKVPSKKFKVLGNTDRHSIKKNLIGALLFDSGETAEATRLKRTARRRYTRRKNRICYLQEIFSNEMAKVDDSFFHRLEESFLVEEDKKHERHPIFGNIVDEVAYHEKYPTIYHLRKKLVDSTDKADLRLIYLALAHMIKFRGHFLIEGDLNPDNSDVDKLFIQLVQTYNQLFEENPINASGVDAKAILSARLSKSRRLENLIAQLPGEKKNGLFGNLIALSLGLTPNFKSNFDLAEDAKLQLSKDTYDDDLDNLLAQIGDQYADLFLAAKNLSDAILLSDILRVNTEITKAPLSASMIKRYDEHHQDLTLLKALVRQQLPEKYKEIFFDQSKNGYAGYIDGGASQEEFYKFIKPILEKMDGTEELLVKLNREDLLRKQRTFDNGSIPHQIHLGELHAILRRQEDFYPFLKDNREKIEKILTFRIPYYVGPLARGNSRFAWMTRKSEETITPWNFEEVVDKGASAQSFIERMTNFDKNLPNEKVLPKHSLLYEYFTVYNELTKVKYVTEGMRKPAFLSGEQKKAIVDLLFKTNRKVTVKQLKEDYFKKIECFDSVEISGVEDRFNASLGTYHDLLKIIKDKDFLDNEENEDILEDIVLTLTLFEDREMIEERLKTYAHLFDDKVMKQLKRRRYTGWGRLSRKLINGIRDKQSGKTILDFLKSDGFANRNFMQLIHDDSLTFKEDIQKAQVSGQGDSLHEHIANLAGSPAIKKGILQTVKVVDELVKVMGRHKPENIVIEMARENQTTQKGQKNSRERMKRIEEGIKELGSQILKEHPVENTQLQNEKLYLYYLQNGRDMYVDQELDINRLSDYDVDHIVPQSFLKDDSIDNKVLTRSDKARGKSDNVPSEEVVKKMKNYWRQLLNAKLITQRKFDNLTKAERGGLSELDKAGFIKRQLVETRQITKHVAQILDSRMNTKYDENDKLIREVKVITLKSKLVSDFRKDFQFYKVREINNYHHAHDAYLNAVVGTALIKKYPKLESEFVYGDYKVYDVRKMIAKSEQEIGKATAKYFFYSNIMNFFKTEITLANGEIRKRPLIETNGETGEIVWDKGRDFATVRKVLSMPQVNIVKKTEVQTGGFSKESILPKRNSDKLIARKKDWDPKKYGGFDSPTVAYSVLVVAKVEKGKSKKLKSVKELLGITIMERSSFEKNPIDFLEAKGYKEVKKDLIIKLPKYSLFELENGRKRMLASAGELQKGNELALPSKYVNFLYLASHYEKLKGSPEDNEQKQLFVEQHKHYLDEIIEQISEFSKRVILADANLDKVLSAYNKHRDKPIREQAENIIHLFTLTNLGAPAAFKYFDTTIDRKRYTSTKEVLDATLIHQSITGLYETRIDLSQLGGDGGEAAAKEAAAKEAAAKEAAAKGGWVQEISDSRPMLHIYLNGRRFLGLLNTGADKTCIAGRDWPANWPIHQTESSLQGLGMACGVARSSQPLRWQHEDKSGIIHPFVIPTLPFTLWGRDIMKDIKVRLMTDSPDDSQDLMIGAIESNLFADQISWKSDQPVWLNQWPLKQEKLQALQQLVTEQLQLGHLEESNSPWNTPVFVIKKKSGKWRLLQDLRAVNATMHDMGALQPGLPSPVAVPKGWEIIIIDLQDCFFNIKLHPEDCKRFAFSVPSPNFKRPYQRFQWKVLPQGMKNSPTLCQKFVDKAILTVRDKYQDSYIVHYMDDILLAHPSRSIVDEILTSMIQALNKHGLVVSTEKIQKYDNLKYLGTHIQGDSVSYQKLQIRTDKLRTLNDFQKLLGNINWIRPFLKLTTGELKPLFEILNPDSNPISTRKLTPEACKALQLMNERLSTARVKRLDLSQPWSLCILKTEYTPTACLWQDGVVEWIHLPHISPKVITPYDIFCTQLIIKGRHRSKELFSKDPDYIVVPYTKVQFDLLLQEKEDWPISLLGFLGEVHFHLPKDPLLTFTLQTAIIFPHMTSTTPLEKGIVIFTDGSANGRSVTYIQGREPIIKENTQNTAQQAEIVAVITAFEEVSQPFNLYTDSKYVTGLFPEIETATLSPRTKIYTELKHLQRLIHKRQEKFYIGHIRGHTGLPGPLAQGNAYADSLTRILTAGKRTADGSEFEKRTADGSEFESPKKKAKVE

SEQ ID NO: 3246 - protein, 2116 aa, synthetic construct
MPAAKRVKLDGGDKKYSIGLDIGTNSVGWAVITDEYKVPSKKFKVLGNTDRHSIKKNLIGALLFDSGETAEATRLKRTARRRYTRRKNRICYLQEIFSNEMAKVDDSFFHRLEESFLVEEDKKHERHPIFGNIVDEVAYHEKYPTIYHLRKKLVDSTDKADLRLIYLALAHMIKFRGHFLIEGDLNPDNSDVDKLFIQLVQTYNQLFEENPINASGVDAKAILSARLSKSRRLENLIAQLPGEKKNGLFGNLIALSLGLTPNFKSNFDLAEDAKLQLSKDTYDDDLDNLLAQIGDQYADLFLAAKNLSDAILLSDILRVNTEITKAPLSASMIKRYDEHHQDLTLLKALVRQQLPEKYKEIFFDQSKNGYAGYIDGGASQEEFYKFIKPILEKMDGTEELLVKLNREDLLRKQRTFDNGSIPHQIHLGELHAILRRQEDFYPFLKDNREKIEKILTFRIPYYVGPLARGNSRFAWMTRKSEETITPWNFEEVVDKGASAQSFIERMTNFDKNLPNEKVLPKHSLLYEYFTVYNELTKVKYVTEGMRKPAFLSGEQKKAIVDLLFKTNRKVTVKQLKEDYFKKIECFDSVEISGVEDRFNASLGTYHDLLKIIKDKDFLDNEENEDILEDIVLTLTLFEDREMIEERLKTYAHLFDDKVMKQLKRRRYTGWGRLSRKLINGIRDKQSGKTILDFLKSDGFANRNFMQLIHDDSLTFKEDIQKAQVSGQGDSLHEHIANLAGSPAIKKGILQTVKVVDELVKVMGRHKPENIVIEMARENQTTQKGQKNSRERMKRIEEGIKELGSQILKEHPVENTQLQNEKLYLYYLQNGRDMYVDQELDINRLSDYDVDHIVPQSFLKDDSIDNKVLTRSDKARGKSDNVPSEEVVKKMKNYWRQLLNAKLITQRKFDNLTKAERGGLSELDKAGFIKRQLVETRQITKHVAQILDSRMNTKYDENDKLIREVKVITLKSKLVSDFRKDFQFYKVREINNYHHAHDAYLNAVVGTALIKKYPKLESEFVYGDYKVYDVRKMIAKSEQEIGKATAKYFFYSNIMNFFKTEITLANGEIRKRPLIETNGETGEIVWDKGRDFATVRKVLSMPQVNIVKKTEVQTGGFSKESILPKRNSDKLIARKKDWDPKKYGGFDSPTVAYSVLVVAKVEKGKSKKLKSVKELLGITIMERSSFEKNPIDFLEAKGYKEVKKDLIIKLPKYSLFELENGRKRMLASAGELQKGNELALPSKYVNFLYLASHYEKLKGSPEDNEQKQLFVEQHKHYLDEIIEQISEFSKRVILADANLDKVLSAYNKHRDKPIREQAENIIHLFTLTNLGAPAAFKYFDTTIDRKRYTSTKEVLDATLIHQSITGLYETRIDLSQLGGDGGGSSGGSEAAAKGGWVQEISDSRPMLHIYLNGRRFLGLLNTGADKTCIAGRDWPANWPIHQTESSLQGLGMACGVARSSQPLRWQHEDKSGIIHPFVIPTLPFTLWGRDIMKDIKVRLMTDSPDDSQDLMIGAIESNLFADQISWKSDQPVWLNQWPLKQEKLQALQQLVTEQLQLGHLEESNSPWNTPVFVIKKKSGKWRLLQDLRAVNATMHDMGALQPGLPSPVAVPKGWEIIIIDLQDCFFNIKLHPEDCKRFAFSVPSPNFKRPYQRFQWKVLPQGMKNSPTLCQKFVDKAILTVRDKYQDSYIVHYMDDILLAHPSRSIVDEILTSMIQALNKHGLVVSTEKIQKYDNLKYLGTHIQGDSVSYQKLQIRTDKLRTLNDFQKLLGNINWIRPFLKLTTGELKPLFEILNPDSNPISTRKLTPEACKALQLMNERLSTARVKRLDLSQPWSLCILKTEYTPTACLWQDGVVEWIHLPHISPKVITPYDIFCTQLIIKGRHRSKELFSKDPDYIVVPYTKVQFDLLLQEKEDWPISLLGFLGEVHFHLPKDPLLTFTLQTAIIFPHMTSTTPLEKGIVIFTDGSANGRSVTYIQGREPIIKENTQNTAQQAEIVAVITAFEEVSQPFNLYTDSKYVTGLFPEIETATLSPRTKIYTELKHLQRLIHKRQEKFYIGHIRGHTGLPGPLAQGNAYADSLTRILTAGKRTADGSEFEKRTADGSEFESPKKKAKVE

SEQ ID NO: 3247 - protein, 2114 aa, synthetic construct
MPAAKRVKLDGGDKKYSIGLDIGTNSVGWAVITDEYKVPSKKFKVLGNTDRHSIKKNLIGALLFDSGETAEATRLKRTARRRYTRRKNRICYLQEIFSNEMAKVDDSFFHRLEESFLVEEDKKHERHPIFGNIVDEVAYHEKYPTIYHLRKKLVDSTDKADLRLIYLALAHMIKFRGHFLIEGDLNPDNSDVDKLFIQLVQTYNQLFEENPINASGVDAKAILSARLSKSRRLENLIAQLPGEKKNGLFGNLIALSLGLTPNFKSNFDLAEDAKLQLSKDTYDDDLDNLLAQIGDQYADLFLAAKNLSDAILLSDILRVNTEITKAPLSASMIKRYDEHHQDLTLLKALVRQQLPEKYKEIFFDQSKNGYAGYIDGGASQEEFYKFIKPILEKMDGTEELLVKLNREDLLRKQRTFDNGSIPHQIHLGELHAILRRQEDFYPFLKDNREKIEKILTFRIPYYVGPLARGNSRFAWMTRKSEETITPWNFEEVVDKGASAQSFIERMTNFDKNLPNEKVLPKHSLLYEYFTVYNELTKVKYVTEGMRKPAFLSGEQKKAIVDLLFKTNRKVTVKQLKEDYFKKIECFDSVEISGVEDRFNASLGTYHDLLKIIKDKDFLDNEENEDILEDIVLTLTLFEDREMIEERLKTYAHLFDDKVMKQLKRRRYTGWGRLSRKLINGIRDKQSGKTILDFLKSDGFANRNFMQLIHDDSLTFKEDIQKAQVSGQGDSLHEHIANLAGSPAIKKGILQTVKVVDELVKVMGRHKPENIVIEMARENQTTQKGQKNSRERMKRIEEGIKELGSQILKEHPVENTQLQNEKLYLYYLQNGRDMYVDQELDINRLSDYDVDHIVPQSFLKDDSIDNKVLTRSDKARGKSDNVPSEEVVKKMKNYWRQLLNAKLITQRKFDNLTKAERGGLSELDKAGFIKRQLVETRQITKHVAQILDSRMNTKYDENDKLIREVKVITLKSKLVSDFRKDFQFYKVREINNYHHAHDAYLNAVVGTALIKKYPKLESEFVYGDYKVYDVRKMIAKSEQEIGKATAKYFFYSNIMNFFKTEITLANGEIRKRPLIETNGETGEIVWDKGRDFATVRKVLSMPQVNIVKKTEVQTGGFSKESILPKRNSDKLIARKKDWDPKKYGGFDSPTVAYSVLVVAKVEKGKSKKLKSVKELLGITIMERSSFEKNPIDFLEAKGYKEVKKDLIIKLPKYSLFELENGRKRMLASAGELQKGNELALPSKYVNFLYLASHYEKLKGSPEDNEQKQLFVEQHKHYLDEIIEQISEFSKRVILADANLDKVLSAYNKHRDKPIREQAENIIHLFTLTNLGAPAAFKYFDTTIDRKRYTSTKEVLDATLIHQSITGLYETRIDLSQLGGDGGGGGGGSGSSGGWVQEISDSRPMLHIYLNGRRFLGLLNTGADKTCIAGRDWPANWPIHQTESSLQGLGMACGVARSSQPLRWQHEDKSGIIHPFVIPTLPFTLWGRDIMKDIKVRLMTDSPDDSQDLMIGAIESNLFADQISWKSDQPVWLNQWPLKQEKLQALQQLVTEQLQLGHLEESNSPWNTPVFVIKKKSGKWRLLQDLRAVNATMHDMGALQPGLPSPVAVPKGWEIIIIDLQDCFFNIKLHPEDCKRFAFSVPSPNFKRPYQRFQWKVLPQGMKNSPTLCQKFVDKAILTVRDKYQDSYIVHYMDDILLAHPSRSIVDEILTSMIQALNKHGLVVSTEKIQKYDNLKYLGTHIQGDSVSYQKLQIRTDKLRTLNDFQKLLGNINWIRPFLKLTTGELKPLFEILNPDSNPISTRKLTPEACKALQLMNERLSTARVKRLDLSQPWSLCILKTEYTPTACLWQDGVVEWIHLPHISPKVITPYDIFCTQLIIKGRHRSKELFSKDPDYIVVPYTKVQFDLLLQEKEDWPISLLGFLGEVHFHLPKDPLLTFTLQTAIIFPHMTSTTPLEKGIVIFTDGSANGRSVTYIQGREPIIKENTQNTAQQAEIVAVITAFEEVSQPFNLYTDSKYVTGLFPEIETATLSPRTKIYTELKHLQRLIHKRQEKFYIGHIRGHTGLPGPLAQGNAYADSLTRILTAGKRTADGSEFEKRTADGSEFESPKKKAKVE

SEQ ID NO: 3248 - protein, 2116 aa, synthetic construct
MPAAKRVKLDGGDKKYSIGLDIGTNSVGWAVITDEYKVPSKKFKVLGNTDRHSIKKNLIGALLFDSGETAEATRLKRTARRRYTRRKNRICYLQEIFSNEMAKVDDSFFHRLEESFLVEEDKKHERHPIFGNIVDEVAYHEKYPTIYHLRKKLVDSTDKADLRLIYLALAHMIKFRGHFLIEGDLNPDNSDVDKLFIQLVQTYNQLFEENPINASGVDAKAILSARLSKSRRLENLIAQLPGEKKNGLFGNLIALSLGLTPNFKSNFDLAEDAKLQLSKDTYDDDLDNLLAQIGDQYADLFLAAKNLSDAILLSDILRVNTEITKAPLSASMIKRYDEHHQDLTLLKALVRQQLPEKYKEIFFDQSKNGYAGYIDGGASQEEFYKFIKPILEKMDGTEELLVKLNREDLLRKQRTFDNGSIPHQIHLGELHAILRRQEDFYPFLKDNREKIEKILTFRIPYYVGPLARGNSRFAWMTRKSEETITPWNFEEVVDKGASAQSFIERMTNFDKNLPNEKVLPKHSLLYEYFTVYNELTKVKYVTEGMRKPAFLSGEQKKAIVDLLFKTNRKVTVKQLKEDYFKKIECFDSVEISGVEDRFNASLGTYHDLLKIIKDKDFLDNEENEDILEDIVLTLTLFEDREMIEERLKTYAHLFDDKVMKQLKRRRYTGWGRLSRKLINGIRDKQSGKTILDFLKSDGFANRNFMQLIHDDSLTFKEDIQKAQVSGQGDSLHEHIANLAGSPAIKKGILQTVKVVDELVKVMGRHKPENIVIEMARENQTTQKGQKNSRERMKRIEEGIKELGSQILKEHPVENTQLQNEKLYLYYLQNGRDMYVDQELDINRLSDYDVDHIVPQSFLKDDSIDNKVLTRSDKARGKSDNVPSEEVVKKMKNYWRQLLNAKLITQRKFDNLTKAERGGLSELDKAGFIKRQLVETRQITKHVAQILDSRMNTKYDENDKLIREVKVITLKSKLVSDFRKDFQFYKVREINNYHHAHDAYLNAVVGTALIKKYPKLESEFVYGDYKVYDVRKMIAKSEQEIGKATAKYFFYSNIMNFFKTEITLANGEIRKRPLIETNGETGEIVWDKGRDFATVRKVLSMPQVNIVKKTEVQTGGFSKESILPKRNSDKLIARKKDWDPKKYGGFDSPTVAYSVLVVAKVEKGKSKKLKSVKELLGITIMERSSFEKNPIDFLEAKGYKEVKKDLIIKLPKYSLFELENGRKRMLASAGELQKGNELALPSKYVNFLYLASHYEKLKGSPEDNEQKQLFVEQHKHYLDEIIEQISEFSKRVILADANLDKVLSAYNKHRDKPIREQAENIIHLFTLTNLGAPAAFKYFDTTIDRKRYTSTKEVLDATLIHQSITGLYETRIDLSQLGGDGGGGGEAAAKGSSGGWVQEISDSRPMLHIYLNGRRFLGLLNTGADKTCIAGRDWPANWPIHQTESSLQGLGMACGVARSSQPLRWQHEDKSGIIHPFVIPTLPFTLWGRDIMKDIKVRLMTDSPDDSQDLMIGAIESNLFADQISWKSDQPVWLNQWPLKQEKLQALQQLVTEQLQLGHLEESNSPWNTPVFVIKKKSGKWRLLQDLRAVNATMHDMGALQPGLPSPVAPPKGWEIIIIDLQDCFFNIKLHPEDCKRFAFSVPSPNFKRPYQRFQWKVLPQGMKNSPTLCQKFVDKAILTVRDKYQDSYIVHYMDDILLAHPSRSIVDEILTSMIQALNKHGLVVSTEKIQKYDNLKYLGTHIQGDSVSYQKLQIRTDKLRTLNDFQKLLGNINWIRPFLKLTTGELKPLFEILNPDSNPISTRKLTPEACKALQLMNERLSTARVKRLDLSQPWSLCILKTEYTPTACLWQDGVVEWIHLPHISPKVITPYDIFCTQLIIKGRHRSKELFSKDPDYIVVPYTKVQFDLLLQEKEDWPISLLGFLGEVHFHLPKDPLLTFTLQTAIIFPHMTSTTPLEKGIVIFTDGSANGRSVTYIQGREPIIKENTQNTAQQAEIVAVITAFEEVSQPFNLYTDSKYVTGLFPEIETATLSPRTKIYTELKHLQRLIHKRQEKFYIGHIRGHTGLPGPLAQGNAYADSLTRILTAGKRTADGSEFEKRTADGSEFESPKKKAKVE

SEQ ID NO: 3249 - protein, 2116 aa, synthetic construct
MPAAKRVKLDGGDKKYSIGLDIGTNSVGWAVITDEYKVPSKKFKVLGNTDRHSIKKNLIGALLFDSGETAEATRLKRTARRRYTRRKNRICYLQEIFSNEMAKVDDSFFHRLEESFLVEEDKKHERHPIFGNIVDEVAYHEKYPTIYHLRKKLVDSTDKADLRLIYLALAHMIKFRGHFLIEGDLNPDNSDVDKLFIQLVQTYNQLFEENPINASGVDAKAILSARLSKSRRLENLIAQLPGEKKNGLFGNLIALSLGLTPNFKSNFDLAEDAKLQLSKDTYDDDLDNLLAQIGDQYADLFLAAKNLSDAILLSDILRVNTEITKAPLSASMIKRYDEHHQDLTLLKALVRQQLPEKYKEIFFDQSKNGYAGYIDGGASQEEFYKFIKPILEKMDGTEELLVKLNREDLLRKQRTFDNGSIPHQIHLGELHAILRRQEDFYPFLKDNREKIEKILTFRIPYYVGPLARGNSRFAWMTRKSEETITPWNFEEVVDKGASAQSFIERMTNFDKNLPNEKVLPKHSLLYEYFTVYNELTKVKYVTEGMRKPAFLSGEQKKAIVDLLFKTNRKVTVKQLKEDYFKKIECFDSVEISGVEDRFNASLGTYHDLLKIIKDKDFLDNEENEDILEDIVLTLTLFEDREMIEERLKTYAHLFDDKVMKQLKRRRYTGWGRLSRKLINGIRDKQSGKTILDFLKSDGFANRNFMQLIHDDSLTFKEDIQKAQVSGQGDSLHEHIANLAGSPAIKKGILQTVKVVDELVKVMGRHKPENIVIEMARENQTTQKGQKNSRERMKRIEEGIKELGSQILKEHPVENTQLQNEKLYLYYLQNGRDMYVDQELDINRLSDYDVDHIVPQSFLKDDSIDNKVLTRSDKARGKSDNVPSEEVVKKMKNYWRQLLNAKLITQRKFDNLTKAERGGLSELDKAGFIKRQLVETRQITKHVAQILDSRMNTKYDENDKLIREVKVITLKSKLVSDFRKDFQFYKVREINNYHHAHDAYLNAVVGTALIKKYPKLESEFVYGDYKVYDVRKMIAKSEQEIGKATAKYFFYSNIMNFFKTEITLANGEIRKRPLIETNGETGEIVWDKGRDFATVRKVLSMPQVNIVKKTEVQTGGFSKESILPKRNSDKLIARKKDWDPKKYGGFDSPTVAYSVLVVAKVEKGKSKKLKSVKELLGITIMERSSFEKNPIDFLEAKGYKEVKKDLIIKLPKYSLFELENGRKRMLASAGELQKGNELALPSKYVNFLYLASHYEKLKGSPEDNEQKQLFVEQHKHYLDEIIEQISEFSKRVILADANLDKVLSAYNKHRDKPIREQAENIIHLFTLTNLGAPAAFKYFDTTIDRKRYTSTKEVLDATLIHQSITGLYETRIDLSQLGGDGGEAAAKGGGGSSGGWVQEISDSRPMLHIYLNGRRFLGLLNTGADKTCIAGRDWPANWPIHQTESSLQGLGMACGVARSSQPLRWQHEDKSGIIHPFVIPTLPFTLWGRDIMKDIKVRLMTDSPDDSQDLMIGAIESNLFADQISWKSDQPVWLNQWPLKQEKLQALQQLVTEQLQLGHLEESNSPWNTPVFVIKKKSGKWRLLQDLRAVNATMHDMGALQPGLPSPVAPPKGWEIIIIDLQDCFFNIKLHPEDCKRFAFSVPSPNFKRPYQRFQWKVLPQGMKNSPTLCQKFVDKAILTVRDKYQDSYIVHYMDDILLAHPSRSIVDEILTSMIQALNKHGLVVSTEKIQKYDNLKYLGTHIQGDSVSYQKLQIRTDKLRTLNDFQKLLGNINWIRPFLKLTTGELKPLFEILNPDSNPISTRKLTPEACKALQLMNERLSTARVKRLDLSQPWSLCILKTEYTPTACLWQDGVVEWIHLPHISPKVITPYDIFCTQLIIKGRHRSKELFSKDPDYIVVPYTKVQFDLLLQEKEDWPISLLGFLGEVHFHLPKDPLLTFTLQTAIIFPHMTSTTPLEKGIVIFTDGSANGRSVTYIQGREPIIKENTQNTAQQAEIVAVITAFEEVSQPFNLYTDSKYVTGLFPEIETATLSPRTKIYTELKHLQRLIHKRQEKFYIGHIRGHTGLPGPLAQGNAYADSLTRILTAGKRTADGSEFEKRTADGSEFESPKKKAKVE

SEQ ID NO: 3250 - protein, 2116 aa, synthetic construct
MPAAKRVKLDGGDKKYSIGLDIGTNSVGWAVITDEYKVPSKKFKVLGNTDRHSIKKNLIGALLFDSGETAEATRLKRTARRRYTRRKNRICYLQEIFSNEMAKVDDSFFHRLEESFLVEEDKKHERHPIFGNIVDEVAYHEKYPTIYHLRKKLVDSTDKADLRLIYLALAHMIKFRGHFLIEGDLNPDNSDVDKLFIQLVQTYNQLFEENPINASGVDAKAILSARLSKSRRLENLIAQLPGEKKNGLFGNLIALSLGLTPNFKSNFDLAEDAKLQLSKDTYDDDLDNLLAQIGDQYADLFLAAKNLSDAILLSDILRVNTEITKAPLSASMIKRYDEHHQDLTLLKALVRQQLPEKYKEIFFDQSKNGYAGYIDGGASQEEFYKFIKPILEKMDGTEELLVKLNREDLLRKQRTFDNGSIPHQIHLGELHAILRRQEDFYPFLKDNREKIEKILTFRIPYYVGPLARGNSRFAWMTRKSEETITPWNFEEVVDKGASAQSFIERMTNFDKNLPNEKVLPKHSLLYEYFTVYNELTKVKYVTEGMRKPAFLSGEQKKAIVDLLFKTNRKVTVKQLKEDYFKKIECFDSVEISGVEDRFNASLGTYHDLLKIIKDKDFLDNEENEDILEDIVLTLTLFEDREMIEERLKTYAHLFDDKVMKQLKRRRYTGWGRLSRKLINGIRDKQSGKTILDFLKSDGFANRNFMQLIHDDSLTFKEDIQKAQVSGQGDSLHEHIANLAGSPAIKKGILQTVKVVDELVKVMGRHKPENIVIEMARENQTTQKGQKNSRERMKRIEEGIKELGSQILKEHPVENTQLQNEKLYLYYLQNGRDMYVDQELDINRLSDYDVDHIVPQSFLKDDSIDNKVLTRSDKARGKSDNVPSEEVVKKMKNYWRQLLNAKLITQRKFDNLTKAERGGLSELDKAGFIKRQLVETRQITKHVAQILDSRMNTKYDENDKLIREVKVITLKSKLVSDFRKDFQFYKVREINNYHHAHDAYLNAVVGTALIKKYPKLESEFVYGDYKVYDVRKMIAKSEQEIGKATAKYFFYSNIMNFFKTEITLANGEIRKRPLIETNGETGEIVWDKGRDFATVRKVLSMPQVNIVKKTEVQTGGFSKESILPKRNSDKLIARKKDWDPKKYGGFDSPTVAYSVLVVAKVEKGKSKKLKSVKELLGITIMERSSFEKNPIDFLEAKGYKEVKKDLIIKLPKYSLFELENGRKRMLASAGELQKGNELALPSKYVNFLYLASHYEKLKGSPEDNEQKQLFVEQHKHYLDEIIEQISEFSKRVILADANLDKVLSAYNKHRDKPIREQAENIIHLFTLTNLGAPAAFKYFDTTIDRKRYTSTKEVLDATLIHQSITGLYETRIDLSQLGGDGGEAAAKGSSGGSGGVQEISDSRPMLHIYLNGRRFLGLLDTGADKTCIAGRDWPANWPIHQTESSLQGLGMACGVARSSQPLRWQHEDKSGIIHPFVIPTLPFTLWGRDIMKDIKVRLMTDSPDDSQDLMIGAIESNLFADQISWKSDQPVWLNQWPLKQEKLQALQQLVTEQLQLGHLEESNSPWNTPVFVIKKKSGKWRLLQDLRAVNATMHDMGALQPGLPSPPAVPKGWEIIIIDLQDCFFNIKLHPEDCKRFAFSVPSPNFKRPYQRFQWKVLPQGMKNSPTLCQKFVDKAILTVRDKYQDSYIVHYMDDILLAHPSRSIVDEILTSMIQALNKHGLVVSTEKIQKYDNLKYLGTHIQGDSVSYQKLQIRTDKLRTLNDFQKLLGNINWIRPFLKLTTGELKPLFEILNPDSNPISTRKLTPEACKALQLMNERLSTARVKRLDLSQPWSLCILKTEYTPTACLWQDGVVEWIHLPHISPKVITPYDIFCTQLIIKGRHRSKELFSKDPDYIVVPYTKVQFDLLLQEKEDWPISLLGFLGEVHFHLPKDPLLTFTLQTAIIFPHMTSTTPLEKGIVIFTDGSANGRSVTYIQGREPIIKENTQNTAQQAEIVAVITAFEEVSQPFNLYTDSKYVTGLFPEIETATLSPRTKIYTELKHLQRLIHKRQEKFYIGHIRGHTGLPGPLAQGNAYADSLTRILTAAGKRTADGSEFEKRTADGSEFESPKKKAKVE

SEQ ID NO: 3251 - protein, 2116 aa, synthetic construct
MPAAKRVKLDGGDKKYSIGLDIGTNSVGWAVITDEYKVPSKKFKVLGNTDRHSIKKNLIGALLFDSGETAEATRLKRTARRRYTRRKNRICYLQEIFSNEMAKVDDSFFHRLEESFLVEEDKKHERHPIFGNIVDEVAYHEKYPTIYHLRKKLVDSTDKADLRLIYLALAHMIKFRGHFLIEGDLNPDNSDVDKLFIQLVQTYNQLFEENPINASGVDAKAILSARLSKSRRLENLIAQLPGEKKNGLFGNLIALSLGLTPNFKSNFDLAEDAKLQLSKDTYDDDLDNLLAQIGDQYADLFLAAKNLSDAILLSDILRVNTEITKAPLSASMIKRYDEHHQDLTLLKALVRQQLPEKYKEIFFDQSKNGYAGYIDGGASQEEFYKFIKPILEKMDGTEELLVKLNREDLLRKQRTFDNGSIPHQIHLGELHAILRRQEDFYPFLKDNREKIEKILTFRIPYYVGPLARGNSRFAWMTRKSEETITPWNFEEVVDKGASAQSFIERMTNFDKNLPNEKVLPKHSLLYEYFTVYNELTKVKYVTEGMRKPAFLSGEQKKAIVDLLFKTNRKVTVKQLKEDYFKKIECFDSVEISGVEDRFNASLGTYHDLLKIIKDKDFLDNEENEDILEDIVLTLTLFEDREMIEERLKTYAHLFDDKVMKQLKRRRYTGWGRLSRKLINGIRDKQSGKTILDFLKSDGFANRNFMQLIHDDSLTFKEDIQKAQVSGQGDSLHEHIANLAGSPAIKKGILQTVKVVDELVKVMGRHKPENIVIEMARENQTTQKGQKNSRERMKRIEEGIKELGSQILKEHPVENTQLQNEKLYLYYLQNGRDMYVDQELDINRLSDYDVDHIVPQSFLKDDSIDNKVLTRSDKARGKSDNVPSEEVVKKMKNYWRQLLNAKLITQRKFDNLTKAERGGLSELDKAGFIKRQLVETRQITKHVAQILDSRMNTKYDENDKLIREVKVITLKSKLVSDFRKDFQFYKVREINNYHHAHDAYLNAVVGTALIKKYPKLESEFVYGDYKVYDVRKMIAKSEQEIGKATAKYFFYSNIMNFFKTEITLANGEIRKRPLIETNGETGEIVWDKGRDFATVRKVLSMPQVNIVKKTEVQTGGFSKESILPKRNSDKLIARKKDWDPKKYGGFDSPTVAYSVLVVAKVEKGKSKKLKSVKELLGITIMERSSFEKNPIDFLEAKGYKEVKKDLIIKLPKYSLFELENGRKRMLASAGELQKGNELALPSKYVNFLYLASHYEKLKGSPEDNEQKQLFVEQHKHYLDEIIEQISEFSKRVILADANLDKVLSAYNKHRDKPIREQAENIIHLFTLTNLGAPAAFKYFDTTIDRKRYTSTKEVLDATLIHQSITGLYETRIDLSQLGGDGGPAPEAAAKGGSGGVQEISDSRPMLHIYLNGRRFLGLLDTGADKTCIAGRDWPANWPIHQTESSLQGLGMACGVARSSQPLRWQHEDKSGIIHPFVIPTLPFTLWGRDIMKDIKVRLMTDSPDDSQDLMIGAIESNLFADQISWKSDQPVWLNQWPLKQEKLQALQQLVTEQLQLGHLEESNSPWNTPVFVIKKKSGKWRLLQDLRAVNATMHDMGALQPGLPSPPAVPKGWEIIIIDLQDCFFNIKLHPEDCKRFAFSVPSPNFKRPYQRFQWKVLPQGMKNSPTLCQKFVDKAILTVRDKYQDSYIVHYMDDILLAHPSRSIVDEILTSMIQALNKHGLVVSTEKIQKYDNLKYLGTHIQGDSVSYQKLQIRTDKLRTLNDFQKLLGNINWIRPFLKLTTGELKPLFEILNPDSNPISTRKLTPEACKALQLMNERLSTARVKRLDLSQPWSLCILKTEYTPTACLWQDGVVEWIHLPHISPKVITPYDIFCTQLIIKGRHRSKELFSKDPDYIVVPYTKVQFDLLLQEKEDWPISLLGFLGEVHFHLPKDPLLTFTLQTAIIFPHMTSTTPLEKGIVIFTDGSANGRSVTYIQGREPIIKENTQNTAQQAEIVAVITAFEEVSQPFNLYTDSKYVTGLFPEIETATLSPRTKIYTELKHLQRLIHKRQEKFYIGHIRGHTGLPGPLAQGNAYADSLTRILTAAGKRTADGSEFEKRTADGSEFESPKKKAKVE

SEQ ID NO: 3252 - protein, 2116 aa, synthetic construct
MPAAKRVKLDGGDKKYSIGLDIGTNSVGWAVITDEYKVPSKKFKVLGNTDRHSIKKNLIGALLFDSGETAEATRLKRTARRRYTRRKNRICYLQEIFSNEMAKVDDSFFHRLEESFLVEEDKKHERHPIFGNIVDEVAYHEKYPTIYHLRKKLVDSTDKADLRLIYLALAHMIKFRGHFLIEGDLNPDNSDVDKLFIQLVQTYNQLFEENPINASGVDAKAILSARLSKSRRLENLIAQLPGEKKNGLFGNLIALSLGLTPNFKSNFDLAEDAKLQLSKDTYDDDLDNLLAQIGDQYADLFLAAKNLSDAILLSDILRVNTEITKAPLSASMIKRYDEHHQDLTLLKALVRQQLPEKYKEIFFDQSKNGYAGYIDGGASQEEFYKFIKPILEKMDGTEELLVKLNREDLLRKQRTFDNGSIPHQIHLGELHAILRRQEDFYPFLKDNREKIEKILTFRIPYYVGPLARGNSRFAWMTRKSEETITPWNFEEVVDKGASAQSFIERMTNFDKNLPNEKVLPKHSLLYEYFTVYNELTKVKYVTEGMRKPAFLSGEQKKAIVDLLFKTNRKVTVKQLKEDYFKKIECFDSVEISGVEDRFNASLGTYHDLLKIIKDKDFLDNEENEDILEDIVLTLTLFEDREMIEERLKTYAHLFDDKVMKQLKRRRYTGWGRLSRKLINGIRDKQSGKTILDFLKSDGFANRNFMQLIHDDSLTFKEDIQKAQVSGQGDSLHEHIANLAGSPAIKKGILQTVKVVDELVKVMGRHKPENIVIEMARENQTTQKGQKNSRERMKRIEEGIKELGSQILKEHPVENTQLQNEKLYLYYLQNGRDMYVDQELDINRLSDYDVDHIVPQSFLKDDSIDNKVLTRSDKARGKSDNVPSEEVVKKMKNYWRQLLNAKLITQRKFDNLTKAERGGLSELDKAGFIKRQLVETRQITKHVAQILDSRMNTKYDENDKLIREVKVITLKSKLVSDFRKDFQFYKVREINNYHHAHDAYLNAVVGTALIKKYPKLESEFVYGDYKVYDVRKMIAKSEQEIGKATAKYFFYSNIMNFFKTEITLANGEIRKRPLIETNGETGEIVWDKGRDFATVRKVLSMPQVNIVKKTEVQTGGFSKESILPKRNSDKLIARKKDWDPKKYGGFDSPTVAYSVLVVAKVEKGKSKKLKSVKELLGITIMERSSFEKNPIDFLEAKGYKEVKKDLIIKLPKYSLFELENGRKRMLASAGELQKGNELALPSKYVNFLYLASHYEKLKGSPEDNEQKQLFVEQHKHYLDEIIEQISEFSKRVILADANLDKVLSAYNKHRDKPIREQAENIIHLFTLTNLGAPAAFKYFDTTIDRKRYTSTKEVLDATLIHQSITGLYETRIDLSQLGGDGGGGGGSSEAAAKGGVQEISDSRPMLHIYLNGRRFLGLLDTGADKTCIAGRDWPANWPIHQTESSLQGLGMACGVARSSQPLRWQHEDKSGIIHPFVIPTLPFTLWGRDIMKDIKVRLMTDSPDDSQDLMIGAIESNLFADQISWKSDQPVWLNQWPLKQEKLQALQQLVTEQLQLGHLEESNSPWNTPVFVIKKKSGKWRLLQDLRAVNATMHDMGALQPGLPSPVAVPKGWEIIIIDLQDCFFNIKLHPEDCKRFAFSVPSPNFKRPYQRFQWKVLPQGMKNSPTLCQKFVDKAILTVRDKYQDSYIVHYMDDILLAHPSRSIVDEILTSMIQALNKHGLVVSTEKIQKYDNLKYLGTHIQGDSVSYQKLQIRTDKLRTLNDFQKLLGNINWIRPFLKLTTGELKPLFEILNPDSNPISTRKLTPEACKALQLMNERLSTARVKRLDLSQPWSLCILKTEYTPTACLWQDGVVEWIHLPHISPKVITPYDIFCTQLIIKGRHRSKELFSKDPDYIVVPYTKVQFDLLLQEKEDWPISLLGFLGEVHFHLPKDPLLTFTLQTAIIFPHMTSTTPLEKGIVIFTDGSANGRSVTYIQGREPIIKENTQNTAQQAEIVAVITAFEEVSQPFNLYTDSKYVTGLFPEIETATLSPRTKIYTELKHLQRLIHKRQEKFYIGHIRGHTGLPGPLAQGNAYADSLTRILTAAGKRTADGSEFEKRTADGSEFESPKKKAKVE

SEQ ID NO: 3253 - protein, 2114 aa, synthetic construct
MPAAKRVKLDGGDKKYSIGLDIGTNSVGWAVITDEYKVPSKKFKVLGNTDRHSIKKNLIGALLFDSGETAEATRLKRTARRRYTRRKNRICYLQEIFSNEMAKVDDSFFHRLEESFLVEEDKKHERHPIFGNIVDEVAYHEKYPTIYHLRKKLVDSTDKADLRLIYLALAHMIKFRGHFLIEGDLNPDNSDVDKLFIQLVQTYNQLFEENPINASGVDAKAILSARLSKSRRLENLIAQLPGEKKNGLFGNLIALSLGLTPNFKSNFDLAEDAKLQLSKDTYDDDLDNLLAQIGDQYADLFLAAKNLSDAILLSDILRVNTEITKAPLSASMIKRYDEHHQDLTLLKALVRQQLPEKYKEIFFDQSKNGYAGYIDGGASQEEFYKFIKPILEKMDGTEELLVKLNREDLLRKQRTFDNGSIPHQIHLGELHAILRRQEDFYPFLKDNREKIEKILTFRIPYYVGPLARGNSRFAWMTRKSEETITPWNFEEVVDKGASAQSFIERMTNFDKNLPNEKVLPKHSLLYEYFTVYNELTKVKYVTEGMRKPAFLSGEQKKAIVDLLFKTNRKVTVKQLKEDYFKKIECFDSVEISGVEDRFNASLGTYHDLLKIIKDKDFLDNEENEDILEDIVLTLTLFEDREMIEERLKTYAHLFDDKVMKQLKRRRYTGWGRLSRKLINGIRDKQSGKTILDFLKSDGFANRNFMQLIHDDSLTFKEDIQKAQVSGQGDSLHEHIANLAGSPAIKKGILQTVKVVDELVKVMGRHKPENIVIEMARENQTTQKGQKNSRERMKRIEEGIKELGSQILKEHPVENTQLQNEKLYLYYLQNGRDMYVDQELDINRLSDYDVDHIVPQSFLKDDSIDNKVLTRSDKARGKSDNVPSEEVVKKMKNYWRQLLNAKLITQRKFDNLTKAERGGLSELDKAGFIKRQLVETRQITKHVAQILDSRMNTKYDENDKLIREVKVITLKSKLVSDFRKDFQFYKVREINNYHHAHDAYLNAVVGTALIKKYPKLESEFVYGDYKVYDVRKMIAKSEQEIGKATAKYFFYSNIMNFFKTEITLANGEIRKRPLIETNGETGEIVWDKGRDFATVRKVLSMPQVNIVKKTEVQTGGFSKESILPKRNSDKLIARKKDWDPKKYGGFDSPTVAYSVLVVAKVEKGKSKKLKSVKELLGITIMERSSFEKNPIDFLEAKGYKEVKKDLIIKLPKYSLFELENGRKRMLASAGELQKGNELALPSKYVNFLYLASHYEKLKGSPEDNEQKQLFVEQHKHYLDEIIEQISEFSKRVILADANLDKVLSAYNKHRDKPIREQAENIIHLFTLTNLGAPAAFKYFDTTIDRKRYTSTKEVLDATLIHQSITGLYETRIDLSQLGGDGGGGGGGSGSSGGVQEISDSRPMLHIYLNGRRFLGLLDTGADKTCIAGRDWPANWPIHQTESSLQGLGMACGVARSSQPLRWQHEDKSGIIHPFVIPTLPFTLWGRDIMKDIKVRLMTDSPDDSQDLMIGAIESNLFADQISWKSDQPVWLNQWPLKQEKLQALQQLVTEQLQLGHLEESNSPWNTPVFVIKKKSGKWRLLQDLRAVNATMHDMGALQPGLPSPVAVPKGWEIIIIDLQDCFFNIKLHPEDCKRFAFSVPSPNFKRPYQRFQWKVLPQGMKNSPTLCQKFVDKAILTVRDKYQDSYIVHYMDDILLAHPSRSIVDEILTSMIQALNKHGLVVSTEKIQKYDNLKYLGTHIQGDSVSYQKLQIRTDKLRTLNDFQKLLGNINWIRPFLKLTTGELKPLFEILNPDSNPISTRKLTPEACKALQLMNERLSTARVKRLDLSQPWSLCILKTEYTPTACLWQDGVVEWIHLPHISPKVITPYDIFCTQLIIKGRHRSKELFSKDPDYIVVPYTKVQFDLLLQEKEDWPISLLGFLGEVHFHLPKDPLLTFTLQTAIIFPHMTSTTPLEKGIVIFTDGSANGRSVTYIQGREPIIKENTQNTAQQAEIVAVITAFEEVSQPFNLYTDSKYVTGLFPEIETATLSPRTKIYTELKHLQRLIHKRQEKFYIGHIRGHTGLPGPLAQGNAYADSLTRILTAAGKRTADGSEFEKRTADGSEFESPKKKAKVE

SEQ ID NO: 3254 - protein, 2125 aa, synthetic construct
MPAAKRVKLDGGDKKYSIGLDIGTNSVGWAVITDEYKVPSKKFKVLGNTDRHSIKKNLIGALLFDSGETAEATRLKRTARRRYTRRKNRICYLQEIFSNEMAKVDDSFFHRLEESFLVEEDKKHERHPIFGNIVDEVAYHEKYPTIYHLRKKLVDSTDKADLRLIYLALAHMIKFRGHFLIEGDLNPDNSDVDKLFIQLVQTYNQLFEENPINASGVDAKAILSARLSKSRRLENLIAQLPGEKKNGLFGNLIALSLGLTPNFKSNFDLAEDAKLQLSKDTYDDDLDNLLAQIGDQYADLFLAAKNLSDAILLSDILRVNTEITKAPLSASMIKRYDEHHQDLTLLKALVRQQLPEKYKEIFFDQSKNGYAGYIDGGASQEEFYKFIKPILEKMDGTEELLVKLNREDLLRKQRTFDNGSIPHQIHLGELHAILRRQEDFYPFLKDNREKIEKILTFRIPYYVGPLARGNSRFAWMTRKSEETITPWNFEEVVDKGASAQSFIERMTNFDKNLPNEKVLPKHSLLYEYFTVYNELTKVKYVTEGMRKPAFLSGEQKKAIVDLLFKTNRKVTVKQLKEDYFKKIECFDSVEISGVEDRFNASLGTYHDLLKIIKDKDFLDNEENEDILEDIVLTLTLFEDREMIEERLKTYAHLFDDKVMKQLKRRRYTGWGRLSRKLINGIRDKQSGKTILDFLKSDGFANRNFMQLIHDDSLTFKEDIQKAQVSGQGDSLHEHIANLAGSPAIKKGILQTVKVVDELVKVMGRHKPENIVIEMARENQTTQKGQKNSRERMKRIEEGIKELGSQILKEHPVENTQLQNEKLYLYYLQNGRDMYVDQELDINRLSDYDVDHIVPQSFLKDDSIDNKVLTRSDKARGKSDNVPSEEVVKKMKNYWRQLLNAKLITQRKFDNLTKAERGGLSELDKAGFIKRQLVETRQITKHVAQILDSRMNTKYDENDKLIREVKVITLKSKLVSDFRKDFQFYKVREINNYHHAHDAYLNAVVGTALIKKYPKLESEFVYGDYKVYDVRKMIAKSEQEIGKATAKYFFYSNIMNFFKTEITLANGEIRKRPLIETNGETGEIVWDKGRDFATVRKVLSMPQVNIVKKTEVQTGGFSKESILPKRNSDKLIARKKDWDPKKYGGFDSPTVAYSVLVVAKVEKGKSKKLKSVKELLGITIMERSSFEKNPIDFLEAKGYKEVKKDLIIKLPKYSLFELENGRKRMLASAGELQKGNELALPSKYVNFLYLASHYEKLKGSPEDNEQKQLFVEQHKHYLDEIIEQISEFSKRVILADANLDKVLSAYNKHRDKPIREQAENIIHLFTLTNLGAPAAFKYFDTTIDRKRYTSTKEVLDATLIHQSITGLYETRIDLSQLGGDGGGGGGSGGGGSGGGGSGGGGSGGVQEISDSRPMLHIYLNGRRFLGLLDTGADKTCIAGRDWPANWPIHQTESSLQGLGMACGVARSSQPLRWQHEDKSGIIHPFVIPTLPFTLWGRDIMKDIKVRLMTDSPDDSQDLMIGAIESNLFADQISWKSDQPVWLNQWPLKQEKLQALQQLVTEQLQLGHLEESNSPWNTPVFVIKKKSGKWRLLQDLRAVNATMHDMGALQPGLPSPVAVPKGWEIIIIDLQDCFFNIKLHPEDCKRFAFSVPSPNFKRPYQRFQWKVLPQGMKNSPTLCQKFVDKAILTVRDKYQDSYIVHYMDDILLAHPSRSIVDEILTSMIQALNKHGLVVSTEKIQKYDNLKYLGTHIQGDSVSYQKLQIRTDKLRTLNDFQKLLGNINWIRPFLKLTTGELKPLFEILNPDSNPISTRKLTPEACKALQLMNERLSTARVKRLDLSQPWSLCILKTEYTPTACLWQDGVVEWIHLPHISPKVITPYDIFCTQLIIKGRHRSKELFSKDPDYIVVPYTKVQFDLLLQEKEDWPISLLGFLGEVHFHLPKDPLLTFTLQTAIIFPHMTSTTPLEKGIVIFTDGSANGRSVTYIQGREPIIKENTQNTAQQAEIVAVITAFEEVSQPFNLYTDSKYVTGLFPEIETATLSPRTKIYTELKHLQRLIHKRQEKFYIGHIRGHTGLPGPLAQGNAYADSLTRILTAAGKRTADGSEFEKRTADGSEFESPKKKAKVE

SEQ ID NO: 3255 - protein, 2116 aa, synthetic construct
MPAAKRVKLDGGDKKYSIGLDIGTNSVGWAVITDEYKVPSKKFKVLGNTDRHSIKKNLIGALLFDSGETAEATRLKRTARRRYTRRKNRICYLQEIFSNEMAKVDDSFFHRLEESFLVEEDKKHERHPIFGNIVDEVAYHEKYPTIYHLRKKLVDSTDKADLRLIYLALAHMIKFRGHFLIEGDLNPDNSDVDKLFIQLVQTYNQLFEENPINASGVDAKAILSARLSKSRRLENLIAQLPGEKKNGLFGNLIALSLGLTPNFKSNFDLAEDAKLQLSKDTYDDDLDNLLAQIGDQYADLFLAAKNLSDAILLSDILRVNTEITKAPLSASMIKRYDEHHQDLTLLKALVRQQLPEKYKEIFFDQSKNGYAGYIDGGASQEEFYKFIKPILEKMDGTEELLVKLNREDLLRKQRTFDNGSIPHQIHLGELHAILRRQEDFYPFLKDNREKIEKILTFRIPYYVGPLARGNSRFAWMTRKSEETITPWNFEEVVDKGASAQSFIERMTNFDKNLPNEKVLPKHSLLYEYFTVYNELTKVKYVTEGMRKPAFLSGEQKKAIVDLLFKTNRKVTVKQLKEDYFKKIECFDSVEISGVEDRFNASLGTYHDLLKIIKDKDFLDNEENEDILEDIVLTLTLFEDREMIEERLKTYAHLFDDKVMKQLKRRRYTGWGRLSRKLINGIRDKQSGKTILDFLKSDGFANRNFMQLIHDDSLTFKEDIQKAQVSGQGDSLHEHIANLAGSPAIKKGILQTVKVVDELVKVMGRHKPENIVIEMARENQTTQKGQKNSRERMKRIEEGIKELGSQILKEHPVENTQLQNEKLYLYYLQNGRDMYVDQELDINRLSDYDVDHIVPQSFLKDDSIDNKVLTRSDKARGKSDNVPSEEVVKKMKNYWRQLLNAKLITQRKFDNLTKAERGGLSELDKAGFIKRQLVETRQITKHVAQILDSRMNTKYDENDKLIREVKVITLKSKLVSDFRKDFQFYKVREINNYHHAHDAYLNAVVGTALIKKYPKLESEFVYGDYKVYDVRKMIAKSEQEIGKATAKYFFYSNIMNFFKTEITLANGEIRKRPLIETNGETGEIVWDKGRDFATVRKVLSMPQVNIVKKTEVQTGGFSKESILPKRNSDKLIARKKDWDPKKYGGFDSPTVAYSVLVVAKVEKGKSKKLKSVKELLGITIMERSSFEKNPIDFLEAKGYKEVKKDLIIKLPKYSLFELENGRKRMLASAGELQKGNELALPSKYVNFLYLASHYEKLKGSPEDNEQKQLFVEQHKHYLDEIIEQISEFSKRVILADANLDKVLSAYNKHRDKPIREQAENIIHLFTLTNLGAPAAFKYFDTTIDRKRYTSTKEVLDATLIHQSITGLYETRIDLSQLGGDGGPAPEAAAKGGGGGVQEISDSRPMLHIYLNGRRFLGLLDTGADKTCIAGRDWPANWPIHQTESSLQGLGMACGVARSSQPLRWQHEDKSGIIHPFVIPTLPFTLWGRDIMKDIKVRLMTDSPDDSQDLMIGAIESNLFADQISWKSDQPVWLNQWPLKQEKLQALQQLVTEQLQLGHLEESNSPWNTPVFVIKKKSGKWRLLQDLRAVNATMHDMGALQPGLPSPVAVPKGWEIIIIDLQDCFFNIKLHPEDCKRFAFSVPSPNFKRPYQRFQWKVLPQGMKNSPTLCQKFVDKAILTVRDKYQDSYIVHYMDDILLAHPSRSIVDEILTSMIQALNKHGLVVSTEKIQKYDNLKYLGTHIQGDSVSYQKLQIRTDKLRTLNDFQKLLGNINWIRPFLKLTTGELKPLFEILNPDSNPISTRKLTPEACKALQLMNERLSTARVKRLDLSQPWSLCILKTEYTPTACLWQDGVVEWIHLPHISPKVITPYDIFCTQLIIKGRHRSKELFSKDPDYIVVPYTKVQFDLLLQEKEDWPISLLGFLGEVHFHLPKDPLLTFTLQTAIIFPHMTSTTPLEKGIVIFTDGSANGRSVTYIQGREPIIKENTQNTAQQAEIVAVITAFEEVSQPFNLYTDSKYVTGLFPEIETATLSPRTKIYTELKHLQRLIHKRQEKFYIGHIRGHTGLPGPLAQGNAYADSLTRILTAAGKRTADGSEFEKRTADGSEFESPKKKAKVE

SEQ ID NO: 3256 - protein, 2112 aa, synthetic construct
MPAAKRVKLDGGDKKYSIGLDIGTNSVGWAVITDEYKVPSKKFKVLGNTDRHSIKKNLIGALLFDSGETAEATRLKRTARRRYTRRKNRICYLQEIFSNEMAKVDDSFFHRLEESFLVEEDKKHERHPIFGNIVDEVAYHEKYPTIYHLRKKLVDSTDKADLRLIYLALAHMIKFRGHFLIEGDLNPDNSDVDKLFIQLVQTYNQLFEENPINASGVDAKAILSARLSKSRRLENLIAQLPGEKKNGLFGNLIALSLGLTPNFKSNFDLAEDAKLQLSKDTYDDDLDNLLAQIGDQYADLFLAAKNLSDAILLSDILRVNTEITKAPLSASMIKRYDEHHQDLTLLKALVRQQLPEKYKEIFFDQSKNGYAGYIDGGASQEEFYKFIKPILEKMDGTEELLVKLNREDLLRKQRTFDNGSIPHQIHLGELHAILRRQEDFYPFLKDNREKIEKILTFRIPYYVGPLARGNSRFAWMTRKSEETITPWNFEEVVDKGASAQSFIERMTNFDKNLPNEKVLPKHSLLYEYFTVYNELTKVKYVTEGMRKPAFLSGEQKKAIVDLLFKTNRKVTVKQLKEDYFKKIECFDSVEISGVEDRFNASLGTYHDLLKIIKDKDFLDNEENEDILEDIVLTLTLFEDREMIEERLKTYAHLFDDKVMKQLKRRRYTGWGRLSRKLINGIRDKQSGKTILDFLKSDGFANRNFMQLIHDDSLTFKEDIQKAQVSGQGDSLHEHIANLAGSPAIKKGILQTVKVVDELVKVMGRHKPENIVIEMARENQTTQKGQKNSRERMKRIEEGIKELGSQILKEHPVENTQLQNEKLYLYYLQNGRDMYVDQELDINRLSDYDVDHIVPQSFLKDDSIDNKVLTRSDKARGKSDNVPSEEVVKKMKNYWRQLLNAKLITQRKFDNLTKAERGGLSELDKAGFIKRQLVETRQITKHVAQILDSRMNTKYDENDKLIREVKVITLKSKLVSDFRKDFQFYKVREINNYHHAHDAYLNAVVGTALIKKYPKLESEFVYGDYKVYDVRKMIAKSEQEIGKATAKYFFYSNIMNFFKTEITLANGEIRKRPLIETNGETGEIVWDKGRDFATVRKVLSMPQVNIVKKTEVQTGGFSKESILPKRNSDKLIARKKDWDPKKYGGFDSPTVAYSVLVVAKVEKGKSKKLKSVKELLGITIMERSSFEKNPIDFLEAKGYKEVKKDLIIKLPKYSLFELENGRKRMLASAGELQKGNELALPSKYVNFLYLASHYEKLKGSPEDNEQKQLFVEQHKHYLDEIIEQISEFSKRVILADANLDKVLSAYNKHRDKPIREQAENIIHLFTLTNLGAPAAFKYFDTTIDRKRYTSTKEVLDATLIHQSITGLYETRIDLSQLGGDGGPAPAPAPGGVQEISDSRPMLHIYLNGRRFLGLLDTGADKTCIAGRDWPANWPIHQTESSLQGLGMACGVARSSQPLRWQHEDKSGIIHPFVIPTLPFTLWGRDIMKDIKVRLMTDSPDDSQDLMIGAIESNLFADQISWKSDQPVWLNQWPLKQEKLQALQQLVTEQLQLGHLEESNSPWNTPVFVIKKKSGKWRLLQDLRAVNATMHDMGALQPGLPSPVAVPKGWEIIIIDLQDCFFNIKLHPEDCKRFAFSVPSPNFKRPYQRFQWKVLPQGMKNSPTLCQKFVDKAILTVRDKYQDSYIVHYMDDILLAHPSRSIVDEILTSMIQALNKHGLVVSTEKIQKYDNLKYLGTHIQGDSVSYQKLQIRTDKLRTLNDFQKLLGNINWIRPFLKLTTGELKPLFEILNPDSNPISTRKLTPEACKALQLMNERLSTARVKRLDLSQPWSLCILKTEYTPTACLWQDGVVEWIHLPHISPKVITPYDIFCTQLIIKGRHRSKELFSKDPDYIVVPYTKVQFDLLLQEKEDWPISLLGFLGEVHFHLPKDPLLTFTLQTAIIFPHMTSTTPLEKGIVIFTDGSANGRSVTYIQGREPIIKENTQNTAQQAEIVAVITAFEEVSQPFNLYTDSKYVTGLFPEIETATLSPRTKIYTELKHLQRLIHKRQEKFYIGHIRGHTGLPGPLAQGNAYADSLTRILTAAGKRTADGSEFEKRTADGSEFESPKKKAKVE

SEQ ID NO: 3257 - protein, 2116 aa, synthetic construct
MPAAKRVKLDGGDKKYSIGLDIGTNSVGWAVITDEYKVPSKKFKVLGNTDRHSIKKNLIGALLFDSGETAEATRLKRTARRRYTRRKNRICYLQEIFSNEMAKVDDSFFHRLEESFLVEEDKKHERHPIFGNIVDEVAYHEKYPTIYHLRKKLVDSTDKADLRLIYLALAHMIKFRGHFLIEGDLNPDNSDVDKLFIQLVQTYNQLFEENPINASGVDAKAILSARLSKSRRLENLIAQLPGEKKNGLFGNLIALSLGLTPNFKSNFDLAEDAKLQLSKDTYDDDLDNLLAQIGDQYADLFLAAKNLSDAILLSDILRVNTEITKAPLSASMIKRYDEHHQDLTLLKALVRQQLPEKYKEIFFDQSKNGYAGYIDGGASQEEFYKFIKPILEKMDGTEELLVKLNREDLLRKQRTFDNGSIPHQIHLGELHAILRRQEDFYPFLKDNREKIEKILTFRIPYYVGPLARGNSRFAWMTRKSEETITPWNFEEVVDKGASAQSFIERMTNFDKNLPNEKVLPKHSLLYEYFTVYNELTKVKYVTEGMRKPAFLSGEQKKAIVDLLFKTNRKVTVKQLKEDYFKKIECFDSVEISGVEDRFNASLGTYHDLLKIIKDKDFLDNEENEDILEDIVLTLTLFEDREMIEERLKTYAHLFDDKVMKQLKRRRYTGWGRLSRKLINGIRDKQSGKTILDFLKSDGFANRNFMQLIHDDSLTFKEDIQKAQVSGQGDSLHEHIANLAGSPAIKKGILQTVKVVDELVKVMGRHKPENIVIEMARENQTTQKGQKNSRERMKRIEEGIKELGSQILKEHPVENTQLQNEKLYLYYLQNGRDMYVDQELDINRLSDYDVDHIVPQSFLKDDSIDNKVLTRSDKARGKSDNVPSEEVVKKMKNYWRQLLNAKLITQRKFDNLTKAERGGLSELDKAGFIKRQLVETRQITKHVAQILDSRMNTKYDENDKLIREVKVITLKSKLVSDFRKDFQFYKVREINNYHHAHDAYLNAVVGTALIKKYPKLESEFVYGDYKVYDVRKMIAKSEQEIGKATAKYFFYSNIMNFFKTEITLANGEIRKRPLIETNGETGEIVWDKGRDFATVRKVLSMPQVNIVKKTEVQTGGFSKESILPKRNSDKLIARKKDWDPKKYGGFDSPTVAYSVLVVAKVEKGKSKKLKSVKELLGITIMERSSFEKNPIDFLEAKGYKEVKKDLIIKLPKYSLFELENGRKRMLASAGELQKGNELALPSKYVNFLYLASHYEKLKGSPEDNEQKQLFVEQHKHYLDEIIEQISEFSKRVILADANLDKVLSAYNKHRDKPIREQAENIIHLFTLTNLGAPAAFKYFDTTIDRKRYTSTKEVLDATLIHQSITGLYETRIDLSQLGGDGGEAAAKPAPGGGGGVQEISDSRPMLHIYLNGRRFLGLLDTGADKTCIAGRDWPANWPIHQTESSLQGLGMACGVARSSQPLRWQHEDKSGIIHPFVIPTLPFTLWGRDIMKDIKVRLMTDSPDDSQDLMIGAIESNLFADQISWKSDQPVWLNQWPLKQEKLQALQQLVTEQLQLGHLEESNSPWNTPVFVIKKKSGKWRLLQDLRAVNATMHDMGALQPGLPSPVAVPKGWEIIIIDLQDCFFNIKLHPEDCKRFAFSVPSPNFKRPYQRFQWKVLPQGMKNSPTLCQKFVDKAILTVRDKYQDSYIVHYMDDILLAHPSRSIVDEILTSMIQALNKHGLVVSTEKIQKYDNLKYLGTHIQGDSVSYQKLQIRTDKLRTLNDFQKLLGNINWIRPFLKLTTGELKPLFEILNPDSNPISTRKLTPEACKALQLMNERLSTARVKRLDLSQPWSLCILKTEYTPTACLWQDGVVEWIHLPHISPKVITPYDIFCTQLIIKGRHRSKELFSKDPDYIVVPYTKVQFDLLLQEKEDWPISLLGFLGEVHFHLPKDPLLTFTLQTAIIFPHMTSTTPLEKGIVIFTDGSANGRSVTYIQGREPIIKENTQNTAQQAEIVAVITAFEEVSQPFNLYTDSKYVTGLFPEIETATLSPRTKIYTELKHLQRLIHKRQEKFYIGHIRGHTGLPGPLAQGNAYADSLTRILTAAGKRTADGSEFEKRTADGSEFESPKKKAKVE

SEQ ID NO: 3258 - protein, 2116 aa, synthetic construct
MPAAKRVKLDGGDKKYSIGLDIGTNSVGWAVITDEYKVPSKKFKVLGNTDRHSIKKNLIGALLFDSGETAEATRLKRTARRRYTRRKNRICYLQEIFSNEMAKVDDSFFHRLEESFLVEEDKKHERHPIFGNIVDEVAYHEKYPTIYHLRKKLVDSTDKADLRLIYLALAHMIKFRGHFLIEGDLNPDNSDVDKLFIQLVQTYNQLFEENPINASGVDAKAILSARLSKSRRLENLIAQLPGEKKNGLFGNLIALSLGLTPNFKSNFDLAEDAKLQLSKDTYDDDLDNLLAQIGDQYADLFLAAKNLSDAILLSDILRVNTEITKAPLSASMIKRYDEHHQDLTLLKALVRQQLPEKYKEIFFDQSKNGYAGYIDGGASQEEFYKFIKPILEKMDGTEELLVKLNREDLLRKQRTFDNGSIPHQIHLGELHAILRRQEDFYPFLKDNREKIEKILTFRIPYYVGPLARGNSRFAWMTRKSEETITPWNFEEVVDKGASAQSFIERMTNFDKNLPNEKVLPKHSLLYEYFTVYNELTKVKYVTEGMRKPAFLSGEQKKAIVDLLFKTNRKVTVKQLKEDYFKKIECFDSVEISGVEDRFNASLGTYHDLLKIIKDKDFLDNEENEDILEDIVLTLTLFEDREMIEERLKTYAHLFDDKVMKQLKRRRYTGWGRLSRKLINGIRDKQSGKTILDFLKSDGFANRNFMQLIHDDSLTFKEDIQKAQVSGQGDSLHEHIANLAGSPAIKKGILQTVKVVDELVKVMGRHKPENIVIEMARENQTTQKGQKNSRERMKRIEEGIKELGSQILKEHPVENTQLQNEKLYLYYLQNGRDMYVDQELDINRLSDYDVDHIVPQSFLKDDSIDNKVLTRSDKARGKSDNVPSEEVVKKMKNYWRQLLNAKLITQRKFDNLTKAERGGLSELDKAGFIKRQLVETRQITKHVAQILDSRMNTKYDENDKLIREVKVITLKSKLVSDFRKDFQFYKVREINNYHHAHDAYLNAVVGTALIKKYPKLESEFVYGDYKVYDVRKMIAKSEQEIGKATAKYFFYSNIMNFFKTEITLANGEIRKRPLIETNGETGEIVWDKGRDFATVRKVLSMPQVNIVKKTEVQTGGFSKESILPKRNSDKLIARKKDWDPKKYGGFDSPTVAYSVLVVAKVEKGKSKKLKSVKELLGITIMERSSFEKNPIDFLEAKGYKEVKKDLIIKLPKYSLFELENGRKRMLASAGELQKGNELALPSKYVNFLYLASHYEKLKGSPEDNEQKQLFVEQHKHYLDEIIEQISEFSKRVILADANLDKVLSAYNKHRDKPIREQAENIIHLFTLTNLGAPAAFKYFDTTIDRKRYTSTKEVLDATLIHQSITGLYETRIDLSQLGGDGGPAPGGSEAAAKGGVQEISDSRPMLHIYLNGRRFLGLLDTGADKTCIAGRDWPANWPIHQTESSLQGLGMACGVARSSQPLRWQHEDKSGIIHPFVIPTLPFTLWGRDIMKDIKVRLMTDSPDDSQDLMIGAIESNLFADQISWKSDQPVWLNQWPLKQEKLQALQQLVTEQLQLGHLEESNSPWNTPVFVIKKKSGKWRLLQDLRAVNATMHDMGALQPGLPSPVAVPKGWEIIIIDLQDCFFNIKLHPEDCKRFAFSVPSPNFKRPYQRFQWKVLPQGMKNSPTLCQKFVDKAILTVRDKYQDSYIVHYMDDILLAHPSRSIVDEILTSMIQALNKHGLVVSTEKIQKYDNLKYLGTHIQGDSVSYQKLQIRTDKLRTLNDFQKLLGNINWIRPFLKLTTGELKPLFEILNPDSNPISTRKLTPEACKALQLMNERLSTARVKRLDLSQPWSLCILKTEYTPTACLWQDGVVEWIHLPHISPKVITPYDIFCTQLIIKGRHRSKELFSKDPDYIVVPYTKVQFDLLLQEKEDWPISLLGFLGEVHFHLPKDPLLTFTLQTAIIFPHMTSTTPLEKGIVIFTDGSANGRSVTYIQGREPIIKENTQNTAQQAEIVAVITAFEEVSQPFNLYTDSKYVTGLFPEIETATLSPRTKIYTELKHLQRLIHKRQEKFYIGHIRGHTGLPGPLAQGNAYADSLTRILTAAGKRTADGSEFEKRTADGSEFESPKKKAKVE

SEQ ID NO: 3259 - protein, 2123 aa, synthetic construct
MPAAKRVKLDGGDKKYSIGLDIGTNSVGWAVITDEYKVPSKKFKVLGNTDRHSIKKNLIGALLFDSGETAEATRLKRTARRRYTRRKNRICYLQEIFSNEMAKVDDSFFHRLEESFLVEEDKKHERHPIFGNIVDEVAYHEKYPTIYHLRKKLVDSTDKADLRLIYLALAHMIKFRGHFLIEGDLNPDNSDVDKLFIQLVQTYNQLFEENPINASGVDAKAILSARLSKSRRLENLIAQLPGEKKNGLFGNLIALSLGLTPNFKSNFDLAEDAKLQLSKDTYDDDLDNLLAQIGDQYADLFLAAKNLSDAILLSDILRVNTEITKAPLSASMIKRYDEHHQDLTLLKALVRQQLPEKYKEIFFDQSKNGYAGYIDGGASQEEFYKFIKPILEKMDGTEELLVKLNREDLLRKQRTFDNGSIPHQIHLGELHAILRRQEDFYPFLKDNREKIEKILTFRIPYYVGPLARGNSRFAWMTRKSEETITPWNFEEVVDKGASAQSFIERMTNFDKNLPNEKVLPKHSLLYEYFTVYNELTKVKYVTEGMRKPAFLSGEQKKAIVDLLFKTNRKVTVKQLKEDYFKKIECFDSVEISGVEDRFNASLGTYHDLLKIIKDKDFLDNEENEDILEDIVLTLTLFEDREMIEERLKTYAHLFDDKVMKQLKRRRYTGWGRLSRKLINGIRDKQSGKTILDFLKSDGFANRNFMQLIHDDSLTFKEDIQKAQVSGQGDSLHEHIANLAGSPAIKKGILQTVKVVDELVKVMGRHKPENIVIEMARENQTTQKGQKNSRERMKRIEEGIKELGSQILKEHPVENTQLQNEKLYLYYLQNGRDMYVDQELDINRLSDYDVDHIVPQSFLKDDSIDNKVLTRSDKARGKSDNVPSEEVVKKMKNYWRQLLNAKLITQRKFDNLTKAERGGLSELDKAGFIKRQLVETRQITKHVAQILDSRMNTKYDENDKLIREVKVITLKSKLVSDFRKDFQFYKVREINNYHHAHDAYLNAVVGTALIKKYPKLESEFVYGDYKVYDVRKMIAKSEQEIGKATAKYFFYSNIMNFFKTEITLANGEIRKRPLIETNGETGEIVWDKGRDFATVRKVLSMPQVNIVKKTEVQTGGFSKESILPKRNSDKLIARKKDWDPKKYGGFDSPTVAYSVLVVAKVEKGKSKKLKSVKELLGITIMERSSFEKNPIDFLEAKGYKEVKKDLIIKLPKYSLFELENGRKRMLASAGELQKGNELALPSKYVNFLYLASHYEKLKGSPEDNEQKQLFVEQHKHYLDEIIEQISEFSKRVILADANLDKVLSAYNKHRDKPIREQAENIIHLFTLTNLGAPAAFKYFDTTIDRKRYTSTKEVLDATLIHQSITGLYETRIDLSQLGGDGGGSSGSSGSSGSSGSSGSSGGVQEISDSRPMLHIYLNGRRFLGLLDTGADKTCIAGRDWPANWPIHQTESSLQGLGMACGVARSSQPLRWQHEDKSGIIHPFVIPTLPFTLWGRDIMKDIKVRLMTDSPDDSQDLMIGAIESNLFADQISWKSDQPVWLNQWPLKQEKLQALQQLVTEQLQLGHLEESNSPWNTPVFVIKKKSGKWRLLQDLRAVNATMHDMGALQPGLPSPVAVPKGWEIIIIDLQDCFFNIKLHPEDCKRFAFSVPSPNFKRPYQRFQWKVLPQGMKNSPTLCQKFVDKAILTVRDKYQDSYIVHYMDDILLAHPSRSIVDEILTSMIQALNKHGLVVSTEKIQKYDNLKYLGTHIQGDSVSYQKLQIRTDKLRTLNDFQKLLGNINWIRPFLKLTTGELKPLFEILNPDSNPISTRKLTPEACKALQLMNERLSTARVKRLDLSQPWSLCILKTEYTPTACLWQDGVVEWIHLPHISPKVITPYDIFCTQLIIKGRHRSKELFSKDPDYIVVPYTKVQFDLLLQEKEDWPISLLGFLGEVHFHLPKDPLLTFTLQTAIIFPHMTSTTPLEKGIVIFTDGSANGRSVTYIQGREPIIKENTQNTAQQAEIVAVITAFEEVSQPFNLYTDSKYVTGLFPEIETATLSPRTKIYTELKHLQRLIHKRQEKFYIGHIRGHTGLPGPLAQGNAYADSLTRILTAAGKRTADGSEFEKRTADGSEFESPKKKAKVE

SEQ ID NO: 3260 - protein, 2125 aa, synthetic construct; identical to SEQ ID NO: 3157

SEQ ID NO: 3261 - protein, 2116 aa, synthetic construct
MPAAKRVKLDGGDKKYSIGLDIGTNSVGWAVITDEYKVPSKKFKVLGNTDRHSIKKNLIGALLFDSGETAEATRLKRTARRRYTRRKNRICYLQEIFSNEMAKVDDSFFHRLEESFLVEEDKKHERHPIFGNIVDEVAYHEKYPTIYHLRKKLVDSTDKADLRLIYLALAHMIKFRGHFLIEGDLNPDNSDVDKLFIQLVQTYNQLFEENPINASGVDAKAILSARLSKSRRLENLIAQLPGEKKNGLFGNLIALSLGLTPNFKSNFDLAEDAKLQLSKDTYDDDLDNLLAQIGDQYADLFLAAKNLSDAILLSDILRVNTEITKAPLSASMIKRYDEHHQDLTLLKALVRQQLPEKYKEIFFDQSKNGYAGYIDGGASQEEFYKFIKPILEKMDGTEELLVKLNREDLLRKQRTFDNGSIPHQIHLGELHAILRRQEDFYPFLKDNREKIEKILTFRIPYYVGPLARGNSRFAWMTRKSEETITPWNFEEVVDKGASAQSFIERMTNFDKNLPNEKVLPKHSLLYEYFTVYNELTKVKYVTEGMRKPAFLSGEQKKAIVDLLFKTNRKVTVKQLKEDYFKKIECFDSVEISGVEDRFNASLGTYHDLLKIIKDKDFLDNEENEDILEDIVLTLTLFEDREMIEERLKTYAHLFDDKVMKQLKRRRYTGWGRLSRKLINGIRDKQSGKTILDFLKSDGFANRNFMQLIHDDSLTFKEDIQKAQVSGQGDSLHEHIANLAGSPAIKKGILQTVKVVDELVKVMGRHKPENIVIEMARENQTTQKGQKNSRERMKRIEEGIKELGSQILKEHPVENTQLQNEKLYLYYLQNGRDMYVDQELDINRLSDYDVDHIVPQSFLKDDSIDNKVLTRSDKARGKSDNVPSEEVVKKMKNYWRQLLNAKLITQRKFDNLTKAERGGLSELDKAGFIKRQLVETRQITKHVAQILDSRMNTKYDENDKLIREVKVITLKSKLVSDFRKDFQFYKVREINNYHHAHDAYLNAVVGTALIKKYPKLESEFVYGDYKVYDVRKMIAKSEQEIGKATAKYFFYSNIMNFFKTEITLANGEIRKRPLIETNGETGEIVWDKGRDFATVRKVLSMPQVNIVKKTEVQTGGFSKESILPKRNSDKLIARKKDWDPKKYGGFDSPTVAYSVLVVAKVEKGKSKKLKSVKELLGITIMERSSFEKNPIDFLEAKGYKEVKKDLIIKLPKYSLFELENGRKRMLASAGELQKGNELALPSKYVNFLYLASHYEKLKGSPEDNEQKQLFVEQHKHYLDEIIEQISEFSKRVILADANLDKVLSAYNKHRDKPIREQAENIIHLFTLTNLGAPAAFKYFDTTIDRKRYTSTKEVLDATLIHQSITGLYETRIDLSQLGGDGGGGSGSSEAAAKGGVQEISDSRPMLHIYLNGRRFLGLLDTGADKTCIAGRDWPANWPIHQTESSLQGLGMACGVARSSQPLRWQHEDKSGIIHPFVIPTLPFTLWGRDIMKDIKVRLMTDSPDDSQDLMIGAIESNLFADQISWKSDQPVWLNQWPLKQEKLQALQQLVTEQLQLGHLEESNSPWNTPVFVIKKKSGKWRLLQDLRAVNATMHDMGALQPGLPSPVAVPKGWEIIIIDLQDCFFNIKLHPEDCKRFAFSVPSPNFKRPYQRFQWKVLPQGMKNSPTLCQKFVDKAILTVRDKYQDSYIVHYMDDILLAHPSRSIVDEILTSMIQALNKHGLVVSTEKIQKYDNLKYLGTHIQGDSVSYQKLQIRTDKLRTLNDFQKLLGNINWIRPFLKLTTGELKPLFEILNGDSNPISTRKLTPEACKALQLMNERLSTARVKRLDLSQPWSLCILKTEYTPTACLWQDGVVEWIHLPHISPKVITPYDIFCTQLIIKGRHRSKELFSKDPDYIVVPYTKVQFDLLLQEKEDWPISLLGFLGEVHFHLPKDPLLTFTLQTAIIFPHMTSTTPLEKGIVIFTDGSANGRSVTYIQGREPIIKENTQNTAQQAEIVAVITAFEEVSQPFNLYTDSKYVTGLFPEIETATLSPRTKIYTELKHLQRLIHKRQEKFYIGHIRGHTGLPGPLAQGNAYADSLTRILTAAGKRTADGSEFEKRTADGSEFESPKKKAKVE

SEQ ID NO: 3262 - protein, 2114 aa, synthetic construct
MPAAKRVKLDGGDKKYSIGLDIGTNSVGWAVITDEYKVPSKKFKVLGNTDRHSIKKNLIGALLFDSGETAEATRLKRTARRRYTRRKNRICYLQEIFSNEMAKVDDSFFHRLEESFLVEEDKKHERHPIFGNIVDEVAYHEKYPTIYHLRKKLVDSTDKADLRLIYLALAHMIKFRGHFLIEGDLNPDNSDVDKLFIQLVQTYNQLFEENPINASGVDAKAILSARLSKSRRLENLIAQLPGEKKNGLFGNLIALSLGLTPNFKSNFDLAEDAKLQLSKDTYDDDLDNLLAQIGDQYADLFLAAKNLSDAILLSDILRVNTEITKAPLSASMIKRYDEHHQDLTLLKALVRQQLPEKYKEIFFDQSKNGYAGYIDGGASQEEFYKFIKPILEKMDGTEELLVKLNREDLLRKQRTFDNGSIPHQIHLGELHAILRRQEDFYPFLKDNREKIEKILTFRIPYYVGPLARGNSRFAWMTRKSEETITPWNFEEVVDKGASAQSFIERMTNFDKNLPNEKVLPKHSLLYEYFTVYNELTKVKYVTEGMRKPAFLSGEQKKAIVDLLFKTNRKVTVKQLKEDYFKKIECFDSVEISGVEDRFNASLGTYHDLLKIIKDKDFLDNEENEDILEDIVLTLTLFEDREMIEERLKTYAHLFDDKVMKQLKRRRYTGWGRLSRKLINGIRDKQSGKTILDFLKSDGFANRNFMQLIHDDSLTFKEDIQKAQVSGQGDSLHEHIANLAGSPAIKKGILQTVKVVDELVKVMGRHKPENIVIEMARENQTTQKGQKNSRERMKRIEEGIKELGSQILKEHPVENTQLQNEKLYLYYLQNGRDMYVDQELDINRLSDYDVDHIVPQSFLKDDSIDNKVLTRSDKARGKSDNVPSEEVVKKMKNYWRQLLNAKLITQRKFDNLTKAERGGLSELDKAGFIKRQLVETRQITKHVAQILDSRMNTKYDENDKLIREVKVITLKSKLVSDFRKDFQFYKVREINNYHHAHDAYLNAVVGTALIKKYPKLESEFVYGDYKVYDVRKMIAKSEQEIGKATAKYFFYSNIMNFFKTEITLANGEIRKRPLIETNGETGEIVWDKGRDFATVRKVLSMPQVNIVKKTEVQTGGFSKESILPKRNSDKLIARKKDWDPKKYGGFDSPTVAYSVLVVAKVEKGKSKKLKSVKELLGITIMERSSFEKNPIDFLEAKGYKEVKKDLIIKLPKYSLFELENGRKRMLASAGELQKGNELALPSKYVNFLYLASHYEKLKGSPEDNEQKQLFVEQHKHYLDEIIEQISEFSKRVILADANLDKVLSAYNKHRDKPIREQAENIIHLFTLTNLGAPAAFKYFDTTIDRKRYTSTKEVLDATLIHQSITGLYETRIDLSQLGGDGGPAPAPAPAPGGVQEISDSRPMLHIYLNGRRFLGLLDTGADKTCIAGRDWPANWPIHQTESSLQGLGMACGVARSSQPLRWQHEDKSGIIHPFVIPTLPFTLWGRDIMKDIKVRLMTDSPDDSQDLMIGAIESNLFADQISWKSDQPVWLNQWPLKQEKLQALQQLVTEQLQLGHLEESNSPWNTPVFVIKKKSGKWRLLQDLRAVNATMHDMGALQPGLPSPVAVPKGWEIIIIDLQDCFFNIKLHPEDCKRFAFSVPSPNFKRPYQRFQWKVLPQGMKNSPTLCQKFVDKAILTVRDKYQDSYIVHYMDDILLAHPSRSIVDEILTSMIQALNKHGLVVSTEKIQKYDNLKYLGTHIQGDSVSYQKLQIRTDKLRTLNDFQKLLGNINWIRPFLKLTTGELKPLFEILNGDSNPISTRKLTPEACKALQLMNERLSTARVKRLDLSQPWSLCILKTEYTPTACLWQDGVVEWIHLPHISPKVITPYDIFCTQLIIKGRHRSKELFSKDPDYIVVPYTKVQFDLLLQEKEDWPISLLGFLGEVHFHLPKDPLLTFTLQTAIIFPHMTSTTPLEKGIVIFTDGSANGRSVTYIQGREPIIKENTQNTAQQAEIVAVITAFEEVSQPFNLYTDSKYVTGLFPEIETATLSPRTKIYTELKHLQRLIHKRQEKFYIGHIRGHTGLPGPLAQGNAYADSLTRILTAAGKRTADGSEFEKRTADGSEFESPKKKAKVE

SEQ ID NO: 3263 - protein, 2116 aa, synthetic construct; identical to SEQ ID NO: 3146

SEQ ID NO: 3264 - protein, 2114 aa, synthetic construct
MPAAKRVKLDGGDKKYSIGLDIGTNSVGWAVITDEYKVPSKKFKVLGNTDRHSIKKNLIGALLFDSGETAEATRLKRTARRRYTRRKNRICYLQEIFSNEMAKVDDSFFHRLEESFLVEEDKKHERHPIFGNIVDEVAYHEKYPTIYHLRKKLVDSTDKADLRLIYLALAHMIKFRGHFLIEGDLNPDNSDVDKLFIQLVQTYNQLFEENPINASGVDAKAILSARLSKSRRLENLIAQLPGEKKNGLFGNLIALSLGLTPNFKSNFDLAEDAKLQLSKDTYDDDLDNLLAQIGDQYADLFLAAKNLSDAILLSDILRVNTEITKAPLSASMIKRYDEHHQDLTLLKALVRQQLPEKYKEIFFDQSKNGYAGYIDGGASQEEFYKFIKPILEKMDGTEELLVKLNREDLLRKQRTFDNGSIPHQIHLGELHAILRRQEDFYPFLKDNREKIEKILTFRIPYYVGPLARGNSRFAWMTRKSEETITPWNFEEVVDKGASAQSFIERMTNFDKNLPNEKVLPKHSLLYEYFTVYNELTKVKYVTEGMRKPAFLSGEQKKAIVDLLFKTNRKVTVKQLKEDYFKKIECFDSVEISGVEDRFNASLGTYHDLLKIIKDKDFLDNEENEDILEDIVLTLTLFEDREMIEERLKTYAHLFDDKVMKQLKRRRYTGWGRLSRKLINGIRDKQSGKTILDFLKSDGFANRNFMQLIHDDSLTFKEDIQKAQVSGQGDSLHEHIANLAGSPAIKKGILQTVKVVDELVKVMGRHKPENIVIEMARENQTTQKGQKNSRERMKRIEEGIKELGSQILKEHPVENTQLQNEKLYLYYLQNGRDMYVDQELDINRLSDYDVDHIVPQSFLKDDSIDNKVLTRSDKARGKSDNVPSEEVVKKMKNYWRQLLNAKLITQRKFDNLTKAERGGLSELDKAGFIKRQLVETRQITKHVAQILDSRMNTKYDENDKLIREVKVITLKSKLVSDFRKDFQFYKVREINNYHHAHDAYLNAVVGTALIKKYPKLESEFVYGDYKVYDVRKMIAKSEQEIGKATAKYFFYSNIMNFFKTEITLANGEIRKRPLIETNGETGEIVWDKGRDFATVRKVLSMPQVNIVKKTEVQTGGFSKESILPKRNSDKLIARKKDWDPKKYGGFDSPTVAYSVLVVAKVEKGKSKKLKSVKELLGITIMERSSFEKNPIDFLEAKGYKEVKKDLIIKLPKYSLFELENGRKRMLASAGELQKGNELALPSKYVNFLYLASHYEKLKGSPEDNEQKQLFVEQHKHYLDEIIEQISEFSKRVILADANLDKVLSAYNKHRDKPIREQAENIIHLFTLTNLGAPAAFKYFDTTIDRKRYTSTKEVLDATLIHQSITGLYETRIDLSQLGGDGGGSSPAPGGGGGVQEISDSRPMLHIYLNGRRFLGLLDTGADKTCIAGRDWPANWPIHQTESSLQGLGMACGVARSSQPLRWQHEDKSGIIHPFVIPTLPFTLWGRDIMKDIKVRLMTDSPDDSQDLMIGAIESNLFADQISWKSDQPVWLNQWPLKQEKLQALQQLVTEQLQLGHLEESNSPWNTPVFVIKKKSGKWRLLQDLRAVNATMHDMGALQPGLPSPVAVPKGWEIIIIDLQDCFFNIKLHPEDCKRFAFSVPSPNFKRPYQRFQWKVLPQGMKNSPTLCQKFVDKAILTVRDKYQDSYIVHYMDDILLAHPSRSIVDEILTSMIQALNKHGLVVSTEKIQKYDNLKYLGTHIQGDSVSYQKLQIRTDKLRTLNDFQKLLGNINWIRPFLKLTTGELKPLFEILNGDSNPISTRKLTPEACKALQLMNERLSTARVKRLDLSQPWSLCILKTEYTPTACLWQDGVVEWIHLPHISPKVITPYDIFCTQLIIKGRHRSKELFSKDPDYIVVPYTKVQFDLLLQEKEDWPISLLGFLGEVHFHLPKDPLLTFTLQTAIIFPHMTSTTPLEKGIVIFTDGSANGRSVTYIQGREPIIKENTQNTAQQAEIVAVITAFEEVSQPFNLYTDSKYVTGLFPEIETATLSPRTKIYTELKHLQRLIHKRQEKFYIGHIRGHTGLPGPLAQGNAYADSLTRILTAAGKRTADGSEFEKRTADGSEFESPKKKAKVE

SEQ ID NO: 3265 - protein, 2116 aa, synthetic construct
MPAAKRVKLDGGDKKYSIGLDIGTNSVGWAVITDEYKVPSKKFKVLGNTDRHSIKKNLIGALLFDSGETAEATRLKRTARRRYTRRKNRICYLQEIFSNEMAKVDDSFFHRLEESFLVEEDKKHERHPIFGNIVDEVAYHEKYPTIYHLRKKLVDSTDKADLRLIYLALAHMIKFRGHFLIEGDLNPDNSDVDKLFIQLVQTYNQLFEENPINASGVDAKAILSARLSKSRRLENLIAQLPGEKKNGLFGNLIALSLGLTPNFKSNFDLAEDAKLQLSKDTYDDDLDNLLAQIGDQYADLFLAAKNLSDAILLSDILRVNTEITKAPLSASMIKRYDEHHQDLTLLKALVRQQLPEKYKEIFFDQSKNGYAGYIDGGASQEEFYKFIKPILEKMDGTEELLVKLNREDLLRKQRTFDNGSIPHQIHLGELHAILRRQEDFYPFLKDNREKIEKILTFRIPYYVGPLARGNSRFAWMTRKSEETITPWNFEEVVDKGASAQSFIERMTNFDKNLPNEKVLPKHSLLYEYFTVYNELTKVKYVTEGMRKPAFLSGEQKKAIVDLLFKTNRKVTVKQLKEDYFKKIECFDSVEISGVEDRFNASLGTYHDLLKIIKDKDFLDNEENEDILEDIVLTLTLFEDREMIEERLKTYAHLFDDKVMKQLKRRRYTGWGRLSRKLINGIRDKQSGKTILDFLKSDGFANRNFMQLIHDDSLTFKEDIQKAQVSGQGDSLHEHIANLAGSPAIKKGILQTVKVVDELVKVMGRHKPENIVIEMARENQTTQKGQKNSRERMKRIEEGIKELGSQILKEHPVENTQLQNEKLYLYYLQNGRDMYVDQELDINRLSDYDVDHIVPQSFLKDDSIDNKVLTRSDKARGKSDNVPSEEVVKKMKNYWRQLLNAKLITQRKFDNLTKAERGGLSELDKAGFIKRQLVETRQITKHVAQILDSRMNTKYDENDKLIREVKVITLKSKLVSDFRKDFQFYKVREINNYHHAHDAYLNAVVGTALIKKYPKLESEFVYGDYKVYDVRKMIAKSEQEIGKATAKYFFYSNIMNFFKTEITLANGEIRKRPLIETNGETGEIVWDKGRDFATVRKVLSMPQVNIVKKTEVQTGGFSKESILPKRNSDKLIARKKDWDPKKYGGFDSPTVAYSVLVVAKVEKGKSKKLKSVKELLGITIMERSSFEKNPIDFLEAKGYKEVKKDLIIKLPKYSLFELENGRKRMLASAGELQKGNELALPSKYVNFLYLASHYEKLKGSPEDNEQKQLFVEQHKHYLDEIIEQISEFSKRVILADANLDKVLSAYNKHRDKPIREQAENIIHLFTLTNLGAPAAFKYFDTTIDRKRYTSTKEVLDATLIHQSITGLYETRIDLSQLGGDGGGSSEAAAKPAPGGVQEISDSRPMLHIYLNGRRFLGLLDTGADKTCIAGRDWPANWPIHQTESSLQGLGMACGVARSSQPLRWQHEDKSGIIHPFVIPTLPFTLWGRDIMKDIKVRLMTDSPDDSQDLMIGAIESNLFADQISWKSDQPVWLNQWPLKQEKLQALQQLVTEQLQLGHLEESNSPWNTPVFVIKKKSGKWRLLQDLRAVNATMHDMGALQPGLPSPVAVPKGWEIIIIDLQDCFFNIKLHPEDCKRFAFSVPSPNFKRPYQRFQWKVLPQGMKNSPTLCQKFVDKAILTVRDKYQDSYIVHYMDDILLAHPSRSIVDEILTSMIQALNKHGLVVSTEKIQKYDNLKYLGTHIQGDSVSYQKLQIRTDKLRTLNDFQKLLGNINWIRPFLKLTTGELKPLFEILNGDSNPISTRKLTPEACKALQLMNERLSTARVKRLDLSQPWSLCILKTEYTPTACLWQDGVVEWIHLPHISPKVITPYDIFCTQLIIKGRHRSKELFSKDPDYIVVPYTKVQFDLLLQEKEDWPISLLGFLGEVHFHLPKDPLLTFTLQTAIIFPHMTSTTPLEKGIVIFTDGSANGRSVTYIQGREPIIKENTQNTAQQAEIVAVITAFEEVSQPFNLYTDSKYVTGLFPEIETATLSPRTKIYTELKHLQRLIHKRQEKFYIGHIRGHTGLPGPLAQGNAYADSLTRILTAAGKRTADGSEFEKRTADGSEFESPKKKAKVE

SEQ ID NO: 3266 - protein, 2120 aa, synthetic construct
MPAAKRVKLDGGDKKYSIGLDIGTNSVGWAVITDEYKVPSKKFKVLGNTDRHSIKKNLIGALLFDSGETAEATRLKRTARRRYTRRKNRICYLQEIFSNEMAKVDDSFFHRLEESFLVEEDKKHERHPIFGNIVDEVAYHEKYPTIYHLRKKLVDSTDKADLRLIYLALAHMIKFRGHFLIEGDLNPDNSDVDKLFIQLVQTYNQLFEENPINASGVDAKAILSARLSKSRRLENLIAQLPGEKKNGLFGNLIALSLGLTPNFKSNFDLAEDAKLQLSKDTYDDDLDNLLAQIGDQYADLFLAAKNLSDAILLSDILRVNTEITKAPLSASMIKRYDEHHQDLTLLKALVRQQLPEKYKEIFFDQSKNGYAGYIDGGASQEEFYKFIKPILEKMDGTEELLVKLNREDLLRKQRTFDNGSIPHQIHLGELHAILRRQEDFYPFLKDNREKIEKILTFRIPYYVGPLARGNSRFAWMTRKSEETITPWNFEEVVDKGASAQSFIERMTNFDKNLPNEKVLPKHSLLYEYFTVYNELTKVKYVTEGMRKPAFLSGEQKKAIVDLLFKTNRKVTVKQLKEDYFKKIECFDSVEISGVEDRFNASLGTYHDLLKIIKDKDFLDNEENEDILEDIVLTLTLFEDREMIEERLKTYAHLFDDKVMKQLKRRRYTGWGRLSRKLINGIRDKQSGKTILDFLKSDGFANRNFMQLIHDDSLTFKEDIQKAQVSGQGDSLHEHIANLAGSPAIKKGILQTVKVVDELVKVMGRHKPENIVIEMARENQTTQKGQKNSRERMKRIEEGIKELGSQILKEHPVENTQLQNEKLYLYYLQNGRDMYVDQELDINRLSDYDVDHIVPQSFLKDDSIDNKVLTRSDKARGKSDNVPSEEVVKKMKNYWRQLLNAKLITQRKFDNLTKAERGGLSELDKAGFIKRQLVETRQITKHVAQILDSRMNTKYDENDKLIREVKVITLKSKLVSDFRKDFQFYKVREINNYHHAHDAYLNAVVGTALIKKYPKLESEFVYGDYKVYDVRKMIAKSEQEIGKATAKYFFYSNIMNFFKTEITLANGEIRKRPLIETNGETGEIVWDKGRDFATVRKVLSMPQVNIVKKTEVQTGGFSKESILPKRNSDKLIARKKDWDPKKYGGFDSPTVAYSVLVVAKVEKGKSKKLKSVKELLGITIMERSSFEKNPIDFLEAKGYKEVKKDLIIKLPKYSLFELENGRKRMLASAGELQKGNELALPSKYVNFLYLASHYEKLKGSPEDNEQKQLFVEQHKHYLDEIIEQISEFSKRVILADANLDKVLSAYNKHRDKPIREQAENIIHLFTLTNLGAPAAFKYFDTTIDRKRYTSTKEVLDATLIHQSITGLYETRIDLSQLGGDGGGGSGGSGGSGGSGGSGGWVQEISDSRPMLHIYLNGRRFLGLLNTGADKTCIAGRDWPANWPIHQTESSLQGLGMACGVARSSQPLRWQHEDKSGIIHPFVIPTLPFTLWGRDIMKDIKVRLMTDSPDDSQDLMIGAIESNLFADQISWKSDQPVWLNQWPLKQEKLQALQQLVTEQLQLGHLEESNSPWNTPVFVIKKKSGKWRLLQDLRAVNATMHDMGALQPGLPSPVAVPKGWEIIIIDLQDCFFNIKLHPEDCKRFAFSVPSPNFKRPYQRFQWKVLPQGMKNSPTLCQKFVDKAILTVRDKYQDSYIVHYMDDILLAHPSRSIVDEILTSMIQALNKHGLVVSTEKIQKYDNLKYLGTHIQGDSVSYQKLQIRTDKLRTLNDFQKLLGNINWIRPFLKLTTGELKPLFEILNGDSNPISTRKLTPEACKALQLMNERLSTARVKRLDLSQPWSLCILKTEYTPTACLWQDGVVEWIHLPHISPKVITPYDIFCTQLIIKGRHRSKELFSKDPDYIVVPYTKVQFDLLLQEKEDWPISLLGFLGEVHFHLPKDPLLTFTLQTAIIFPHMTSTTPLEKGIVIFTDGSANGRSVTYIQGREPIIKENTQNTAQQAEIVAVITAFEEVSQPFNLYTDSKYVTGLFPEIETATLSPRTKIYTELKHLQRLIHKRQEKFYIGHIRGHTGLPGPLAQGNAYADSLTRILTAGKRTADGSEFEKRTADGSEFESPKKKAKVE

SEQ ID NO: 3267 - protein, 2151 aa, synthetic construct
MPAAKRVKLDGGDKKYSIGLDIGTNSVGWAVITDEYKVPSKKFKVLGNTDRHSIKKNLIGALLFDSGETAEATRLKRTARRRYTRRKNRICYLQEIFSNEMAKVDDSFFHRLEESFLVEEDKKHERHPIFGNIVDEVAYHEKYPTIYHLRKKLVDSTDKADLRLIYLALAHMIKFRGHFLIEGDLNPDNSDVDKLFIQLVQTYNQLFEENPINASGVDAKAILSARLSKSRRLENLIAQLPGEKKNGLFGNLIALSLGLTPNFKSNFDLAEDAKLQLSKDTYDDDLDNLLAQIGDQYADLFLAAKNLSDAILLSDILRVNTEITKAPLSASMIKRYDEHHQDLTLLKALVRQQLPEKYKEIFFDQSKNGYAGYIDGGASQEEFYKFIKPILEKMDGTEELLVKLNREDLLRKQRTFDNGSIPHQIHLGELHAILRRQEDFYPFLKDNREKIEKILTFRIPYYVGPLARGNSRFAWMTRKSEETITPWNFEEVVDKGASAQSFIERMTNFDKNLPNEKVLPKHSLLYEYFTVYNELTKVKYVTEGMRKPAFLSGEQKKAIVDLLFKTNRKVTVKQLKEDYFKKIECFDSVEISGVEDRFNASLGTYHDLLKIIKDKDFLDNEENEDILEDIVLTLTLFEDREMIEERLKTYAHLFDDKVMKQLKRRRYTGWGRLSRKLINGIRDKQSGKTILDFLKSDGFANRNFMQLIHDDSLTFKEDIQKAQVSGQGDSLHEHIANLAGSPAIKKGILQTVKVVDELVKVMGRHKPENIVIEMARENQTTQKGQKNSRERMKRIEEGIKELGSQILKEHPVENTQLQNEKLYLYYLQNGRDMYVDQELDINRLSDYDVDHIVPQSFLKDDSIDNKVLTRSDKARGKSDNVPSEEVVKKMKNYWRQLLNAKLITQRKFDNLTKAERGGLSELDKAGFIKRQLVETRQITKHVAQILDSRMNTKYDENDKLIREVKVITLKSKLVSDFRKDFQFYKVREINNYHHAHDAYLNAVVGTALIKKYPKLESEFVYGDYKVYDVRKMIAKSEQEIGKATAKYFFYSNIMNFFKTEITLANGEIRKRPLIETNGETGEIVWDKGRDFATVRKVLSMPQVNIVKKTEVQTGGFSKESILPKRNSDKLIARKKDWDPKKYGGFDSPTVAYSVLVVAKVEKGKSKKLKSVKELLGITIMERSSFEKNPIDFLEAKGYKEVKKDLIIKLPKYSLFELENGRKRMLASAGELQKGNELALPSKYVNFLYLASHYEKLKGSPEDNEQKQLFVEQHKHYLDEIIEQISEFSKRVILADANLDKVLSAYNKHRDKPIREQAENIIHLFTLTNLGAPAAFKYFDTTIDRKRYTSTKEVLDATLIHQSITGLYETRIDLSQLGGDGGAEAAAKEAAAKEAAAKEAAAKALEAEAAAKEAAAKEAAAKEAAAKAGGWVQEISDSRPMLHIYLNGRRFLGLLNTGADKTCIAGRDWPANWPIHQTESSLQGLGMACGVARSSQPLRWQHEDKSGIIHPFVIPTLPFTLWGRDIMKDIKVRLMTDSPDDSQDLMIGAIESNLFADQISWKSDQPVWLNQWPLKQEKLQALQQLVTEQLQLGHLEESNSPWNTPVFVIKKKSGKWRLLQDLRAVNATMHDMGALQPGLPSPVAVPKGWEIIIIDLQDCFFNIKLHPEDCKRFAFSVPSPNFKRPYQRFQWKVLPQGMKNSPTLCQKFVDKAILTVRDKYQDSYIVHYMDDILLAHPSRSIVDEILTSMIQALNKHGLVVSTEKIQKYDNLKYLGTHIQGDSVSYQKLQIRTDKLRTLNDFQKLLGNINWIRPFLKLTTGELKPLFEILNGDSNPISTRKLTPEACKALQLMNERLSTARVKRLDLSQPWSLCILKTEYTPTACLWQDGVVEWIHLPHISPKVITPYDIFCTQLIIKGRHRSKELFSKDPDYIVVPYTKVQFDLLLQEKEDWPISLLGFLGEVHFHLPKDPLLTFTLQTAIIFPHMTSTTPLEKGIVIFTDGSANGRSVTYIQGREPIIKENTQNTAQQAEIVAVITAFEEVSQPFNLYTDSKYVTGLFPEIETATLSPRTKIYTELKHLQRLIHKRQEKFYIGHIRGHTGLPGPLAQGNAYADSLTRILTAGKRTADGSEFEKRTADGSEFESPKKKAKVE

SEQ ID NO: 3268 - protein, 2135 aa, synthetic construct; identical to SEQ ID NO: 3172

SEQ ID NO: 3269 - protein, 2114 aa, synthetic construct
MPAAKRVKLDGGDKKYSIGLDIGTNSVGWAVITDEYKVPSKKFKVLGNTDRHSIKKNLIGALLFDSGETAEATRLKRTARRRYTRRKNRICYLQEIFSNEMAKVDDSFFHRLEESFLVEEDKKHERHPIFGNIVDEVAYHEKYPTIYHLRKKLVDSTDKADLRLIYLALAHMIKFRGHFLIEGDLNPDNSDVDKLFIQLVQTYNQLFEENPINASGVDAKAILSARLSKSRRLENLIAQLPGEKKNGLFGNLIALSLGLTPNFKSNFDLAEDAKLQLSKDTYDDDLDNLLAQIGDQYADLFLAAKNLSDAILLSDILRVNTEITKAPLSASMIKRYDEHHQDLTLLKALVRQQLPEKYKEIFFDQSKNGYAGYIDGGASQEEFYKFIKPILEKMDGTEELLVKLNREDLLRKQRTFDNGSIPHQIHLGELHAILRRQEDFYPFLKDNREKIEKILTFRIPYYVGPLARGNSRFAWMTRKSEETITPWNFEEVVDKGASAQSFIERMTNFDKNLPNEKVLPKHSLLYEYFTVYNELTKVKYVTEGMRKPAFLSGEQKKAIVDLLFKTNRKVTVKQLKEDYFKKIECFDSVEISGVEDRFNASLGTYHDLLKIIKDKDFLDNEENEDILEDIVLTLTLFEDREMIEERLKTYAHLFDDKVMKQLKRRRYTGWGRLSRKLINGIRDKQSGKTILDFLKSDGFANRNFMQLIHDDSLTFKEDIQKAQVSGQGDSLHEHIANLAGSPAIKKGILQTVKVVDELVKVMGRHKPENIVIEMARENQTTQKGQKNSRERMKRIEEGIKELGSQILKEHPVENTQLQNEKLYLYYLQNGRDMYVDQELDINRLSDYDVDHIVPQSFLKDDSIDNKVLTRSDKARGKSDNVPSEEVVKKMKNYWRQLLNAKLITQRKFDNLTKAERGGLSELDKAGFIKRQLVETRQITKHVAQILDSRMNTKYDENDKLIREVKVITLKSKLVSDFRKDFQFYKVREINNYHHAHDAYLNAVVGTALIKKYPKLESEFVYGDYKVYDVRKMIAKSEQEIGKATAKYFFYSNIMNFFKTEITLANGEIRKRPLIETNGETGEIVWDKGRDFATVRKVLSMPQVNIVKKTEVQTGGFSKESILPKRNSDKLIARKKDWDPKKYGGFDSPTVAYSVLVVAKVEKGKSKKLKSVKELLGITIMERSSFEKNPIDFLEAKGYKEVKKDLIIKLPKYSLFELENGRKRMLASAGELQKGNELALPSKYVNFLYLASHYEKLKGSPEDNEQKQLFVEQHKHYLDEIIEQISEFSKRVILADANLDKVLSAYNKHRDKPIREQAENIIHLFTLTNLGAPAAFKYFDTTIDRKRYTSTKEVLDATLIHQSITGLYETRIDLSQLGGDGGGGSGGGGSSGGWVQEISDSRPMLHIYLNGRRFLGLLNTGADKTCIAGRDWPANWPIHQTESSLQGLGMACGVARSSQPLRWQHEDKSGIIHPFVIPTLPFTLWGRDIMKDIKVRLMTDSPDDSQDLMIGAIESNLFADQISWKSDQPVWLNQWPLKQEKLQALQQLVTEQLQLGHLEESNSPWNTPVFVIKKKSGKWRLLQDLRAVNATMHDMGALQPGLPSPVAVPKGWEIIIIDLQDCFFNIKLHPEDCKRFAFSVPSPNFKRPYQRFQWKVLPQGMKNSPTLCQKFVDKAILTVRDKYQDSYIVHYMDDILLAHPSRSIVDEILTSMIQALNKHGLVVSTEKIQKYDNLKYLGTHIQGDSVSYQKLQIRTDKLRTLNDFQKLLGNINWIRPFLKLTTGELKPLFEILNGDSNPISTRKLTPEACKALQLMNERLSTARVKRLDLSQPWSLCILKTEYTPTACLWQDGVVEWIHLPHISPKVITPYDIFCTQLIIKGRHRSKELFSKDPDYIVVPYTKVQFDLLLQEKEDWPISLLGFLGEVHFHLPKDPLLTFTLQTAIIFPHMTSTTPLEKGIVIFTDGSANGRSVTYIQGREPIIKENTQNTAQQAEIVAVITAFEEVSQPFNLYTDSKYVTGLFPEIETATLSPRTKIYTELKHLQRLIHKRQEKFYIGHIRGHTGLPGPLAQGNAYADSLTRILTAGKRTADGSEFEKRTADGSEFESPKKKAKVE

SEQ ID NO: 3270 - protein, 2116 aa, synthetic construct; identical to SEQ ID NO: 3181

SEQ ID NO: 3271 - protein, 2116 aa, synthetic construct
MPAAKRVKLDGGDKKYSIGLDIGTNSVGWAVITDEYKVPSKKFKVLGNTDRHSIKKNLIGALLFDSGETAEATRLKRTARRRYTRRKNRICYLQEIFSNEMAKVDDSFFHRLEESFLVEEDKKHERHPIFGNIVDEVAYHEKYPTIYHLRKKLVDSTDKADLRLIYLALAHMIKFRGHFLIEGDLNPDNSDVDKLFIQLVQTYNQLFEENPINASGVDAKAILSARLSKSRRLENLIAQLPGEKKNGLFGNLIALSLGLTPNFKSNFDLAEDAKLQLSKDTYDDDLDNLLAQIGDQYADLFLAAKNLSDAILLSDILRVNTEITKAPLSASMIKRYDEHHQDLTLLKALVRQQLPEKYKEIFFDQSKNGYAGYIDGGASQEEFYKFIKPILEKMDGTEELLVKLNREDLLRKQRTFDNGSIPHQIHLGELHAILRRQEDFYPFLKDNREKIEKILTFRIPYYVGPLARGNSRFAWMTRKSEETITPWNFEEVVDKGASAQSFIERMTNFDKNLPNEKVLPKHSLLYEYFTVYNELTKVKYVTEGMRKPAFLSGEQKKAIVDLLFKTNRKVTVKQLKEDYFKKIECFDSVEISGVEDRFNASLGTYHDLLKIIKDKDFLDNEENEDILEDIVLTLTLFEDREMIEERLKTYAHLFDDKVMKQLKRRRYTGWGRLSRKLINGIRDKQSGKTILDFLKSDGFANRNFMQLIHDDSLTFKEDIQKAQVSGQGDSLHEHIANLAGSPAIKKGILQTVKVVDELVKVMGRHKPENIVIEMARENQTTQKGQKNSRERMKRIEEGIKELGSQILKEHPVENTQLQNEKLYLYYLQNGRDMYVDQELDINRLSDYDVDHIVPQSFLKDDSIDNKVLTRSDKARGKSDNVPSEEVVKKMKNYWRQLLNAKLITQRKFDNLTKAERGGLSELDKAGFIKRQLVETRQITKHVAQILDSRMNTKYDENDKLIREVKVITLKSKLVSDFRKDFQFYKVREINNYHHAHDAYLNAVVGTALIKKYPKLESEFVYGDYKVYDVRKMIAKSEQEIGKATAKYFFYSNIMNFFKTEITLANGEIRKRPLIETNGETGEIVWDKGRDFATVRKVLSMPQVNIVKKTEVQTGGFSKESILPKRNSDKLIARKKDWDPKKYGGFDSPTVAYSVLVVAKVEKGKSKKLKSVKELLGITIMERSSFEKNPIDFLEAKGYKEVKKDLIIKLPKYSLFELENGRKRMLASAGELQKGNELALPSKYVNFLYLASHYEKLKGSPEDNEQKQLFVEQHKHYLDEIIEQISEFSKRVILADANLDKVLSAYNKHRDKPIREQAENIIHLFTLTNLGAPAAFKYFDTTIDRKRYTSTKEVLDATLIHQSITGLYETRIDLSQLGGDGGEAAAKGSSGGGGGWVQEISDSRPMLHIYLNGRRFLGLLNTGADKTCIAGRDWPANWPIHQTESSLQGLGMACGVARSSQPLRWQHEDKSGIIHPFVIPTLPFTLWGRDIMKDIKVRLMTDSPDDSQDLMIGAIESNLFADQISWKSDQPVWLNQWPLKQEKLQALQQLVTEQLQLGHLEESNSPWNTPVFVIKKKSGKWRLLQDLRAVNATMHDMGALQPGLPSPVAVPKGWEIIIIDLQDCFFNIKLHPEDCKRFAFSVPSPNFKRPYQRFQWKVLPQGMKNSPTLCQKFVDKAILTVRDKYQDSYIVHYMDDILLAHPSRSIVDEILTSMIQALNKHGLVVSTEKIQKYDNLKYLGTHIQGDSVSYQKLQIRTDKLRTLNDFQKLLGNINWIRPFLKLTTGELKPLFEILNGDSNPISTRKLTPEACKALQLMNERLSTARVKRLDLSQPWSLCILKTEYTPTACLWQDGVVEWIHLPHISPKVITPYDIFCTQLIIKGRHRSKELFSKDPDYIVVPYTKVQFDLLLQEKEDWPISLLGFLGEVHFHLPKDPLLTFTLQTAIIFPHMTSTTPLEKGIVIFTDGSANGRSVTYIQGREPIIKENTQNTAQQAEIVAVITAFEEVSQPFNLYTDSKYVTGLFPEIETATLSPRTKIYTELKHLQRLIHKRQEKFYIGHIRGHTGLPGPLAQGNAYADSLTRILTAGKRTADGSEFEKRTADGSEFESPKKKAKVE

SEQ ID NO: 3272 - protein, 2114 aa, synthetic construct
MPAAKRVKLDGGDKKYSIGLDIGTNSVGWAVITDEYKVPSKKFKVLGNTDRHSIKKNLIGALLFDSGETAEATRLKRTARRRYTRRKNRICYLQEIFSNEMAKVDDSFFHRLEESFLVEEDKKHERHPIFGNIVDEVAYHEKYPTIYHLRKKLVDSTDKADLRLIYLALAHMIKFRGHFLIEGDLNPDNSDVDKLFIQLVQTYNQLFEENPINASGVDAKAILSARLSKSRRLENLIAQLPGEKKNGLFGNLIALSLGLTPNFKSNFDLAEDAKLQLSKDTYDDDLDNLLAQIGDQYADLFLAAKNLSDAILLSDILRVNTEITKAPLSASMIKRYDEHHQDLTLLKALVRQQLPEKYKEIFFDQSKNGYAGYIDGGASQEEFYKFIKPILEKMDGTEELLVKLNREDLLRKQRTFDNGSIPHQIHLGELHAILRRQEDFYPFLKDNREKIEKILTFRIPYYVGPLARGNSRFAWMTRKSEETITPWNFEEVVDKGASAQSFIERMTNFDKNLPNEKVLPKHSLLYEYFTVYNELTKVKYVTEGMRKPAFLSGEQKKAIVDLLFKTNRKVTVKQLKEDYFKKIECFDSVEISGVEDRFNASLGTYHDLLKIIKDKDFLDNEENEDILEDIVLTLTLFEDREMIEERLKTYAHLFDDKVMKQLKRRRYTGWGRLSRKLINGIRDKQSGKTILDFLKSDGFANRNFMQLIHDDSLTFKEDIQKAQVSGQGDSLHEHIANLAGSPAIKKGILQTVKVVDELVKVMGRHKPENIVIEMARENQTTQKGQKNSRERMKRIEEGIKELGSQILKEHPVENTQLQNEKLYLYYLQNGRDMYVDQELDINRLSDYDVDHIVPQSFLKDDSIDNKVLTRSDKARGKSDNVPSEEVVKKMKNYWRQLLNAKLITQRKFDNLTKAERGGLSELDKAGFIKRQLVETRQITKHVAQILDSRMNTKYDENDKLIREVKVITLKSKLVSDFRKDFQFYKVREINNYHHAHDAYLNAVVGTALIKKYPKLESEFVYGDYKVYDVRKMIAKSEQEIGKATAKYFFYSNIMNFFKTEITLANGEIRKRPLIETNGETGEIVWDKGRDFATVRKVLSMPQVNIVKKTEVQTGGFSKESILPKRNSDKLIARKKDWDPKKYGGFDSPTVAYSVLVVAKVEKGKSKKLKSVKELLGITIMERSSFEKNPIDFLEAKGYKEVKKDLIIKLPKYSLFELENGRKRMLASAGELQKGNELALPSKYVNFLYLASHYEKLKGSPEDNEQKQLFVEQHKHYLDEIIEQISEFSKRVILADANLDKVLSAYNKHRDKPIREQAENIIHLFTLTNLGAPAAFKYFDTTIDRKRYTSTKEVLDATLIHQSITGLYETRIDLSQLGGDGGGGGGGSGSSGGWVQEISDSRPMLHIYLNGRRFLGLLNTGADKTCIAGRDWPANWPIHQTESSLQGLGMACGVARSSQPLRWQHEDKSGIIHPFVIPTLPFTLWGRDIMKDIKVRLMTDSPDDSQDLMIGAIESNLFADQISWKSDQPVWLNQWPLKQEKLQALQQLVTEQLQLGHLEESNSPWNTPVFVIKKKSGKWRLLQDLRAVNATMHDMGALQPGLPSPVAVPKGWEIIIIDLQDCFFNIKLHPEDCKRFAFSVPSPNFKRPYQRFQWKVLPQGMKNSPTLCQKFVDKAILTVRDKYQDSYIVHYMDDILLAHPSRSIVDEILTSMIQALNKHGLVVSTEKIQKYDNLKYLGTHIQGDSVSYQKLQIRTDKLRTLNDFQKLLGNINWIRPFLKLTTGELKPLFEILNGDSNPISTRKLTPEACKALQLMNERLSTARVKRLDLSQPWSLCILKTEYTPTACLWQDGVVEWIHLPHISPKVITPYDIFCTQLIIKGRHRSKELFSKDPDYIVVPYTKVQFDLLLQEKEDWPISLLGFLGEVHFHLPKDPLLTFTLQTAIIFPHMTSTTPLEKGIVIFTDGSANGRSVTYIQGREPIIKENTQNTAQQAEIVAVITAFEEVSQPFNLYTDSKYVTGLFPEIETATLSPRTKIYTELKHLQRLIHKRQEKFYIGHIRGHTGLPGPLAQGNAYADSLTRILTAGKRTADGSEFEKRTADGSEFESPKKKAKVE

SEQ ID NO: 3273 - protein, 2116 aa, synthetic construct
MPAAKRVKLDGGDKKYSIGLDIGTNSVGWAVITDEYKVPSKKFKVLGNTDRHSIKKNLIGALLFDSGETAEATRLKRTARRRYTRRKNRICYLQEIFSNEMAKVDDSFFHRLEESFLVEEDKKHERHPIFGNIVDEVAYHEKYPTIYHLRKKLVDSTDKADLRLIYLALAHMIKFRGHFLIEGDLNPDNSDVDKLFIQLVQTYNQLFEENPINASGVDAKAILSARLSKSRRLENLIAQLPGEKKNGLFGNLIALSLGLTPNFKSNFDLAEDAKLQLSKDTYDDDLDNLLAQIGDQYADLFLAAKNLSDAILLSDILRVNTEITKAPLSASMIKRYDEHHQDLTLLKALVRQQLPEKYKEIFFDQSKNGYAGYIDGGASQEEFYKFIKPILEKMDGTEELLVKLNREDLLRKQRTFDNGSIPHQIHLGELHAILRRQEDFYPFLKDNREKIEKILTFRIPYYVGPLARGNSRFAWMTRKSEETITPWNFEEVVDKGASAQSFIERMTNFDKNLPNEKVLPKHSLLYEYFTVYNELTKVKYVTEGMRKPAFLSGEQKKAIVDLLFKTNRKVTVKQLKEDYFKKIECFDSVEISGVEDRFNASLGTYHDLLKIIKDKDFLDNEENEDILEDIVLTLTLFEDREMIEERLKTYAHLFDDKVMKQLKRRRYTGWGRLSRKLINGIRDKQSGKTILDFLKSDGFANRNFMQLIHDDSLTFKEDIQKAQVSGQGDSLHEHIANLAGSPAIKKGILQTVKVVDELVKVMGRHKPENIVIEMARENQTTQKGQKNSRERMKRIEEGIKELGSQILKEHPVENTQLQNEKLYLYYLQNGRDMYVDQELDINRLSDYDVDHIVPQSFLKDDSIDNKVLTRSDKARGKSDNVPSEEVVKKMKNYWRQLLNAKLITQRKFDNLTKAERGGLSELDKAGFIKRQLVETRQITKHVAQILDSRMNTKYDENDKLIREVKVITLKSKLVSDFRKDFQFYKVREINNYHHAHDAYLNAVVGTALIKKYPKLESEFVYGDYKVYDVRKMIAKSEQEIGKATAKYFFYSNIMNFFKTEITLANGEIRKRPLIETNGETGEIVWDKGRDFATVRKVLSMPQVNIVKKTEVQTGGFSKESILPKRNSDKLIARKKDWDPKKYGGFDSPTVAYSVLVVAKVEKGKSKKLKSVKELLGITIMERSSFEKNPIDFLEAKGYKEVKKDLIIKLPKYSLFELENGRKRMLASAGELQKGNELALPSKYVNFLYLASHYEKLKGSPEDNEQKQLFVEQHKHYLDEIIEQISEFSKRVILADANLDKVLSAYNKHRDKPIREQAENIIHLFTLTNLGAPAAFKYFDTTIDRKRYTSTKEVLDATLIHQSITGLYETRIDLSQLGGDGGEAAAKGGGPAPGGWVQEISDSRPMLHIYLNGRRFLGLLNTGADKTCIAGRDWPANWPIHQTESSLQGLGMACGVARSSQPLRWQHEDKSGIIHPFVIPTLPFTLWGRDIMKDIKVRLMTDSPDDSQDLMIGAIESNLFADQISWKSDQPVWLNQWPLKQEKLQALQQLVTEQLQLGHLEESNSPWNTPVFVIKKKSGKWRLLQDLRAVNATMHDMGALQPGLPSPVAVPKGWEIIIIDLQDCFFNIKLHPEDCKRFAFSVPSPNFKRPYQRFQWKVLPQGMKNSPTLCQKFVDKAILTVRDKYQDSYIVHYMDDILLAHPSRSIVDEILTSMIQALNKHGLVVSTEKIQKYDNLKYLGTHIQGDSVSYQKLQIRTDKLRTLNDFQKLLGNINWIRPFLKLTTGELKPLFEILNGDSNPISTRKLTPEACKALQLMNERLSTARVKRLDLSQPWSLCILKTEYTPTACLWQDGVVEWIHLPHISPKVITPYDIFCTQLIIKGRHRSKELFSKDPDYIVVPYTKVQFDLLLQEKEDWPISLLGFLGEVHFHLPKDPLLTFTLQTAIIFPHMTSTTPLEKGIVIFTDGSANGRSVTYIQGREPIIKENTQNTAQQAEIVAVITAFEEVSQPFNLYTDSKYVTGLFPEIETATLSPRTKIYTELKHLQRLIHKRQEKFYIGHIRGHTGLPGPLAQGNAYADSLTRILTAGKRTADGSEFEKRTADGSEFESPKKKAKVE

SEQ ID NO: 3274 - protein, 2116 aa, synthetic construct
MPAAKRVKLDGGDKKYSIGLDIGTNSVGWAVITDEYKVPSKKFKVLGNTDRHSIKKNLIGALLFDSGETAEATRLKRTARRRYTRRKNRICYLQEIFSNEMAKVDDSFFHRLEESFLVEEDKKHERHPIFGNIVDEVAYHEKYPTIYHLRKKLVDSTDKADLRLIYLALAHMIKFRGHFLIEGDLNPDNSDVDKLFIQLVQTYNQLFEENPINASGVDAKAILSARLSKSRRLENLIAQLPGEKKNGLFGNLIALSLGLTPNFKSNFDLAEDAKLQLSKDTYDDDLDNLLAQIGDQYADLFLAAKNLSDAILLSDILRVNTEITKAPLSASMIKRYDEHHQDLTLLKALVRQQLPEKYKEIFFDQSKNGYAGYIDGGASQEEFYKFIKPILEKMDGTEELLVKLNREDLLRKQRTFDNGSIPHQIHLGELHAILRRQEDFYPFLKDNREKIEKILTFRIPYYVGPLARGNSRFAWMTRKSEETITPWNFEEVVDKGASAQSFIERMTNFDKNLPNEKVLPKHSLLYEYFTVYNELTKVKYVTEGMRKPAFLSGEQKKAIVDLLFKTNRKVTVKQLKEDYFKKIECFDSVEISGVEDRFNASLGTYHDLLKIIKDKDFLDNEENEDILEDIVLTLTLFEDREMIEERLKTYAHLFDDKVMKQLKRRRYTGWGRLSRKLINGIRDKQSGKTILDFLKSDGFANRNFMQLIHDDSLTFKEDIQKAQVSGQGDSLHEHIANLAGSPAIKKGILQTVKVVDELVKVMGRHKPENIVIEMARENQTTQKGQKNSRERMKRIEEGIKELGSQILKEHPVENTQLQNEKLYLYYLQNGRDMYVDQELDINRLSDYDVDHIVPQSFLKDDSIDNKVLTRSDKARGKSDNVPSEEVVKKMKNYWRQLLNAKLITQRKFDNLTKAERGGLSELDKAGFIKRQLVETRQITKHVAQILDSRMNTKYDENDKLIREVKVITLKSKLVSDFRKDFQFYKVREINNYHHAHDAYLNAVVGTALIKKYPKLESEFVYGDYKVYDVRKMIAKSEQEIGKATAKYFFYSNIMNFFKTEITLANGEIRKRPLIETNGETGEIVWDKGRDFATVRKVLSMPQVNIVKKTEVQTGGFSKESILPKRNSDKLIARKKDWDPKKYGGFDSPTVAYSVLVVAKVEKGKSKKLKSVKELLGITIMERSSFEKNPIDFLEAKGYKEVKKDLIIKLPKYSLFELENGRKRMLASAGELQKGNELALPSKYVNFLYLASHYEKLKGSPEDNEQKQLFVEQHKHYLDEIIEQISEFSKRVILADANLDKVLSAYNKHRDKPIREQAENIIHLFTLTNLGAPAAFKYFDTTIDRKRYTSTKEVLDATLIHQSITGLYETRIDLSQLGGDGGPAPEAAAKGGGGGWVQEISDSRPMLHIYLNGRRFLGLLNTGADKTCIAGRDWPANWPIHQTESSLQGLGMACGVARSSQPLRWQHEDKSGIIHPFVIPTLPFTLWGRDIMKDIKVRLMTDSPDDSQDLMIGAIESNLFADQISWKSDQPVWLNQWPLKQEKLQALQQLVTEQLQLGHLEESNSPWNTPVFVIKKKSGKWRLLQDLRAVNATMHDMGALQPGLPSPVAVPKGWEIIIIDLQDCFFNIKLHPEDCKRFAFSVPSPNFKRPYQRFQWKVLPQGMKNSPTLCQKFVDKAILTVRDKYQDSYIVHYMDDILLAHPSRSIVDEILTSMIQALNKHGLVVSTEKIQKYDNLKYLGTHIQGDSVSYQKLQIRTDKLRTLNDFQKLLGNINWIRPFLKLTTGELKPLFEILNGDSNPISTRKLTPEACKALQLMNERLSTARVKRLDLSQPWSLCILKTEYTPTACLWQDGVVEWIHLPHISPKVITPYDIFCTQLIIKGRHRSKELFSKDPDYIVVPYTKVQFDLLLQEKEDWPISLLGFLGEVHFHLPKDPLLTFTLQTAIIFPHMTSTTPLEKGIVIFTDGSANGRSVTYIQGREPIIKENTQNTAQQAEIVAVITAFEEVSQPFNLYTDSKYVTGLFPEIETATLSPRTKIYTELKHLQRLIHKRQEKFYIGHIRGHTGLPGPLAQGNAYADSLTRILTAGKRTADGSEFEKRTADGSEFESPKKKAKVE

SEQ ID NO: 3275 - protein, 2114 aa, synthetic construct
MPAAKRVKLDGGDKKYSIGLDIGTNSVGWAVITDEYKVPSKKFKVLGNTDRHSIKKNLIGALLFDSGETAEATRLKRTARRRYTRRKNRICYLQEIFSNEMAKVDDSFFHRLEESFLVEEDKKHERHPIFGNIVDEVAYHEKYPTIYHLRKKLVDSTDKADLRLIYLALAHMIKFRGHFLIEGDLNPDNSDVDKLFIQLVQTYNQLFEENPINASGVDAKAILSARLSKSRRLENLIAQLPGEKKNGLFGNLIALSLGLTPNFKSNFDLAEDAKLQLSKDTYDDDLDNLLAQIGDQYADLFLAAKNLSDAILLSDILRVNTEITKAPLSASMIKRYDEHHQDLTLLKALVRQQLPEKYKEIFFDQSKNGYAGYIDGGASQEEFYKFIKPILEKMDGTEELLVKLNREDLLRKQRTFDNGSIPHQIHLGELHAILRRQEDFYPFLKDNREKIEKILTFRIPYYVGPLARGNSRFAWMTRKSEETITPWNFEEVVDKGASAQSFIERMTNFDKNLPNEKVLPKHSLLYEYFTVYNELTKVKYVTEGMRKPAFLSGEQKKAIVDLLFKTNRKVTVKQLKEDYFKKIECFDSVEISGVEDRFNASLGTYHDLLKIIKDKDFLDNEENEDILEDIVLTLTLFEDREMIEERLKTYAHLFDDKVMKQLKRRRYTGWGRLSRKLINGIRDKQSGKTILDFLKSDGFANRNFMQLIHDDSLTFKEDIQKAQVSGQGDSLHEHIANLAGSPAIKKGILQTVKVVDELVKVMGRHKPENIVIEMARENQTTQKGQKNSRERMKRIEEGIKELGSQILKEHPVENTQLQNEKLYLYYLQNGRDMYVDQELDINRLSDYDVDHIVPQSFLKDDSIDNKVLTRSDKARGKSDNVPSEEVVKKMKNYWRQLLNAKLITQRKFDNLTKAERGGLSELDKAGFIKRQLVETRQITKHVAQILDSRMNTKYDENDKLIREVKVITLKSKLVSDFRKDFQFYKVREINNYHHAHDAYLNAVVGTALIKKYPKLESEFVYGDYKVYDVRKMIAKSEQEIGKATAKYFFYSNIMNFFKTEITLANGEIRKRPLIETNGETGEIVWDKGRDFATVRKVLSMPQVNIVKKTEVQTGGFSKESILPKRNSDKLIARKKDWDPKKYGGFDSPTVAYSVLVVAKVEKGKSKKLKSVKELLGITIMERSSFEKNPIDFLEAKGYKEVKKDLIIKLPKYSLFELENGRKRMLASAGELQKGNELALPSKYVNFLYLASHYEKLKGSPEDNEQKQLFVEQHKHYLDEIIEQISEFSKRVILADANLDKVLSAYNKHRDKPIREQAENIIHLFTLTNLGAPAAFKYFDTTIDRKRYTSTKEVLDATLIHQSITGLYETRIDLSQLGGDGGGGGPAPGGSGGWVQEISDSRPMLHIYLNGRRFLGLLNTGADKTCIAGRDWPANWPIHQTESSLQGLGMACGVARSSQPLRWQHEDKSGIIHPFVIPTLPFTLWGRDIMKDIKVRLMTDSPDDSQDLMIGAIESNLFADQISWKSDQPVWLNQWPLKQEKLQALQQLVTEQLQLGHLEESNSPWNTPVFVIKKKSGKWRLLQDLRAVNATMHDMGALQPGLPSPVAVPKGWEIIIIDLQDCFFNIKLHPEDCKRFAFSVPSPNFKRPYQRFQWKVLPQGMKNSPTLCQKFVDKAILTVRDKYQDSYIVHYMDDILLAHPSRSIVDEILTSMIQALNKHGLVVSTEKIQKYDNLKYLGTHIQGDSVSYQKLQIRTDKLRTLNDFQKLLGNINWIRPFLKLTTGELKPLFEILNGDSNPISTRKLTPEACKALQLMNERLSTARVKRLDLSQPWSLCILKTEYTPTACLWQDGVVEWIHLPHISPKVITPYDIFCTQLIIKGRHRSKELFSKDPDYIVVPYTKVQFDLLLQEKEDWPISLLGFLGEVHFHLPKDPLLTFTLQTAIIFPHMTSTTPLEKGIVIFTDGSANGRSVTYIQGREPIIKENTQNTAQQAEIVAVITAFEEVSQPFNLYTDSKYVTGLFPEIETATLSPRTKIYTELKHLQRLIHKRQEKFYIGHIRGHTGLPGPLAQGNAYADSLTRILTAGKRTADGSEFEKRTADGSEFESPKKKAKVE

SEQ ID NO: 3276 - protein, 2114 aa, synthetic construct
MPAAKRVKLDGGDKKYSIGLDIGTNSVGWAVITDEYKVPSKKFKVLGNTDRHSIKKNLIGALLFDSGETAEATRLKRTARRRYTRRKNRICYLQEIFSNEMAKVDDSFFHRLEESFLVEEDKKHERHPIFGNIVDEVAYHEKYPTIYHLRKKLVDSTDKADLRLIYLALAHMIKFRGHFLIEGDLNPDNSDVDKLFIQLVQTYNQLFEENPINASGVDAKAILSARLSKSRRLENLIAQLPGEKKNGLFGNLIALSLGLTPNFKSNFDLAEDAKLQLSKDTYDDDLDNLLAQIGDQYADLFLAAKNLSDAILLSDILRVNTEITKAPLSASMIKRYDEHHQDLTLLKALVRQQLPEKYKEIFFDQSKNGYAGYIDGGASQEEFYKFIKPILEKMDGTEELLVKLNREDLLRKQRTFDNGSIPHQIHLGELHAILRRQEDFYPFLKDNREKIEKILTFRIPYYVGPLARGNSRFAWMTRKSEETITPWNFEEVVDKGASAQSFIERMTNFDKNLPNEKVLPKHSLLYEYFTVYNELTKVKYVTEGMRKPAFLSGEQKKAIVDLLFKTNRKVTVKQLKEDYFKKIECFDSVEISGVEDRFNASLGTYHDLLKIIKDKDFLDNEENEDILEDIVLTLTLFEDREMIEERLKTYAHLFDDKVMKQLKRRRYTGWGRLSRKLINGIRDKQSGKTILDFLKSDGFANRNFMQLIHDDSLTFKEDIQKAQVSGQGDSLHEHIANLAGSPAIKKGILQTVKVVDELVKVMGRHKPENIVIEMARENQTTQKGQKNSRERMKRIEEGIKELGSQILKEHPVENTQLQNEKLYLYYLQNGRDMYVDQELDINRLSDYDVDHIVPQSFLKDDSIDNKVLTRSDKARGKSDNVPSEEVVKKMKNYWRQLLNAKLITQRKFDNLTKAERGGLSELDKAGFIKRQLVETRQITKHVAQILDSRMNTKYDENDKLIREVKVITLKSKLVSDFRKDFQFYKVREINNYHHAHDAYLNAVVGTALIKKYPKLESEFVYGDYKVYDVRKMIAKSEQEIGKATAKYFFYSNIMNFFKTEITLANGEIRKRPLIETNGETGEIVWDKGRDFATVRKVLSMPQVNIVKKTEVQTGGFSKESILPKRNSDKLIARKKDWDPKKYGGFDSPTVAYSVLVVAKVEKGKSKKLKSVKELLGITIMERSSFEKNPIDFLEAKGYKEVKKDLIIKLPKYSLFELENGRKRMLASAGELQKGNELALPSKYVNFLYLASHYEKLKGSPEDNEQKQLFVEQHKHYLDEIIEQISEFSKRVILADANLDKVLSAYNKHRDKPIREQAENIIHLFTLTNLGAPAAFKYFDTTIDRKRYTSTKEVLDATLIHQSITGLYETRIDLSQLGGDGGGGSGGGPAPGGWVQEISDSRPMLHIYLNGRRFLGLLNTGADKTCIAGRDWPANWPIHQTESSLQGLGMACGVARSSQPLRWQHEDKSGIIHPFVIPTLPFTLWGRDIMKDIKVRLMTDSPDDSQDLMIGAIESNLFADQISWKSDQPVWLNQWPLKQEKLQALQQLVTEQLQLGHLEESNSPWNTPVFVIKKKSGKWRLLQDLRAVNATMHDMGALQPGLPSPVAVPKGWEIIIIDLQDCFFNIKLHPEDCKRFAFSVPSPNFKRPYQRFQWKVLPQGMKNSPTLCQKFVDKAILTVRDKYQDSYIVHYMDDILLAHPSRSIVDEILTSMIQALNKHGLVVSTEKIQKYDNLKYLGTHIQGDSVSYQKLQIRTDKLRTLNDFQKLLGNINWIRPFLKLTTGELKPLFEILNGDSNPISTRKLTPEACKALQLMNERLSTARVKRLDLSQPWSLCILKTEYTPTACLWQDGVVEWIHLPHISPKVITPYDIFCTQLIIKGRHRSKELFSKDPDYIVVPYTKVQFDLLLQEKEDWPISLLGFLGEVHFHLPKDPLLTFTLQTAIIFPHMTSTTPLEKGIVIFTDGSANGRSVTYIQGREPIIKENTQNTAQQAEIVAVITAFEEVSQPFNLYTDSKYVTGLFPEIETATLSPRTKIYTELKHLQRLIHKRQEKFYIGHIRGHTGLPGPLAQGNAYADSLTRILTAGKRTADGSEFEKRTADGSEFESPKKKAKVE

SEQ ID NO: 3277 - protein, 2135 aa, synthetic construct; identical to SEQ ID NO: 3173

SEQ ID NO: 3278 - protein, 2110 aa, synthetic construct
MPAAKRVKLDGGDKKYSIGLDIGTNSVGWAVITDEYKVPSKKFKVLGNTDRHSIKKNLIGALLFDSGETAEATRLKRTARRRYTRRKNRICYLQEIFSNEMAKVDDSFFHRLEESFLVEEDKKHERHPIFGNIVDEVAYHEKYPTIYHLRKKLVDSTDKADLRLIYLALAHMIKFRGHFLIEGDLNPDNSDVDKLFIQLVQTYNQLFEENPINASGVDAKAILSARLSKSRRLENLIAQLPGEKKNGLFGNLIALSLGLTPNFKSNFDLAEDAKLQLSKDTYDDDLDNLLAQIGDQYADLFLAAKNLSDAILLSDILRVNTEITKAPLSASMIKRYDEHHQDLTLLKALVRQQLPEKYKEIFFDQSKNGYAGYIDGGASQEEFYKFIKPILEKMDGTEELLVKLNREDLLRKQRTFDNGSIPHQIHLGELHAILRRQEDFYPFLKDNREKIEKILTFRIPYYVGPLARGNSRFAWMTRKSEETITPWNFEEVVDKGASAQSFIERMTNFDKNLPNEKVLPKHSLLYEYFTVYNELTKVKYVTEGMRKPAFLSGEQKKAIVDLLFKTNRKVTVKQLKEDYFKKIECFDSVEISGVEDRFNASLGTYHDLLKIIKDKDFLDNEENEDILEDIVLTLTLFEDREMIEERLKTYAHLFDDKVMKQLKRRRYTGWGRLSRKLINGIRDKQSGKTILDFLKSDGFANRNFMQLIHDDSLTFKEDIQKAQVSGQGDSLHEHIANLAGSPAIKKGILQTVKVVDELVKVMGRHKPENIVIEMARENQTTQKGQKNSRERMKRIEEGIKELGSQILKEHPVENTQLQNEKLYLYYLQNGRDMYVDQELDINRLSDYDVDHIVPQSFLKDDSIDNKVLTRSDKARGKSDNVPSEEVVKKMKNYWRQLLNAKLITQRKFDNLTKAERGGLSELDKAGFIKRQLVETRQITKHVAQILDSRMNTKYDENDKLIREVKVITLKSKLVSDFRKDFQFYKVREINNYHHAHDAYLNAVVGTALIKKYPKLESEFVYGDYKVYDVRKMIAKSEQEIGKATAKYFFYSNIMNFFKTEITLANGEIRKRPLIETNGETGEIVWDKGRDFATVRKVLSMPQVNIVKKTEVQTGGFSKESILPKRNSDKLIARKKDWDPKKYGGFDSPTVAYSVLVVAKVEKGKSKKLKSVKELLGITIMERSSFEKNPIDFLEAKGYKEVKKDLIIKLPKYSLFELENGRKRMLASAGELQKGNELALPSKYVNFLYLASHYEKLKGSPEDNEQKQLFVEQHKHYLDEIIEQISEFSKRVILADANLDKVLSAYNKHRDKPIREQAENIIHLFTLTNLGAPAAFKYFDTTIDRKRYTSTKEVLDATLIHQSITGLYETRIDLSQLGGDGGEAAAKGGWVQEISDSRPMLHIYLNGRRFLGLLNTGADKTCIAGRDWPANWPIHQTESSLQGLGMACGVARSSQPLRWQHEDKSGIIHPFVIPTLPFTLWGRDIMKDIKVRLMTDSPDDSQDLMIGAIESNLFADQISWKSDQPVWLNQWPLKQEKLQALQQLVTEQLQLGHLEESNSPWNTPVFVIKKKSGKWRLLQDLRAVNATMHDMGALQPGLPSPVAVPKGWEIIIIDLQDCFFNIKLHPEDCKRFAFSVPSPNFKRPYQRFQWKVLPQGMKNSPTLCQKFVDKAILTVRDKYQDSYIVHYMDDILLAHPSRSIVDEILTSMIQALNKHGLVVSTEKIQKYDNLKYLGTHIQGDSVSYQKLQIRTDKLRTLNDFQKLLGNINWIRPFLKLTTGELKPLFEILNGDSNPISTRKLTPEACKALQLMNERLSTARVKRLDLSQPWSLCILKTEYTPTACLWQDGVVEWIHLPHISPKVITPYDIFCTQLIIKGRHRSKELFSKDPDYIVVPYTKVQFDLLLQEKEDWPISLLGFLGEVHFHLPKDPLLTFTLQTAIIFPHMTSTTPLEKGIVIFTDGSANGRSVTYIQGREPIIKENTQNTAQQAEIVAVITAFEEVSQPFNLYTDSKYVTGLFPEIETATLSPRTKIYTELKHLQRLIHKRQEKFYIGHIRGHTGLPGPLAQGNAYADSLTRILTAGKRTADGSEFEKRTADGSEFESPKKKAKVE

SEQ ID NO: 3279 - protein, 2116 aa, synthetic construct
MPAAKRVKLDGGDKKYSIGLDIGTNSVGWAVITDEYKVPSKKFKVLGNTDRHSIKKNLIGALLFDSGETAEATRLKRTARRRYTRRKNRICYLQEIFSNEMAKVDDSFFHRLEESFLVEEDKKHERHPIFGNIVDEVAYHEKYPTIYHLRKKLVDSTDKADLRLIYLALAHMIKFRGHFLIEGDLNPDNSDVDKLFIQLVQTYNQLFEENPINASGVDAKAILSARLSKSRRLENLIAQLPGEKKNGLFGNLIALSLGLTPNFKSNFDLAEDAKLQLSKDTYDDDLDNLLAQIGDQYADLFLAAKNLSDAILLSDILRVNTEITKAPLSASMIKRYDEHHQDLTLLKALVRQQLPEKYKEIFFDQSKNGYAGYIDGGASQEEFYKFIKPILEKMDGTEELLVKLNREDLLRKQRTFDNGSIPHQIHLGELHAILRRQEDFYPFLKDNREKIEKILTFRIPYYVGPLARGNSRFAWMTRKSEETITPWNFEEVVDKGASAQSFIERMTNFDKNLPNEKVLPKHSLLYEYFTVYNELTKVKYVTEGMRKPAFLSGEQKKAIVDLLFKTNRKVTVKQLKEDYFKKIECFDSVEISGVEDRFNASLGTYHDLLKIIKDKDFLDNEENEDILEDIVLTLTLFEDREMIEERLKTYAHLFDDKVMKQLKRRRYTGWGRLSRKLINGIRDKQSGKTILDFLKSDGFANRNFMQLIHDDSLTFKEDIQKAQVSGQGDSLHEHIANLAGSPAIKKGILQTVKVVDELVKVMGRHKPENIVIEMARENQTTQKGQKNSRERMKRIEEGIKELGSQILKEHPVENTQLQNEKLYLYYLQNGRDMYVDQELDINRLSDYDVDHIVPQSFLKDDSIDNKVLTRSDKARGKSDNVPSEEVVKKMKNYWRQLLNAKLITQRKFDNLTKAERGGLSELDKAGFIKRQLVETRQITKHVAQILDSRMNTKYDENDKLIREVKVITLKSKLVSDFRKDFQFYKVREINNYHHAHDAYLNAVVGTALIKKYPKLESEFVYGDYKVYDVRKMIAKSEQEIGKATAKYFFYSNIMNFFKTEITLANGEIRKRPLIETNGETGEIVWDKGRDFATVRKVLSMPQVNIVKKTEVQTGGFSKESILPKRNSDKLIARKKDWDPKKYGGFDSPTVAYSVLVVAKVEKGKSKKLKSVKELLGITIMERSSFEKNPIDFLEAKGYKEVKKDLIIKLPKYSLFELENGRKRMLASAGELQKGNELALPSKYVNFLYLASHYEKLKGSPEDNEQKQLFVEQHKHYLDEIIEQISEFSKRVILADANLDKVLSAYNKHRDKPIREQAENIIHLFTLTNLGAPAAFKYFDTTIDRKRYTSTKEVLDATLIHQSITGLYETRIDLSQLGGDGGGGGGGSEAAAKGGWVQEISDSRPMLHIYLNGRRFLGLLNTGADKTCIAGRDWPANWPIHQTESSLQGLGMACGVARSSQPLRWQHEDKSGIIHPFVIPTLPFTLWGRDIMKDIKVRLMTDSPDDSQDLMIGAIESNLFADQISWKSDQPVWLNQWPLKQEKLQALQQLVTEQLQLGHLEESNSPWNTPVFVIKKKSGKWRLLQDLRAVNATMHDMGALQPGLPSPVAVPKGWEIIIIDLQDCFFNIKLHPEDCKRFAFSVPSPNFKRPYQRFQWKVLPQGMKNSPTLCQKFVDKAILTVRDKYQDSYIVHYMDDILLAHPSRSIVDEILTSMIQALNKHGLVVSTEKIQKYDNLKYLGTHIQGDSVSYQKLQIRTDKLRTLNDFQKLLGNINWIRPFLKLTTGELKPLFEILNGDSNPISTRKLTPEACKALQLMNERLSTARVKRLDLSQPWSLCILKTEYTPTACLWQDGVVEWIHLPHISPKVITPYDIFCTQLIIKGRHRSKELFSKDPDYIVVPYTKVQFDLLLQEKEDWPISLLGFLGEVHFHLPKDPLLTFTLQTAIIFPHMTSTTPLEKGIVIFTDGSANGRSVTYIQGREPIIKENTQNTAQQAEIVAVITAFEEVSQPFNLYTDSKYVTGLFPEIETATLSPRTKIYTELKHLQRLIHKRQEKFYIGHIRGHTGLPGPLAQGNAYADSLTRILTAGKRTADGSEFEKRTADGSEFESPKKKAKVE

SEQ ID NO: 3280 - protein, 2125 aa, synthetic construct; identical to SEQ ID NO: 3193

SEQ ID NO: 3281 - protein, 2120 aa, synthetic construct
MPAAKRVKLDGGDKKYSIGLDIGTNSVGWAVITDEYKVPSKKFKVLGNTDRHSIKKNLIGALLFDSGETAEATRLKRTARRRYTRRKNRICYLQEIFSNEMAKVDDSFFHRLEESFLVEEDKKHERHPIFGNIVDEVAYHEKYPTIYHLRKKLVDSTDKADLRLIYLALAHMIKFRGHFLIEGDLNPDNSDVDKLFIQLVQTYNQLFEENPINASGVDAKAILSARLSKSRRLENLIAQLPGEKKNGLFGNLIALSLGLTPNFKSNFDLAEDAKLQLSKDTYDDDLDNLLAQIGDQYADLFLAAKNLSDAILLSDILRVNTEITKAPLSASMIKRYDEHHQDLTLLKALVRQQLPEKYKEIFFDQSKNGYAGYIDGGASQEEFYKFIKPILEKMDGTEELLVKLNREDLLRKQRTFDNGSIPHQIHLGELHAILRRQEDFYPFLKDNREKIEKILTFRIPYYVGPLARGNSRFAWMTRKSEETITPWNFEEVVDKGASAQSFIERMTNFDKNLPNEKVLPKHSLLYEYFTVYNELTKVKYVTEGMRKPAFLSGEQKKAIVDLLFKTNRKVTVKQLKEDYFKKIECFDSVEISGVEDRFNASLGTYHDLLKIIKDKDFLDNEENEDILEDIVLTLTLFEDREMIEERLKTYAHLFDDKVMKQLKRRRYTGWGRLSRKLINGIRDKQSGKTILDFLKSDGFANRNFMQLIHDDSLTFKEDIQKAQVSGQGDSLHEHIANLAGSPAIKKGILQTVKVVDELVKVMGRHKPENIVIEMARENQTTQKGQKNSRERMKRIEEGIKELGSQILKEHPVENTQLQNEKLYLYYLQNGRDMYVDQELDINRLSDYDVDHIVPQSFLKDDSIDNKVLTRSDKARGKSDNVPSEEVVKKMKNYWRQLLNAKLITQRKFDNLTKAERGGLSELDKAGFIKRQLVETRQITKHVAQILDSRMNTKYDENDKLIREVKVITLKSKLVSDFRKDFQFYKVREINNYHHAHDAYLNAVVGTALIKKYPKLESEFVYGDYKVYDVRKMIAKSEQEIGKATAKYFFYSNIMNFFKTEITLANGEIRKRPLIETNGETGEIVWDKGRDFATVRKVLSMPQVNIVKKTEVQTGGFSKESILPKRNSDKLIARKKDWDPKKYGGFDSPTVAYSVLVVAKVEKGKSKKLKSVKELLGITIMERSSFEKNPIDFLEAKGYKEVKKDLIIKLPKYSLFELENGRKRMLASAGELQKGNELALPSKYVNFLYLASHYEKLKGSPEDNEQKQLFVEQHKHYLDEIIEQISEFSKRVILADANLDKVLSAYNKHRDKPIREQAENIIHLFTLTNLGAPAAFKYFDTTIDRKRYTSTKEVLDATLIHQSITGLYETRIDLSQLGGDGGGSSGSSGSSGSSGSSGGWVQEISDSRPMLHIYLNGRRFLGLLNTGADKTCIAGRDWPANWPIHQTESSLQGLGMACGVARSSQPLRWQHEDKSGIIHPFVIPTLPFTLWGRDIMKDIKVRLMTDSPDDSQDLMIGAIESNLFADQISWKSDQPVWLNQWPLKQEKLQALQQLVTEQLQLGHLEESNSPWNTPVFVIKKKSGKWRLLQDLRAVNATMHDMGALQPGLPSPVAVPKGWEIIIIDLQDCFFNIKLHPEDCKRFAFSVPSPNFKRPYQRFQWKVLPQGMKNSPTLCQKFVDKAILTVRDKYQDSYIVHYMDDILLAHPSRSIVDEILTSMIQALNKHGLVVSTEKIQKYDNLKYLGTHIQGDSVSYQKLQIRTDKLRTLNDFQKLLGNINWIRPFLKLTTGELKPLFEILNGDSNPISTRKLTPEACKALQLMNERLSTARVKRLDLSQPWSLCILKTEYTPTACLWQDGVVEWIHLPHISPKVITPYDIFCTQLIIKGRHRSKELFSKDPDYIVVPYTKVQFDLLLQEKEDWPISLLGFLGEVHFHLPKDPLLTFTLQTAIIFPHMTSTTPLEKGIVIFTDGSANGRSVTYIQGREPIIKENTQNTAQQAEIVAVITAFEEVSQPFNLYTDSKYVTGLFPEIETATLSPRTKIYTELKHLQRLIHKRQEKFYIGHIRGHTGLPGPLAQGNAYADSLTRILTAGKRTADGSEFEKRTADGSEFESPKKKAKVE

SEQ ID NO: 3282 - protein, 2123 aa, synthetic construct
MPAAKRVKLDGGDKKYSIGLDIGTNSVGWAVITDEYKVPSKKFKVLGNTDRHSIKKNLIGALLFDSGETAEATRLKRTARRRYTRRKNRICYLQEIFSNEMAKVDDSFFHRLEESFLVEEDKKHERHPIFGNIVDEVAYHEKYPTIYHLRKKLVDSTDKADLRLIYLALAHMIKFRGHFLIEGDLNPDNSDVDKLFIQLVQTYNQLFEENPINASGVDAKAILSARLSKSRRLENLIAQLPGEKKNGLFGNLIALSLGLTPNFKSNFDLAEDAKLQLSKDTYDDDLDNLLAQIGDQYADLFLAAKNLSDAILLSDILRVNTEITKAPLSASMIKRYDEHHQDLTLLKALVRQQLPEKYKEIFFDQSKNGYAGYIDGGASQEEFYKFIKPILEKMDGTEELLVKLNREDLLRKQRTFDNGSIPHQIHLGELHAILRRQEDFYPFLKDNREKIEKILTFRIPYYVGPLARGNSRFAWMTRKSEETITPWNFEEVVDKGASAQSFIERMTNFDKNLPNEKVLPKHSLLYEYFTVYNELTKVKYVTEGMRKPAFLSGEQKKAIVDLLFKTNRKVTVKQLKEDYFKKIECFDSVEISGVEDRFNASLGTYHDLLKIIKDKDFLDNEENEDILEDIVLTLTLFEDREMIEERLKTYAHLFDDKVMKQLKRRRYTGWGRLSRKLINGIRDKQSGKTILDFLKSDGFANRNFMQLIHDDSLTFKEDIQKAQVSGQGDSLHEHIANLAGSPAIKKGILQTVKVVDELVKVMGRHKPENIVIEMARENQTTQKGQKNSRERMKRIEEGIKELGSQILKEHPVENTQLQNEKLYLYYLQNGRDMYVDQELDINRLSDYDVDHIVPQSFLKDDSIDNKVLTRSDKARGKSDNVPSEEVVKKMKNYWRQLLNAKLITQRKFDNLTKAERGGLSELDKAGFIKRQLVETRQITKHVAQILDSRMNTKYDENDKLIREVKVITLKSKLVSDFRKDFQFYKVREINNYHHAHDAYLNAVVGTALIKKYPKLESEFVYGDYKVYDVRKMIAKSEQEIGKATAKYFFYSNIMNFFKTEITLANGEIRKRPLIETNGETGEIVWDKGRDFATVRKVLSMPQVNIVKKTEVQTGGFSKESILPKRNSDKLIARKKDWDPKKYGGFDSPTVAYSVLVVAKVEKGKSKKLKSVKELLGITIMERSSFEKNPIDFLEAKGYKEVKKDLIIKLPKYSLFELENGRKRMLASAGELQKGNELALPSKYVNFLYLASHYEKLKGSPEDNEQKQLFVEQHKHYLDEIIEQISEFSKRVILADANLDKVLSAYNKHRDKPIREQAENIIHLFTLTNLGAPAAFKYFDTTIDRKRYTSTKEVLDATLIHQSITGLYETRIDLSQLGGDGGGSSGSSGSSGSSGSSGSSGGWVQEISDSRPMLHIYLNGRRFLGLLNTGADKTCIAGRDWPANWPIHQTESSLQGLGMACGVARSSQPLRWQHEDKSGIIHPFVIPTLPFTLWGRDIMKDIKVRLMTDSPDDSQDLMIGAIESNLFADQISWKSDQPVWLNQWPLKQEKLQALQQLVTEQLQLGHLEESNSPWNTPVFVIKKKSGKWRLLQDLRAVNATMHDMGALQPGLPSPVAVPKGWEIIIIDLQDCFFNIKLHPEDCKRFAFSVPSPNFKRPYQRFQWKVLPQGMKNSPTLCQKFVDKAILTVRDKYQDSYIVHYMDDILLAHPSRSIVDEILTSMIQALNKHGLVVSTEKIQKYDNLKYLGTHIQGDSVSYQKLQIRTDKLRTLNDFQKLLGNINWIRPFLKLTTGELKPLFEILNGDSNPISTRKLTPEACKALQLMNERLSTARVKRLDLSQPWSLCILKTEYTPTACLWQDGVVEWIHLPHISPKVITPYDIFCTQLIIKGRHRSKELFSKDPDYIVVPYTKVQFDLLLQEKEDWPISLLGFLGEVHFHLPKDPLLTFTLQTAIIFPHMTSTTPLEKGIVIFTDGSANGRSVTYIQGREPIIKENTQNTAQQAEIVAVITAFEEVSQPFNLYTDSKYVTGLFPEIETATLSPRTKIYTELKHLQRLIHKRQEKFYIGHIRGHTGLPGPLAQGNAYADSLTRILTAGKRTADGSEFEKRTADGSEFESPKKKAKVE

SEQ ID NO: 3283 - protein, 2116 aa, synthetic construct
MPAAKRVKLDGGDKKYSIGLDIGTNSVGWAVITDEYKVPSKKFKVLGNTDRHSIKKNLIGALLFDSGETAEATRLKRTARRRYTRRKNRICYLQEIFSNEMAKVDDSFFHRLEESFLVEEDKKHERHPIFGNIVDEVAYHEKYPTIYHLRKKLVDSTDKADLRLIYLALAHMIKFRGHFLIEGDLNPDNSDVDKLFIQLVQTYNQLFEENPINASGVDAKAILSARLSKSRRLENLIAQLPGEKKNGLFGNLIALSLGLTPNFKSNFDLAEDAKLQLSKDTYDDDLDNLLAQIGDQYADLFLAAKNLSDAILLSDILRVNTEITKAPLSASMIKRYDEHHQDLTLLKALVRQQLPEKYKEIFFDQSKNGYAGYIDGGASQEEFYKFIKPILEKMDGTEELLVKLNREDLLRKQRTFDNGSIPHQIHLGELHAILRRQEDFYPFLKDNREKIEKILTFRIPYYVGPLARGNSRFAWMTRKSEETITPWNFEEVVDKGASAQSFIERMTNFDKNLPNEKVLPKHSLLYEYFTVYNELTKVKYVTEGMRKPAFLSGEQKKAIVDLLFKTNRKVTVKQLKEDYFKKIECFDSVEISGVEDRFNASLGTYHDLLKIIKDKDFLDNEENEDILEDIVLTLTLFEDREMIEERLKTYAHLFDDKVMKQLKRRRYTGWGRLSRKLINGIRDKQSGKTILDFLKSDGFANRNFMQLIHDDSLTFKEDIQKAQVSGQGDSLHEHIANLAGSPAIKKGILQTVKVVDELVKVMGRHKPENIVIEMARENQTTQKGQKNSRERMKRIEEGIKELGSQILKEHPVENTQLQNEKLYLYYLQNGRDMYVDQELDINRLSDYDVDHIVPQSFLKDDSIDNKVLTRSDKARGKSDNVPSEEVVKKMKNYWRQLLNAKLITQRKFDNLTKAERGGLSELDKAGFIKRQLVETRQITKHVAQILDSRMNTKYDENDKLIREVKVITLKSKLVSDFRKDFQFYKVREINNYHHAHDAYLNAVVGTALIKKYPKLESEFVYGDYKVYDVRKMIAKSEQEIGKATAKYFFYSNIMNFFKTEITLANGEIRKRPLIETNGETGEIVWDKGRDFATVRKVLSMPQVNIVKKTEVQTGGFSKESILPKRNSDKLIARKKDWDPKKYGGFDSPTVAYSVLVVAKVEKGKSKKLKSVKELLGITIMERSSFEKNPIDFLEAKGYKEVKKDLIIKLPKYSLFELENGRKRMLASAGELQKGNELALPSKYVNFLYLASHYEKLKGSPEDNEQKQLFVEQHKHYLDEIIEQISEFSKRVILADANLDKVLSAYNKHRDKPIREQAENIIHLFTLTNLGAPAAFKYFDTTIDRKRYTSTKEVLDATLIHQSITGLYETRIDLSQLGGDGGEAAAKGGGGSSGGWVQEISDSRPMLHIYLNGRRFLGLLNTGADKTCIAGRDWPANWPIHQTESSLQGLGMACGVARSSQPLRWQHEDKSGIIHPFVIPTLPFTLWGRDIMKDIKVRLMTDSPDDSQDLMIGAIESNLFADQISWKSDQPVWLNQWPLKQEKLQALQQLVTEQLQLGHLEESNSPWNTPVFVIKKKSGKWRLLQDLRAVNATMHDMGALQPGLPSPVAVPKGWEIIIIDLQDCFFNIKLHPEDCKRFAFSVPSPNFKRPYQRFQWKVLPQGMKNSPTLCQKFVDKAILTVRDKYQDSYIVHYMDDILLAHPSRSIVDEILTSMIQALNKHGLVVSTEKIQKYDNLKYLGTHIQGDSVSYQKLQIRTDKLRTLNDFQKLLGNINWIRPFLKLTTGELKPLFEILNGDSNPISTRKLTPEACKALQLMNERLSTARVKRLDLSQPWSLCILKTEYTPTACLWQDGVVEWIHLPHISPKVITPYDIFCTQLIIKGRHRSKELFSKDPDYIVVPYTKVQFDLLLQEKEDWPISLLGFLGEVHFHLPKDPLLTFTLQTAIIFPHMTSTTPLEKGIVIFTDGSANGRSVTYIQGREPIIKENTQNTAQQAEIVAVITAFEEVSQPFNLYTDSKYVTGLFPEIETATLSPRTKIYTELKHLQRLIHKRQEKFYIGHIRGHTGLPGPLAQGNAYADSLTRILTAGKRTADGSEFEKRTADGSEFESPKKKAKVE

SEQ ID NO: 3284 - protein, 2116 aa, synthetic construct
MPAAKRVKLDGGDKKYSIGLDIGTNSVGWAVITDEYKVPSKKFKVLGNTDRHSIKKNLIGALLFDSGETAEATRLKRTARRRYTRRKNRICYLQEIFSNEMAKVDDSFFHRLEESFLVEEDKKHERHPIFGNIVDEVAYHEKYPTIYHLRKKLVDSTDKADLRLIYLALAHMIKFRGHFLIEGDLNPDNSDVDKLFIQLVQTYNQLFEENPINASGVDAKAILSARLSKSRRLENLIAQLPGEKKNGLFGNLIALSLGLTPNFKSNFDLAEDAKLQLSKDTYDDDLDNLLAQIGDQYADLFLAAKNLSDAILLSDILRVNTEITKAPLSASMIKRYDEHHQDLTLLKALVRQQLPEKYKEIFFDQSKNGYAGYIDGGASQEEFYKFIKPILEKMDGTEELLVKLNREDLLRKQRTFDNGSIPHQIHLGELHAILRRQEDFYPFLKDNREKIEKILTFRIPYYVGPLARGNSRFAWMTRKSEETITPWNFEEVVDKGASAQSFIERMTNFDKNLPNEKVLPKHSLLYEYFTVYNELTKVKYVTEGMRKPAFLSGEQKKAIVDLLFKTNRKVTVKQLKEDYFKKIECFDSVEISGVEDRFNASLGTYHDLLKIIKDKDFLDNEENEDILEDIVLTLTLFEDREMIEERLKTYAHLFDDKVMKQLKRRRYTGWGRLSRKLINGIRDKQSGKTILDFLKSDGFANRNFMQLIHDDSLTFKEDIQKAQVSGQGDSLHEHIANLAGSPAIKKGILQTVKVVDELVKVMGRHKPENIVIEMARENQTTQKGQKNSRERMKRIEEGIKELGSQILKEHPVENTQLQNEKLYLYYLQNGRDMYVDQELDINRLSDYDVDHIVPQSFLKDDSIDNKVLTRSDKARGKSDNVPSEEVVKKMKNYWRQLLNAKLITQRKFDNLTKAERGGLSELDKAGFIKRQLVETRQITKHVAQILDSRMNTKYDENDKLIREVKVITLKSKLVSDFRKDFQFYKVREINNYHHAHDAYLNAVVGTALIKKYPKLESEFVYGDYKVYDVRKMIAKSEQEIGKATAKYFFYSNIMNFFKTEITLANGEIRKRPLIETNGETGEIVWDKGRDFATVRKVLSMPQVNIVKKTEVQTGGFSKESILPKRNSDKLIARKKDWDPKKYGGFDSPTVAYSVLVVAKVEKGKSKKLKSVKELLGITIMERSSFEKNPIDFLEAKGYKEVKKDLIIKLPKYSLFELENGRKRMLASAGELQKGNELALPSKYVNFLYLASHYEKLKGSPEDNEQKQLFVEQHKHYLDEIIEQISEFSKRVILADANLDKVLSAYNKHRDKPIREQAENIIHLFTLTNLGAPAAFKYFDTTIDRKRYTSTKEVLDATLIHQSITGLYETRIDLSQLGGDGGEAAAKGGGGGSGGWVQEISDSRPMLHIYLNGRRFLGLLNTGADKTCIAGRDWPANWPIHQTESSLQGLGMACGVARSSQPLRWQHEDKSGIIHPFVIPTLPFTLWGRDIMKDIKVRLMTDSPDDSQDLMIGAIESNLFADQISWKSDQPVWLNQWPLKQEKLQALQQLVTEQLQLGHLEESNSPWNTPVFVIKKKSGKWRLLQDLRAVNATMHDMGALQPGLPSPVAVPKGWEIIIIDLQDCFFNIKLHPEDCKRFAFSVPSPNFKRPYQRFQWKVLPQGMKNSPTLCQKFVDKAILTVRDKYQDSYIVHYMDDILLAHPSRSIVDEILTSMIQALNKHGLVVSTEKIQKYDNLKYLGTHIQGDSVSYQKLQIRTDKLRTLNDFQKLLGNINWIRPFLKLTTGELKPLFEILNGDSNPISTRKLTPEACKALQLMNERLSTARVKRLDLSQPWSLCILKTEYTPTACLWQDGVVEWIHLPHISPKVITPYDIFCTQLIIKGRHRSKELFSKDPDYIVVPYTKVQFDLLLQEKEDWPISLLGFLGEVHFHLPKDPLLTFTLQTAIIFPHMTSTTPLEKGIVIFTDGSANGRSVTYIQGREPIIKENTQNTAQQAEIVAVITAFEEVSQPFNLYTDSKYVTGLFPEIETATLSPRTKIYTELKHLQRLIHKRQEKFYIGHIRGHTGLPGPLAQGNAYADSLTRILTAGKRTADGSEFEKRTADGSEFESPKKKAKVE

SEQ ID NO: 3285 - protein, 2116 aa, synthetic construct
MPAAKRVKLDGGDKKYSIGLDIGTNSVGWAVITDEYKVPSKKFKVLGNTDRHSIKKNLIGALLFDSGETAEATRLKRTARRRYTRRKNRICYLQEIFSNEMAKVDDSFFHRLEESFLVEEDKKHERHPIFGNIVDEVAYHEKYPTIYHLRKKLVDSTDKADLRLIYLALAHMIKFRGHFLIEGDLNPDNSDVDKLFIQLVQTYNQLFEENPINASGVDAKAILSARLSKSRRLENLIAQLPGEKKNGLFGNLIALSLGLTPNFKSNFDLAEDAKLQLSKDTYDDDLDNLLAQIGDQYADLFLAAKNLSDAILLSDILRVNTEITKAPLSASMIKRYDEHHQDLTLLKALVRQQLPEKYKEIFFDQSKNGYAGYIDGGASQEEFYKFIKPILEKMDGTEELLVKLNREDLLRKQRTFDNGSIPHQIHLGELHAILRRQEDFYPFLKDNREKIEKILTFRIPYYVGPLARGNSRFAWMTRKSEETITPWNFEEVVDKGASAQSFIERMTNFDKNLPNEKVLPKHSLLYEYFTVYNELTKVKYVTEGMRKPAFLSGEQKKAIVDLLFKTNRKVTVKQLKEDYFKKIECFDSVEISGVEDRFNASLGTYHDLLKIIKDKDFLDNEENEDILEDIVLTLTLFEDREMIEERLKTYAHLFDDKVMKQLKRRRYTGWGRLSRKLINGIRDKQSGKTILDFLKSDGFANRNFMQLIHDDSLTFKEDIQKAQVSGQGDSLHEHIANLAGSPAIKKGILQTVKVVDELVKVMGRHKPENIVIEMARENQTTQKGQKNSRERMKRIEEGIKELGSQILKEHPVENTQLQNEKLYLYYLQNGRDMYVDQELDINRLSDYDVDHIVPQSFLKDDSIDNKVLTRSDKARGKSDNVPSEEVVKKMKNYWRQLLNAKLITQRKFDNLTKAERGGLSELDKAGFIKRQLVETRQITKHVAQILDSRMNTKYDENDKLIREVKVITLKSKLVSDFRKDFQFYKVREINNYHHAHDAYLNAVVGTALIKKYPKLESEFVYGDYKVYDVRKMIAKSEQEIGKATAKYFFYSNIMNFFKTEITLANGEIRKRPLIETNGETGEIVWDKGRDFATVRKVLSMPQVNIVKKTEVQTGGFSKESILPKRNSDKLIARKKDWDPKKYGGFDSPTVAYSVLVVAKVEKGKSKKLKSVKELLGITIMERSSFEKNPIDFLEAKGYKEVKKDLIIKLPKYSLFELENGRKRMLASAGELQKGNELALPSKYVNFLYLASHYEKLKGSPEDNEQKQLFVEQHKHYLDEIIEQISEFSKRVILADANLDKVLSAYNKHRDKPIREQAENIIHLFTLTNLGAPAAFKYFDTTIDRKRYTSTKEVLDATLIHQSITGLYETRIDLSQLGGDGGGGGGSSEAAAKGGWVQEISDSRPMLHIYLNGRRFLGLLNTGADKTCIAGRDWPANWPIHQTESSLQGLGMACGVARSSQPLRWQHEDKSGIIHPFVIPTLPFTLWGRDIMKDIKVRLMTDSPDDSQDLMIGAIESNLFADQISWKSDQPVWLNQWPLKQEKLQALQQLVTEQLQLGHLEESNSPWNTPVFVIKKKSGKWRLLQDLRAVNATMHDMGALQPGLPSPVAVPKGWEIIIIDLQDCFFNIKLHPEDCKRFAFSVPSPNFKRPYQRFQWKVLPQGMKNSPTLCQKFVDKAILTVRDKYQDSYIVHYMDDILLAHPSRSIVDEILTSMIQALNKHGLVVSTEKIQKYDNLKYLGTHIQGDSVSYQKLQIRTDKLRTLNDFQKLLGNINWIRPFLKLTTGELKPLFEILNGDSNPISTRKLTPEACKALQLMNERLSTARVKRLDLSQPWSLCILKTEYTPTACLWQDGVVEWIHLPHISPKVITPYDIFCTQLIIKGRHRSKELFSKDPDYIVVPYTKVQFDLLLQEKEDWPISLLGFLGEVHFHLPKDPLLTFTLQTAIIFPHMTSTTPLEKGIVIFTDGSANGRSVTYIQGREPIIKENTQNTAQQAEIVAVITAFEEVSQPFNLYTDSKYVTGLFPEIETATLSPRTKIYTELKHLQRLIHKRQEKFYIGHIRGHTGLPGPLAQGNAYADSLTRILTAGKRTADGSEFEKRTADGSEFESPKKKAKVE

SEQ ID NO: 3286 - protein, 2116 aa, synthetic construct
MPAAKRVKLDGGDKKYSIGLDIGTNSVGWAVITDEYKVPSKKFKVLGNTDRHSIKKNLIGALLFDSGETAEATRLKRTARRRYTRRKNRICYLQEIFSNEMAKVDDSFFHRLEESFLVEEDKKHERHPIFGNIVDEVAYHEKYPTIYHLRKKLVDSTDKADLRLIYLALAHMIKFRGHFLIEGDLNPDNSDVDKLFIQLVQTYNQLFEENPINASGVDAKAILSARLSKSRRLENLIAQLPGEKKNGLFGNLIALSLGLTPNFKSNFDLAEDAKLQLSKDTYDDDLDNLLAQIGDQYADLFLAAKNLSDAILLSDILRVNTEITKAPLSASMIKRYDEHHQDLTLLKALVRQQLPEKYKEIFFDQSKNGYAGYIDGGASQEEFYKFIKPILEKMDGTEELLVKLNREDLLRKQRTFDNGSIPHQIHLGELHAILRRQEDFYPFLKDNREKIEKILTFRIPYYVGPLARGNSRFAWMTRKSEETITPWNFEEVVDKGASAQSFIERMTNFDKNLPNEKVLPKHSLLYEYFTVYNELTKVKYVTEGMRKPAFLSGEQKKAIVDLLFKTNRKVTVKQLKEDYFKKIECFDSVEISGVEDRFNASLGTYHDLLKIIKDKDFLDNEENEDILEDIVLTLTLFEDREMIEERLKTYAHLFDDKVMKQLKRRRYTGWGRLSRKLINGIRDKQSGKTILDFLKSDGFANRNFMQLIHDDSLTFKEDIQKAQVSGQGDSLHEHIANLAGSPAIKKGILQTVKVVDELVKVMGRHKPENIVIEMARENQTTQKGQKNSRERMKRIEEGIKELGSQILKEHPVENTQLQNEKLYLYYLQNGRDMYVDQELDINRLSDYDVDHIVPQSFLKDDSIDNKVLTRSDKARGKSDNVPSEEVVKKMKNYWRQLLNAKLITQRKFDNLTKAERGGLSELDKAGFIKRQLVETRQITKHVAQILDSRMNTKYDENDKLIREVKVITLKSKLVSDFRKDFQFYKVREINNYHHAHDAYLNAVVGTALIKKYPKLESEFVYGDYKVYDVRKMIAKSEQEIGKATAKYFFYSNIMNFFKTEITLANGEIRKRPLIETNGETGEIVWDKGRDFATVRKVLSMPQVNIVKKTEVQTGGFSKESILPKRNSDKLIARKKDWDPKKYGGFDSPTVAYSVLVVAKVEKGKSKKLKSVKELLGITIMERSSFEKNPIDFLEAKGYKEVKKDLIIKLPKYSLFELENGRKRMLASAGELQKGNELALPSKYVNFLYLASHYEKLKGSPEDNEQKQLFVEQHKHYLDEIIEQISEFSKRVILADANLDKVLSAYNKHRDKPIREQAENIIHLFTLTNLGAPAAFKYFDTTIDRKRYTSTKEVLDATLIHQSITGLYETRIDLSQLGGDGGGGSGGGEAAAKGGWVQEISDSRPMLHIYLNGRRFLGLLNTGADKTCIAGRDWPANWPIHQTESSLQGLGMACGVARSSQPLRWQHEDKSGIIHPFVIPTLPFTLWGRDIMKDIKVRLMTDSPDDSQDLMIGAIESNLFADQISWKSDQPVWLNQWPLKQEKLQALQQLVTEQLQLGHLEESNSPWNTPVFVIKKKSGKWRLLQDLRAVNATMHDMGALQPGLPSPVAVPKGWEIIIIDLQDCFFNIKLHPEDCKRFAFSVPSPNFKRPYQRFQWKVLPQGMKNSPTLCQKFVDKAILTVRDKYQDSYIVHYMDDILLAHPSRSIVDEILTSMIQALNKHGLVVSTEKIQKYDNLKYLGTHIQGDSVSYQKLQIRTDKLRTLNDFQKLLGNINWIRPFLKLTTGELKPLFEILNGDSNPISTRKLTPEACKALQLMNERLSTARVKRLDLSQPWSLCILKTEYTPTACLWQDGVVEWIHLPHISPKVITPYDIFCTQLIIKGRHRSKELFSKDPDYIVVPYTKVQFDLLLQEKEDWPISLLGFLGEVHFHLPKDPLLTFTLQTAIIFPHMTSTTPLEKGIVIFTDGSANGRSVTYIQGREPIIKENTQNTAQQAEIVAVITAFEEVSQPFNLYTDSKYVTGLFPEIETATLSPRTKIYTELKHLQRLIHKRQEKFYIGHIRGHTGLPGPLAQGNAYADSLTRILTAGKRTADGSEFEKRTADGSEFESPKKKAKVE

SEQ ID NO: 3287 - protein, 2114 aa, synthetic construct; identical to SEQ ID NO: 3179

SEQ ID NO: 3288 - protein, 2116 aa, synthetic construct
MPAAKRVKLDGGDKKYSIGLDIGTNSVGWAVITDEYKVPSKKFKVLGNTDRHSIKKNLIGALLFDSGETAEATRLKRTARRRYTRRKNRICYLQEIFSNEMAKVDDSFFHRLEESFLVEEDKKHERHPIFGNIVDEVAYHEKYPTIYHLRKKLVDSTDKADLRLIYLALAHMIKFRGHFLIEGDLNPDNSDVDKLFIQLVQTYNQLFEENPINASGVDAKAILSARLSKSRRLENLIAQLPGEKKNGLFGNLIALSLGLTPNFKSNFDLAEDAKLQLSKDTYDDDLDNLLAQIGDQYADLFLAAKNLSDAILLSDILRVNTEITKAPLSASMIKRYDEHHQDLTLLKALVRQQLPEKYKEIFFDQSKNGYAGYIDGGASQEEFYKFIKPILEKMDGTEELLVKLNREDLLRKQRTFDNGSIPHQIHLGELHAILRRQEDFYPFLKDNREKIEKILTFRIPYYVGPLARGNSRFAWMTRKSEETITPWNFEEVVDKGASAQSFIERMTNFDKNLPNEKVLPKHSLLYEYFTVYNELTKVKYVTEGMRKPAFLSGEQKKAIVDLLFKTNRKVTVKQLKEDYFKKIECFDSVEISGVEDRFNASLGTYHDLLKIIKDKDFLDNEENEDILEDIVLTLTLFEDREMIEERLKTYAHLFDDKVMKQLKRRRYTGWGRLSRKLINGIRDKQSGKTILDFLKSDGFANRNFMQLIHDDSLTFKEDIQKAQVSGQGDSLHEHIANLAGSPAIKKGILQTVKVVDELVKVMGRHKPENIVIEMARENQTTQKGQKNSRERMKRIEEGIKELGSQILKEHPVENTQLQNEKLYLYYLQNGRDMYVDQELDINRLSDYDVDHIVPQSFLKDDSIDNKVLTRSDKARGKSDNVPSEEVVKKMKNYWRQLLNAKLITQRKFDNLTKAERGGLSELDKAGFIKRQLVETRQITKHVAQILDSRMNTKYDENDKLIREVKVITLKSKLVSDFRKDFQFYKVREINNYHHAHDAYLNAVVGTALIKKYPKLESEFVYGDYKVYDVRKMIAKSEQEIGKATAKYFFYSNIMNFFKTEITLANGEIRKRPLIETNGETGEIVWDKGRDFATVRKVLSMPQVNIVKKTEVQTGGFSKESILPKRNSDKLIARKKDWDPKKYGGFDSPTVAYSVLVVAKVEKGKSKKLKSVKELLGITIMERSSFEKNPIDFLEAKGYKEVKKDLIIKLPKYSLFELENGRKRMLASAGELQKGNELALPSKYVNFLYLASHYEKLKGSPEDNEQKQLFVEQHKHYLDEIIEQISEFSKRVILADANLDKVLSAYNKHRDKPIREQAENIIHLFTLTNLGAPAAFKYFDTTIDRKRYTSTKEVLDATLIHQSITGLYETRIDLSQLGGDGGPAPEAAAKGGSGGWVQEISDSRPMLHIYLNGRRFLGLLNTGADKTCIAGRDWPANWPIHQTESSLQGLGMACGVARSSQPLRWQHEDKSGIIHPFVIPTLPFTLWGRDIMKDIKVRLMTDSPDDSQDLMIGAIESNLFADQISWKSDQPVWLNQWPLKQEKLQALQQLVTEQLQLGHLEESNSPWNTPVFVIKKKSGKWRLLQDLRAVNATMHDMGALQPGLPSPVAVPKGWEIIIIDLQDCFFNIKLHPEDCKRFAFSVPSPNFKRPYQRFQWKVLPQGMKNSPTLCQKFVDKAILTVRDKYQDSYIVHYMDDILLAHPSRSIVDEILTSMIQALNKHGLVVSTEKIQKYDNLKYLGTHIQGDSVSYQKLQIRTDKLRTLNDFQKLLGNINWIRPFLKLTTGELKPLFEILNGDSNPISTRKLTPEACKALQLMNERLSTARVKRLDLSQPWSLCILKTEYTPTACLWQDGVVEWIHLPHISPKVITPYDIFCTQLIIKGRHRSKELFSKDPDYIVVPYTKVQFDLLLQEKEDWPISLLGFLGEVHFHLPKDPLLTFTLQTAIIFPHMTSTTPLEKGIVIFTDGSANGRSVTYIQGREPIIKENTQNTAQQAEIVAVITAFEEVSQPFNLYTDSKYVTGLFPEIETATLSPRTKIYTELKHLQRLIHKRQEKFYIGHIRGHTGLPGPLAQGNAYADSLTRILTAGKRTADGSEFEKRTADGSEFESPKKKAKVE

SEQ ID NO: 3289 - protein, 2116 aa, synthetic construct; identical to SEQ ID NO: 3178

SEQ ID NO: 3290 - protein, 2116 aa, synthetic construct
MPAAKRVKLDGGDKKYSIGLDIGTNSVGWAVITDEYKVPSKKFKVLGNTDRHSIKKNLIGALLFDSGETAEATRLKRTARRRYTRRKNRICYLQEIFSNEMAKVDDSFFHRLEESFLVEEDKKHERHPIFGNIVDEVAYHEKYPTIYHLRKKLVDSTDKADLRLIYLALAHMIKFRGHFLIEGDLNPDNSDVDKLFIQLVQTYNQLFEENPINASGVDAKAILSARLSKSRRLENLIAQLPGEKKNGLFGNLIALSLGLTPNFKSNFDLAEDAKLQLSKDTYDDDLDNLLAQIGDQYADLFLAAKNLSDAILLSDILRVNTEITKAPLSASMIKRYDEHHQDLTLLKALVRQQLPEKYKEIFFDQSKNGYAGYIDGGASQEEFYKFIKPILEKMDGTEELLVKLNREDLLRKQRTFDNGSIPHQIHLGELHAILRRQEDFYPFLKDNREKIEKILTFRIPYYVGPLARGNSRFAWMTRKSEETITPWNFEEVVDKGASAQSFIERMTNFDKNLPNEKVLPKHSLLYEYFTVYNELTKVKYVTEGMRKPAFLSGEQKKAIVDLLFKTNRKVTVKQLKEDYFKKIECFDSVEISGVEDRFNASLGTYHDLLKIIKDKDFLDNEENEDILEDIVLTLTLFEDREMIEERLKTYAHLFDDKVMKQLKRRRYTGWGRLSRKLINGIRDKQSGKTILDFLKSDGFANRNFMQLIHDDSLTFKEDIQKAQVSGQGDSLHEHIANLAGSPAIKKGILQTVKVVDELVKVMGRHKPENIVIEMARENQTTQKGQKNSRERMKRIEEGIKELGSQILKEHPVENTQLQNEKLYLYYLQNGRDMYVDQELDINRLSDYDVDHIVPQSFLKDDSIDNKVLTRSDKARGKSDNVPSEEVVKKMKNYWRQLLNAKLITQRKFDNLTKAERGGLSELDKAGFIKRQLVETRQITKHVAQILDSRMNTKYDENDKLIREVKVITLKSKLVSDFRKDFQFYKVREINNYHHAHDAYLNAVVGTALIKKYPKLESEFVYGDYKVYDVRKMIAKSEQEIGKATAKYFFYSNIMNFFKTEITLANGEIRKRPLIETNGETGEIVWDKGRDFATVRKVLSMPQVNIVKKTEVQTGGFSKESILPKRNSDKLIARKKDWDPKKYGGFDSPTVAYSVLVVAKVEKGKSKKLKSVKELLGITIMERSSFEKNPIDFLEAKGYKEVKKDLIIKLPKYSLFELENGRKRMLASAGELQKGNELALPSKYVNFLYLASHYEKLKGSPEDNEQKQLFVEQHKHYLDEIIEQISEFSKRVILADANLDKVLSAYNKHRDKPIREQAENIIHLFTLTNLGAPAAFKYFDTTIDRKRYTSTKEVLDATLIHQSITGLYETRIDLSQLGGDGGPAPGGSEAAAKGGWVQEISDSRPMLHIYLNGRRFLGLLNTGADKTCIAGRDWPANWPIHQTESSLQGLGMACGVARSSQPLRWQHEDKSGIIHPFVIPTLPFTLWGRDIMKDIKVRLMTDSPDDSQDLMIGAIESNLFADQISWKSDQPVWLNQWPLKQEKLQALQQLVTEQLQLGHLEESNSPWNTPVFVIKKKSGKWRLLQDLRAVNATMHDMGALQPGLPSPVAVPKGWEIIIIDLQDCFFNIKLHPEDCKRFAFSVPSPNFKRPYQRFQWKVLPQGMKNSPTLCQKFVDKAILTVRDKYQDSYIVHYMDDILLAHPSRSIVDEILTSMIQALNKHGLVVSTEKIQKYDNLKYLGTHIQGDSVSYQKLQIRTDKLRTLNDFQKLLGNINWIRPFLKLTTGELKPLFEILNGDSNPISTRKLTPEACKALQLMNERLSTARVKRLDLSQPWSLCILKTEYTPTACLWQDGVVEWIHLPHISPKVITPYDIFCTQLIIKGRHRSKELFSKDPDYIVVPYTKVQFDLLLQEKEDWPISLLGFLGEVHFHLPKDPLLTFTLQTAIIFPHMTSTTPLEKGIVIFTDGSANGRSVTYIQGREPIIKENTQNTAQQAEIVAVITAFEEVSQPFNLYTDSKYVTGLFPEIETATLSPRTKIYTELKHLQRLIHKRQEKFYIGHIRGHTGLPGPLAQGNAYADSLTRILTAGKRTADGSEFEKRTADGSEFESPKKKAKVE

SEQ ID NO: 3291 - protein, 2116 aa, synthetic construct
MPAAKRVKLDGGDKKYSIGLDIGTNSVGWAVITDEYKVPSKKFKVLGNTDRHSIKKNLIGALLFDSGETAEATRLKRTARRRYTRRKNRICYLQEIFSNEMAKVDDSFFHRLEESFLVEEDKKHERHPIFGNIVDEVAYHEKYPTIYHLRKKLVDSTDKADLRLIYLALAHMIKFRGHFLIEGDLNPDNSDVDKLFIQLVQTYNQLFEENPINASGVDAKAILSARLSKSRRLENLIAQLPGEKKNGLFGNLIALSLGLTPNFKSNFDLAEDAKLQLSKDTYDDDLDNLLAQIGDQYADLFLAAKNLSDAILLSDILRVNTEITKAPLSASMIKRYDEHHQDLTLLKALVRQQLPEKYKEIFFDQSKNGYAGYIDGGASQEEFYKFIKPILEKMDGTEELLVKLNREDLLRKQRTFDNGSIPHQIHLGELHAILRRQEDFYPFLKDNREKIEKILTFRIPYYVGPLARGNSRFAWMTRKSEETITPWNFEEVVDKGASAQSFIERMTNFDKNLPNEKVLPKHSLLYEYFTVYNELTKVKYVTEGMRKPAFLSGEQKKAIVDLLFKTNRKVTVKQLKEDYFKKIECFDSVEISGVEDRFNASLGTYHDLLKIIKDKDFLDNEENEDILEDIVLTLTLFEDREMIEERLKTYAHLFDDKVMKQLKRRRYTGWGRLSRKLINGIRDKQSGKTILDFLKSDGFANRNFMQLIHDDSLTFKEDIQKAQVSGQGDSLHEHIANLAGSPAIKKGILQTVKVVDELVKVMGRHKPENIVIEMARENQTTQKGQKNSRERMKRIEEGIKELGSQILKEHPVENTQLQNEKLYLYYLQNGRDMYVDQELDINRLSDYDVDHIVPQSFLKDDSIDNKVLTRSDKARGKSDNVPSEEVVKKMKNYWRQLLNAKLITQRKFDNLTKAERGGLSELDKAGFIKRQLVETRQITKHVAQILDSRMNTKYDENDKLIREVKVITLKSKLVSDFRKDFQFYKVREINNYHHAHDAYLNAVVGTALIKKYPKLESEFVYGDYKVYDVRKMIAKSEQEIGKATAKYFFYSNIMNFFKTEITLANGEIRKRPLIETNGETGEIVWDKGRDFATVRKVLSMPQVNIVKKTEVQTGGFSKESILPKRNSDKLIARKKDWDPKKYGGFDSPTVAYSVLVVAKVEKGKSKKLKSVKELLGITIMERSSFEKNPIDFLEAKGYKEVKKDLIIKLPKYSLFELENGRKRMLASAGELQKGNELALPSKYVNFLYLASHYEKLKGSPEDNEQKQLFVEQHKHYLDEIIEQISEFSKRVILADANLDKVLSAYNKHRDKPIREQAENIIHLFTLTNLGAPAAFKYFDTTIDRKRYTSTKEVLDATLIHQSITGLYETRIDLSQLGGDGGGGSEAAAKGGGGGWVQEISDSRPMLHIYLNGRRFLGLLNTGADKTCIAGRDWPANWPIHQTESSLQGLGMACGVARSSQPLRWQHEDKSGIIHPFVIPTLPFTLWGRDIMKDIKVRLMTDSPDDSQDLMIGAIESNLFADQISWKSDQPVWLNQWPLKQEKLQALQQLVTEQLQLGHLEESNSPWNTPVFVIKKKSGKWRLLQDLRAVNATMHDMGALQPGLPSPVAVPKGWEIIIIDLQDCFFNIKLHPEDCKRFAFSVPSPNFKRPYQRFQWKVLPQGMKNSPTLCQKFVDKAILTVRDKYQDSYIVHYMDDILLAHPSRSIVDEILTSMIQALNKHGLVVSTEKIQKYDNLKYLGTHIQGDSVSYQKLQIRTDKLRTLNDFQKLLGNINWIRPFLKLTTGELKPLFEILNGDSNPISTRKLTPEACKALQLMNERLSTARVKRLDLSQPWSLCILKTEYTPTACLWQDGVVEWIHLPHISPKVITPYDIFCTQLIIKGRHRSKELFSKDPDYIVVPYTKVQFDLLLQEKEDWPISLLGFLGEVHFHLPKDPLLTFTLQTAIIFPHMTSTTPLEKGIVIFTDGSANGRSVTYIQGREPIIKENTQNTAQQAEIVAVITAFEEVSQPFNLYTDSKYVTGLFPEIETATLSPRTKIYTELKHLQRLIHKRQEKFYIGHIRGHTGLPGPLAQGNAYADSLTRILTAGKRTADGSEFEKRTADGSEFESPKKKAKVE

SEQ ID NO: 3292 - protein, 2114 aa, synthetic construct
MPAAKRVKLDGGDKKYSIGLDIGTNSVGWAVITDEYKVPSKKFKVLGNTDRHSIKKNLIGALLFDSGETAEATRLKRTARRRYTRRKNRICYLQEIFSNEMAKVDDSFFHRLEESFLVEEDKKHERHPIFGNIVDEVAYHEKYPTIYHLRKKLVDSTDKADLRLIYLALAHMIKFRGHFLIEGDLNPDNSDVDKLFIQLVQTYNQLFEENPINASGVDAKAILSARLSKSRRLENLIAQLPGEKKNGLFGNLIALSLGLTPNFKSNFDLAEDAKLQLSKDTYDDDLDNLLAQIGDQYADLFLAAKNLSDAILLSDILRVNTEITKAPLSASMIKRYDEHHQDLTLLKALVRQQLPEKYKEIFFDQSKNGYAGYIDGGASQEEFYKFIKPILEKMDGTEELLVKLNREDLLRKQRTFDNGSIPHQIHLGELHAILRRQEDFYPFLKDNREKIEKILTFRIPYYVGPLARGNSRFAWMTRKSEETITPWNFEEVVDKGASAQSFIERMTNFDKNLPNEKVLPKHSLLYEYFTVYNELTKVKYVTEGMRKPAFLSGEQKKAIVDLLFKTNRKVTVKQLKEDYFKKIECFDSVEISGVEDRFNASLGTYHDLLKIIKDKDFLDNEENEDILEDIVLTLTLFEDREMIEERLKTYAHLFDDKVMKQLKRRRYTGWGRLSRKLINGIRDKQSGKTILDFLKSDGFANRNFMQLIHDDSLTFKEDIQKAQVSGQGDSLHEHIANLAGSPAIKKGILQTVKVVDELVKVMGRHKPENIVIEMARENQTTQKGQKNSRERMKRIEEGIKELGSQILKEHPVENTQLQNEKLYLYYLQNGRDMYVDQELDINRLSDYDVDHIVPQSFLKDDSIDNKVLTRSDKARGKSDNVPSEEVVKKMKNYWRQLLNAKLITQRKFDNLTKAERGGLSELDKAGFIKRQLVETRQITKHVAQILDSRMNTKYDENDKLIREVKVITLKSKLVSDFRKDFQFYKVREINNYHHAHDAYLNAVVGTALIKKYPKLESEFVYGDYKVYDVRKMIAKSEQEIGKATAKYFFYSNIMNFFKTEITLANGEIRKRPLIETNGETGEIVWDKGRDFATVRKVLSMPQVNIVKKTEVQTGGFSKESILPKRNSDKLIARKKDWDPKKYGGFDSPTVAYSVLVVAKVEKGKSKKLKSVKELLGITIMERSSFEKNPIDFLEAKGYKEVKKDLIIKLPKYSLFELENGRKRMLASAGELQKGNELALPSKYVNFLYLASHYEKLKGSPEDNEQKQLFVEQHKHYLDEIIEQISEFSKRVILADANLDKVLSAYNKHRDKPIREQAENIIHLFTLTNLGAPAAFKYFDTTIDRKRYTSTKEVLDATLIHQSITGLYETRIDLSQLGGDGGGGSGGSGGSGGWVQEISDSRPMLHIYLNGRRFLGLLNTGADKTCIAGRDWPANWPIHQTESSLQGLGMACGVARSSQPLRWQHEDKSGIIHPFVIPTLPFTLWGRDIMKDIKVRLMTDSPDDSQDLMIGAIESNLFADQISWKSDQPVWLNQWPLKQEKLQALQQLVTEQLQLGHLEESNSPWNTPVFVIKKKSGKWRLLQDLRAVNATMHDMGALQPGLPSPVAVPKGWEIIIIDLQDCFFNIKLHPEDCKRFAFSVPSPNFKRPYQRFQWKVLPQGMKNSPTLCQKFVDKAILTVRDKYQDSYIVHYMDDILLAHPSRSIVDEILTSMIQALNKHGLVVSTEKIQKYDNLKYLGTHIQGDSVSYQKLQIRTDKLRTLNDFQKLLGNINWIRPFLKLTTGELKPLFEILNGDSNPISTRKLTPEACKALQLMNERLSTARVKRLDLSQPWSLCILKTEYTPTACLWQDGVVEWIHLPHISPKVITPYDIFCTQLIIKGRHRSKELFSKDPDYIVVPYTKVQFDLLLQEKEDWPISLLGFLGEVHFHLPKDPLLTFTLQTAIIFPHMTSTTPLEKGIVIFTDGSANGRSVTYIQGREPIIKENTQNTAQQAEIVAVITAFEEVSQPFNLYTDSKYVTGLFPEIETATLSPRTKIYTELKHLQRLIHKRQEKFYIGHIRGHTGLPGPLAQGNAYADSLTRILTAGKRTADGSEFEKRTADGSEFESPKKKAKVE

SEQ ID NO: 3293 - protein, 2113 aa, synthetic construct
MPAAKRVKLDGGDKKYSIGLDIGTNSVGWAVITDEYKVPSKKFKVLGNTDRHSIKKNLIGALLFDSGETAEATRLKRTARRRYTRRKNRICYLQEIFSNEMAKVDDSFFHRLEESFLVEEDKKHERHPIFGNIVDEVAYHEKYPTIYHLRKKLVDSTDKADLRLIYLALAHMIKFRGHFLIEGDLNPDNSDVDKLFIQLVQTYNQLFEENPINASGVDAKAILSARLSKSRRLENLIAQLPGEKKNGLFGNLIALSLGLTPNFKSNFDLAEDAKLQLSKDTYDDDLDNLLAQIGDQYADLFLAAKNLSDAILLSDILRVNTEITKAPLSASMIKRYDEHHQDLTLLKALVRQQLPEKYKEIFFDQSKNGYAGYIDGGASQEEFYKFIKPILEKMDGTEELLVKLNREDLLRKQRTFDNGSIPHQIHLGELHAILRRQEDFYPFLKDNREKIEKILTFRIPYYVGPLARGNSRFAWMTRKSEETITPWNFEEVVDKGASAQSFIERMTNFDKNLPNEKVLPKHSLLYEYFTVYNELTKVKYVTEGMRKPAFLSGEQKKAIVDLLFKTNRKVTVKQLKEDYFKKIECFDSVEISGVEDRFNASLGTYHDLLKIIKDKDFLDNEENEDILEDIVLTLTLFEDREMIEERLKTYAHLFDDKVMKQLKRRRYTGWGRLSRKLINGIRDKQSGKTILDFLKSDGFANRNFMQLIHDDSLTFKEDIQKAQVSGQGDSLHEHIANLAGSPAIKKGILQTVKVVDELVKVMGRHKPENIVIEMARENQTTQKGQKNSRERMKRIEEGIKELGSQILKEHPVENTQLQNEKLYLYYLQNGRDMYVDQELDINRLSDYDVDHIVPQSFLKDDSIDNKVLTRSDKARGKSDNVPSEEVVKKMKNYWRQLLNAKLITQRKFDNLTKAERGGLSELDKAGFIKRQLVETRQITKHVAQILDSRMNTKYDENDKLIREVKVITLKSKLVSDFRKDFQFYKVREINNYHHAHDAYLNAVVGTALIKKYPKLESEFVYGDYKVYDVRKMIAKSEQEIGKATAKYFFYSNIMNFFKTEITLANGEIRKRPLIETNGETGEIVWDKGRDFATVRKVLSMPQVNIVKKTEVQTGGFSKESILPKRNSDKLIARKKDWDPKKYGGFDSPTVAYSVLVVAKVEKGKSKKLKSVKELLGITIMERSSFEKNPIDFLEAKGYKEVKKDLIIKLPKYSLFELENGRKRMLASAGELQKGNELALPSKYVNFLYLASHYEKLKGSPEDNEQKQLFVEQHKHYLDEIIEQISEFSKRVILADANLDKVLSAYNKHRDKPIREQAENIIHLFTLTNLGAPAAFKYFDTTIDRKRYTSTKEVLDATLIHQSITGLYETRIDLSQLGGDGGGGSEAAAKGGWVQEISDSRPMLHIYLNGRRFLGLLNTGADKTCIAGRDWPANWPIHQTESSLQGLGMACGVARSSQPLRWQHEDKSGIIHPFVIPTLPFTLWGRDIMKDIKVRLMTDSPDDSQDLMIGAIESNLFADQISWKSDQPVWLNQWPLKQEKLQALQQLVTEQLQLGHLEESNSPWNTPVFVIKKKSGKWRLLQDLRAVNATMHDMGALQPGLPSPVAVPKGWEIIIIDLQDCFFNIKLHPEDCKRFAFSVPSPNFKRPYQRFQWKVLPQGMKNSPTLCQKFVDKAILTVRDKYQDSYIVHYMDDILLAHPSRSIVDEILTSMIQALNKHGLVVSTEKIQKYDNLKYLGTHIQGDSVSYQKLQIRTDKLRTLNDFQKLLGNINWIRPFLKLTTGELKPLFEILNGDSNPISTRKLTPEACKALQLMNERLSTARVKRLDLSQPWSLCILKTEYTPTACLWQDGVVEWIHLPHISPKVITPYDIFCTQLIIKGRHRSKELFSKDPDYIVVPYTKVQFDLLLQEKEDWPISLLGFLGEVHFHLPKDPLLTFTLQTAIIFPHMTSTTPLEKGIVIFTDGSANGRSVTYIQGREPIIKENTQNTAQQAEIVAVITAFEEVSQPFNLYTDSKYVTGLFPEIETATLSPRTKIYTELKHLQRLIHKRQEKFYIGHIRGHTGLPGPLAQGNAYADSLTRILTAGKRTADGSEFEKRTADGSEFESPKKKAKVE

SEQ ID NO: 3294 - protein, 2043 aa, synthetic construct
MPAAKRVKLDGGDKKYSIGLDIGTNSVGWAVITDEYKVPSKKFKVLGNTDRHSIKKNLIGALLFDSGETAEATRLKRTARRRYTRRKNRICYLQEIFSNEMAKVDDSFFHRLEESFLVEEDKKHERHPIFGNIVDEVAYHEKYPTIYHLRKKLVDSTDKADLRLIYLALAHMIKFRGHFLIEGDLNPDNSDVDKLFIQLVQTYNQLFEENPINASGVDAKAILSARLSKSRRLENLIAQLPGEKKNGLFGNLIALSLGLTPNFKSNFDLAEDAKLQLSKDTYDDDLDNLLAQIGDQYADLFLAAKNLSDAILLSDILRVNTEITKAPLSASMIKRYDEHHQDLTLLKALVRQQLPEKYKEIFFDQSKNGYAGYIDGGASQEEFYKFIKPILEKMDGTEELLVKLNREDLLRKQRTFDNGSIPHQIHLGELHAILRRQEDFYPFLKDNREKIEKILTFRIPYYVGPLARGNSRFAWMTRKSEETITPWNFEEVVDKGASAQSFIERMTNFDKNLPNEKVLPKHSLLYEYFTVYNELTKVKYVTEGMRKPAFLSGEQKKAIVDLLFKTNRKVTVKQLKEDYFKKIECFDSVEISGVEDRFNASLGTYHDLLKIIKDKDFLDNEENEDILEDIVLTLTLFEDREMIEERLKTYAHLFDDKVMKQLKRRRYTGWGRLSRKLINGIRDKQSGKTILDFLKSDGFANRNFMQLIHDDSLTFKEDIQKAQVSGQGDSLHEHIANLAGSPAIKKGILQTVKVVDELVKVMGRHKPENIVIEMARENQTTQKGQKNSRERMKRIEEGIKELGSQILKEHPVENTQLQNEKLYLYYLQNGRDMYVDQELDINRLSDYDVDHIVPQSFLKDDSIDNKVLTRSDKARGKSDNVPSEEVVKKMKNYWRQLLNAKLITQRKFDNLTKAERGGLSELDKAGFIKRQLVETRQITKHVAQILDSRMNTKYDENDKLIREVKVITLKSKLVSDFRKDFQFYKVREINNYHHAHDAYLNAVVGTALIKKYPKLESEFVYGDYKVYDVRKMIAKSEQEIGKATAKYFFYSNIMNFFKTEITLANGEIRKRPLIETNGETGEIVWDKGRDFATVRKVLSMPQVNIVKKTEVQTGGFSKESILPKRNSDKLIARKKDWDPKKYGGFDSPTVAYSVLVVAKVEKGKSKKLKSVKELLGITIMERSSFEKNPIDFLEAKGYKEVKKDLIIKLPKYSLFELENGRKRMLASAGELQKGNELALPSKYVNFLYLASHYEKLKGSPEDNEQKQLFVEQHKHYLDEIIEQISEFSKRVILADANLDKVLSAYNKHRDKPIREQAENIIHLFTLTNLGAPAAFKYFDTTIDRKRYTSTKEVLDATLIHQSITGLYETRIDLSQLGGDGGEAAAKEAAAKEAAAKEAAAKEAAAKEAAAKGGGRDIMKDIKVRLMTDSPDDSQDLMIGAIESNLFADQISWKSDQPVWLNQWPLKQEKLQALQQLVTEQLQLGHLEESNSPWNTPVFVIKKKSGKWRLLQDLRAVNATMHDMGALQPGLPSPVAVPKGWEIIIIDLQDCFFNIKLHPEDCKRFAFSVPSPNFKRPYQRFQWKVLPQGMKNSPTLCQKFVDKAILTVRDKYQDSYIVHYMDDILLAHPSRSIVDEILTSMIQALNKHGLVVSTEKIQKYDNLKYLGTHIQGDSVSYQKLQIRTDKLRTLNDFQKLLGNINWIRPFLKLTTGELKPLFEILNGDSNPISTRKLTPEACKALQLMNERLSTARVKRLDLSQPWSLCILKTEYTPTACLWQDGVVEWIHLPHISPKVITPYDIFCTQLIIKGRHRSKELFSKDPDYIVVPYTKVQFDLLLQEKEDWPISLLGFLGEVHFHLPKDPLLTFTLQTAIIFPHMTSTTPLEKGIVIFTDGSANGRSVTYIQGREPIIKENTQNTAQQAEIVAVITAFEEVSQPFNLYTDSKYVTGLFPEIETATLSPRTKIYTELKHLQRLIHKRQEKFYIGHIRGHTGLPGPLAQGNAYADSLTRILTAGKRTADGSEFEKRTADGSEFESPKKKAKVE

SEQ ID NO: 3295 - protein, 2046 aa, synthetic construct; identical to SEQ ID NO: 3238

SEQ ID NO: 3296 - protein, 2028 aa, synthetic construct; identical to SEQ ID NO: 3201

SEQ ID NO: 3297 - protein, 2031 aa, synthetic construct
MPAAKRVKLDGGDKKYSIGLDIGTNSVGWAVITDEYKVPSKKFKVLGNTDRHSIKKNLIGALLFDSGETAEATRLKRTARRRYTRRKNRICYLQEIFSNEMAKVDDSFFHRLEESFLVEEDKKHERHPIFGNIVDEVAYHEKYPTIYHLRKKLVDSTDKADLRLIYLALAHMIKFRGHFLIEGDLNPDNSDVDKLFIQLVQTYNQLFEENPINASGVDAKAILSARLSKSRRLENLIAQLPGEKKNGLFGNLIALSLGLTPNFKSNFDLAEDAKLQLSKDTYDDDLDNLLAQIGDQYADLFLAAKNLSDAILLSDILRVNTEITKAPLSASMIKRYDEHHQDLTLLKALVRQQLPEKYKEIFFDQSKNGYAGYIDGGASQEEFYKFIKPILEKMDGTEELLVKLNREDLLRKQRTFDNGSIPHQIHLGELHAILRRQEDFYPFLKDNREKIEKILTFRIPYYVGPLARGNSRFAWMTRKSEETITPWNFEEVVDKGASAQSFIERMTNFDKNLPNEKVLPKHSLLYEYFTVYNELTKVKYVTEGMRKPAFLSGEQKKAIVDLLFKTNRKVTVKQLKEDYFKKIECFDSVEISGVEDRFNASLGTYHDLLKIIKDKDFLDNEENEDILEDIVLTLTLFEDREMIEERLKTYAHLFDDKVMKQLKRRRYTGWGRLSRKLINGIRDKQSGKTILDFLKSDGFANRNFMQLIHDDSLTFKEDIQKAQVSGQGDSLHEHIANLAGSPAIKKGILQTVKVVDELVKVMGRHKPENIVIEMARENQTTQKGQKNSRERMKRIEEGIKELGSQILKEHPVENTQLQNEKLYLYYLQNGRDMYVDQELDINRLSDYDVDHIVPQSFLKDDSIDNKVLTRSDKARGKSDNVPSEEVVKKMKNYWRQLLNAKLITQRKFDNLTKAERGGLSELDKAGFIKRQLVETRQITKHVAQILDSRMNTKYDENDKLIREVKVITLKSKLVSDFRKDFQFYKVREINNYHHAHDAYLNAVVGTALIKKYPKLESEFVYGDYKVYDVRKMIAKSEQEIGKATAKYFFYSNIMNFFKTEITLANGEIRKRPLIETNGETGEIVWDKGRDFATVRKVLSMPQVNIVKKTEVQTGGFSKESILPKRNSDKLIARKKDWDPKKYGGFDSPTVAYSVLVVAKVEKGKSKKLKSVKELLGITIMERSSFEKNPIDFLEAKGYKEVKKDLIIKLPKYSLFELENGRKRMLASAGELQKGNELALPSKYVNFLYLASHYEKLKGSPEDNEQKQLFVEQHKHYLDEIIEQISEFSKRVILADANLDKVLSAYNKHRDKPIREQAENIIHLFTLTNLGAPAAFKYFDTTIDRKRYTSTKEVLDATLIHQSITGLYETRIDLSQLGGDGGGSSGSSGSSGSSGSSGSSGGGRDIMKDIKVRLMTDSPDDSQDLMIGAIESNLFADQISWKSDQPVWLNQWPLKQEKLQALQQLVTEQLQLGHLEESNSPWNTPVFVIKKKSGKWRLLQDLRAVNATMHDMGALQPGLPSPVAVPKGWEIIIIDLQDCFFNIKLHPEDCKRFAFSVPSPNFKRPYQRFQWKVLPQGMKNSPTLCQKFVDKAILTVRDKYQDSYIVHYMDDILLAHPSRSIVDEILTSMIQALNKHGLVVSTEKIQKYDNLKYLGTHIQGDSVSYQKLQIRTDKLRTLNDFQKLLGNINWIRPFLKLTTGELKPLFEILNGDSNPISTRKLTPEACKALQLMNERLSTARVKRLDLSQPWSLCILKTEYTPTACLWQDGVVEWIHLPHISPKVITPYDIFCTQLIIKGRHRSKELFSKDPDYIVVPYTKVQFDLLLQEKEDWPISLLGFLGEVHFHLPKDPLLTFTLQTAIIFPHMTSTTPLEKGIVIFTDGSANGRSVTYIQGREPIIKENTQNTAQQAEIVAVITAFEEVSQPFNLYTDSKYVTGLFPEIETATLSPRTKIYTELKHLQRLIHKRQEKFYIGHIRGHTGLPGPLAQGNAYADSLTRILTAGKRTADGSEFEKRTADGSEFESPKKKAKVE

SEQ ID NO: 3298 - protein, 2028 aa, synthetic construct
MPAAKRVKLDGGDKKYSIGLDIGTNSVGWAVITDEYKVPSKKFKVLGNTDRHSIKKNLIGALLFDSGETAEATRLKRTARRRYTRRKNRICYLQEIFSNEMAKVDDSFFHRLEESFLVEEDKKHERHPIFGNIVDEVAYHEKYPTIYHLRKKLVDSTDKADLRLIYLALAHMIKFRGHFLIEGDLNPDNSDVDKLFIQLVQTYNQLFEENPINASGVDAKAILSARLSKSRRLENLIAQLPGEKKNGLFGNLIALSLGLTPNFKSNFDLAEDAKLQLSKDTYDDDLDNLLAQIGDQYADLFLAAKNLSDAILLSDILRVNTEITKAPLSASMIKRYDEHHQDLTLLKALVRQQLPEKYKEIFFDQSKNGYAGYIDGGASQEEFYKFIKPILEKMDGTEELLVKLNREDLLRKQRTFDNGSIPHQIHLGELHAILRRQEDFYPFLKDNREKIEKILTFRIPYYVGPLARGNSRFAWMTRKSEETITPWNFEEVVDKGASAQSFIERMTNFDKNLPNEKVLPKHSLLYEYFTVYNELTKVKYVTEGMRKPAFLSGEQKKAIVDLLFKTNRKVTVKQLKEDYFKKIECFDSVEISGVEDRFNASLGTYHDLLKIIKDKDFLDNEENEDILEDIVLTLTLFEDREMIEERLKTYAHLFDDKVMKQLKRRRYTGWGRLSRKLINGIRDKQSGKTILDFLKSDGFANRNFMQLIHDDSLTFKEDIQKAQVSGQGDSLHEHIANLAGSPAIKKGILQTVKVVDELVKVMGRHKPENIVIEMARENQTTQKGQKNSRERMKRIEEGIKELGSQILKEHPVENTQLQNEKLYLYYLQNGRDMYVDQELDINRLSDYDVDHIVPQSFLKDDSIDNKVLTRSDKARGKSDNVPSEEVVKKMKNYWRQLLNAKLITQRKFDNLTKAERGGLSELDKAGFIKRQLVETRQITKHVAQILDSRMNTKYDENDKLIREVKVITLKSKLVSDFRKDFQFYKVREINNYHHAHDAYLNAVVGTALIKKYPKLESEFVYGDYKVYDVRKMIAKSEQEIGKATAKYFFYSNIMNFFKTEITLANGEIRKRPLIETNGETGEIVWDKGRDFATVRKVLSMPQVNIVKKTEVQTGGFSKESILPKRNSDKLIARKKDWDPKKYGGFDSPTVAYSVLVVAKVEKGKSKKLKSVKELLGITIMERSSFEKNPIDFLEAKGYKEVKKDLIIKLPKYSLFELENGRKRMLASAGELQKGNELALPSKYVNFLYLASHYEKLKGSPEDNEQKQLFVEQHKHYLDEIIEQISEFSKRVILADANLDKVLSAYNKHRDKPIREQAENIIHLFTLTNLGAPAAFKYFDTTIDRKRYTSTKEVLDATLIHQSITGLYETRIDLSQLGGDGGGGGGSEAAAKGGGGSGGGRDIMKDIKVRLMTDSPDDSQDLMIGAIESNLFADQISWKSDQPVWLNQWPLKQEKLQALQQLVTEQLQLGHLEESNSPWNTPVFVIKKKSGKWRLLQDLRAVNATMHDMGALQPGLPSPVAVPKGWEIIIIDLQDCFFNIKLHPEDCKRFAFSVPSPNFKRPYQRFQWKVLPQGMKNSPTLCQKFVDKAILTVRDKYQDSYIVHYMDDILLAHPSRSIVDEILTSMIQALNKHGLVVSTEKIQKYDNLKYLGTHIQGDSVSYQKLQIRTDKLRTLNDFQKLLGNINWIRPFLKLTTGELKPLFEILNGDSNPISTRKLTPEACKALQLMNERLSTARVKRLDLSQPWSLCILKTEYTPTACLWQDGVVEWIHLPHISPKVITPYDIFCTQLIIKGRHRSKELFSKDPDYIVVPYTKVQFDLLLQEKEDWPISLLGFLGEVHFHLPKDPLLTFTLQTAIIFPHMTSTTPLEKGIVIFTDGSANGRSVTYIQGREPIIKENTQNTAQQAEIVAVITAFEEVSQPFNLYTDSKYVTGLFPEIETATLSPRTKIYTELKHLQRLIHKRQEKFYIGHIRGHTGLPGPLAQGNAYADSLTRILTAGKRTADGSEFEKRTADGSEFESPKKKAKVE

SEQ ID NO: 3299 - protein, 2028 aa, synthetic construct
MPAAKRVKLDGGDKKYSIGLDIGTNSVGWAVITDEYKVPSKKFKVLGNTDRHSIKKNLIGALLFDSGETAEATRLKRTARRRYTRRKNRICYLQEIFSNEMAKVDDSFFHRLEESFLVEEDKKHERHPIFGNIVDEVAYHEKYPTIYHLRKKLVDSTDKADLRLIYLALAHMIKFRGHFLIEGDLNPDNSDVDKLFIQLVQTYNQLFEENPINASGVDAKAILSARLSKSRRLENLIAQLPGEKKNGLFGNLIALSLGLTPNFKSNFDLAEDAKLQLSKDTYDDDLDNLLAQIGDQYADLFLAAKNLSDAILLSDILRVNTEITKAPLSASMIKRYDEHHQDLTLLKALVRQQLPEKYKEIFFDQSKNGYAGYIDGGASQEEFYKFIKPILEKMDGTEELLVKLNREDLLRKQRTFDNGSIPHQIHLGELHAILRRQEDFYPFLKDNREKIEKILTFRIPYYVGPLARGNSRFAWMTRKSEETITPWNFEEVVDKGASAQSFIERMTNFDKNLPNEKVLPKHSLLYEYFTVYNELTKVKYVTEGMRKPAFLSGEQKKAIVDLLFKTNRKVTVKQLKEDYFKKIECFDSVEISGVEDRFNASLGTYHDLLKIIKDKDFLDNEENEDILEDIVLTLTLFEDREMIEERLKTYAHLFDDKVMKQLKRRRYTGWGRLSRKLINGIRDKQSGKTILDFLKSDGFANRNFMQLIHDDSLTFKEDIQKAQVSGQGDSLHEHIANLAGSPAIKKGILQTVKVVDELVKVMGRHKPENIVIEMARENQTTQKGQKNSRERMKRIEEGIKELGSQILKEHPVENTQLQNEKLYLYYLQNGRDMYVDQELDINRLSDYDVDHIVPQSFLKDDSIDNKVLTRSDKARGKSDNVPSEEVVKKMKNYWRQLLNAKLITQRKFDNLTKAERGGLSELDKAGFIKRQLVETRQITKHVAQILDSRMNTKYDENDKLIREVKVITLKSKLVSDFRKDFQFYKVREINNYHHAHDAYLNAVVGTALIKKYPKLESEFVYGDYKVYDVRKMIAKSEQEIGKATAKYFFYSNIMNFFKTEITLANGEIRKRPLIETNGETGEIVWDKGRDFATVRKVLSMPQVNIVKKTEVQTGGFSKESILPKRNSDKLIARKKDWDPKKYGGFDSPTVAYSVLVVAKVEKGKSKKLKSVKELLGITIMERSSFEKNPIDFLEAKGYKEVKKDLIIKLPKYSLFELENGRKRMLASAGELQKGNELALPSKYVNFLYLASHYEKLKGSPEDNEQKQLFVEQHKHYLDEIIEQISEFSKRVILADANLDKVLSAYNKHRDKPIREQAENIIHLFTLTNLGAPAAFKYFDTTIDRKRYTSTKEVLDATLIHQSITGLYETRIDLSQLGGDGGEAAAKEAAAKEAAAKGGGRDIMKDIKVRLMTDSPDDSQDLMIGAIESNLFADQISWKSDQPVWLNQWPLKQEKLQALQQLVTEQLQLGHLEESNSPWNTPVFVIKKKSGKWRLLQDLRAVNATMHDMGALQPGLPSPVAVPKGWEIIIIDLQDCFFNIKLHPEDCKRFAFSVPSPNFKRPYQRFQWKVLPQGMKNSPTLCQKFVDKAILTVRDKYQDSYIVHYMDDILLAHPSRSIVDEILTSMIQALNKHGLVVSTEKIQKYDNLKYLGTHIQGDSVSYQKLQIRTDKLRTLNDFQKLLGNINWIRPFLKLTTGELKPLFEILNGDSNPISTRKLTPEACKALQLMNERLSTARVKRLDLSQPWSLCILKTEYTPTACLWQDGVVEWIHLPHISPKVITPYDIFCTQLIIKGRHRSKELFSKDPDYIVVPYTKVQFDLLLQEKEDWPISLLGFLGEVHFHLPKDPLLTFTLQTAIIFPHMTSTTPLEKGIVIFTDGSANGRSVTYIQGREPIIKENTQNTAQQAEIVAVITAFEEVSQPFNLYTDSKYVTGLFPEIETATLSPRTKIYTELKHLQRLIHKRQEKFYIGHIRGHTGLPGPLAQGNAYADSLTRILTAGKRTADGSEFEKRTADGSEFESPKKKAKVE

SEQ ID NO: 3300 - protein, 2024 aa, synthetic construct; identical to SEQ ID NO: 3213

SEQ ID NO: 3301 - protein, 2024 aa, synthetic construct
MPAAKRVKLDGGDKKYSIGLDIGTNSVGWAVITDEYKVPSKKFKVLGNTDRHSIKKNLIGALLFDSGETAEATRLKRTARRRYTRRKNRICYLQEIFSNEMAKVDDSFFHRLEESFLVEEDKKHERHPIFGNIVDEVAYHEKYPTIYHLRKKLVDSTDKADLRLIYLALAHMIKFRGHFLIEGDLNPDNSDVDKLFIQLVQTYNQLFEENPINASGVDAKAILSARLSKSRRLENLIAQLPGEKKNGLFGNLIALSLGLTPNFKSNFDLAEDAKLQLSKDTYDDDLDNLLAQIGDQYADLFLAAKNLSDAILLSDILRVNTEITKAPLSASMIKRYDEHHQDLTLLKALVRQQLPEKYKEIFFDQSKNGYAGYIDGGASQEEFYKFIKPILEKMDGTEELLVKLNREDLLRKQRTFDNGSIPHQIHLGELHAILRRQEDFYPFLKDNREKIEKILTFRIPYYVGPLARGNSRFAWMTRKSEETITPWNFEEVVDKGASAQSFIERMTNFDKNLPNEKVLPKHSLLYEYFTVYNELTKVKYVTEGMRKPAFLSGEQKKAIVDLLFKTNRKVTVKQLKEDYFKKIECFDSVEISGVEDRFNASLGTYHDLLKIIKDKDFLDNEENEDILEDIVLTLTLFEDREMIEERLKTYAHLFDDKVMKQLKRRRYTGWGRLSRKLINGIRDKQSGKTILDFLKSDGFANRNFMQLIHDDSLTFKEDIQKAQVSGQGDSLHEHIANLAGSPAIKKGILQTVKVVDELVKVMGRHKPENIVIEMARENQTTQKGQKNSRERMKRIEEGIKELGSQILKEHPVENTQLQNEKLYLYYLQNGRDMYVDQELDINRLSDYDVDHIVPQSFLKDDSIDNKVLTRSDKARGKSDNVPSEEVVKKMKNYWRQLLNAKLITQRKFDNLTKAERGGLSELDKAGFIKRQLVETRQITKHVAQILDSRMNTKYDENDKLIREVKVITLKSKLVSDFRKDFQFYKVREINNYHHAHDAYLNAVVGTALIKKYPKLESEFVYGDYKVYDVRKMIAKSEQEIGKATAKYFFYSNIMNFFKTEITLANGEIRKRPLIETNGETGEIVWDKGRDFATVRKVLSMPQVNIVKKTEVQTGGFSKESILPKRNSDKLIARKKDWDPKKYGGFDSPTVAYSVLVVAKVEKGKSKKLKSVKELLGITIMERSSFEKNPIDFLEAKGYKEVKKDLIIKLPKYSLFELENGRKRMLASAGELQKGNELALPSKYVNFLYLASHYEKLKGSPEDNEQKQLFVEQHKHYLDEIIEQISEFSKRVILADANLDKVLSAYNKHRDKPIREQAENIIHLFTLTNLGAPAAFKYFDTTIDRKRYTSTKEVLDATLIHQSITGLYETRIDLSQLGGDGGEAAAKGSSGGSGGGRDIMKDIKVRLMTDSPDDSQDLMIGAIESNLFADQISWKSDQPVWLNQWPLKQEKLQALQQLVTEQLQLGHLEESNSPWNTPVFVIKKKSGKWRLLQDLRAVNATMHDMGALQPGLPSPVAVPKGWEIIIIDLQDCFFNIKLHPEDCKRFAFSVPSPNFKRPYQRFQWKVLPQGMKNSPTLCQKFVDKAILTVRDKYQDSYIVHYMDDILLAHPSRSIVDEILTSMIQALNKHGLVVSTEKIQKYDNLKYLGTHIQGDSVSYQKLQIRTDKLRTLNDFQKLLGNINWIRPFLKLTTGELKPLFEILNGDSNPISTRKLTPEACKALQLMNERLSTARVKRLDLSQPWSLCILKTEYTPTACLWQDGVVEWIHLPHISPKVITPYDIFCTQLIIKGRHRSKELFSKDPDYIVVPYTKVQFDLLLQEKEDWPISLLGFLGEVHFHLPKDPLLTFTLQTAIIFPHMTSTTPLEKGIVIFTDGSANGRSVTYIQGREPIIKENTQNTAQQAEIVAVITAFEEVSQPFNLYTDSKYVTGLFPEIETATLSPRTKIYTELKHLQRLIHKRQEKFYIGHIRGHTGLPGPLAQGNAYADSLTRILTAGKRTADGSEFEKRTADGSEFESPKKKAKVE

SEQ ID NO: 3302 - protein, 2028 aa, synthetic construct
MPAAKRVKLDGGDKKYSIGLDIGTNSVGWAVITDEYKVPSKKFKVLGNTDRHSIKKNLIGALLFDSGETAEATRLKRTARRRYTRRKNRICYLQEIFSNEMAKVDDSFFHRLEESFLVEEDKKHERHPIFGNIVDEVAYHEKYPTIYHLRKKLVDSTDKADLRLIYLALAHMIKFRGHFLIEGDLNPDNSDVDKLFIQLVQTYNQLFEENPINASGVDAKAILSARLSKSRRLENLIAQLPGEKKNGLFGNLIALSLGLTPNFKSNFDLAEDAKLQLSKDTYDDDLDNLLAQIGDQYADLFLAAKNLSDAILLSDILRVNTEITKAPLSASMIKRYDEHHQDLTLLKALVRQQLPEKYKEIFFDQSKNGYAGYIDGGASQEEFYKFIKPILEKMDGTEELLVKLNREDLLRKQRTFDNGSIPHQIHLGELHAILRRQEDFYPFLKDNREKIEKILTFRIPYYVGPLARGNSRFAWMTRKSEETITPWNFEEVVDKGASAQSFIERMTNFDKNLPNEKVLPKHSLLYEYFTVYNELTKVKYVTEGMRKPAFLSGEQKKAIVDLLFKTNRKVTVKQLKEDYFKKIECFDSVEISGVEDRFNASLGTYHDLLKIIKDKDFLDNEENEDILEDIVLTLTLFEDREMIEERLKTYAHLFDDKVMKQLKRRRYTGWGRLSRKLINGIRDKQSGKTILDFLKSDGFANRNFMQLIHDDSLTFKEDIQKAQVSGQGDSLHEHIANLAGSPAIKKGILQTVKVVDELVKVMGRHKPENIVIEMARENQTTQKGQKNSRERMKRIEEGIKELGSQILKEHPVENTQLQNEKLYLYYLQNGRDMYVDQELDINRLSDYDVDHIVPQSFLKDDSIDNKVLTRSDKARGKSDNVPSEEVVKKMKNYWRQLLNAKLITQRKFDNLTKAERGGLSELDKAGFIKRQLVETRQITKHVAQILDSRMNTKYDENDKLIREVKVITLKSKLVSDFRKDFQFYKVREINNYHHAHDAYLNAVVGTALIKKYPKLESEFVYGDYKVYDVRKMIAKSEQEIGKATAKYFFYSNIMNFFKTEITLANGEIRKRPLIETNGETGEIVWDKGRDFATVRKVLSMPQVNIVKKTEVQTGGFSKESILPKRNSDKLIARKKDWDPKKYGGFDSPTVAYSVLVVAKVEKGKSKKLKSVKELLGITIMERSSFEKNPIDFLEAKGYKEVKKDLIIKLPKYSLFELENGRKRMLASAGELQKGNELALPSKYVNFLYLASHYEKLKGSPEDNEQKQLFVEQHKHYLDEIIEQISEFSKRVILADANLDKVLSAYNKHRDKPIREQAENIIHLFTLTNLGAPAAFKYFDTTIDRKRYTSTKEVLDATLIHQSITGLYETRIDLSQLGGDGGGGSGGSGGSGGSGGSGGGRDIMKDIKVRLMTDSPDDSQDLMIGAIESNLFADQISWKSDQPVWLNQWPLKQEKLQALQQLVTEQLQLGHLEESNSPWNTPVFVIKKKSGKWRLLQDLRAVNATMHDMGALQPGLPSPVAVPKGWEIIIIDLQDCFFNIKLHPEDCKRFAFSVPSPNFKRPYQRFQWKVLPQGMKNSPTLCQKFVDKAILTVRDKYQDSYIVHYMDDILLAHPSRSIVDEILTSMIQALNKHGLVVSTEKIQKYDNLKYLGTHIQGDSVSYQKLQIRTDKLRTLNDFQKLLGNINWIRPFLKLTTGELKPLFEILNGDSNPISTRKLTPEACKALQLMNERLSTARVKRLDLSQPWSLCILKTEYTPTACLWQDGVVEWIHLPHISPKVITPYDIFCTQLIIKGRHRSKELFSKDPDYIVVPYTKVQFDLLLQEKEDWPISLLGFLGEVHFHLPKDPLLTFTLQTAIIFPHMTSTTPLEKGIVIFTDGSANGRSVTYIQGREPIIKENTQNTAQQAEIVAVITAFEEVSQPFNLYTDSKYVTGLFPEIETATLSPRTKIYTELKHLQRLIHKRQEKFYIGHIRGHTGLPGPLAQGNAYADSLTRILTAGKRTADGSEFEKRTADGSEFESPKKKAKVE

SEQ ID NO: 3303 - protein, 2028 aa, synthetic construct
MPAAKRVKLDGGDKKYSIGLDIGTNSVGWAVITDEYKVPSKKFKVLGNTDRHSIKKNLIGALLFDSGETAEATRLKRTARRRYTRRKNRICYLQEIFSNEMAKVDDSFFHRLEESFLVEEDKKHERHPIFGNIVDEVAYHEKYPTIYHLRKKLVDSTDKADLRLIYLALAHMIKFRGHFLIEGDLNPDNSDVDKLFIQLVQTYNQLFEENPINASGVDAKAILSARLSKSRRLENLIAQLPGEKKNGLFGNLIALSLGLTPNFKSNFDLAEDAKLQLSKDTYDDDLDNLLAQIGDQYADLFLAAKNLSDAILLSDILRVNTEITKAPLSASMIKRYDEHHQDLTLLKALVRQQLPEKYKEIFFDQSKNGYAGYIDGGASQEEFYKFIKPILEKMDGTEELLVKLNREDLLRKQRTFDNGSIPHQIHLGELHAILRRQEDFYPFLKDNREKIEKILTFRIPYYVGPLARGNSRFAWMTRKSEETITPWNFEEVVDKGASAQSFIERMTNFDKNLPNEKVLPKHSLLYEYFTVYNELTKVKYVTEGMRKPAFLSGEQKKAIVDLLFKTNRKVTVKQLKEDYFKKIECFDSVEISGVEDRFNASLGTYHDLLKIIKDKDFLDNEENEDILEDIVLTLTLFEDREMIEERLKTYAHLFDDKVMKQLKRRRYTGWGRLSRKLINGIRDKQSGKTILDFLKSDGFANRNFMQLIHDDSLTFKEDIQKAQVSGQGDSLHEHIANLAGSPAIKKGILQTVKVVDELVKVMGRHKPENIVIEMARENQTTQKGQKNSRERMKRIEEGIKELGSQILKEHPVENTQLQNEKLYLYYLQNGRDMYVDQELDINRLSDYDVDHIVPQSFLKDDSIDNKVLTRSDKARGKSDNVPSEEVVKKMKNYWRQLLNAKLITQRKFDNLTKAERGGLSELDKAGFIKRQLVETRQITKHVAQILDSRMNTKYDENDKLIREVKVITLKSKLVSDFRKDFQFYKVREINNYHHAHDAYLNAVVGTALIKKYPKLESEFVYGDYKVYDVRKMIAKSEQEIGKATAKYFFYSNIMNFFKTEITLANGEIRKRPLIETNGETGEIVWDKGRDFATVRKVLSMPQVNIVKKTEVQTGGFSKESILPKRNSDKLIARKKDWDPKKYGGFDSPTVAYSVLVVAKVEKGKSKKLKSVKELLGITIMERSSFEKNPIDFLEAKGYKEVKKDLIIKLPKYSLFELENGRKRMLASAGELQKGNELALPSKYVNFLYLASHYEKLKGSPEDNEQKQLFVEQHKHYLDEIIEQISEFSKRVILADANLDKVLSAYNKHRDKPIREQAENIIHLFTLTNLGAPAAFKYFDTTIDRKRYTSTKEVLDATLIHQSITGLYETRIDLSQLGGDGGGSSGSSGSSGSSGSSGGGRDIMKDIKVRLMTDSPDDSQDLMIGAIESNLFADQISWKSDQPVWLNQWPLKQEKLQALQQLVTEQLQLGHLEESNSPWNTPVFVIKKKSGKWRLLQDLRAVNATMHDMGALQPGLPSPVAVPKGWEIIIIDLQDCFFNIKLHPEDCKRFAFSVPSPNFKRPYQRFQWKVLPQGMKNSPTLCQKFVDKAILTVRDKYQDSYIVHYMDDILLAHPSRSIVDEILTSMIQALNKHGLVVSTEKIQKYDNLKYLGTHIQGDSVSYQKLQIRTDKLRTLNDFQKLLGNINWIRPFLKLTTGELKPLFEILNGDSNPISTRKLTPEACKALQLMNERLSTARVKRLDLSQPWSLCILKTEYTPTACLWQDGVVEWIHLPHISPKVITPYDIFCTQLIIKGRHRSKELFSKDPDYIVVPYTKVQFDLLLQEKEDWPISLLGFLGEVHFHLPKDPLLTFTLQTAIIFPHMTSTTPLEKGIVIFTDGSANGRSVTYIQGREPIIKENTQNTAQQAEIVAVITAFEEVSQPFNLYTDSKYVTGLFPEIETATLSPRTKIYTELKHLQRLIHKRQEKFYIGHIRGHTGLPGPLAQGNAYADSLTRILTAGKRTADGSEFEKRTADGSEFESPKKKAKVE

SEQ ID NO: 3304 - protein, 2022 aa, synthetic construct; identical to SEQ ID NO: 3221

SEQ ID NO: 3305 - protein, 2022 aa, synthetic construct
MPAAKRVKLDGGDKKYSIGLDIGTNSVGWAVITDEYKVPSKKFKVLGNTDRHSIKKNLIGALLFDSGETAEATRLKRTARRRYTRRKNRICYLQEIFSNEMAKVDDSFFHRLEESFLVEEDKKHERHPIFGNIVDEVAYHEKYPTIYHLRKKLVDSTDKADLRLIYLALAHMIKFRGHFLIEGDLNPDNSDVDKLFIQLVQTYNQLFEENPINASGVDAKAILSARLSKSRRLENLIAQLPGEKKNGLFGNLIALSLGLTPNFKSNFDLAEDAKLQLSKDTYDDDLDNLLAQIGDQYADLFLAAKNLSDAILLSDILRVNTEITKAPLSASMIKRYDEHHQDLTLLKALVRQQLPEKYKEIFFDQSKNGYAGYIDGGASQEEFYKFIKPILEKMDGTEELLVKLNREDLLRKQRTFDNGSIPHQIHLGELHAILRRQEDFYPFLKDNREKIEKILTFRIPYYVGPLARGNSRFAWMTRKSEETITPWNFEEVVDKGASAQSFIERMTNFDKNLPNEKVLPKHSLLYEYFTVYNELTKVKYVTEGMRKPAFLSGEQKKAIVDLLFKTNRKVTVKQLKEDYFKKIECFDSVEISGVEDRFNASLGTYHDLLKIIKDKDFLDNEENEDILEDIVLTLTLFEDREMIEERLKTYAHLFDDKVMKQLKRRRYTGWGRLSRKLINGIRDKQSGKTILDFLKSDGFANRNFMQLIHDDSLTFKEDIQKAQVSGQGDSLHEHIANLAGSPAIKKGILQTVKVVDELVKVMGRHKPENIVIEMARENQTTQKGQKNSRERMKRIEEGIKELGSQILKEHPVENTQLQNEKLYLYYLQNGRDMYVDQELDINRLSDYDVDHIVPQSFLKDDSIDNKVLTRSDKARGKSDNVPSEEVVKKMKNYWRQLLNAKLITQRKFDNLTKAERGGLSELDKAGFIKRQLVETRQITKHVAQILDSRMNTKYDENDKLIREVKVITLKSKLVSDFRKDFQFYKVREINNYHHAHDAYLNAVVGTALIKKYPKLESEFVYGDYKVYDVRKMIAKSEQEIGKATAKYFFYSNIMNFFKTEITLANGEIRKRPLIETNGETGEIVWDKGRDFATVRKVLSMPQVNIVKKTEVQTGGFSKESILPKRNSDKLIARKKDWDPKKYGGFDSPTVAYSVLVVAKVEKGKSKKLKSVKELLGITIMERSSFEKNPIDFLEAKGYKEVKKDLIIKLPKYSLFELENGRKRMLASAGELQKGNELALPSKYVNFLYLASHYEKLKGSPEDNEQKQLFVEQHKHYLDEIIEQISEFSKRVILADANLDKVLSAYNKHRDKPIREQAENIIHLFTLTNLGAPAAFKYFDTTIDRKRYTSTKEVLDATLIHQSITGLYETRIDLSQLGGDGGGSSGGSPAPGGGRDIMKDIKVRLMTDSPDDSQDLMIGAIESNLFADQISWKSDQPVWLNQWPLKQEKLQALQQLVTEQLQLGHLEESNSPWNTPVFVIKKKSGKWRLLQDLRAVNATMHDMGALQPGLPSPVAVPKGWEIIIIDLQDCFFNIKLHPEDCKRFAFSVPSPNFKRPYQRFQWKVLPQGMKNSPTLCQKFVDKAILTVRDKYQDSYIVHYMDDILLAHPSRSIVDEILTSMIQALNKHGLVVSTEKIQKYDNLKYLGTHIQGDSVSYQKLQIRTDKLRTLNDFQKLLGNINWIRPFLKLTTGELKPLFEILNGDSNPISTRKLTPEACKALQLMNERLSTARVKRLDLSQPWSLCILKTEYTPTACLWQDGVVEWIHLPHISPKVITPYDIFCTQLIIKGRHRSKELFSKDPDYIVVPYTKVQFDLLLQEKEDWPISLLGFLGEVHFHLPKDPLLTFTLQTAIIFPHMTSTTPLEKGIVIFTDGSANGRSVTYIQGREPIIKENTQNTAQQAEIVAVITAFEEVSQPFNLYTDSKYVTGLFPEIETATLSPRTKIYTELKHLQRLIHKRQEKFYIGHIRGHTGLPGPLAQGNAYADSLTRILTAGKRTADGSEFEKRTADGSEFESPKKKAKVE

SEQ ID NO: 3306 - protein, 2024 aa, synthetic construct
MPAAKRVKLDGGDKKYSIGLDIGTNSVGWAVITDEYKVPSKKFKVLGNTDRHSIKKNLIGALLFDSGETAEATRLKRTARRRYTRRKNRICYLQEIFSNEMAKVDDSFFHRLEESFLVEEDKKHERHPIFGNIVDEVAYHEKYPTIYHLRKKLVDSTDKADLRLIYLALAHMIKFRGHFLIEGDLNPDNSDVDKLFIQLVQTYNQLFEENPINASGVDAKAILSARLSKSRRLENLIAQLPGEKKNGLFGNLIALSLGLTPNFKSNFDLAEDAKLQLSKDTYDDDLDNLLAQIGDQYADLFLAAKNLSDAILLSDILRVNTEITKAPLSASMIKRYDEHHQDLTLLKALVRQQLPEKYKEIFFDQSKNGYAGYIDGGASQEEFYKFIKPILEKMDGTEELLVKLNREDLLRKQRTFDNGSIPHQIHLGELHAILRRQEDFYPFLKDNREKIEKILTFRIPYYVGPLARGNSRFAWMTRKSEETITPWNFEEVVDKGASAQSFIERMTNFDKNLPNEKVLPKHSLLYEYFTVYNELTKVKYVTEGMRKPAFLSGEQKKAIVDLLFKTNRKVTVKQLKEDYFKKIECFDSVEISGVEDRFNASLGTYHDLLKIIKDKDFLDNEENEDILEDIVLTLTLFEDREMIEERLKTYAHLFDDKVMKQLKRRRYTGWGRLSRKLINGIRDKQSGKTILDFLKSDGFANRNFMQLIHDDSLTFKEDIQKAQVSGQGDSLHEHIANLAGSPAIKKGILQTVKVVDELVKVMGRHKPENIVIEMARENQTTQKGQKNSRERMKRIEEGIKELGSQILKEHPVENTQLQNEKLYLYYLQNGRDMYVDQELDINRLSDYDVDHIVPQSFLKDDSIDNKVLTRSDKARGKSDNVPSEEVVKKMKNYWRQLLNAKLITQRKFDNLTKAERGGLSELDKAGFIKRQLVETRQITKHVAQILDSRMNTKYDENDKLIREVKVITLKSKLVSDFRKDFQFYKVREINNYHHAHDAYLNAVVGTALIKKYPKLESEFVYGDYKVYDVRKMIAKSEQEIGKATAKYFFYSNIMNFFKTEITLANGEIRKRPLIETNGETGEIVWDKGRDFATVRKVLSMPQVNIVKKTEVQTGGFSKESILPKRNSDKLIARKKDWDPKKYGGFDSPTVAYSVLVVAKVEKGKSKKLKSVKELLGITIMERSSFEKNPIDFLEAKGYKEVKKDLIIKLPKYSLFELENGRKRMLASAGELQKGNELALPSKYVNFLYLASHYEKLKGSPEDNEQKQLFVEQHKHYLDEIIEQISEFSKRVILADANLDKVLSAYNKHRDKPIREQAENIIHLFTLTNLGAPAAFKYFDTTIDRKRYTSTKEVLDATLIHQSITGLYETRIDLSQLGGDGGEAAAKGGGGSSGGGRDIMKDIKVRLMTDSPDDSQDLMIGAIESNLFADQISWKSDQPVWLNQWPLKQEKLQALQQLVTEQLQLGHLEESNSPWNTPVFVIKKKSGKWRLLQDLRAVNATMHDMGALQPGLPSPVAVPKGWEIIIIDLQDCFFNIKLHPEDCKRFAFSVPSPNFKRPYQRFQWKVLPQGMKNSPTLCQKFVDKAILTVRDKYQDSYIVHYMDDILLAHPSRSIVDEILTSMIQALNKHGLVVSTEKIQKYDNLKYLGTHIQGDSVSYQKLQIRTDKLRTLNDFQKLLGNINWIRPFLKLTTGELKPLFEILNGDSNPISTRKLTPEACKALQLMNERLSTARVKRLDLSQPWSLCILKTEYTPTACLWQDGVVEWIHLPHISPKVITPYDIFCTQLIIKGRHRSKELFSKDPDYIVVPYTKVQFDLLLQEKEDWPISLLGFLGEVHFHLPKDPLLTFTLQTAIIFPHMTSTTPLEKGIVIFTDGSANGRSVTYIQGREPIIKENTQNTAQQAEIVAVITAFEEVSQPFNLYTDSKYVTGLFPEIETATLSPRTKIYTELKHLQRLIHKRQEKFYIGHIRGHTGLPGPLAQGNAYADSLTRILTAGKRTADGSEFEKRTADGSEFESPKKKAKVE

SEQ ID NO: 3307 - protein, 2021 aa, synthetic construct
MPAAKRVKLDGGDKKYSIGLDIGTNSVGWAVITDEYKVPSKKFKVLGNTDRHSIKKNLIGALLFDSGETAEATRLKRTARRRYTRRKNRICYLQEIFSNEMAKVDDSFFHRLEESFLVEEDKKHERHPIFGNIVDEVAYHEKYPTIYHLRKKLVDSTDKADLRLIYLALAHMIKFRGHFLIEGDLNPDNSDVDKLFIQLVQTYNQLFEENPINASGVDAKAILSARLSKSRRLENLIAQLPGEKKNGLFGNLIALSLGLTPNFKSNFDLAEDAKLQLSKDTYDDDLDNLLAQIGDQYADLFLAAKNLSDAILLSDILRVNTEITKAPLSASMIKRYDEHHQDLTLLKALVRQQLPEKYKEIFFDQSKNGYAGYIDGGASQEEFYKFIKPILEKMDGTEELLVKLNREDLLRKQRTFDNGSIPHQIHLGELHAILRRQEDFYPFLKDNREKIEKILTFRIPYYVGPLARGNSRFAWMTRKSEETITPWNFEEVVDKGASAQSFIERMTNFDKNLPNEKVLPKHSLLYEYFTVYNELTKVKYVTEGMRKPAFLSGEQKKAIVDLLFKTNRKVTVKQLKEDYFKKIECFDSVEISGVEDRFNASLGTYHDLLKIIKDKDFLDNEENEDILEDIVLTLTLFEDREMIEERLKTYAHLFDDKVMKQLKRRRYTGWGRLSRKLINGIRDKQSGKTILDFLKSDGFANRNFMQLIHDDSLTFKEDIQKAQVSGQGDSLHEHIANLAGSPAIKKGILQTVKVVDELVKVMGRHKPENIVIEMARENQTTQKGQKNSRERMKRIEEGIKELGSQILKEHPVENTQLQNEKLYLYYLQNGRDMYVDQELDINRLSDYDVDHIVPQSFLKDDSIDNKVLTRSDKARGKSDNVPSEEVVKKMKNYWRQLLNAKLITQRKFDNLTKAERGGLSELDKAGFIKRQLVETRQITKHVAQILDSRMNTKYDENDKLIREVKVITLKSKLVSDFRKDFQFYKVREINNYHHAHDAYLNAVVGTALIKKYPKLESEFVYGDYKVYDVRKMIAKSEQEIGKATAKYFFYSNIMNFFKTEITLANGEIRKRPLIETNGETGEIVWDKGRDFATVRKVLSMPQVNIVKKTEVQTGGFSKESILPKRNSDKLIARKKDWDPKKYGGFDSPTVAYSVLVVAKVEKGKSKKLKSVKELLGITIMERSSFEKNPIDFLEAKGYKEVKKDLIIKLPKYSLFELENGRKRMLASAGELQKGNELALPSKYVNFLYLASHYEKLKGSPEDNEQKQLFVEQHKHYLDEIIEQISEFSKRVILADANLDKVLSAYNKHRDKPIREQAENIIHLFTLTNLGAPAAFKYFDTTIDRKRYTSTKEVLDATLIHQSITGLYETRIDLSQLGGDGGGSSEAAAKGGGRDIMKDIKVRLMTDSPDDSQDLMIGAIESNLFADQISWKSDQPVWLNQWPLKQEKLQALQQLVTEQLQLGHLEESNSPWNTPVFVIKKKSGKWRLLQDLRAVNATMHDMGALQPGLPSPVAVPKGWEIIIIDLQDCFFNIKLHPEDCKRFAFSVPSPNFKRPYQRFQWKVLPQGMKNSPTLCQKFVDKAILTVRDKYQDSYIVHYMDDILLAHPSRSIVDEILTSMIQALNKHGLVVSTEKIQKYDNLKYLGTHIQGDSVSYQKLQIRTDKLRTLNDFQKLLGNINWIRPFLKLTTGELKPLFEILNGDSNPISTRKLTPEACKALQLMNERLSTARVKRLDLSQPWSLCILKTEYTPTACLWQDGVVEWIHLPHISPKVITPYDIFCTQLIIKGRHRSKELFSKDPDYIVVPYTKVQFDLLLQEKEDWPISLLGFLGEVHFHLPKDPLLTFTLQTAIIFPHMTSTTPLEKGIVIFTDGSANGRSVTYIQGREPIIKENTQNTAQQAEIVAVITAFEEVSQPFNLYTDSKYVTGLFPEIETATLSPRTKIYTELKHLQRLIHKRQEKFYIGHIRGHTGLPGPLAQGNAYADSLTRILTAGKRTADGSEFEKRTADGSEFESPKKKAKVE

SEQ ID NO: 3308 - protein, 2022 aa, synthetic construct; identical to SEQ ID NO: 3224

SEQ ID NO: 3309 - protein, 2024 aa, synthetic construct
MPAAKRVKLDGGDKKYSIGLDIGTNSVGWAVITDEYKVPSKKFKVLGNTDRHSIKKNLIGALLFDSGETAEATRLKRTARRRYTRRKNRICYLQEIFSNEMAKVDDSFFHRLEESFLVEEDKKHERHPIFGNIVDEVAYHEKYPTIYHLRKKLVDSTDKADLRLIYLALAHMIKFRGHFLIEGDLNPDNSDVDKLFIQLVQTYNQLFEENPINASGVDAKAILSARLSKSRRLENLIAQLPGEKKNGLFGNLIALSLGLTPNFKSNFDLAEDAKLQLSKDTYDDDLDNLLAQIGDQYADLFLAAKNLSDAILLSDILRVNTEITKAPLSASMIKRYDEHHQDLTLLKALVRQQLPEKYKEIFFDQSKNGYAGYIDGGASQEEFYKFIKPILEKMDGTEELLVKLNREDLLRKQRTFDNGSIPHQIHLGELHAILRRQEDFYPFLKDNREKIEKILTFRIPYYVGPLARGNSRFAWMTRKSEETITPWNFEEVVDKGASAQSFIERMTNFDKNLPNEKVLPKHSLLYEYFTVYNELTKVKYVTEGMRKPAFLSGEQKKAIVDLLFKTNRKVTVKQLKEDYFKKIECFDSVEISGVEDRFNASLGTYHDLLKIIKDKDFLDNEENEDILEDIVLTLTLFEDREMIEERLKTYAHLFDDKVMKQLKRRRYTGWGRLSRKLINGIRDKQSGKTILDFLKSDGFANRNFMQLIHDDSLTFKEDIQKAQVSGQGDSLHEHIANLAGSPAIKKGILQTVKVVDELVKVMGRHKPENIVIEMARENQTTQKGQKNSRERMKRIEEGIKELGSQILKEHPVENTQLQNEKLYLYYLQNGRDMYVDQELDINRLSDYDVDHIVPQSFLKDDSIDNKVLTRSDKARGKSDNVPSEEVVKKMKNYWRQLLNAKLITQRKFDNLTKAERGGLSELDKAGFIKRQLVETRQITKHVAQILDSRMNTKYDENDKLIREVKVITLKSKLVSDFRKDFQFYKVREINNYHHAHDAYLNAVVGTALIKKYPKLESEFVYGDYKVYDVRKMIAKSEQEIGKATAKYFFYSNIMNFFKTEITLANGEIRKRPLIETNGETGEIVWDKGRDFATVRKVLSMPQVNIVKKTEVQTGGFSKESILPKRNSDKLIARKKDWDPKKYGGFDSPTVAYSVLVVAKVEKGKSKKLKSVKELLGITIMERSSFEKNPIDFLEAKGYKEVKKDLIIKLPKYSLFELENGRKRMLASAGELQKGNELALPSKYVNFLYLASHYEKLKGSPEDNEQKQLFVEQHKHYLDEIIEQISEFSKRVILADANLDKVLSAYNKHRDKPIREQAENIIHLFTLTNLGAPAAFKYFDTTIDRKRYTSTKEVLDATLIHQSITGLYETRIDLSQLGGDGGPAPAPAPAPAPGGGRDIMKDIKVRLMTDSPDDSQDLMIGAIESNLFADQISWKSDQPVWLNQWPLKQEKLQALQQLVTEQLQLGHLEESNSPWNTPVFVIKKKSGKWRLLQDLRAVNATMHDMGALQPGLPSPVAVPKGWEIIIIDLQDCFFNIKLHPEDCKRFAFSVPSPNFKRPYQRFQWKVLPQGMKNSPTLCQKFVDKAILTVRDKYQDSYIVHYMDDILLAHPSRSIVDEILTSMIQALNKHGLVVSTEKIQKYDNLKYLGTHIQGDSVSYQKLQIRTDKLRTLNDFQKLLGNINWIRPFLKLTTGELKPLFEILNGDSNPISTRKLTPEACKALQLMNERLSTARVKRLDLSQPWSLCILKTEYTPTACLWQDGVVEWIHLPHISPKVITPYDIFCTQLIIKGRHRSKELFSKDPDYIVVPYTKVQFDLLLQEKEDWPISLLGFLGEVHFHLPKDPLLTFTLQTAIIFPHMTSTTPLEKGIVIFTDGSANGRSVTYIQGREPIIKENTQNTAQQAEIVAVITAFEEVSQPFNLYTDSKYVTGLFPEIETATLSPRTKIYTELKHLQRLIHKRQEKFYIGHIRGHTGLPGPLAQGNAYADSLTRILTAGKRTADGSEFEKRTADGSEFESPKKKAKVE

SEQ ID NO: 3310 - protein, 2024 aa, synthetic construct
MPAAKRVKLDGGDKKYSIGLDIGTNSVGWAVITDEYKVPSKKFKVLGNTDRHSIKKNLIGALLFDSGETAEATRLKRTARRRYTRRKNRICYLQEIFSNEMAKVDDSFFHRLEESFLVEEDKKHERHPIFGNIVDEVAYHEKYPTIYHLRKKLVDSTDKADLRLIYLALAHMIKFRGHFLIEGDLNPDNSDVDKLFIQLVQTYNQLFEENPINASGVDAKAILSARLSKSRRLENLIAQLPGEKKNGLFGNLIALSLGLTPNFKSNFDLAEDAKLQLSKDTYDDDLDNLLAQIGDQYADLFLAAKNLSDAILLSDILRVNTEITKAPLSASMIKRYDEHHQDLTLLKALVRQQLPEKYKEIFFDQSKNGYAGYIDGGASQEEFYKFIKPILEKMDGTEELLVKLNREDLLRKQRTFDNGSIPHQIHLGELHAILRRQEDFYPFLKDNREKIEKILTFRIPYYVGPLARGNSRFAWMTRKSEETITPWNFEEVVDKGASAQSFIERMTNFDKNLPNEKVLPKHSLLYEYFTVYNELTKVKYVTEGMRKPAFLSGEQKKAIVDLLFKTNRKVTVKQLKEDYFKKIECFDSVEISGVEDRFNASLGTYHDLLKIIKDKDFLDNEENEDILEDIVLTLTLFEDREMIEERLKTYAHLFDDKVMKQLKRRRYTGWGRLSRKLINGIRDKQSGKTILDFLKSDGFANRNFMQLIHDDSLTFKEDIQKAQVSGQGDSLHEHIANLAGSPAIKKGILQTVKVVDELVKVMGRHKPENIVIEMARENQTTQKGQKNSRERMKRIEEGIKELGSQILKEHPVENTQLQNEKLYLYYLQNGRDMYVDQELDINRLSDYDVDHIVPQSFLKDDSIDNKVLTRSDKARGKSDNVPSEEVVKKMKNYWRQLLNAKLITQRKFDNLTKAERGGLSELDKAGFIKRQLVETRQITKHVAQILDSRMNTKYDENDKLIREVKVITLKSKLVSDFRKDFQFYKVREINNYHHAHDAYLNAVVGTALIKKYPKLESEFVYGDYKVYDVRKMIAKSEQEIGKATAKYFFYSNIMNFFKTEITLANGEIRKRPLIETNGETGEIVWDKGRDFATVRKVLSMPQVNIVKKTEVQTGGFSKESILPKRNSDKLIARKKDWDPKKYGGFDSPTVAYSVLVVAKVEKGKSKKLKSVKELLGITIMERSSFEKNPIDFLEAKGYKEVKKDLIIKLPKYSLFELENGRKRMLASAGELQKGNELALPSKYVNFLYLASHYEKLKGSPEDNEQKQLFVEQHKHYLDEIIEQISEFSKRVILADANLDKVLSAYNKHRDKPIREQAENIIHLFTLTNLGAPAAFKYFDTTIDRKRYTSTKEVLDATLIHQSITGLYETRIDLSQLGGDGGGSSEAAAKGGSGGGRDIMKDIKVRLMTDSPDDSQDLMIGAIESNLFADQISWKSDQPVWLNQWPLKQEKLQALQQLVTEQLQLGHLEESNSPWNTPVFVIKKKSGKWRLLQDLRAVNATMHDMGALQPGLPSPVAVPKGWEIIIIDLQDCFFNIKLHPEDCKRFAFSVPSPNFKRPYQRFQWKVLPQGMKNSPTLCQKFVDKAILTVRDKYQDSYIVHYMDDILLAHPSRSIVDEILTSMIQALNKHGLVVSTEKIQKYDNLKYLGTHIQGDSVSYQKLQIRTDKLRTLNDFQKLLGNINWIRPFLKLTTGELKPLFEILNGDSNPISTRKLTPEACKALQLMNERLSTARVKRLDLSQPWSLCILKTEYTPTACLWQDGVVEWIHLPHISPKVITPYDIFCTQLIIKGRHRSKELFSKDPDYIVVPYTKVQFDLLLQEKEDWPISLLGFLGEVHFHLPKDPLLTFTLQTAIIFPHMTSTTPLEKGIVIFTDGSANGRSVTYIQGREPIIKENTQNTAQQAEIVAVITAFEEVSQPFNLYTDSKYVTGLFPEIETATLSPRTKIYTELKHLQRLIHKRQEKFYIGHIRGHTGLPGPLAQGNAYADSLTRILTAGKRTADGSEFEKRTADGSEFESPKKKAKVE

SEQ ID NO: 3311 - protein, 2024 aa, synthetic construct
MPAAKRVKLDGGDKKYSIGLDIGTNSVGWAVITDEYKVPSKKFKVLGNTDRHSIKKNLIGALLFDSGETAEATRLKRTARRRYTRRKNRICYLQEIFSNEMAKVDDSFFHRLEESFLVEEDKKHERHPIFGNIVDEVAYHEKYPTIYHLRKKLVDSTDKADLRLIYLALAHMIKFRGHFLIEGDLNPDNSDVDKLFIQLVQTYNQLFEENPINASGVDAKAILSARLSKSRRLENLIAQLPGEKKNGLFGNLIALSLGLTPNFKSNFDLAEDAKLQLSKDTYDDDLDNLLAQIGDQYADLFLAAKNLSDAILLSDILRVNTEITKAPLSASMIKRYDEHHQDLTLLKALVRQQLPEKYKEIFFDQSKNGYAGYIDGGASQEEFYKFIKPILEKMDGTEELLVKLNREDLLRKQRTFDNGSIPHQIHLGELHAILRRQEDFYPFLKDNREKIEKILTFRIPYYVGPLARGNSRFAWMTRKSEETITPWNFEEVVDKGASAQSFIERMTNFDKNLPNEKVLPKHSLLYEYFTVYNELTKVKYVTEGMRKPAFLSGEQKKAIVDLLFKTNRKVTVKQLKEDYFKKIECFDSVEISGVEDRFNASLGTYHDLLKIIKDKDFLDNEENEDILEDIVLTLTLFEDREMIEERLKTYAHLFDDKVMKQLKRRRYTGWGRLSRKLINGIRDKQSGKTILDFLKSDGFANRNFMQLIHDDSLTFKEDIQKAQVSGQGDSLHEHIANLAGSPAIKKGILQTVKVVDELVKVMGRHKPENIVIEMARENQTTQKGQKNSRERMKRIEEGIKELGSQILKEHPVENTQLQNEKLYLYYLQNGRDMYVDQELDINRLSDYDVDHIVPQSFLKDDSIDNKVLTRSDKARGKSDNVPSEEVVKKMKNYWRQLLNAKLITQRKFDNLTKAERGGLSELDKAGFIKRQLVETRQITKHVAQILDSRMNTKYDENDKLIREVKVITLKSKLVSDFRKDFQFYKVREINNYHHAHDAYLNAVVGTALIKKYPKLESEFVYGDYKVYDVRKMIAKSEQEIGKATAKYFFYSNIMNFFKTEITLANGEIRKRPLIETNGETGEIVWDKGRDFATVRKVLSMPQVNIVKKTEVQTGGFSKESILPKRNSDKLIARKKDWDPKKYGGFDSPTVAYSVLVVAKVEKGKSKKLKSVKELLGITIMERSSFEKNPIDFLEAKGYKEVKKDLIIKLPKYSLFELENGRKRMLASAGELQKGNELALPSKYVNFLYLASHYEKLKGSPEDNEQKQLFVEQHKHYLDEIIEQISEFSKRVILADANLDKVLSAYNKHRDKPIREQAENIIHLFTLTNLGAPAAFKYFDTTIDRKRYTSTKEVLDATLIHQSITGLYETRIDLSQLGGDGGGGGGSSEAAAKGGGRDIMKDIKVRLMTDSPDDSQDLMIGAIESNLFADQISWKSDQPVWLNQWPLKQEKLQALQQLVTEQLQLGHLEESNSPWNTPVFVIKKKSGKWRLLQDLRAVNATMHDMGALQPGLPSPVAVPKGWEIIIIDLQDCFFNIKLHPEDCKRFAFSVPSPNFKRPYQRFQWKVLPQGMKNSPTLCQKFVDKAILTVRDKYQDSYIVHYMDDILLAHPSRSIVDEILTSMIQALNKHGLVVSTEKIQKYDNLKYLGTHIQGDSVSYQKLQIRTDKLRTLNDFQKLLGNINWIRPFLKLTTGELKPLFEILNGDSNPISTRKLTPEACKALQLMNERLSTARVKRLDLSQPWSLCILKTEYTPTACLWQDGVVEWIHLPHISPKVITPYDIFCTQLIIKGRHRSKELFSKDPDYIVVPYTKVQFDLLLQEKEDWPISLLGFLGEVHFHLPKDPLLTFTLQTAIIFPHMTSTTPLEKGIVIFTDGSANGRSVTYIQGREPIIKENTQNTAQQAEIVAVITAFEEVSQPFNLYTDSKYVTGLFPEIETATLSPRTKIYTELKHLQRLIHKRQEKFYIGHIRGHTGLPGPLAQGNAYADSLTRILTAGKRTADGSEFEKRTADGSEFESPKKKAKVE

SEQ ID NO: 3312 - protein, 2022 aa, synthetic construct; identical to SEQ ID NO: 3229

SEQ ID NO: 3313 - protein, 2021 aa, synthetic construct; identical to SEQ ID NO: 3208

SEQ ID NO: 3314 - protein, 2024 aa, synthetic construct
MPAAKRVKLDGGDKKYSIGLDIGTNSVGWAVITDEYKVPSKKFKVLGNTDRHSIKKNLIGALLFDSGETAEATRLKRTARRRYTRRKNRICYLQEIFSNEMAKVDDSFFHRLEESFLVEEDKKHERHPIFGNIVDEVAYHEKYPTIYHLRKKLVDSTDKADLRLIYLALAHMIKFRGHFLIEGDLNPDNSDVDKLFIQLVQTYNQLFEENPINASGVDAKAILSARLSKSRRLENLIAQLPGEKKNGLFGNLIALSLGLTPNFKSNFDLAEDAKLQLSKDTYDDDLDNLLAQIGDQYADLFLAAKNLSDAILLSDILRVNTEITKAPLSASMIKRYDEHHQDLTLLKALVRQQLPEKYKEIFFDQSKNGYAGYIDGGASQEEFYKFIKPILEKMDGTEELLVKLNREDLLRKQRTFDNGSIPHQIHLGELHAILRRQEDFYPFLKDNREKIEKILTFRIPYYVGPLARGNSRFAWMTRKSEETITPWNFEEVVDKGASAQSFIERMTNFDKNLPNEKVLPKHSLLYEYFTVYNELTKVKYVTEGMRKPAFLSGEQKKAIVDLLFKTNRKVTVKQLKEDYFKKIECFDSVEISGVEDRFNASLGTYHDLLKIIKDKDFLDNEENEDILEDIVLTLTLFEDREMIEERLKTYAHLFDDKVMKQLKRRRYTGWGRLSRKLINGIRDKQSGKTILDFLKSDGFANRNFMQLIHDDSLTFKEDIQKAQVSGQGDSLHEHIANLAGSPAIKKGILQTVKVVDELVKVMGRHKPENIVIEMARENQTTQKGQKNSRERMKRIEEGIKELGSQILKEHPVENTQLQNEKLYLYYLQNGRDMYVDQELDINRLSDYDVDHIVPQSFLKDDSIDNKVLTRSDKARGKSDNVPSEEVVKKMKNYWRQLLNAKLITQRKFDNLTKAERGGLSELDKAGFIKRQLVETRQITKHVAQILDSRMNTKYDENDKLIREVKVITLKSKLVSDFRKDFQFYKVREINNYHHAHDAYLNAVVGTALIKKYPKLESEFVYGDYKVYDVRKMIAKSEQEIGKATAKYFFYSNIMNFFKTEITLANGEIRKRPLIETNGETGEIVWDKGRDFATVRKVLSMPQVNIVKKTEVQTGGFSKESILPKRNSDKLIARKKDWDPKKYGGFDSPTVAYSVLVVAKVEKGKSKKLKSVKELLGITIMERSSFEKNPIDFLEAKGYKEVKKDLIIKLPKYSLFELENGRKRMLASAGELQKGNELALPSKYVNFLYLASHYEKLKGSPEDNEQKQLFVEQHKHYLDEIIEQISEFSKRVILADANLDKVLSAYNKHRDKPIREQAENIIHLFTLTNLGAPAAFKYFDTTIDRKRYTSTKEVLDATLIHQSITGLYETRIDLSQLGGDGGGSSGGSEAAAKGGGRDIMKDIKVRLMTDSPDDSQDLMIGAIESNLFADQISWKSDQPVWLNQWPLKQEKLQALQQLVTEQLQLGHLEESNSPWNTPVFVIKKKSGKWRLLQDLRAVNATMHDMGALQPGLPSPVAVPKGWEIIIIDLQDCFFNIKLHPEDCKRFAFSVPSPNFKRPYQRFQWKVLPQGMKNSPTLCQKFVDKAILTVRDKYQDSYIVHYMDDILLAHPSRSIVDEILTSMIQALNKHGLVVSTEKIQKYDNLKYLGTHIQGDSVSYQKLQIRTDKLRTLNDFQKLLGNINWIRPFLKLTTGELKPLFEILNGDSNPISTRKLTPEACKALQLMNERLSTARVKRLDLSQPWSLCILKTEYTPTACLWQDGVVEWIHLPHISPKVITPYDIFCTQLIIKGRHRSKELFSKDPDYIVVPYTKVQFDLLLQEKEDWPISLLGFLGEVHFHLPKDPLLTFTLQTAIIFPHMTSTTPLEKGIVIFTDGSANGRSVTYIQGREPIIKENTQNTAQQAEIVAVITAFEEVSQPFNLYTDSKYVTGLFPEIETATLSPRTKIYTELKHLQRLIHKRQEKFYIGHIRGHTGLPGPLAQGNAYADSLTRILTAGKRTADGSEFEKRTADGSEFESPKKKAKVE

SEQ ID NO: 3315 - protein, 2022 aa, synthetic construct; identical to SEQ ID NO: 3199

SEQ ID NO: 3316 - protein, 2022 aa, synthetic construct
MPAAKRVKLDGGDKKYSIGLDIGTNSVGWAVITDEYKVPSKKFKVLGNTDRHSIKKNLIGALLFDSGETAEATRLKRTARRRYTRRKNRICYLQEIFSNEMAKVDDSFFHRLEESFLVEEDKKHERHPIFGNIVDEVAYHEKYPTIYHLRKKLVDSTDKADLRLIYLALAHMIKFRGHFLIEGDLNPDNSDVDKLFIQLVQTYNQLFEENPINASGVDAKAILSARLSKSRRLENLIAQLPGEKKNGLFGNLIALSLGLTPNFKSNFDLAEDAKLQLSKDTYDDDLDNLLAQIGDQYADLFLAAKNLSDAILLSDILRVNTEITKAPLSASMIKRYDEHHQDLTLLKALVRQQLPEKYKEIFFDQSKNGYAGYIDGGASQEEFYKFIKPILEKMDGTEELLVKLNREDLLRKQRTFDNGSIPHQIHLGELHAILRRQEDFYPFLKDNREKIEKILTFRIPYYVGPLARGNSRFAWMTRKSEETITPWNFEEVVDKGASAQSFIERMTNFDKNLPNEKVLPKHSLLYEYFTVYNELTKVKYVTEGMRKPAFLSGEQKKAIVDLLFKTNRKVTVKQLKEDYFKKIECFDSVEISGVEDRFNASLGTYHDLLKIIKDKDFLDNEENEDILEDIVLTLTLFEDREMIEERLKTYAHLFDDKVMKQLKRRRYTGWGRLSRKLINGIRDKQSGKTILDFLKSDGFANRNFMQLIHDDSLTFKEDIQKAQVSGQGDSLHEHIANLAGSPAIKKGILQTVKVVDELVKVMGRHKPENIVIEMARENQTTQKGQKNSRERMKRIEEGIKELGSQILKEHPVENTQLQNEKLYLYYLQNGRDMYVDQELDINRLSDYDVDHIVPQSFLKDDSIDNKVLTRSDKARGKSDNVPSEEVVKKMKNYWRQLLNAKLITQRKFDNLTKAERGGLSELDKAGFIKRQLVETRQITKHVAQILDSRMNTKYDENDKLIREVKVITLKSKLVSDFRKDFQFYKVREINNYHHAHDAYLNAVVGTALIKKYPKLESEFVYGDYKVYDVRKMIAKSEQEIGKATAKYFFYSNIMNFFKTEITLANGEIRKRPLIETNGETGEIVWDKGRDFATVRKVLSMPQVNIVKKTEVQTGGFSKESILPKRNSDKLIARKKDWDPKKYGGFDSPTVAYSVLVVAKVEKGKSKKLKSVKELLGITIMERSSFEKNPIDFLEAKGYKEVKKDLIIKLPKYSLFELENGRKRMLASAGELQKGNELALPSKYVNFLYLASHYEKLKGSPEDNEQKQLFVEQHKHYLDEIIEQISEFSKRVILADANLDKVLSAYNKHRDKPIREQAENIIHLFTLTNLGAPAAFKYFDTTIDRKRYTSTKEVLDATLIHQSITGLYETRIDLSQLGGDGGGGSGGSGGSGGGRDIMKDIKVRLMTDSPDDSQDLMIGAIESNLFADQISWKSDQPVWLNQWPLKQEKLQALQQLVTEQLQLGHLEESNSPWNTPVFVIKKKSGKWRLLQDLRAVNATMHDMGALQPGLPSPVAVPKGWEIIIIDLQDCFFNIKLHPEDCKRFAFSVPSPNFKRPYQRFQWKVLPQGMKNSPTLCQKFVDKAILTVRDKYQDSYIVHYMDDILLAHPSRSIVDEILTSMIQALNKHGLVVSTEKIQKYDNLKYLGTHIQGDSVSYQKLQIRTDKLRTLNDFQKLLGNINWIRPFLKLTTGELKPLFEILNGDSNPISTRKLTPEACKALQLMNERLSTARVKRLDLSQPWSLCILKTEYTPTACLWQDGVVEWIHLPHISPKVITPYDIFCTQLIIKGRHRSKELFSKDPDYIVVPYTKVQFDLLLQEKEDWPISLLGFLGEVHFHLPKDPLLTFTLQTAIIFPHMTSTTPLEKGIVIFTDGSANGRSVTYIQGREPIIKENTQNTAQQAEIVAVITAFEEVSQPFNLYTDSKYVTGLFPEIETATLSPRTKIYTELKHLQRLIHKRQEKFYIGHIRGHTGLPGPLAQGNAYADSLTRILTAGKRTADGSEFEKRTADGSEFESPKKKAKVE

SEQ ID NO: 3317 - protein, 2025 aa, synthetic construct
MPAAKRVKLDGGDKKYSIGLDIGTNSVGWAVITDEYKVPSKKFKVLGNTDRHSIKKNLIGALLFDSGETAEATRLKRTARRRYTRRKNRICYLQEIFSNEMAKVDDSFFHRLEESFLVEEDKKHERHPIFGNIVDEVAYHEKYPTIYHLRKKLVDSTDKADLRLIYLALAHMIKFRGHFLIEGDLNPDNSDVDKLFIQLVQTYNQLFEENPINASGVDAKAILSARLSKSRRLENLIAQLPGEKKNGLFGNLIALSLGLTPNFKSNFDLAEDAKLQLSKDTYDDDLDNLLAQIGDQYADLFLAAKNLSDAILLSDILRVNTEITKAPLSASMIKRYDEHHQDLTLLKALVRQQLPEKYKEIFFDQSKNGYAGYIDGGASQEEFYKFIKPILEKMDGTEELLVKLNREDLLRKQRTFDNGSIPHQIHLGELHAILRRQEDFYPFLKDNREKIEKILTFRIPYYVGPLARGNSRFAWMTRKSEETITPWNFEEVVDKGASAQSFIERMTNFDKNLPNEKVLPKHSLLYEYFTVYNELTKVKYVTEGMRKPAFLSGEQKKAIVDLLFKTNRKVTVKQLKEDYFKKIECFDSVEISGVEDRFNASLGTYHDLLKIIKDKDFLDNEENEDILEDIVLTLTLFEDREMIEERLKTYAHLFDDKVMKQLKRRRYTGWGRLSRKLINGIRDKQSGKTILDFLKSDGFANRNFMQLIHDDSLTFKEDIQKAQVSGQGDSLHEHIANLAGSPAIKKGILQTVKVVDELVKVMGRHKPENIVIEMARENQTTQKGQKNSRERMKRIEEGIKELGSQILKEHPVENTQLQNEKLYLYYLQNGRDMYVDQELDINRLSDYDVDHIVPQSFLKDDSIDNKVLTRSDKARGKSDNVPSEEVVKKMKNYWRQLLNAKLITQRKFDNLTKAERGGLSELDKAGFIKRQLVETRQITKHVAQILDSRMNTKYDENDKLIREVKVITLKSKLVSDFRKDFQFYKVREINNYHHAHDAYLNAVVGTALIKKYPKLESEFVYGDYKVYDVRKMIAKSEQEIGKATAKYFFYSNIMNFFKTEITLANGEIRKRPLIETNGETGEIVWDKGRDFATVRKVLSMPQVNIVKKTEVQTGGFSKESILPKRNSDKLIARKKDWDPKKYGGFDSPTVAYSVLVVAKVEKGKSKKLKSVKELLGITIMERSSFEKNPIDFLEAKGYKEVKKDLIIKLPKYSLFELENGRKRMLASAGELQKGNELALPSKYVNFLYLASHYEKLKGSPEDNEQKQLFVEQHKHYLDEIIEQISEFSKRVILADANLDKVLSAYNKHRDKPIREQAENIIHLFTLTNLGAPAAFKYFDTTIDRKRYTSTKEVLDATLIHQSITGLYETRIDLSQLGGDGGGGSGGSGGSGGSGGGRDIMKDIKVRLMTDSPDDSQDLMIGAIESNLFADQISWKSDQPVWLNQWPLKQEKLQALQQLVTEQLQLGHLEESNSPWNTPVFVIKKKSGKWRLLQDLRAVNATMHDMGALQPGLPSPVAVPKGWEIIIIDLQDCFFNIKLHPEDCKRFAFSVPSPNFKRPYQRFQWKVLPQGMKNSPTLCQKFVDKAILTVRDKYQDSYIVHYMDDILLAHPSRSIVDEILTSMIQALNKHGLVVSTEKIQKYDNLKYLGTHIQGDSVSYQKLQIRTDKLRTLNDFQKLLGNINWIRPFLKLTTGELKPLFEILNGDSNPISTRKLTPEACKALQLMNERLSTARVKRLDLSQPWSLCILKTEYTPTACLWQDGVVEWIHLPHISPKVITPYDIFCTQLIIKGRHRSKELFSKDPDYIVVPYTKVQFDLLLQEKEDWPISLLGFLGEVHFHLPKDPLLTFTLQTAIIFPHMTSTTPLEKGIVIFTDGSANGRSVTYIQGREPIIKENTQNTAQQAEIVAVITAFEEVSQPFNLYTDSKYVTGLFPEIETATLSPRTKIYTELKHLQRLIHKRQEKFYIGHIRGHTGLPGPLAQGNAYADSLTRILTAGKRTADGSEFEKRTADGSEFESPKKKAKVE

SEQ ID NO: 3318 - protein, 2024 aa, synthetic construct; identical to SEQ ID NO: 3207

SEQ ID NO: 3319 - protein, 2016 aa, synthetic construct; identical to SEQ ID NO: 3210

SEQ ID NO: 3320 - protein, 2024 aa, synthetic construct
MPAAKRVKLDGGDKKYSIGLDIGTNSVGWAVITDEYKVPSKKFKVLGNTDRHSIKKNLIGALLFDSGETAEATRLKRTARRRYTRRKNRICYLQEIFSNEMAKVDDSFFHRLEESFLVEEDKKHERHPIFGNIVDEVAYHEKYPTIYHLRKKLVDSTDKADLRLIYLALAHMIKFRGHFLIEGDLNPDNSDVDKLFIQLVQTYNQLFEENPINASGVDAKAILSARLSKSRRLENLIAQLPGEKKNGLFGNLIALSLGLTPNFKSNFDLAEDAKLQLSKDTYDDDLDNLLAQIGDQYADLFLAAKNLSDAILLSDILRVNTEITKAPLSASMIKRYDEHHQDLTLLKALVRQQLPEKYKEIFFDQSKNGYAGYIDGGASQEEFYKFIKPILEKMDGTEELLVKLNREDLLRKQRTFDNGSIPHQIHLGELHAILRRQEDFYPFLKDNREKIEKILTFRIPYYVGPLARGNSRFAWMTRKSEETITPWNFEEVVDKGASAQSFIERMTNFDKNLPNEKVLPKHSLLYEYFTVYNELTKVKYVTEGMRKPAFLSGEQKKAIVDLLFKTNRKVTVKQLKEDYFKKIECFDSVEISGVEDRFNASLGTYHDLLKIIKDKDFLDNEENEDILEDIVLTLTLFEDREMIEERLKTYAHLFDDKVMKQLKRRRYTGWGRLSRKLINGIRDKQSGKTILDFLKSDGFANRNFMQLIHDDSLTFKEDIQKAQVSGQGDSLHEHIANLAGSPAIKKGILQTVKVVDELVKVMGRHKPENIVIEMARENQTTQKGQKNSRERMKRIEEGIKELGSQILKEHPVENTQLQNEKLYLYYLQNGRDMYVDQELDINRLSDYDVDHIVPQSFLKDDSIDNKVLTRSDKARGKSDNVPSEEVVKKMKNYWRQLLNAKLITQRKFDNLTKAERGGLSELDKAGFIKRQLVETRQITKHVAQILDSRMNTKYDENDKLIREVKVITLKSKLVSDFRKDFQFYKVREINNYHHAHDAYLNAVVGTALIKKYPKLESEFVYGDYKVYDVRKMIAKSEQEIGKATAKYFFYSNIMNFFKTEITLANGEIRKRPLIETNGETGEIVWDKGRDFATVRKVLSMPQVNIVKKTEVQTGGFSKESILPKRNSDKLIARKKDWDPKKYGGFDSPTVAYSVLVVAKVEKGKSKKLKSVKELLGITIMERSSFEKNPIDFLEAKGYKEVKKDLIIKLPKYSLFELENGRKRMLASAGELQKGNELALPSKYVNFLYLASHYEKLKGSPEDNEQKQLFVEQHKHYLDEIIEQISEFSKRVILADANLDKVLSAYNKHRDKPIREQAENIIHLFTLTNLGAPAAFKYFDTTIDRKRYTSTKEVLDATLIHQSITGLYETRIDLSQLGGDGGGGSPAPEAAAKGGGRDIMKDIKVRLMTDSPDDSQDLMIGAIESNLFADQISWKSDQPVWLNQWPLKQEKLQALQQLVTEQLQLGHLEESNSPWNTPVFVIKKKSGKWRLLQDLRAVNATMHDMGALQPGLPSPVAVPKGWEIIIIDLQDCFFNIKLHPEDCKRFAFSVPSPNFKRPYQRFQWKVLPQGMKNSPTLCQKFVDKAILTVRDKYQDSYIVHYMDDILLAHPSRSIVDEILTSMIQALNKHGLVVSTEKIQKYDNLKYLGTHIQGDSVSYQKLQIRTDKLRTLNDFQKLLGNINWIRPFLKLTTGELKPLFEILNGDSNPISTRKLTPEACKALQLMNERLSTARVKRLDLSQPWSLCILKTEYTPTACLWQDGVVEWIHLPHISPKVITPYDIFCTQLIIKGRHRSKELFSKDPDYIVVPYTKVQFDLLLQEKEDWPISLLGFLGEVHFHLPKDPLLTFTLQTAIIFPHMTSTTPLEKGIVIFTDGSANGRSVTYIQGREPIIKENTQNTAQQAEIVAVITAFEEVSQPFNLYTDSKYVTGLFPEIETATLSPRTKIYTELKHLQRLIHKRQEKFYIGHIRGHTGLPGPLAQGNAYADSLTRILTAGKRTADGSEFEKRTADGSEFESPKKKAKVE

SEQ ID NO: 3321 - protein, 2022 aa, synthetic construct; identical to SEQ ID NO: 3215

SEQ ID NO: 3322 - protein, 2024 aa, synthetic construct; identical to SEQ ID NO: 3232

SEQ ID NO: 3323 - protein, 2024 aa, synthetic construct; identical to SEQ ID NO: 3235

SEQ ID NO: 3324 - protein, 2024 aa, synthetic construct; identical to SEQ ID NO: 3236

SEQ ID NO: 3325 - protein, 2024 aa, synthetic construct
MPAAKRVKLDGGDKKYSIGLDIGTNSVGWAVITDEYKVPSKKFKVLGNTDRHSIKKNLIGALLFDSGETAEATRLKRTARRRYTRRKNRICYLQEIFSNEMAKVDDSFFHRLEESFLVEEDKKHERHPIFGNIVDEVAYHEKYPTIYHLRKKLVDSTDKADLRLIYLALAHMIKFRGHFLIEGDLNPDNSDVDKLFIQLVQTYNQLFEENPINASGVDAKAILSARLSKSRRLENLIAQLPGEKKNGLFGNLIALSLGLTPNFKSNFDLAEDAKLQLSKDTYDDDLDNLLAQIGDQYADLFLAAKNLSDAILLSDILRVNTEITKAPLSASMIKRYDEHHQDLTLLKALVRQQLPEKYKEIFFDQSKNGYAGYIDGGASQEEFYKFIKPILEKMDGTEELLVKLNREDLLRKQRTFDNGSIPHQIHLGELHAILRRQEDFYPFLKDNREKIEKILTFRIPYYVGPLARGNSRFAWMTRKSEETITPWNFEEVVDKGASAQSFIERMTNFDKNLPNEKVLPKHSLLYEYFTVYNELTKVKYVTEGMRKPAFLSGEQKKAIVDLLFKTNRKVTVKQLKEDYFKKIECFDSVEISGVEDRFNASLGTYHDLLKIIKDKDFLDNEENEDILEDIVLTLTLFEDREMIEERLKTYAHLFDDKVMKQLKRRRYTGWGRLSRKLINGIRDKQSGKTILDFLKSDGFANRNFMQLIHDDSLTFKEDIQKAQVSGQGDSLHEHIANLAGSPAIKKGILQTVKVVDELVKVMGRHKPENIVIEMARENQTTQKGQKNSRERMKRIEEGIKELGSQILKEHPVENTQLQNEKLYLYYLQNGRDMYVDQELDINRLSDYDVDHIVPQSFLKDDSIDNKVLTRSDKARGKSDNVPSEEVVKKMKNYWRQLLNAKLITQRKFDNLTKAERGGLSELDKAGFIKRQLVETRQITKHVAQILDSRMNTKYDENDKLIREVKVITLKSKLVSDFRKDFQFYKVREINNYHHAHDAYLNAVVGTALIKKYPKLESEFVYGDYKVYDVRKMIAKSEQEIGKATAKYFFYSNIMNFFKTEITLANGEIRKRPLIETNGETGEIVWDKGRDFATVRKVLSMPQVNIVKKTEVQTGGFSKESILPKRNSDKLIARKKDWDPKKYGGFDSPTVAYSVLVVAKVEKGKSKKLKSVKELLGITIMERSSFEKNPIDFLEAKGYKEVKKDLIIKLPKYSLFELENGRKRMLASAGELQKGNELALPSKYVNFLYLASHYEKLKGSPEDNEQKQLFVEQHKHYLDEIIEQISEFSKRVILADANLDKVLSAYNKHRDKPIREQAENIIHLFTLTNLGAPAAFKYFDTTIDRKRYTSTKEVLDATLIHQSITGLYETRIDLSQLGGDGGGGGGGSEAAAKGGGRDIMKDIKVRLMTDSPDDSQDLMIGAIESNLFADQISWKSDQPVWLNQWPLKQEKLQALQQLVTEQLQLGHLEESNSPWNTPVFVIKKKSGKWRLLQDLRAVNATMHDMGALQPGLPSPVAVPKGWEIIIIDLQDCFFNIKLHPEDCKRFAFSVPSPNFKRPYQRFQWKVLPQGMKNSPTLCQKFVDKAILTVRDKYQDSYIVHYMDDILLAHPSRSIVDEILTSMIQALNKHGLVVSTEKIQKYDNLKYLGTHIQGDSVSYQKLQIRTDKLRTLNDFQKLLGNINWIRPFLKLTTGELKPLFEILNGDSNPISTRKLTPEACKALQLMNERLSTARVKRLDLSQPWSLCILKTEYTPTACLWQDGVVEWIHLPHISPKVITPYDIFCTQLIIKGRHRSKELFSKDPDYIVVPYTKVQFDLLLQEKEDWPISLLGFLGEVHFHLPKDPLLTFTLQTAIIFPHMTSTTPLEKGIVIFTDGSANGRSVTYIQGREPIIKENTQNTAQQAEIVAVITAFEEVSQPFNLYTDSKYVTGLFPEIETATLSPRTKIYTELKHLQRLIHKRQEKFYIGHIRGHTGLPGPLAQGNAYADSLTRILTAGKRTADGSEFEKRTADGSEFESPKKKAKVE

SEQ ID NO: 3326 - protein, 2024 aa, synthetic construct
MPAAKRVKLDGGDKKYSIGLDIGTNSVGWAVITDEYKVPSKKFKVLGNTDRHSIKKNLIGALLFDSGETAEATRLKRTARRRYTRRKNRICYLQEIFSNEMAKVDDSFFHRLEESFLVEEDKKHERHPIFGNIVDEVAYHEKYPTIYHLRKKLVDSTDKADLRLIYLALAHMIKFRGHFLIEGDLNPDNSDVDKLFIQLVQTYNQLFEENPINASGVDAKAILSARLSKSRRLENLIAQLPGEKKNGLFGNLIALSLGLTPNFKSNFDLAEDAKLQLSKDTYDDDLDNLLAQIGDQYADLFLAAKNLSDAILLSDILRVNTEITKAPLSASMIKRYDEHHQDLTLLKALVRQQLPEKYKEIFFDQSKNGYAGYIDGGASQEEFYKFIKPILEKMDGTEELLVKLNREDLLRKQRTFDNGSIPHQIHLGELHAILRRQEDFYPFLKDNREKIEKILTFRIPYYVGPLARGNSRFAWMTRKSEETITPWNFEEVVDKGASAQSFIERMTNFDKNLPNEKVLPKHSLLYEYFTVYNELTKVKYVTEGMRKPAFLSGEQKKAIVDLLFKTNRKVTVKQLKEDYFKKIECFDSVEISGVEDRFNASLGTYHDLLKIIKDKDFLDNEENEDILEDIVLTLTLFEDREMIEERLKTYAHLFDDKVMKQLKRRRYTGWGRLSRKLINGIRDKQSGKTILDFLKSDGFANRNFMQLIHDDSLTFKEDIQKAQVSGQGDSLHEHIANLAGSPAIKKGILQTVKVVDELVKVMGRHKPENIVIEMARENQTTQKGQKNSRERMKRIEEGIKELGSQILKEHPVENTQLQNEKLYLYYLQNGRDMYVDQELDINRLSDYDVDHIVPQSFLKDDSIDNKVLTRSDKARGKSDNVPSEEVVKKMKNYWRQLLNAKLITQRKFDNLTKAERGGLSELDKAGFIKRQLVETRQITKHVAQILDSRMNTKYDENDKLIREVKVITLKSKLVSDFRKDFQFYKVREINNYHHAHDAYLNAVVGTALIKKYPKLESEFVYGDYKVYDVRKMIAKSEQEIGKATAKYFFYSNIMNFFKTEITLANGEIRKRPLIETNGETGEIVWDKGRDFATVRKVLSMPQVNIVKKTEVQTGGFSKESILPKRNSDKLIARKKDWDPKKYGGFDSPTVAYSVLVVAKVEKGKSKKLKSVKELLGITIMERSSFEKNPIDFLEAKGYKEVKKDLIIKLPKYSLFELENGRKRMLASAGELQKGNELALPSKYVNFLYLASHYEKLKGSPEDNEQKQLFVEQHKHYLDEIIEQISEFSKRVILADANLDKVLSAYNKHRDKPIREQAENIIHLFTLTNLGAPAAFKYFDTTIDRKRYTSTKEVLDATLIHQSITGLYETRIDLSQLGGDGGGGSEAAAKGSSGGGRDIMKDIKVRLMTDSPDDSQDLMIGAIESNLFADQISWKSDQPVWLNQWPLKQEKLQALQQLVTEQLQLGHLEESNSPWNTPVFVIKKKSGKWRLLQDLRAVNATMHDMGALQPGLPSPVAVPKGWEIIIIDLQDCFFNIKLHPEDCKRFAFSVPSPNFKRPYQRFQWKVLPQGMKNSPTLCQKFVDKAILTVRDKYQDSYIVHYMDDILLAHPSRSIVDEILTSMIQALNKHGLVVSTEKIQKYDNLKYLGTHIQGDSVSYQKLQIRTDKLRTLNDFQKLLGNINWIRPFLKLTTGELKPLFEILNGDSNPISTRKLTPEACKALQLMNERLSTARVKRLDLSQPWSLCILKTEYTPTACLWQDGVVEWIHLPHISPKVITPYDIFCTQLIIKGRHRSKELFSKDPDYIVVPYTKVQFDLLLQEKEDWPISLLGFLGEVHFHLPKDPLLTFTLQTAIIFPHMTSTTPLEKGIVIFTDGSANGRSVTYIQGREPIIKENTQNTAQQAEIVAVITAFEEVSQPFNLYTDSKYVTGLFPEIETATLSPRTKIYTELKHLQRLIHKRQEKFYIGHIRGHTGLPGPLAQGNAYADSLTRILTAGKRTADGSEFEKRTADGSEFESPKKKAKVE

SEQ ID NO: 3327 - protein, 2018 aa, synthetic construct
MPAAKRVKLDGGDKKYSIGLDIGTNSVGWAVITDEYKVPSKKFKVLGNTDRHSIKKNLIGALLFDSGETAEATRLKRTARRRYTRRKNRICYLQEIFSNEMAKVDDSFFHRLEESFLVEEDKKHERHPIFGNIVDEVAYHEKYPTIYHLRKKLVDSTDKADLRLIYLALAHMIKFRGHFLIEGDLNPDNSDVDKLFIQLVQTYNQLFEENPINASGVDAKAILSARLSKSRRLENLIAQLPGEKKNGLFGNLIALSLGLTPNFKSNFDLAEDAKLQLSKDTYDDDLDNLLAQIGDQYADLFLAAKNLSDAILLSDILRVNTEITKAPLSASMIKRYDEHHQDLTLLKALVRQQLPEKYKEIFFDQSKNGYAGYIDGGASQEEFYKFIKPILEKMDGTEELLVKLNREDLLRKQRTFDNGSIPHQIHLGELHAILRRQEDFYPFLKDNREKIEKILTFRIPYYVGPLARGNSRFAWMTRKSEETITPWNFEEVVDKGASAQSFIERMTNFDKNLPNEKVLPKHSLLYEYFTVYNELTKVKYVTEGMRKPAFLSGEQKKAIVDLLFKTNRKVTVKQLKEDYFKKIECFDSVEISGVEDRFNASLGTYHDLLKIIKDKDFLDNEENEDILEDIVLTLTLFEDREMIEERLKTYAHLFDDKVMKQLKRRRYTGWGRLSRKLINGIRDKQSGKTILDFLKSDGFANRNFMQLIHDDSLTFKEDIQKAQVSGQGDSLHEHIANLAGSPAIKKGILQTVKVVDELVKVMGRHKPENIVIEMARENQTTQKGQKNSRERMKRIEEGIKELGSQILKEHPVENTQLQNEKLYLYYLQNGRDMYVDQELDINRLSDYDVDHIVPQSFLKDDSIDNKVLTRSDKARGKSDNVPSEEVVKKMKNYWRQLLNAKLITQRKFDNLTKAERGGLSELDKAGFIKRQLVETRQITKHVAQILDSRMNTKYDENDKLIREVKVITLKSKLVSDFRKDFQFYKVREINNYHHAHDAYLNAVVGTALIKKYPKLESEFVYGDYKVYDVRKMIAKSEQEIGKATAKYFFYSNIMNFFKTEITLANGEIRKRPLIETNGETGEIVWDKGRDFATVRKVLSMPQVNIVKKTEVQTGGFSKESILPKRNSDKLIARKKDWDPKKYGGFDSPTVAYSVLVVAKVEKGKSKKLKSVKELLGITIMERSSFEKNPIDFLEAKGYKEVKKDLIIKLPKYSLFELENGRKRMLASAGELQKGNELALPSKYVNFLYLASHYEKLKGSPEDNEQKQLFVEQHKHYLDEIIEQISEFSKRVILADANLDKVLSAYNKHRDKPIREQAENIIHLFTLTNLGAPAAFKYFDTTIDRKRYTSTKEVLDATLIHQSITGLYETRIDLSQLGGDGGPAPAPGGGRDIMKDIKVRLMTDSPDDSQDLMIGAIESNLFADQISWKSDQPVWLNQWPLKQEKLQALQQLVTEQLQLGHLEESNSPWNTPVFVIKKKSGKWRLLQDLRAVNATMHDMGALQPGLPSPVAVPKGWEIIIIDLQDCFFNIKLHPEDCKRFAFSVPSPNFKRPYQRFQWKVLPQGMKNSPTLCQKFVDKAILTVRDKYQDSYIVHYMDDILLAHPSRSIVDEILTSMIQALNKHGLVVSTEKIQKYDNLKYLGTHIQGDSVSYQKLQIRTDKLRTLNDFQKLLGNINWIRPFLKLTTGELKPLFEILNPDSNPISTRKLTPEACKALQLMNERLSTARVKRLDLSQPWSLCILKTEYTPTACLWQDGVVEWIHLPHISPKVITPYDIFCTQLIIKGRHRSKELFSKDPDYIVVPYTKVQFDLLLQEKEDWPISLLGFLGEVHFHLPKDPLLTFTLQTAIIFPHMTSTTPLEKGIVIFTDGSANGRSVTYIQGREPIIKENTQNTAQQAEIVAVITAFEEVSQPFNLYTDSKYVTGLFPEIETATLSPRTKIYTELKHLQRLIHKRQEKFYIGHIRGHTGLPGPLAQGNAYADSLTRILTAGKRTADGSEFEKRTADGSEFESPKKKAKVE

SEQ ID NO: 3328 - protein, 2028 aa, synthetic construct
MPAAKRVKLDGGDKKYSIGLDIGTNSVGWAVITDEYKVPSKKFKVLGNTDRHSIKKNLIGALLFDSGETAEATRLKRTARRRYTRRKNRICYLQEIFSNEMAKVDDSFFHRLEESFLVEEDKKHERHPIFGNIVDEVAYHEKYPTIYHLRKKLVDSTDKADLRLIYLALAHMIKFRGHFLIEGDLNPDNSDVDKLFIQLVQTYNQLFEENPINASGVDAKAILSARLSKSRRLENLIAQLPGEKKNGLFGNLIALSLGLTPNFKSNFDLAEDAKLQLSKDTYDDDLDNLLAQIGDQYADLFLAAKNLSDAILLSDILRVNTEITKAPLSASMIKRYDEHHQDLTLLKALVRQQLPEKYKEIFFDQSKNGYAGYIDGGASQEEFYKFIKPILEKMDGTEELLVKLNREDLLRKQRTFDNGSIPHQIHLGELHAILRRQEDFYPFLKDNREKIEKILTFRIPYYVGPLARGNSRFAWMTRKSEETITPWNFEEVVDKGASAQSFIERMTNFDKNLPNEKVLPKHSLLYEYFTVYNELTKVKYVTEGMRKPAFLSGEQKKAIVDLLFKTNRKVTVKQLKEDYFKKIECFDSVEISGVEDRFNASLGTYHDLLKIIKDKDFLDNEENEDILEDIVLTLTLFEDREMIEERLKTYAHLFDDKVMKQLKRRRYTGWGRLSRKLINGIRDKQSGKTILDFLKSDGFANRNFMQLIHDDSLTFKEDIQKAQVSGQGDSLHEHIANLAGSPAIKKGILQTVKVVDELVKVMGRHKPENIVIEMARENQTTQKGQKNSRERMKRIEEGIKELGSQILKEHPVENTQLQNEKLYLYYLQNGRDMYVDQELDINRLSDYDVDHIVPQSFLKDDSIDNKVLTRSDKARGKSDNVPSEEVVKKMKNYWRQLLNAKLITQRKFDNLTKAERGGLSELDKAGFIKRQLVETRQITKHVAQILDSRMNTKYDENDKLIREVKVITLKSKLVSDFRKDFQFYKVREINNYHHAHDAYLNAVVGTALIKKYPKLESEFVYGDYKVYDVRKMIAKSEQEIGKATAKYFFYSNIMNFFKTEITLANGEIRKRPLIETNGETGEIVWDKGRDFATVRKVLSMPQVNIVKKTEVQTGGFSKESILPKRNSDKLIARKKDWDPKKYGGFDSPTVAYSVLVVAKVEKGKSKKLKSVKELLGITIMERSSFEKNPIDFLEAKGYKEVKKDLIIKLPKYSLFELENGRKRMLASAGELQKGNELALPSKYVNFLYLASHYEKLKGSPEDNEQKQLFVEQHKHYLDEIIEQISEFSKRVILADANLDKVLSAYNKHRDKPIREQAENIIHLFTLTNLGAPAAFKYFDTTIDRKRYTSTKEVLDATLIHQSITGLYETRIDLSQLGGDGGGGGGSEAAAKGGGGSGGGRDIMKDIKVRLMTDSPDDSQDLMIGAIESNLFADQISWKSDQPVWLNQWPLKQEKLQALQQLVTEQLQLGHLEESNSPWNTPVFVIKKKSGKWRLLQDLRAVNATMHDMGALQPGLPSPVAVPKGWEIIIIDLQDCFFNIKLHPEDCKRFAFSVPSPNFKRPYQRFQWKVLPQGMKNSPTLCQKFVDKAILTVRDKYQDSYIVHYMDDILLAHPSRSIVDEILTSMIQALNKHGLVVSTEKIQKYDNLKYLGTHIQGDSVSYQKLQIRTDKLRTLNDFQKLLGNINWIRPFLKLTTGELKPLFEILNPDSNPISTRKLTPEACKALQLMNERLSTARVKRLDLSQPWSLCILKTEYTPTACLWQDGVVEWIHLPHISPKVITPYDIFCTQLIIKGRHRSKELFSKDPDYIVVPYTKVQFDLLLQEKEDWPISLLGFLGEVHFHLPKDPLLTFTLQTAIIFPHMTSTTPLEKGIVIFTDGSANGRSVTYIQGREPIIKENTQNTAQQAEIVAVITAFEEVSQPFNLYTDSKYVTGLFPEIETATLSPRTKIYTELKHLQRLIHKRQEKFYIGHIRGHTGLPGPLAQGNAYADSLTRILTAGKRTADGSEFEKRTADGSEFESPKKKAKVE

SEQ ID NO: 3329 - protein, 2022 aa, synthetic construct
MPAAKRVKLDGGDKKYSIGLDIGTNSVGWAVITDEYKVPSKKFKVLGNTDRHSIKKNLIGALLFDSGETAEATRLKRTARRRYTRRKNRICYLQEIFSNEMAKVDDSFFHRLEESFLVEEDKKHERHPIFGNIVDEVAYHEKYPTIYHLRKKLVDSTDKADLRLIYLALAHMIKFRGHFLIEGDLNPDNSDVDKLFIQLVQTYNQLFEENPINASGVDAKAILSARLSKSRRLENLIAQLPGEKKNGLFGNLIALSLGLTPNFKSNFDLAEDAKLQLSKDTYDDDLDNLLAQIGDQYADLFLAAKNLSDAILLSDILRVNTEITKAPLSASMIKRYDEHHQDLTLLKALVRQQLPEKYKEIFFDQSKNGYAGYIDGGASQEEFYKFIKPILEKMDGTEELLVKLNREDLLRKQRTFDNGSIPHQIHLGELHAILRRQEDFYPFLKDNREKIEKILTFRIPYYVGPLARGNSRFAWMTRKSEETITPWNFEEVVDKGASAQSFIERMTNFDKNLPNEKVLPKHSLLYEYFTVYNELTKVKYVTEGMRKPAFLSGEQKKAIVDLLFKTNRKVTVKQLKEDYFKKIECFDSVEISGVEDRFNASLGTYHDLLKIIKDKDFLDNEENEDILEDIVLTLTLFEDREMIEERLKTYAHLFDDKVMKQLKRRRYTGWGRLSRKLINGIRDKQSGKTILDFLKSDGFANRNFMQLIHDDSLTFKEDIQKAQVSGQGDSLHEHIANLAGSPAIKKGILQTVKVVDELVKVMGRHKPENIVIEMARENQTTQKGQKNSRERMKRIEEGIKELGSQILKEHPVENTQLQNEKLYLYYLQNGRDMYVDQELDINRLSDYDVDHIVPQSFLKDDSIDNKVLTRSDKARGKSDNVPSEEVVKKMKNYWRQLLNAKLITQRKFDNLTKAERGGLSELDKAGFIKRQLVETRQITKHVAQILDSRMNTKYDENDKLIREVKVITLKSKLVSDFRKDFQFYKVREINNYHHAHDAYLNAVVGTALIKKYPKLESEFVYGDYKVYDVRKMIAKSEQEIGKATAKYFFYSNIMNFFKTEITLANGEIRKRPLIETNGETGEIVWDKGRDFATVRKVLSMPQVNIVKKTEVQTGGFSKESILPKRNSDKLIARKKDWDPKKYGGFDSPTVAYSVLVVAKVEKGKSKKLKSVKELLGITIMERSSFEKNPIDFLEAKGYKEVKKDLIIKLPKYSLFELENGRKRMLASAGELQKGNELALPSKYVNFLYLASHYEKLKGSPEDNEQKQLFVEQHKHYLDEIIEQISEFSKRVILADANLDKVLSAYNKHRDKPIREQAENIIHLFTLTNLGAPAAFKYFDTTIDRKRYTSTKEVLDATLIHQSITGLYETRIDLSQLGGDGGGGSGGGGSSGGGRDIMKDIKVRLMTDSPDDSQDLMIGAIESNLFADQISWKSDQPVWLNQWPLKQEKLQALQQLVTEQLQLGHLEESNSPWNTPVFVIKKKSGKWRLLQDLRAVNATMHDMGALQPGLPSPVAVPKGWEIIIIDLQDCFFNIKLHPEDCKRFAFSVPSPNFKRPYQRFQWKVLPQGMKNSPTLCQKFVDKAILTVRDKYQDSYIVHYMDDILLAHPSRSIVDEILTSMIQALNKHGLVVSTEKIQKYDNLKYLGTHIQGDSVSYQKLQIRTDKLRTLNDFQKLLGNINWIRPFLKLTTGELKPLFEILNPDSNPISTRKLTPEACKALQLMNERLSTARVKRLDLSQPWSLCILKTEYTPTACLWQDGVVEWIHLPHISPKVITPYDIFCTQLIIKGRHRSKELFSKDPDYIVVPYTKVQFDLLLQEKEDWPISLLGFLGEVHFHLPKDPLLTFTLQTAIIFPHMTSTTPLEKGIVIFTDGSANGRSVTYIQGREPIIKENTQNTAQQAEIVAVITAFEEVSQPFNLYTDSKYVTGLFPEIETATLSPRTKIYTELKHLQRLIHKRQEKFYIGHIRGHTGLPGPLAQGNAYADSLTRILTAGKRTADGSEFEKRTADGSEFESPKKKAKVE

SEQ ID NO: 3330 - protein, 2033 aa, synthetic construct
MPAAKRVKLDGGDKKYSIGLDIGTNSVGWAVITDEYKVPSKKFKVLGNTDRHSIKKNLIGALLFDSGETAEATRLKRTARRRYTRRKNRICYLQEIFSNEMAKVDDSFFHRLEESFLVEEDKKHERHPIFGNIVDEVAYHEKYPTIYHLRKKLVDSTDKADLRLIYLALAHMIKFRGHFLIEGDLNPDNSDVDKLFIQLVQTYNQLFEENPINASGVDAKAILSARLSKSRRLENLIAQLPGEKKNGLFGNLIALSLGLTPNFKSNFDLAEDAKLQLSKDTYDDDLDNLLAQIGDQYADLFLAAKNLSDAILLSDILRVNTEITKAPLSASMIKRYDEHHQDLTLLKALVRQQLPEKYKEIFFDQSKNGYAGYIDGGASQEEFYKFIKPILEKMDGTEELLVKLNREDLLRKQRTFDNGSIPHQIHLGELHAILRRQEDFYPFLKDNREKIEKILTFRIPYYVGPLARGNSRFAWMTRKSEETITPWNFEEVVDKGASAQSFIERMTNFDKNLPNEKVLPKHSLLYEYFTVYNELTKVKYVTEGMRKPAFLSGEQKKAIVDLLFKTNRKVTVKQLKEDYFKKIECFDSVEISGVEDRFNASLGTYHDLLKIIKDKDFLDNEENEDILEDIVLTLTLFEDREMIEERLKTYAHLFDDKVMKQLKRRRYTGWGRLSRKLINGIRDKQSGKTILDFLKSDGFANRNFMQLIHDDSLTFKEDIQKAQVSGQGDSLHEHIANLAGSPAIKKGILQTVKVVDELVKVMGRHKPENIVIEMARENQTTQKGQKNSRERMKRIEEGIKELGSQILKEHPVENTQLQNEKLYLYYLQNGRDMYVDQELDINRLSDYDVDHIVPQSFLKDDSIDNKVLTRSDKARGKSDNVPSEEVVKKMKNYWRQLLNAKLITQRKFDNLTKAERGGLSELDKAGFIKRQLVETRQITKHVAQILDSRMNTKYDENDKLIREVKVITLKSKLVSDFRKDFQFYKVREINNYHHAHDAYLNAVVGTALIKKYPKLESEFVYGDYKVYDVRKMIAKSEQEIGKATAKYFFYSNIMNFFKTEITLANGEIRKRPLIETNGETGEIVWDKGRDFATVRKVLSMPQVNIVKKTEVQTGGFSKESILPKRNSDKLIARKKDWDPKKYGGFDSPTVAYSVLVVAKVEKGKSKKLKSVKELLGITIMERSSFEKNPIDFLEAKGYKEVKKDLIIKLPKYSLFELENGRKRMLASAGELQKGNELALPSKYVNFLYLASHYEKLKGSPEDNEQKQLFVEQHKHYLDEIIEQISEFSKRVILADANLDKVLSAYNKHRDKPIREQAENIIHLFTLTNLGAPAAFKYFDTTIDRKRYTSTKEVLDATLIHQSITGLYETRIDLSQLGGDGGEAAAKEAAAKEAAAKEAAAKGGGRDIMKDIKVRLMTDSPDDSQDLMIGAIESNLFADQISWKSDQPVWLNQWPLKQEKLQALQQLVTEQLQLGHLEESNSPWNTPVFVIKKKSGKWRLLQDLRAVNATMHDMGALQPGLPSPVAPPKGWEIIIIDLQDCFFNIKLHPEDCKRFAFSVPSPNFKRPYQRFQWKVLPQGMKNSPTLCQKFVDKAILTVRDKYQDSYIVHYMDDILLAHPSRSIVDEILTSMIQALNKHGLVVSTEKIQKYDNLKYLGTHIQGDSVSYQKLQIRTDKLRTLNDFQKLLGNINWIRPFLKLTTGELKPLFEILNPDSNPISTRKLTPEACKALQLMNERLSTARVKRLDLSQPWSLCILKTEYTPTACLWQDGVVEWIHLPHISPKVITPYDIFCTQLIIKGRHRSKELFSKDPDYIVVPYTKVQFDLLLQEKEDWPISLLGFLGEVHFHLPKDPLLTFTLQTAIIFPHMTSTTPLEKGIVIFTDGSANGRSVTYIQGREPIIKENTQNTAQQAEIVAVITAFEEVSQPFNLYTDSKYVTGLFPEIETATLSPRTKIYTELKHLQRLIHKRQEKFYIGHIRGHTGLPGPLAQGNAYADSLTRILTAGKRTADGSEFEKRTADGSEFESPKKKAKVE

SEQ ID NO: 3331 - protein, 2022 aa, synthetic construct
MPAAKRVKLDGGDKKYSIGLDIGTNSVGWAVITDEYKVPSKKFKVLGNTDRHSIKKNLIGALLFDSGETAEATRLKRTARRRYTRRKNRICYLQEIFSNEMAKVDDSFFHRLEESFLVEEDKKHERHPIFGNIVDEVAYHEKYPTIYHLRKKLVDSTDKADLRLIYLALAHMIKFRGHFLIEGDLNPDNSDVDKLFIQLVQTYNQLFEENPINASGVDAKAILSARLSKSRRLENLIAQLPGEKKNGLFGNLIALSLGLTPNFKSNFDLAEDAKLQLSKDTYDDDLDNLLAQIGDQYADLFLAAKNLSDAILLSDILRVNTEITKAPLSASMIKRYDEHHQDLTLLKALVRQQLPEKYKEIFFDQSKNGYAGYIDGGASQEEFYKFIKPILEKMDGTEELLVKLNREDLLRKQRTFDNGSIPHQIHLGELHAILRRQEDFYPFLKDNREKIEKILTFRIPYYVGPLARGNSRFAWMTRKSEETITPWNFEEVVDKGASAQSFIERMTNFDKNLPNEKVLPKHSLLYEYFTVYNELTKVKYVTEGMRKPAFLSGEQKKAIVDLLFKTNRKVTVKQLKEDYFKKIECFDSVEISGVEDRFNASLGTYHDLLKIIKDKDFLDNEENEDILEDIVLTLTLFEDREMIEERLKTYAHLFDDKVMKQLKRRRYTGWGRLSRKLINGIRDKQSGKTILDFLKSDGFANRNFMQLIHDDSLTFKEDIQKAQVSGQGDSLHEHIANLAGSPAIKKGILQTVKVVDELVKVMGRHKPENIVIEMARENQTTQKGQKNSRERMKRIEEGIKELGSQILKEHPVENTQLQNEKLYLYYLQNGRDMYVDQELDINRLSDYDVDHIVPQSFLKDDSIDNKVLTRSDKARGKSDNVPSEEVVKKMKNYWRQLLNAKLITQRKFDNLTKAERGGLSELDKAGFIKRQLVETRQITKHVAQILDSRMNTKYDENDKLIREVKVITLKSKLVSDFRKDFQFYKVREINNYHHAHDAYLNAVVGTALIKKYPKLESEFVYGDYKVYDVRKMIAKSEQEIGKATAKYFFYSNIMNFFKTEITLANGEIRKRPLIETNGETGEIVWDKGRDFATVRKVLSMPQVNIVKKTEVQTGGFSKESILPKRNSDKLIARKKDWDPKKYGGFDSPTVAYSVLVVAKVEKGKSKKLKSVKELLGITIMERSSFEKNPIDFLEAKGYKEVKKDLIIKLPKYSLFELENGRKRMLASAGELQKGNELALPSKYVNFLYLASHYEKLKGSPEDNEQKQLFVEQHKHYLDEIIEQISEFSKRVILADANLDKVLSAYNKHRDKPIREQAENIIHLFTLTNLGAPAAFKYFDTTIDRKRYTSTKEVLDATLIHQSITGLYETRIDLSQLGGDGGGGGGGSPAPGGGRDIMKDIKVRLMTDSPDDSQDLMIGAIESNLFADQISWKSDQPVWLNQWPLKQEKLQALQQLVTEQLQLGHLEESNSPWNTPVFVIKKKSGKWRLLQDLRAVNATMHDMGALQPGLPSPVAPPKGWEIIIIDLQDCFFNIKLHPEDCKRFAFSVPSPNFKRPYQRFQWKVLPQGMKNSPTLCQKFVDKAILTVRDKYQDSYIVHYMDDILLAHPSRSIVDEILTSMIQALNKHGLVVSTEKIQKYDNLKYLGTHIQGDSVSYQKLQIRTDKLRTLNDFQKLLGNINWIRPFLKLTTGELKPLFEILNPDSNPISTRKLTPEACKALQLMNERLSTARVKRLDLSQPWSLCILKTEYTPTACLWQDGVVEWIHLPHISPKVITPYDIFCTQLIIKGRHRSKELFSKDPDYIVVPYTKVQFDLLLQEKEDWPISLLGFLGEVHFHLPKDPLLTFTLQTAIIFPHMTSTTPLEKGIVIFTDGSANGRSVTYIQGREPIIKENTQNTAQQAEIVAVITAFEEVSQPFNLYTDSKYVTGLFPEIETATLSPRTKIYTELKHLQRLIHKRQEKFYIGHIRGHTGLPGPLAQGNAYADSLTRILTAGKRTADGSEFEKRTADGSEFESPKKKAKVE

SEQ ID NO: 3332 - protein, 2024 aa, synthetic construct
MPAAKRVKLDGGDKKYSIGLDIGTNSVGWAVITDEYKVPSKKFKVLGNTDRHSIKKNLIGALLFDSGETAEATRLKRTARRRYTRRKNRICYLQEIFSNEMAKVDDSFFHRLEESFLVEEDKKHERHPIFGNIVDEVAYHEKYPTIYHLRKKLVDSTDKADLRLIYLALAHMIKFRGHFLIEGDLNPDNSDVDKLFIQLVQTYNQLFEENPINASGVDAKAILSARLSKSRRLENLIAQLPGEKKNGLFGNLIALSLGLTPNFKSNFDLAEDAKLQLSKDTYDDDLDNLLAQIGDQYADLFLAAKNLSDAILLSDILRVNTEITKAPLSASMIKRYDEHHQDLTLLKALVRQQLPEKYKEIFFDQSKNGYAGYIDGGASQEEFYKFIKPILEKMDGTEELLVKLNREDLLRKQRTFDNGSIPHQIHLGELHAILRRQEDFYPFLKDNREKIEKILTFRIPYYVGPLARGNSRFAWMTRKSEETITPWNFEEVVDKGASAQSFIERMTNFDKNLPNEKVLPKHSLLYEYFTVYNELTKVKYVTEGMRKPAFLSGEQKKAIVDLLFKTNRKVTVKQLKEDYFKKIECFDSVEISGVEDRFNASLGTYHDLLKIIKDKDFLDNEENEDILEDIVLTLTLFEDREMIEERLKTYAHLFDDKVMKQLKRRRYTGWGRLSRKLINGIRDKQSGKTILDFLKSDGFANRNFMQLIHDDSLTFKEDIQKAQVSGQGDSLHEHIANLAGSPAIKKGILQTVKVVDELVKVMGRHKPENIVIEMARENQTTQKGQKNSRERMKRIEEGIKELGSQILKEHPVENTQLQNEKLYLYYLQNGRDMYVDQELDINRLSDYDVDHIVPQSFLKDDSIDNKVLTRSDKARGKSDNVPSEEVVKKMKNYWRQLLNAKLITQRKFDNLTKAERGGLSELDKAGFIKRQLVETRQITKHVAQILDSRMNTKYDENDKLIREVKVITLKSKLVSDFRKDFQFYKVREINNYHHAHDAYLNAVVGTALIKKYPKLESEFVYGDYKVYDVRKMIAKSEQEIGKATAKYFFYSNIMNFFKTEITLANGEIRKRPLIETNGETGEIVWDKGRDFATVRKVLSMPQVNIVKKTEVQTGGFSKESILPKRNSDKLIARKKDWDPKKYGGFDSPTVAYSVLVVAKVEKGKSKKLKSVKELLGITIMERSSFEKNPIDFLEAKGYKEVKKDLIIKLPKYSLFELENGRKRMLASAGELQKGNELALPSKYVNFLYLASHYEKLKGSPEDNEQKQLFVEQHKHYLDEIIEQISEFSKRVILADANLDKVLSAYNKHRDKPIREQAENIIHLFTLTNLGAPAAFKYFDTTIDRKRYTSTKEVLDATLIHQSITGLYETRIDLSQLGGDGGGSSEAAAKPAPGGGRDIMKDIKVRLMTDSPDDSQDLMIGAIESNLFADQISWKSDQPVWLNQWPLKQEKLQALQQLVTEQLQLGHLEESNSPWNTPVFVIKKKSGKWRLLQDLRAVNATMHDMGALQPGLPSPVAPPKGWEIIIIDLQDCFFNIKLHPEDCKRFAFSVPSPNFKRPYQRFQWKVLPQGMKNSPTLCQKFVDKAILTVRDKYQDSYIVHYMDDILLAHPSRSIVDEILTSMIQALNKHGLVVSTEKIQKYDNLKYLGTHIQGDSVSYQKLQIRTDKLRTLNDFQKLLGNINWIRPFLKLTTGELKPLFEILNPDSNPISTRKLTPEACKALQLMNERLSTARVKRLDLSQPWSLCILKTEYTPTACLWQDGVVEWIHLPHISPKVITPYDIFCTQLIIKGRHRSKELFSKDPDYIVVPYTKVQFDLLLQEKEDWPISLLGFLGEVHFHLPKDPLLTFTLQTAIIFPHMTSTTPLEKGIVIFTDGSANGRSVTYIQGREPIIKENTQNTAQQAEIVAVITAFEEVSQPFNLYTDSKYVTGLFPEIETATLSPRTKIYTELKHLQRLIHKRQEKFYIGHIRGHTGLPGPLAQGNAYADSLTRILTAGKRTADGSEFEKRTADGSEFESPKKKAKVE

SEQ ID NO: 3333-4500 - skipped (1168 entries)

SEQ ID NO: 4501 - protein, 2096 aa, synthetic construct
MPAAKRVKLDGGDKKYSIGLDIGTNSVGWAVITDEYKVPSKKFKVLGNTDRHSIKKNLIGALLFDSGETAEATRLKRTARRRYTRRKNRICYLQEIFSNEMAKVDDSFFHRLEESFLVEEDKKHERHPIFGNIVDEVAYHEKYPTIYHLRKKLVDSTDKADLRLIYLALAHMIKFRGHFLIEGDLNPDNSDVDKLFIQLVQTYNQLFEENPINASGVDAKAILSARLSKSRRLENLIAQLPGEKKNGLFGNLIALSLGLTPNFKSNFDLAEDAKLQLSKDTYDDDLDNLLAQIGDQYADLFLAAKNLSDAILLSDILRVNTEITKAPLSASMIKRYDEHHQDLTLLKALVRQQLPEKYKEIFFDQSKNGYAGYIDGGASQEEFYKFIKPILEKMDGTEELLVKLNREDLLRKQRTFDNGSIPHQIHLGELHAILRRQEDFYPFLKDNREKIEKILTFRIPYYVGPLARGNSRFAWMTRKSEETITPWNFEEVVDKGASAQSFIERMTNFDKNLPNEKVLPKHSLLYEYFTVYNELTKVKYVTEGMRKPAFLSGEQKKAIVDLLFKTNRKVTVKQLKEDYFKKIECFDSVEISGVEDRFNASLGTYHDLLKIIKDKDFLDNEENEDILEDIVLTLTLFEDREMIEERLKTYAHLFDDKVMKQLKRRRYTGWGRLSRKLINGIRDKQSGKTILDFLKSDGFANRNFMQLIHDDSLTFKEDIQKAQVSGQGDSLHEHIANLAGSPAIKKGILQTVKVVDELVKVMGRHKPENIVIEMARENQTTQKGQKNSRERMKRIEEGIKELGSQILKEHPVENTQLQNEKLYLYYLQNGRDMYVDQELDINRLSDYDVDHIVPQSFLKDDSIDNKVLTRSDKARGKSDNVPSEEVVKKMKNYWRQLLNAKLITQRKFDNLTKAERGGLSELDKAGFIKRQLVETRQITKHVAQILDSRMNTKYDENDKLIREVKVITLKSKLVSDFRKDFQFYKVREINNYHHAHDAYLNAVVGTALIKKYPKLESEFVYGDYKVYDVRKMIAKSEQEIGKATAKYFFYSNIMNFFKTEITLANGEIRKRPLIETNGETGEIVWDKGRDFATVRKVLSMPQVNIVKKTEVQTGGFSKESILPKRNSDKLIARKKDWDPKKYGGFDSPTVAYSVLVVAKVEKGKSKKLKSVKELLGITIMERSSFEKNPIDFLEAKGYKEVKKDLIIKLPKYSLFELENGRKRMLASAGELQKGNELALPSKYVNFLYLASHYEKLKGSPEDNEQKQLFVEQHKHYLDEIIEQISEFSKRVILADANLDKVLSAYNKHRDKPIREQAENIIHLFTLTNLGAPAAFKYFDTTIDRKRYTSTKEVLDATLIHQSITGLYETRIDLSQLGGDGGGGSGGSGGSGGTAPLEEEYRLFLEAPIQNVTLLEQWKREIPKVWAEINPPGLASTQAPIHVQLLSTALPVRVRQYPITLEAKRSLRETIRKFRAAGILRPVHSPWNTPLLPVRKSGTSEYRMVQDLREVNKRVETIHPTVPNPYTLLSLLPPDRIWYSVLDLKDAFFCIPLAPESQLIFAFEWADAEEGESGQLTWTRLPQGFKNSPTLFNEALNRDLQGFRLDHPSVSLLQYVDDLLIAADTQAACLSATRDLLMTLAELGYRVSGKKAQLCQEEVTYLGFKIHKGSRSLSNSRTQAILQIPVPKTKRQVREFLGKIGYCRLFIPGFAELAQPLYAATRPGNDPLVWGEKEEEAFQSLKLALTQPPALALPSLDKPFQLFVEETSGAAKGVLTQALGPWKRPVAYLSKRLDPVAAGWPRCLRAIAAAALLTREASKLTFGQDIEITSSHNLESLLRSPPDKWLTNARITQYQVLLLDPPRVRFKQTAALNPATLLPETDDTLPIHHCLDTLDSLTSTRPDLTDQPLAQAEATLFTDGSSYIRDGKRYAGAAVVTLDSVIWAEPLPIGTSAQKAELIALTKALEWSKDKSVNIYTDSRYAFATLHVHGMIYRERGWLTAGGKAIKNAPEILALLTAVWLPKRVAVMHCKGHQKDDAPTSTGNRRADEVAREVAIRPLSTQATISAGKRTADGSEFEKRTADGSEFESPKKKAKVE

SEQ ID NO: 4502 - protein, 2098 aa, synthetic construct
MPAAKRVKLDGGDKKYSIGLDIGTNSVGWAVITDEYKVPSKKFKVLGNTDRHSIKKNLIGALLFDSGETAEATRLKRTARRRYTRRKNRICYLQEIFSNEMAKVDDSFFHRLEESFLVEEDKKHERHPIFGNIVDEVAYHEKYPTIYHLRKKLVDSTDKADLRLIYLALAHMIKFRGHFLIEGDLNPDNSDVDKLFIQLVQTYNQLFEENPINASGVDAKAILSARLSKSRRLENLIAQLPGEKKNGLFGNLIALSLGLTPNFKSNFDLAEDAKLQLSKDTYDDDLDNLLAQIGDQYADLFLAAKNLSDAILLSDILRVNTEITKAPLSASMIKRYDEHHQDLTLLKALVRQQLPEKYKEIFFDQSKNGYAGYIDGGASQEEFYKFIKPILEKMDGTEELLVKLNREDLLRKQRTFDNGSIPHQIHLGELHAILRRQEDFYPFLKDNREKIEKILTFRIPYYVGPLARGNSRFAWMTRKSEETITPWNFEEVVDKGASAQSFIERMTNFDKNLPNEKVLPKHSLLYEYFTVYNELTKVKYVTEGMRKPAFLSGEQKKAIVDLLFKTNRKVTVKQLKEDYFKKIECFDSVEISGVEDRFNASLGTYHDLLKIIKDKDFLDNEENEDILEDIVLTLTLFEDREMIEERLKTYAHLFDDKVMKQLKRRRYTGWGRLSRKLINGIRDKQSGKTILDFLKSDGFANRNFMQLIHDDSLTFKEDIQKAQVSGQGDSLHEHIANLAGSPAIKKGILQTVKVVDELVKVMGRHKPENIVIEMARENQTTQKGQKNSRERMKRIEEGIKELGSQILKEHPVENTQLQNEKLYLYYLQNGRDMYVDQELDINRLSDYDVDHIVPQSFLKDDSIDNKVLTRSDKARGKSDNVPSEEVVKKMKNYWRQLLNAKLITQRKFDNLTKAERGGLSELDKAGFIKRQLVETRQITKHVAQILDSRMNTKYDENDKLIREVKVITLKSKLVSDFRKDFQFYKVREINNYHHAHDAYLNAVVGTALIKKYPKLESEFVYGDYKVYDVRKMIAKSEQEIGKATAKYFFYSNIMNFFKTEITLANGEIRKRPLIETNGETGEIVWDKGRDFATVRKVLSMPQVNIVKKTEVQTGGFSKESILPKRNSDKLIARKKDWDPKKYGGFDSPTVAYSVLVVAKVEKGKSKKLKSVKELLGITIMERSSFEKNPIDFLEAKGYKEVKKDLIIKLPKYSLFELENGRKRMLASAGELQKGNELALPSKYVNFLYLASHYEKLKGSPEDNEQKQLFVEQHKHYLDEIIEQISEFSKRVILADANLDKVLSAYNKHRDKPIREQAENIIHLFTLTNLGAPAAFKYFDTTIDRKRYTSTKEVLDATLIHQSITGLYETRIDLSQLGGDGGGGSGGSGGSGGSGGSGGVLNLEEEYRLHEKPVPSSIDPSWLQLFPTVWAERAGMGLANQVPPVVVELRSGASPVAVRQYPMSKEAREGIRPHIQRFLDLGVLVPCQSPWNTPLLPVKKPGTNDYRPVQDLREINKRVQDIHPTVPNPYNLLSSLPPSHTWYSVLDLKDAFFCLKLHPNSQPLFAFEWRDPEKGNTGQLTWTRLPQGFKNSPTLFNEALHRDLAPFRALNPQVVLLQYVDDLLVAAPTYRDCKEGTQKLLQELSKLGYRVSAKKAQLCQKEVTYLGYLLKEGKRWLTPARKATVMKIPPPTTPRQVREFLGTAGFCRLWIPGFASLAAPLYPLTKPSIPFIWTEEHQKAFDRIKEALLSAPALALPDLTKPFTLYVDERAGVARGVLTQTLGPWRRPVAYLSKKLDPVASGWPTCLKAVAAVALLLKDADKLTLGQNVTVIASHSLESIVRQPPDRWMTNARMTHYQSLLLNERVSFAPPAVLNPATLLPVESEATPVHRCSEILAEETGTRRDLKDQPLPGVPAWYTDGSSFIAEGKRRAGAAIVDGKRTVWASSLPEGTSAQKAELVALTQALRLAEGKDINIYTDSRYAFATAHIHGAIYKQRGWLTSAGKDIKNKEEILALLEAIHLPKRVAIIHCPGHQKGNDPVATGNRRADEAAKQAALSTRVLAETTKPAGKRTADGSEFEKRTADGSEFESPKKKAKVE

SEQ ID NO: 4503 - protein, 2103 aa, synthetic construct
MPAAKRVKLDGGDKKYSIGLDIGTNSVGWAVITDEYKVPSKKFKVLGNTDRHSIKKNLIGALLFDSGETAEATRLKRTARRRYTRRKNRICYLQEIFSNEMAKVDDSFFHRLEESFLVEEDKKHERHPIFGNIVDEVAYHEKYPTIYHLRKKLVDSTDKADLRLIYLALAHMIKFRGHFLIEGDLNPDNSDVDKLFIQLVQTYNQLFEENPINASGVDAKAILSARLSKSRRLENLIAQLPGEKKNGLFGNLIALSLGLTPNFKSNFDLAEDAKLQLSKDTYDDDLDNLLAQIGDQYADLFLAAKNLSDAILLSDILRVNTEITKAPLSASMIKRYDEHHQDLTLLKALVRQQLPEKYKEIFFDQSKNGYAGYIDGGASQEEFYKFIKPILEKMDGTEELLVKLNREDLLRKQRTFDNGSIPHQIHLGELHAILRRQEDFYPFLKDNREKIEKILTFRIPYYVGPLARGNSRFAWMTRKSEETITPWNFEEVVDKGASAQSFIERMTNFDKNLPNEKVLPKHSLLYEYFTVYNELTKVKYVTEGMRKPAFLSGEQKKAIVDLLFKTNRKVTVKQLKEDYFKKIECFDSVEISGVEDRFNASLGTYHDLLKIIKDKDFLDNEENEDILEDIVLTLTLFEDREMIEERLKTYAHLFDDKVMKQLKRRRYTGWGRLSRKLINGIRDKQSGKTILDFLKSDGFANRNFMQLIHDDSLTFKEDIQKAQVSGQGDSLHEHIANLAGSPAIKKGILQTVKVVDELVKVMGRHKPENIVIEMARENQTTQKGQKNSRERMKRIEEGIKELGSQILKEHPVENTQLQNEKLYLYYLQNGRDMYVDQELDINRLSDYDVDHIVPQSFLKDDSIDNKVLTRSDKARGKSDNVPSEEVVKKMKNYWRQLLNAKLITQRKFDNLTKAERGGLSELDKAGFIKRQLVETRQITKHVAQILDSRMNTKYDENDKLIREVKVITLKSKLVSDFRKDFQFYKVREINNYHHAHDAYLNAVVGTALIKKYPKLESEFVYGDYKVYDVRKMIAKSEQEIGKATAKYFFYSNIMNFFKTEITLANGEIRKRPLIETNGETGEIVWDKGRDFATVRKVLSMPQVNIVKKTEVQTGGFSKESILPKRNSDKLIARKKDWDPKKYGGFDSPTVAYSVLVVAKVEKGKSKKLKSVKELLGITIMERSSFEKNPIDFLEAKGYKEVKKDLIIKLPKYSLFELENGRKRMLASAGELQKGNELALPSKYVNFLYLASHYEKLKGSPEDNEQKQLFVEQHKHYLDEIIEQISEFSKRVILADANLDKVLSAYNKHRDKPIREQAENIIHLFTLTNLGAPAAFKYFDTTIDRKRYTSTKEVLDATLIHQSITGLYETRIDLSQLGGDGGGGSGGSGGSGGSGGSGGSGGLGIEDEYRLHETSTEPDVSLGSTWLSDFPQAWAETGGMGLAVRQAPLIIPLKATSTPVSIQQYPMSHEARLGIKPHIQRLLDQGILVPCQSPWNTPLLPVKKPGTNDYRPVQDLREVNKRVEDIHPTVPNPYNLLSGLPPSHQWYTVLDLKDAFFCLRLHPTSQPLFAFEWRDPGMGISGQLTWTRLPQGFKNSPTLFNEALHRDLADFRIQHPDLILLQYVDDILLAATSELDCQQGTRALLQTLGDLGYRASAKKAQICQKQVKYLGYLLREGQRWLTEARKETVMGQPVPKTPRQLREFLGKAGFCRLFIPGFAEMAAPLYPLTKPGTLFSWGPDQQKAYQEIKQALLTAPALGLPDLTKPFELFVDEKQGYAKGVLTQKLGPWRRPVAYLSKKLDPVAAGWPPCLRMVAAIAVLTKDAGKLTMGQPLVILAPHAVEALVKQPPDRWLSNARMTHYQAMLLDTDRVQFGPVVALNPATLLPLPEEGAPHDCLEILAETHGTRPDLTDQPIPDADHTWYTDGSSFLQEGQRKAGAAVTTETEVIWAGALPAGTSAQRAELIALTQALKMAEGKRLNVYTDSRYAFATAHIHGEIYRRRGWLTSEGREIKNKSEILALLKALFLPKRLSIIHCLGHQKGDSAEARGNRLADQAAREAAIKTPPDTSTLLIAGKRTADGSEFEKRTADGSEFESPKKKAKVE

SEQ ID NO: 4504 - protein, 2110 aa, synthetic construct
MPAAKRVKLDGGDKKYSIGLDIGTNSVGWAVITDEYKVPSKKFKVLGNTDRHSIKKNLIGALLFDSGETAEATRLKRTARRRYTRRKNRICYLQEIFSNEMAKVDDSFFHRLEESFLVEEDKKHERHPIFGNIVDEVAYHEKYPTIYHLRKKLVDSTDKADLRLIYLALAHMIKFRGHFLIEGDLNPDNSDVDKLFIQLVQTYNQLFEENPINASGVDAKAILSARLSKSRRLENLIAQLPGEKKNGLFGNLIALSLGLTPNFKSNFDLAEDAKLQLSKDTYDDDLDNLLAQIGDQYADLFLAAKNLSDAILLSDILRVNTEITKAPLSASMIKRYDEHHQDLTLLKALVRQQLPEKYKEIFFDQSKNGYAGYIDGGASQEEFYKFIKPILEKMDGTEELLVKLNREDLLRKQRTFDNGSIPHQIHLGELHAILRRQEDFYPFLKDNREKIEKILTFRIPYYVGPLARGNSRFAWMTRKSEETITPWNFEEVVDKGASAQSFIERMTNFDKNLPNEKVLPKHSLLYEYFTVYNELTKVKYVTEGMRKPAFLSGEQKKAIVDLLFKTNRKVTVKQLKEDYFKKIECFDSVEISGVEDRFNASLGTYHDLLKIIKDKDFLDNEENEDILEDIVLTLTLFEDREMIEERLKTYAHLFDDKVMKQLKRRRYTGWGRLSRKLINGIRDKQSGKTILDFLKSDGFANRNFMQLIHDDSLTFKEDIQKAQVSGQGDSLHEHIANLAGSPAIKKGILQTVKVVDELVKVMGRHKPENIVIEMARENQTTQKGQKNSRERMKRIEEGIKELGSQILKEHPVENTQLQNEKLYLYYLQNGRDMYVDQELDINRLSDYDVDHIVPQSFLKDDSIDNKVLTRSDKARGKSDNVPSEEVVKKMKNYWRQLLNAKLITQRKFDNLTKAERGGLSELDKAGFIKRQLVETRQITKHVAQILDSRMNTKYDENDKLIREVKVITLKSKLVSDFRKDFQFYKVREINNYHHAHDAYLNAVVGTALIKKYPKLESEFVYGDYKVYDVRKMIAKSEQEIGKATAKYFFYSNIMNFFKTEITLANGEIRKRPLIETNGETGEIVWDKGRDFATVRKVLSMPQVNIVKKTEVQTGGFSKESILPKRNSDKLIARKKDWDPKKYGGFDSPTVAYSVLVVAKVEKGKSKKLKSVKELLGITIMERSSFEKNPIDFLEAKGYKEVKKDLIIKLPKYSLFELENGRKRMLASAGELQKGNELALPSKYVNFLYLASHYEKLKGSPEDNEQKQLFVEQHKHYLDEIIEQISEFSKRVILADANLDKVLSAYNKHRDKPIREQAENIIHLFTLTNLGAPAAFKYFDTTIDRKRYTSTKEVLDATLIHQSITGLYETRIDLSQLGGDGGGGGGSGGGGSGGGGSGGGGSGGGGSGGTLNIEDEHRLHETSKEPDVSLGSTWLSDFPQAWAETGGMGLAVRQAPLIIPLKATSTPVSIKQYPMSQEARLGIKPHIQRLLDQGILVPCQSPWNTPLLPVKKPGTNDYRPVQDLREVNKRVEDIHPTVPNPYNLLSGLPPSHQWYTVLDLKDAFFCLRLHPTSQPLFAFEWRDPEMGISGQLTWTRLPQGFKNSPTLFNEALHRDLADFRIQHPDLILLQYVDDLLLAATSELDCQQGTRALLQTLGNLGYRASAKKAQICQKQVKYLGYLLKEGQRWLTEARKETVMGQPTPKTPRQLREFLGKAGFCRLFIPGFAEMAAPLYPLTKPGTLFNWGPDQQKAYQEIKQALLTAPALGLPDLTKPFELFVDEKQGYAKGVLTQKLGPWRRPVAYLSKKLDPVAAGWPPCLRMVAAIAVLTKDAGKLTMGQPLVILAPHAVEALVKQPPDRWLSNARMTHYQALLLDTDRVQFGPVVALNPATLLPLPEEGLQHNCLDILAEAHGTRPDLTDQPLPDADHTWYTDGSSLLQEGQRKAGAAVTTETEVIWAKALPAGTSAQRAELIALTQALKMAEGKKLNVYTDSRYAFATAHIHGEIYRRRGWLTSEGKEIKNKDEILALLKALFLPKRLSIIHCPGHQKGHSAEARGNRMADQAARKAAITETPDTSTLLAGKRTADGSEFEKRTADGSEFESPKKKAKVE

SEQ ID NO: 4505 - protein, 2094 aa, synthetic construct
MPAAKRVKLDGGDKKYSIGLDIGTNSVGWAVITDEYKVPSKKFKVLGNTDRHSIKKNLIGALLFDSGETAEATRLKRTARRRYTRRKNRICYLQEIFSNEMAKVDDSFFHRLEESFLVEEDKKHERHPIFGNIVDEVAYHEKYPTIYHLRKKLVDSTDKADLRLIYLALAHMIKFRGHFLIEGDLNPDNSDVDKLFIQLVQTYNQLFEENPINASGVDAKAILSARLSKSRRLENLIAQLPGEKKNGLFGNLIALSLGLTPNFKSNFDLAEDAKLQLSKDTYDDDLDNLLAQIGDQYADLFLAAKNLSDAILLSDILRVNTEITKAPLSASMIKRYDEHHQDLTLLKALVRQQLPEKYKEIFFDQSKNGYAGYIDGGASQEEFYKFIKPILEKMDGTEELLVKLNREDLLRKQRTFDNGSIPHQIHLGELHAILRRQEDFYPFLKDNREKIEKILTFRIPYYVGPLARGNSRFAWMTRKSEETITPWNFEEVVDKGASAQSFIERMTNFDKNLPNEKVLPKHSLLYEYFTVYNELTKVKYVTEGMRKPAFLSGEQKKAIVDLLFKTNRKVTVKQLKEDYFKKIECFDSVEISGVEDRFNASLGTYHDLLKIIKDKDFLDNEENEDILEDIVLTLTLFEDREMIEERLKTYAHLFDDKVMKQLKRRRYTGWGRLSRKLINGIRDKQSGKTILDFLKSDGFANRNFMQLIHDDSLTFKEDIQKAQVSGQGDSLHEHIANLAGSPAIKKGILQTVKVVDELVKVMGRHKPENIVIEMARENQTTQKGQKNSRERMKRIEEGIKELGSQILKEHPVENTQLQNEKLYLYYLQNGRDMYVDQELDINRLSDYDVDHIVPQSFLKDDSIDNKVLTRSDKARGKSDNVPSEEVVKKMKNYWRQLLNAKLITQRKFDNLTKAERGGLSELDKAGFIKRQLVETRQITKHVAQILDSRMNTKYDENDKLIREVKVITLKSKLVSDFRKDFQFYKVREINNYHHAHDAYLNAVVGTALIKKYPKLESEFVYGDYKVYDVRKMIAKSEQEIGKATAKYFFYSNIMNFFKTEITLANGEIRKRPLIETNGETGEIVWDKGRDFATVRKVLSMPQVNIVKKTEVQTGGFSKESILPKRNSDKLIARKKDWDPKKYGGFDSPTVAYSVLVVAKVEKGKSKKLKSVKELLGITIMERSSFEKNPIDFLEAKGYKEVKKDLIIKLPKYSLFELENGRKRMLASAGELQKGNELALPSKYVNFLYLASHYEKLKGSPEDNEQKQLFVEQHKHYLDEIIEQISEFSKRVILADANLDKVLSAYNKHRDKPIREQAENIIHLFTLTNLGAPAAFKYFDTTIDRKRYTSTKEVLDATLIHQSITGLYETRIDLSQLGGDGGGSSGSSGSSGGTLNIEDEHRLHETSKEPDVSLGSTWLSDFPQAWAETGGMGLAVRQAPLIIPLKATSTPVSIKQYPMSQEARLGIKPHIQRLLDQGILVPCQSPWNTPLLPVKKPGTNDYRPVQDLREVNKRVEDIHPTVPNPYNLLSGLPPSHQWYTVLDLKDAFFCLRLHPTSQPLFAFEWRDPEMGISGQLTWTRLPQGFKNSPTLFNEALHRDLADFRIQHPDLILLQYVDDLLLAATSELDCQQGTRALLQTLGNLGYRASAKKAQICQKQVKYLGYLLKEGQRWLTEARKETVMGQPTPKTPRQLREFLGTAGFCRLWIPGFAEMAAPLYPLTKPGTLFNWGPDQQKAYQEIKQALLTAPALGLPDLTKPFELFVDEKQGYAKGVLTQKLGPWRRPVAYLSKKLDPVAAGWPPCLRMVAAIAVLTKDAGKLTMGQPLVILAPHAVEALVKQPPDRWLSNARMTHYQALLLDTDRVQFGPVVALNPATLLPLPEEGLQHNCLDILAEAHGTRPDLTDQPLPDADHTWYTDGSSLLQEGQRKAGAAVTTETEVIWAKALPAGTSAQRAELIALTQALKMAEGKKLNVYTDSRYAFATAHIHGEIYRRRGWLTSEGKEIKNKDEILALLKALFLPKRLSIIHCPGHQKGHSAEARGNRMADQAARKAAITETPDTSTLLAGKRTADGSEFEKRTADGSEFESPKKKAKVE

SEQ ID NO: 4506 - protein, 2100 aa, synthetic construct
MPAAKRVKLDGGDKKYSIGLDIGTNSVGWAVITDEYKVPSKKFKVLGNTDRHSIKKNLIGALLFDSGETAEATRLKRTARRRYTRRKNRICYLQEIFSNEMAKVDDSFFHRLEESFLVEEDKKHERHPIFGNIVDEVAYHEKYPTIYHLRKKLVDSTDKADLRLIYLALAHMIKFRGHFLIEGDLNPDNSDVDKLFIQLVQTYNQLFEENPINASGVDAKAILSARLSKSRRLENLIAQLPGEKKNGLFGNLIALSLGLTPNFKSNFDLAEDAKLQLSKDTYDDDLDNLLAQIGDQYADLFLAAKNLSDAILLSDILRVNTEITKAPLSASMIKRYDEHHQDLTLLKALVRQQLPEKYKEIFFDQSKNGYAGYIDGGASQEEFYKFIKPILEKMDGTEELLVKLNREDLLRKQRTFDNGSIPHQIHLGELHAILRRQEDFYPFLKDNREKIEKILTFRIPYYVGPLARGNSRFAWMTRKSEETITPWNFEEVVDKGASAQSFIERMTNFDKNLPNEKVLPKHSLLYEYFTVYNELTKVKYVTEGMRKPAFLSGEQKKAIVDLLFKTNRKVTVKQLKEDYFKKIECFDSVEISGVEDRFNASLGTYHDLLKIIKDKDFLDNEENEDILEDIVLTLTLFEDREMIEERLKTYAHLFDDKVMKQLKRRRYTGWGRLSRKLINGIRDKQSGKTILDFLKSDGFANRNFMQLIHDDSLTFKEDIQKAQVSGQGDSLHEHIANLAGSPAIKKGILQTVKVVDELVKVMGRHKPENIVIEMARENQTTQKGQKNSRERMKRIEEGIKELGSQILKEHPVENTQLQNEKLYLYYLQNGRDMYVDQELDINRLSDYDVDHIVPQSFLKDDSIDNKVLTRSDKARGKSDNVPSEEVVKKMKNYWRQLLNAKLITQRKFDNLTKAERGGLSELDKAGFIKRQLVETRQITKHVAQILDSRMNTKYDENDKLIREVKVITLKSKLVSDFRKDFQFYKVREINNYHHAHDAYLNAVVGTALIKKYPKLESEFVYGDYKVYDVRKMIAKSEQEIGKATAKYFFYSNIMNFFKTEITLANGEIRKRPLIETNGETGEIVWDKGRDFATVRKVLSMPQVNIVKKTEVQTGGFSKESILPKRNSDKLIARKKDWDPKKYGGFDSPTVAYSVLVVAKVEKGKSKKLKSVKELLGITIMERSSFEKNPIDFLEAKGYKEVKKDLIIKLPKYSLFELENGRKRMLASAGELQKGNELALPSKYVNFLYLASHYEKLKGSPEDNEQKQLFVEQHKHYLDEIIEQISEFSKRVILADANLDKVLSAYNKHRDKPIREQAENIIHLFTLTNLGAPAAFKYFDTTIDRKRYTSTKEVLDATLIHQSITGLYETRIDLSQLGGDGGEAAAKEAAAKEAAAKGGTLNIEDEYRLHETSKEPDVPLGSTWLSDFPQAWAETGGMGLAVRQAPLIIPLKATSTPVSIKQYPMSQEARLGIKPHIQRLLDQGILVPCQSPWNTPLLPVKKPGTNDYRPVQDLREVNKRVEDIHPTVPNPYNLLSGLPPSHQWYTVLDLKDAFFCLRLHPTSQPLFAFEWRDPEMGISGQLTWTRLPQGFKNSPTLFNEALHRDLADFRIQHPDLILLQYVDDLLLAATSEQDCQRGTRALLQTLGNLGYRASAKKAQICQKQVKYLGYLLKEGQRWLTEARKETVMGQPTPKTPRQLREFLGKAGFCRLFIPGFAEMAAPLYPLTKPGTLFNWGPDQQKAYQEIKQALLTAPALGLPDLTKPFELFVDEKQGYAKGVLTQKLGPWRRPVAYLSKKLDPVAAGWPPCLRMVAAIAVLTKDAGKLTMGQPLVILAPHAVEALVKQPPDRWLSNARMTHYQAMLLDTDRVQFGPVVALNPATLLPLPEKEAPHDCLEILAETHGTRPDLTDQPIPDADYTWYTDGSSFLQEGQRRAGAAVTTETEVIWARALPAGTSAQRAELIALTQALKMAEGKKLNVYTDSRYAFATAHVHGEIYRRRGWLTSEGREIKNKNEILALLKALFLPKRLSIIHCPGHQKGNSAEARGNRMADQAAREAAMKAVLETSTLLAGKRTADGSEFEKRTADGSEFESPKKKAKVE

SEQ ID NO: 4507 - protein, 2110 aa, synthetic construct
MPAAKRVKLDGGDKKYSIGLDIGTNSVGWAVITDEYKVPSKKFKVLGNTDRHSIKKNLIGALLFDSGETAEATRLKRTARRRYTRRKNRICYLQEIFSNEMAKVDDSFFHRLEESFLVEEDKKHERHPIFGNIVDEVAYHEKYPTIYHLRKKLVDSTDKADLRLIYLALAHMIKFRGHFLIEGDLNPDNSDVDKLFIQLVQTYNQLFEENPINASGVDAKAILSARLSKSRRLENLIAQLPGEKKNGLFGNLIALSLGLTPNFKSNFDLAEDAKLQLSKDTYDDDLDNLLAQIGDQYADLFLAAKNLSDAILLSDILRVNTEITKAPLSASMIKRYDEHHQDLTLLKALVRQQLPEKYKEIFFDQSKNGYAGYIDGGASQEEFYKFIKPILEKMDGTEELLVKLNREDLLRKQRTFDNGSIPHQIHLGELHAILRRQEDFYPFLKDNREKIEKILTFRIPYYVGPLARGNSRFAWMTRKSEETITPWNFEEVVDKGASAQSFIERMTNFDKNLPNEKVLPKHSLLYEYFTVYNELTKVKYVTEGMRKPAFLSGEQKKAIVDLLFKTNRKVTVKQLKEDYFKKIECFDSVEISGVEDRFNASLGTYHDLLKIIKDKDFLDNEENEDILEDIVLTLTLFEDREMIEERLKTYAHLFDDKVMKQLKRRRYTGWGRLSRKLINGIRDKQSGKTILDFLKSDGFANRNFMQLIHDDSLTFKEDIQKAQVSGQGDSLHEHIANLAGSPAIKKGILQTVKVVDELVKVMGRHKPENIVIEMARENQTTQKGQKNSRERMKRIEEGIKELGSQILKEHPVENTQLQNEKLYLYYLQNGRDMYVDQELDINRLSDYDVDHIVPQSFLKDDSIDNKVLTRSDKARGKSDNVPSEEVVKKMKNYWRQLLNAKLITQRKFDNLTKAERGGLSELDKAGFIKRQLVETRQITKHVAQILDSRMNTKYDENDKLIREVKVITLKSKLVSDFRKDFQFYKVREINNYHHAHDAYLNAVVGTALIKKYPKLESEFVYGDYKVYDVRKMIAKSEQEIGKATAKYFFYSNIMNFFKTEITLANGEIRKRPLIETNGETGEIVWDKGRDFATVRKVLSMPQVNIVKKTEVQTGGFSKESILPKRNSDKLIARKKDWDPKKYGGFDSPTVAYSVLVVAKVEKGKSKKLKSVKELLGITIMERSSFEKNPIDFLEAKGYKEVKKDLIIKLPKYSLFELENGRKRMLASAGELQKGNELALPSKYVNFLYLASHYEKLKGSPEDNEQKQLFVEQHKHYLDEIIEQISEFSKRVILADANLDKVLSAYNKHRDKPIREQAENIIHLFTLTNLGAPAAFKYFDTTIDRKRYTSTKEVLDATLIHQSITGLYETRIDLSQLGGDGGEAAAKEAAAKEAAAKEAAAKEAAAKGGTLNIEDEYRLHETSKEPDVSLGSTWLSDFPQAWAETGGMGLAVRQAPLIIPLKATSTPVSIKQYPMSQEARLGIKPHIQRLLDQGILVPCQSPWNTPLLPVKKPGTNDYRPVQDLREVNKRVEDIHPTVPNPYNLLSGLPPSHQWYTVLDLKDAFFCLRLHPTSQPLFAFEWRDPEMGISGQLTWTRLPQGFKNSPTLFNEALHRDLAGFRIQHPDLILLQYVDDLLLAATSELDCQQGTRALLQTLGDLGYRASAKKAQICQKQVKYLGYLLKEGQRWLTEARKETVMGQPIPKTPRQLREFLGTAGFCRLWIPGFAEMAAPLYPLTKPGTLFNWGPDQQKAFQEIKQALLTAPALGLPDLTKPFELFVDEKQGYAKGVLTQKLGPWRRPVAYLSKKLDPVAAGWPPCLRMVAAIAVLTKDAGKLTMGQPLVILAPHAVEALVKQPPDRWLSNARMTHYQALLLDTDRVQFGPVVALNPATLLPLPEEGLQHDCLDILAEAHGTRSDLMDQPLPDADHTWYTDGSSFLQEGQRKAGAAVTTETEVIWARALPAGTSAQRAELIALTQALKMAEGKKLNVYTDSRYAFATAHIHGEIYRRRGWLTSEGKEIKNKDEILALLKALFLPKRLSIIHCPGHQKGNSAEARGNRMADQAAREVATRETPETSTLLAGKRTADGSEFEKRTADGSEFESPKKKAKVE

SEQ ID NO: 4508 - protein, 2112 aa, synthetic construct
MPAAKRVKLDGGDKKYSIGLDIGTNSVGWAVITDEYKVPSKKFKVLGNTDRHSIKKNLIGALLFDSGETAEATRLKRTARRRYTRRKNRICYLQEIFSNEMAKVDDSFFHRLEESFLVEEDKKHERHPIFGNIVDEVAYHEKYPTIYHLRKKLVDSTDKADLRLIYLALAHMIKFRGHFLIEGDLNPDNSDVDKLFIQLVQTYNQLFEENPINASGVDAKAILSARLSKSRRLENLIAQLPGEKKNGLFGNLIALSLGLTPNFKSNFDLAEDAKLQLSKDTYDDDLDNLLAQIGDQYADLFLAAKNLSDAILLSDILRVNTEITKAPLSASMIKRYDEHHQDLTLLKALVRQQLPEKYKEIFFDQSKNGYAGYIDGGASQEEFYKFIKPILEKMDGTEELLVKLNREDLLRKQRTFDNGSIPHQIHLGELHAILRRQEDFYPFLKDNREKIEKILTFRIPYYVGPLARGNSRFAWMTRKSEETITPWNFEEVVDKGASAQSFIERMTNFDKNLPNEKVLPKHSLLYEYFTVYNELTKVKYVTEGMRKPAFLSGEQKKAIVDLLFKTNRKVTVKQLKEDYFKKIECFDSVEISGVEDRFNASLGTYHDLLKIIKDKDFLDNEENEDILEDIVLTLTLFEDREMIEERLKTYAHLFDDKVMKQLKRRRYTGWGRLSRKLINGIRDKQSGKTILDFLKSDGFANRNFMQLIHDDSLTFKEDIQKAQVSGQGDSLHEHIANLAGSPAIKKGILQTVKVVDELVKVMGRHKPENIVIEMARENQTTQKGQKNSRERMKRIEEGIKELGSQILKEHPVENTQLQNEKLYLYYLQNGRDMYVDQELDINRLSDYDVDHIVPQSFLKDDSIDNKVLTRSDKARGKSDNVPSEEVVKKMKNYWRQLLNAKLITQRKFDNLTKAERGGLSELDKAGFIKRQLVETRQITKHVAQILDSRMNTKYDENDKLIREVKVITLKSKLVSDFRKDFQFYKVREINNYHHAHDAYLNAVVGTALIKKYPKLESEFVYGDYKVYDVRKMIAKSEQEIGKATAKYFFYSNIMNFFKTEITLANGEIRKRPLIETNGETGEIVWDKGRDFATVRKVLSMPQVNIVKKTEVQTGGFSKESILPKRNSDKLIARKKDWDPKKYGGFDSPTVAYSVLVVAKVEKGKSKKLKSVKELLGITIMERSSFEKNPIDFLEAKGYKEVKKDLIIKLPKYSLFELENGRKRMLASAGELQKGNELALPSKYVNFLYLASHYEKLKGSPEDNEQKQLFVEQHKHYLDEIIEQISEFSKRVILADANLDKVLSAYNKHRDKPIREQAENIIHLFTLTNLGAPAAFKYFDTTIDRKRYTSTKEVLDATLIHQSITGLYETRIDLSQLGGDGGPAPAPAPGGTLNIEDEYRLHETSKEPDVSLGSTWLSDFPQAWAETGGMGLAVRQAPLIIPLKATSTPVSIKQYPMSQEARLGIKPHIQRLLDQGILVPCQSPWNTPLLPVKKPGTNDYRPVQDLREVNKRVEDIHPTVPNPYNLLSGLPPSHQWYTVLDLKDAFFCLRLHPTSQPLFAFEWRDPEMGISGQLTWTRLPQGFKNSPTLFNEALHRDLADFRIQHPDLILLQYVDDLLLAATSELDCQQGTRALLQTLGNLGYRASAKKAQICQKQVKYLGYLLKEGQRWLTEARKETVMGQPTPKTPRQLREFLGKAGFCRLFIPGFAEMAAPLYPLTKPGTLFNWGPDQQKAYQEIKQALLTAPALGLPDLTKPFELFVDEKQGYAKGVLTQKLGPWRRPVAYLSKKLDPVAAGWPPCLRMVAAIAVLTKDAGKLTMGQPLVILAPHAVEALVKQPPDRWLSNARMTHYQALLLDTDRVQFGPVVALNPATLLPLPEEGLQHNCLDILAEAHGTRPDLTDQPLPDADHTWYTDGSSLLQEGQRKAGAAVTTETEVIWAKALPAGTSAQRAELIALTQALKMAEGKKLNVYTDSRYAFATAHIHGEIYRRRGWLTSEGKEIKNKDEILALLKALFLPKRLSIIHCPGHQKGHSAEARGNRMADQAARKAAITETPDTSTLLIENSSPSGGSKRTADGSEFEAGKRTADGSEFEKRTADGSEFESPKKKAKVE

SEQ ID NO: 4509 - protein, 2096 aa, synthetic construct
MPAAKRVKLDGGDKKYSIGLDIGTNSVGWAVITDEYKVPSKKFKVLGNTDRHSIKKNLIGALLFDSGETAEATRLKRTARRRYTRRKNRICYLQEIFSNEMAKVDDSFFHRLEESFLVEEDKKHERHPIFGNIVDEVAYHEKYPTIYHLRKKLVDSTDKADLRLIYLALAHMIKFRGHFLIEGDLNPDNSDVDKLFIQLVQTYNQLFEENPINASGVDAKAILSARLSKSRRLENLIAQLPGEKKNGLFGNLIALSLGLTPNFKSNFDLAEDAKLQLSKDTYDDDLDNLLAQIGDQYADLFLAAKNLSDAILLSDILRVNTEITKAPLSASMIKRYDEHHQDLTLLKALVRQQLPEKYKEIFFDQSKNGYAGYIDGGASQEEFYKFIKPILEKMDGTEELLVKLNREDLLRKQRTFDNGSIPHQIHLGELHAILRRQEDFYPFLKDNREKIEKILTFRIPYYVGPLARGNSRFAWMTRKSEETITPWNFEEVVDKGASAQSFIERMTNFDKNLPNEKVLPKHSLLYEYFTVYNELTKVKYVTEGMRKPAFLSGEQKKAIVDLLFKTNRKVTVKQLKEDYFKKIECFDSVEISGVEDRFNASLGTYHDLLKIIKDKDFLDNEENEDILEDIVLTLTLFEDREMIEERLKTYAHLFDDKVMKQLKRRRYTGWGRLSRKLINGIRDKQSGKTILDFLKSDGFANRNFMQLIHDDSLTFKEDIQKAQVSGQGDSLHEHIANLAGSPAIKKGILQTVKVVDELVKVMGRHKPENIVIEMARENQTTQKGQKNSRERMKRIEEGIKELGSQILKEHPVENTQLQNEKLYLYYLQNGRDMYVDQELDINRLSDYDVDHIVPQSFLKDDSIDNKVLTRSDKARGKSDNVPSEEVVKKMKNYWRQLLNAKLITQRKFDNLTKAERGGLSELDKAGFIKRQLVETRQITKHVAQILDSRMNTKYDENDKLIREVKVITLKSKLVSDFRKDFQFYKVREINNYHHAHDAYLNAVVGTALIKKYPKLESEFVYGDYKVYDVRKMIAKSEQEIGKATAKYFFYSNIMNFFKTEITLANGEIRKRPLIETNGETGEIVWDKGRDFATVRKVLSMPQVNIVKKTEVQTGGFSKESILPKRNSDKLIARKKDWDPKKYGGFDSPTVAYSVLVVAKVEKGKSKKLKSVKELLGITIMERSSFEKNPIDFLEAKGYKEVKKDLIIKLPKYSLFELENGRKRMLASAGELQKGNELALPSKYVNFLYLASHYEKLKGSPEDNEQKQLFVEQHKHYLDEIIEQISEFSKRVILADANLDKVLSAYNKHRDKPIREQAENIIHLFTLTNLGAPAAFKYFDTTIDRKRYTSTKEVLDATLIHQSITGLYETRIDLSQLGGDGGPAPAPAPAPAPAPGGVLNLEEEYRLHEKPVPSSIDPSWLQLFPTVWAERAGMGLANQVPPVVVELRSGASPVAVRQYPMSKEAREGIRPHIQRFLDLGVLVPCQSPWNTPLLPVKKPGTNDYRPVQDLREINKRVQDIHPTVPNPYNLLSSLPPSHTWYSVLDLKDAFFCLKLHPNSQPLFAFEWRDPEKGNTGQLTWTRLPQGFKNSPTLFNEALHRDLAPFRALNPQVVLLQYVDDLLVAAPTYRDCKEGTQKLLQELSKLGYRVSAKKAQLCQKEVTYLGYLLKEGKRWLTPARKATVMKIPPPTTPRQVREFLGTAGFCRLWIPGFASLAAPLYPLTKPSIPFIWTEEHQKAFDRIKEALLSAPALALPDLTKPFTLYVDERAGVARGVLTQTLGPWRRPVAYLSKKLDPVASGWPTCLKAVAAVALLLKDADKLTLGQNVTVIASHSLESIVRQPPDRWMTNARMTHYQSLLLNERVSFAPPAVLNPATLLPVESEATPVHRCSEILAEETGTRRDLKDQPLPGVPAWYTDGSSFIAEGKRRAGAAIVDGKRTVWASSLPEGTSAQKAELVALTQALRLAEGKDINIYTDSRYAFATAHIHGAIYKQRGWLTSAGKDIKNKEEILALLEAIHLPKRVAIIHCPGHQKGNDPVATGNRRADEAAKQAALSTRVLAETTKPAGKRTADGSEFEKRTADGSEFESPKKKAKVE

SEQ ID NO: 4510 - protein, 2098 aa, synthetic construct
MPAAKRVKLDGGDKKYSIGLDIGTNSVGWAVITDEYKVPSKKFKVLGNTDRHSIKKNLIGALLFDSGETAEATRLKRTARRRYTRRKNRICYLQEIFSNEMAKVDDSFFHRLEESFLVEEDKKHERHPIFGNIVDEVAYHEKYPTIYHLRKKLVDSTDKADLRLIYLALAHMIKFRGHFLIEGDLNPDNSDVDKLFIQLVQTYNQLFEENPINASGVDAKAILSARLSKSRRLENLIAQLPGEKKNGLFGNLIALSLGLTPNFKSNFDLAEDAKLQLSKDTYDDDLDNLLAQIGDQYADLFLAAKNLSDAILLSDILRVNTEITKAPLSASMIKRYDEHHQDLTLLKALVRQQLPEKYKEIFFDQSKNGYAGYIDGGASQEEFYKFIKPILEKMDGTEELLVKLNREDLLRKQRTFDNGSIPHQIHLGELHAILRRQEDFYPFLKDNREKIEKILTFRIPYYVGPLARGNSRFAWMTRKSEETITPWNFEEVVDKGASAQSFIERMTNFDKNLPNEKVLPKHSLLYEYFTVYNELTKVKYVTEGMRKPAFLSGEQKKAIVDLLFKTNRKVTVKQLKEDYFKKIECFDSVEISGVEDRFNASLGTYHDLLKIIKDKDFLDNEENEDILEDIVLTLTLFEDREMIEERLKTYAHLFDDKVMKQLKRRRYTGWGRLSRKLINGIRDKQSGKTILDFLKSDGFANRNFMQLIHDDSLTFKEDIQKAQVSGQGDSLHEHIANLAGSPAIKKGILQTVKVVDELVKVMGRHKPENIVIEMARENQTTQKGQKNSRERMKRIEEGIKELGSQILKEHPVENTQLQNEKLYLYYLQNGRDMYVDQELDINRLSDYDVDHIVPQSFLKDDSIDNKVLTRSDKARGKSDNVPSEEVVKKMKNYWRQLLNAKLITQRKFDNLTKAERGGLSELDKAGFIKRQLVETRQITKHVAQILDSRMNTKYDENDKLIREVKVITLKSKLVSDFRKDFQFYKVREINNYHHAHDAYLNAVVGTALIKKYPKLESEFVYGDYKVYDVRKMIAKSEQEIGKATAKYFFYSNIMNFFKTEITLANGEIRKRPLIETNGETGEIVWDKGRDFATVRKVLSMPQVNIVKKTEVQTGGFSKESILPKRNSDKLIARKKDWDPKKYGGFDSPTVAYSVLVVAKVEKGKSKKLKSVKELLGITIMERSSFEKNPIDFLEAKGYKEVKKDLIIKLPKYSLFELENGRKRMLASAGELQKGNELALPSKYVNFLYLASHYEKLKGSPEDNEQKQLFVEQHKHYLDEIIEQISEFSKRVILADANLDKVLSAYNKHRDKPIREQAENIIHLFTLTNLGAPAAFKYFDTTIDRKRYTSTKEVLDATLIHQSITGLYETRIDLSQLGGDGGPAPAPAPAPAPAPGGTLNIEDEYRLHETSKEPDVPLGSTWLSDFPQAWAETGGMGLAVRQAPLIIPLKATSTPVSIKQYPMSQEARLGIKPHIQRLLDQGILVPCQSPWNTPLLPVKKPGTNDYRPVQDLREVNKRVEDIHPTVPNPYNLLSGLPPSHQWYTVLDLKDAFFCLRLHPTSQPLFAFEWRDPEMGISGQLTWTRLPQGFKNSPTLFNEALHRDLADFRIQHPDLILLQYVDDLLLAATSEQDCQRGTRALLQTLGNLGYRASAKKAQICQKQVKYLGYLLKEGQRWLTEARKETVMGQPTPKTPRQLREFLGTAGFCRLWIPGFAEMAAPLYPLTKPGTLFNWGPDQQKAYQEIKQALLTAPALGLPDLTKPFELFVDEKQGYAKGVLTQKLGPWRRPVAYLSKKLDPVAAGWPPCLRMVAAIAVLTKDAGKLTMGQPLVILAPHAVEALVKQPPDRWLSNARMTHYQAMLLDTDRVQFGPVVALNPATLLPLPEKEAPHDCLEILAETHGTRPDLTDQPIPDADYTWYTDGSSFLQEGQRRAGAAVTTETEVIWARALPAGTSAQRAELIALTQALKMAEGKKLNVYTDSRYAFATAHVHGEIYRRRGWLTSEGREIKNKNEILALLKALFLPKRLSIIHCPGHQKGNSAEARGNRMADQAAREAAMKAVLETSTLLAGKRTADGSEFEKRTADGSEFESPKKKAKVE

SEQ ID NO: 4511 - protein, 2091 aa, synthetic construct
MPAAKRVKLDGGDKKYSIGLDIGTNSVGWAVITDEYKVPSKKFKVLGNTDRHSIKKNLIGALLFDSGETAEATRLKRTARRRYTRRKNRICYLQEIFSNEMAKVDDSFFHRLEESFLVEEDKKHERHPIFGNIVDEVAYHEKYPTIYHLRKKLVDSTDKADLRLIYLALAHMIKFRGHFLIEGDLNPDNSDVDKLFIQLVQTYNQLFEENPINASGVDAKAILSARLSKSRRLENLIAQLPGEKKNGLFGNLIALSLGLTPNFKSNFDLAEDAKLQLSKDTYDDDLDNLLAQIGDQYADLFLAAKNLSDAILLSDILRVNTEITKAPLSASMIKRYDEHHQDLTLLKALVRQQLPEKYKEIFFDQSKNGYAGYIDGGASQEEFYKFIKPILEKMDGTEELLVKLNREDLLRKQRTFDNGSIPHQIHLGELHAILRRQEDFYPFLKDNREKIEKILTFRIPYYVGPLARGNSRFAWMTRKSEETITPWNFEEVVDKGASAQSFIERMTNFDKNLPNEKVLPKHSLLYEYFTVYNELTKVKYVTEGMRKPAFLSGEQKKAIVDLLFKTNRKVTVKQLKEDYFKKIECFDSVEISGVEDRFNASLGTYHDLLKIIKDKDFLDNEENEDILEDIVLTLTLFEDREMIEERLKTYAHLFDDKVMKQLKRRRYTGWGRLSRKLINGIRDKQSGKTILDFLKSDGFANRNFMQLIHDDSLTFKEDIQKAQVSGQGDSLHEHIANLAGSPAIKKGILQTVKVVDELVKVMGRHKPENIVIEMARENQTTQKGQKNSRERMKRIEEGIKELGSQILKEHPVENTQLQNEKLYLYYLQNGRDMYVDQELDINRLSDYDVDHIVPQSFLKDDSIDNKVLTRSDKARGKSDNVPSEEVVKKMKNYWRQLLNAKLITQRKFDNLTKAERGGLSELDKAGFIKRQLVETRQITKHVAQILDSRMNTKYDENDKLIREVKVITLKSKLVSDFRKDFQFYKVREINNYHHAHDAYLNAVVGTALIKKYPKLESEFVYGDYKVYDVRKMIAKSEQEIGKATAKYFFYSNIMNFFKTEITLANGEIRKRPLIETNGETGEIVWDKGRDFATVRKVLSMPQVNIVKKTEVQTGGFSKESILPKRNSDKLIARKKDWDPKKYGGFDSPTVAYSVLVVAKVEKGKSKKLKSVKELLGITIMERSSFEKNPIDFLEAKGYKEVKKDLIIKLPKYSLFELENGRKRMLASAGELQKGNELALPSKYVNFLYLASHYEKLKGSPEDNEQKQLFVEQHKHYLDEIIEQISEFSKRVILADANLDKVLSAYNKHRDKPIREQAENIIHLFTLTNLGAPAAFKYFDTTIDRKRYTSTKEVLDATLIHQSITGLYETRIDLSQLGGDGGGGGGGSGGLGIEDEYRLHETSTEPDVSLGSTWLSDFPQAWAETGGMGLAVRQAPLIIPLKATSTPVSIQQYPMSHEARLGIKPHIQRLLDQGILVPCQSPWNTPLLPVKKPGTNDYRPVQDLREVNKRVEDIHPTVPNPYNLLSGLPPSHQWYTVLDLKDAFFCLRLHPTSQPLFAFEWRDPGMGISGQLTWTRLPQGFKNSPTLFNEALHRDLADFRIQHPDLILLQYVDDILLAATSELDCQQGTRALLQTLGDLGYRASAKKAQICQKQVKYLGYLLREGQRWLTEARKETVMGQPVPKTPRQLREFLGKAGFCRLFIPGFAEMAAPLYPLTKPGTLFSWGPDQQKAYQEIKQALLTAPALGLPDLTKPFELFVDEKQGYAKGVLTQKLGPWRRPVAYLSKKLDPVAAGWPPCLRMVAAIAVLTKDAGKLTMGQPLVILAPHAVEALVKQPPDRWLSNARMTHYQAMLLDTDRVQFGPVVALNPATLLPLPEEGAPHDCLEILAETHGTRPDLTDQPIPDADHTWYTDGSSFLQEGQRKAGAAVTTETEVIWAGALPAGTSAQRAELIALTQALKMAEGKRLNVYTDSRYAFATAHIHGEIYRRRGWLTSEGREIKNKSEILALLKALFLPKRLSIIHCLGHQKGDSAEARGNRLADQAAREAAIKTPPDTSTLLIAGKRTADGSEFEKRTADGSEFESPKKKAKVE

SEQ ID NO: 4512 - protein, 2093 aa, synthetic construct
MPAAKRVKLDGGDKKYSIGLDIGTNSVGWAVITDEYKVPSKKFKVLGNTDRHSIKKNLIGALLFDSGETAEATRLKRTARRRYTRRKNRICYLQEIFSNEMAKVDDSFFHRLEESFLVEEDKKHERHPIFGNIVDEVAYHEKYPTIYHLRKKLVDSTDKADLRLIYLALAHMIKFRGHFLIEGDLNPDNSDVDKLFIQLVQTYNQLFEENPINASGVDAKAILSARLSKSRRLENLIAQLPGEKKNGLFGNLIALSLGLTPNFKSNFDLAEDAKLQLSKDTYDDDLDNLLAQIGDQYADLFLAAKNLSDAILLSDILRVNTEITKAPLSASMIKRYDEHHQDLTLLKALVRQQLPEKYKEIFFDQSKNGYAGYIDGGASQEEFYKFIKPILEKMDGTEELLVKLNREDLLRKQRTFDNGSIPHQIHLGELHAILRRQEDFYPFLKDNREKIEKILTFRIPYYVGPLARGNSRFAWMTRKSEETITPWNFEEVVDKGASAQSFIERMTNFDKNLPNEKVLPKHSLLYEYFTVYNELTKVKYVTEGMRKPAFLSGEQKKAIVDLLFKTNRKVTVKQLKEDYFKKIECFDSVEISGVEDRFNASLGTYHDLLKIIKDKDFLDNEENEDILEDIVLTLTLFEDREMIEERLKTYAHLFDDKVMKQLKRRRYTGWGRLSRKLINGIRDKQSGKTILDFLKSDGFANRNFMQLIHDDSLTFKEDIQKAQVSGQGDSLHEHIANLAGSPAIKKGILQTVKVVDELVKVMGRHKPENIVIEMARENQTTQKGQKNSRERMKRIEEGIKELGSQILKEHPVENTQLQNEKLYLYYLQNGRDMYVDQELDINRLSDYDVDHIVPQSFLKDDSIDNKVLTRSDKARGKSDNVPSEEVVKKMKNYWRQLLNAKLITQRKFDNLTKAERGGLSELDKAGFIKRQLVETRQITKHVAQILDSRMNTKYDENDKLIREVKVITLKSKLVSDFRKDFQFYKVREINNYHHAHDAYLNAVVGTALIKKYPKLESEFVYGDYKVYDVRKMIAKSEQEIGKATAKYFFYSNIMNFFKTEITLANGEIRKRPLIETNGETGEIVWDKGRDFATVRKVLSMPQVNIVKKTEVQTGGFSKESILPKRNSDKLIARKKDWDPKKYGGFDSPTVAYSVLVVAKVEKGKSKKLKSVKELLGITIMERSSFEKNPIDFLEAKGYKEVKKDLIIKLPKYSLFELENGRKRMLASAGELQKGNELALPSKYVNFLYLASHYEKLKGSPEDNEQKQLFVEQHKHYLDEIIEQISEFSKRVILADANLDKVLSAYNKHRDKPIREQAENIIHLFTLTNLGAPAAFKYFDTTIDRKRYTSTKEVLDATLIHQSITGLYETRIDLSQLGGDGGEAAAKGSSGGLGIEDEYRLHETSTEPDVSLGSTWLSDFPQAWAETGGMGLAVRQAPLIIPLKATSTPVSIQQYPMSHEARLGIKPHIQRLLDQGILVPCQSPWNTPLLPVKKPGTNDYRPVQDLREVNKRVEDIHPTVPNPYNLLSGLPPSHQWYTVLDLKDAFFCLRLHPTSQPLFAFEWRDPGMGISGQLTWTRLPQGFKNSPTLFNEALHRDLADFRIQHPDLILLQYVDDILLAATSELDCQQGTRALLQTLGDLGYRASAKKAQICQKQVKYLGYLLREGQRWLTEARKETVMGQPVPKTPRQLREFLGKAGFCRLFIPGFAEMAAPLYPLTKPGTLFSWGPDQQKAYQEIKQALLTAPALGLPDLTKPFELFVDEKQGYAKGVLTQKLGPWRRPVAYLSKKLDPVAAGWPPCLRMVAAIAVLTKDAGKLTMGQPLVILAPHAVEALVKQPPDRWLSNARMTHYQAMLLDTDRVQFGPVVALNPATLLPLPEEGAPHDCLEILAETHGTRPDLTDQPIPDADHTWYTDGSSFLQEGQRKAGAAVTTETEVIWAGALPAGTSAQRAELIALTQALKMAEGKRLNVYTDSRYAFATAHIHGEIYRRRGWLTSEGREIKNKSEILALLKALFLPKRLSIIHCLGHQKGDSAEARGNRLADQAAREAAIKTPPDTSTLLIAGKRTADGSEFEKRTADGSEFESPKKKAKVE

SEQ ID NO: 4513 - protein, 2091 aa, synthetic construct
MPAAKRVKLDGGDKKYSIGLDIGTNSVGWAVITDEYKVPSKKFKVLGNTDRHSIKKNLIGALLFDSGETAEATRLKRTARRRYTRRKNRICYLQEIFSNEMAKVDDSFFHRLEESFLVEEDKKHERHPIFGNIVDEVAYHEKYPTIYHLRKKLVDSTDKADLRLIYLALAHMIKFRGHFLIEGDLNPDNSDVDKLFIQLVQTYNQLFEENPINASGVDAKAILSARLSKSRRLENLIAQLPGEKKNGLFGNLIALSLGLTPNFKSNFDLAEDAKLQLSKDTYDDDLDNLLAQIGDQYADLFLAAKNLSDAILLSDILRVNTEITKAPLSASMIKRYDEHHQDLTLLKALVRQQLPEKYKEIFFDQSKNGYAGYIDGGASQEEFYKFIKPILEKMDGTEELLVKLNREDLLRKQRTFDNGSIPHQIHLGELHAILRRQEDFYPFLKDNREKIEKILTFRIPYYVGPLARGNSRFAWMTRKSEETITPWNFEEVVDKGASAQSFIERMTNFDKNLPNEKVLPKHSLLYEYFTVYNELTKVKYVTEGMRKPAFLSGEQKKAIVDLLFKTNRKVTVKQLKEDYFKKIECFDSVEISGVEDRFNASLGTYHDLLKIIKDKDFLDNEENEDILEDIVLTLTLFEDREMIEERLKTYAHLFDDKVMKQLKRRRYTGWGRLSRKLINGIRDKQSGKTILDFLKSDGFANRNFMQLIHDDSLTFKEDIQKAQVSGQGDSLHEHIANLAGSPAIKKGILQTVKVVDELVKVMGRHKPENIVIEMARENQTTQKGQKNSRERMKRIEEGIKELGSQILKEHPVENTQLQNEKLYLYYLQNGRDMYVDQELDINRLSDYDVDHIVPQSFLKDDSIDNKVLTRSDKARGKSDNVPSEEVVKKMKNYWRQLLNAKLITQRKFDNLTKAERGGLSELDKAGFIKRQLVETRQITKHVAQILDSRMNTKYDENDKLIREVKVITLKSKLVSDFRKDFQFYKVREINNYHHAHDAYLNAVVGTALIKKYPKLESEFVYGDYKVYDVRKMIAKSEQEIGKATAKYFFYSNIMNFFKTEITLANGEIRKRPLIETNGETGEIVWDKGRDFATVRKVLSMPQVNIVKKTEVQTGGFSKESILPKRNSDKLIARKKDWDPKKYGGFDSPTVAYSVLVVAKVEKGKSKKLKSVKELLGITIMERSSFEKNPIDFLEAKGYKEVKKDLIIKLPKYSLFELENGRKRMLASAGELQKGNELALPSKYVNFLYLASHYEKLKGSPEDNEQKQLFVEQHKHYLDEIIEQISEFSKRVILADANLDKVLSAYNKHRDKPIREQAENIIHLFTLTNLGAPAAFKYFDTTIDRKRYTSTKEVLDATLIHQSITGLYETRIDLSQLGGDGGPAPGSSGGTLNIEDEHRLHETSKEPDVSLGSTWLSDFPQAWAETGGMGLAVRQAPLIIPLKATSTPVSIKQYPMSQEARLGIKPHIQRLLDQGILVPCQSPWNTPLLPVKKPGTNDYRPVQDLREVNKRVEDIHPTVPNPYNLLSGLPPSHQWYTVLDLKDAFFCLRLHPTSQPLFAFEWRDPEMGISGQLTWTRLPQGFKNSPTLFNEALHRDLADFRIQHPDLILLQYVDDLLLAATSELDCQQGTRALLQTLGNLGYRASAKKAQICQKQVKYLGYLLKEGQRWLTEARKETVMGQPTPKTPRQLREFLGKAGFCRLFIPGFAEMAAPLYPLTKPGTLFNWGPDQQKAYQEIKQALLTAPALGLPDLTKPFELFVDEKQGYAKGVLTQKLGPWRRPVAYLSKKLDPVAAGWPPCLRMVAAIAVLTKDAGKLTMGQPLVILAPHAVEALVKQPPDRWLSNARMTHYQALLLDTDRVQFGPVVALNPATLLPLPEEGLQHNCLDILAEAHGTRPDLTDQPLPDADHTWYTDGSSLLQEGQRKAGAAVTTETEVIWAKALPAGTSAQRAELIALTQALKMAEGKKLNVYTDSRYAFATAHIHGEIYRRRGWLTSEGKEIKNKDEILALLKALFLPKRLSIIHCPGHQKGHSAEARGNRMADQAARKAAITETPDTSTLLAGKRTADGSEFEKRTADGSEFESPKKKAKVE

SEQ ID NO: 4514 - protein, 2091 aa, synthetic construct; identical to SEQ ID NO: 4513

SEQ ID NO: 4515 - protein, 2091 aa, synthetic construct
MPAAKRVKLDGGDKKYSIGLDIGTNSVGWAVITDEYKVPSKKFKVLGNTDRHSIKKNLIGALLFDSGETAEATRLKRTARRRYTRRKNRICYLQEIFSNEMAKVDDSFFHRLEESFLVEEDKKHERHPIFGNIVDEVAYHEKYPTIYHLRKKLVDSTDKADLRLIYLALAHMIKFRGHFLIEGDLNPDNSDVDKLFIQLVQTYNQLFEENPINASGVDAKAILSARLSKSRRLENLIAQLPGEKKNGLFGNLIALSLGLTPNFKSNFDLAEDAKLQLSKDTYDDDLDNLLAQIGDQYADLFLAAKNLSDAILLSDILRVNTEITKAPLSASMIKRYDEHHQDLTLLKALVRQQLPEKYKEIFFDQSKNGYAGYIDGGASQEEFYKFIKPILEKMDGTEELLVKLNREDLLRKQRTFDNGSIPHQIHLGELHAILRRQEDFYPFLKDNREKIEKILTFRIPYYVGPLARGNSRFAWMTRKSEETITPWNFEEVVDKGASAQSFIERMTNFDKNLPNEKVLPKHSLLYEYFTVYNELTKVKYVTEGMRKPAFLSGEQKKAIVDLLFKTNRKVTVKQLKEDYFKKIECFDSVEISGVEDRFNASLGTYHDLLKIIKDKDFLDNEENEDILEDIVLTLTLFEDREMIEERLKTYAHLFDDKVMKQLKRRRYTGWGRLSRKLINGIRDKQSGKTILDFLKSDGFANRNFMQLIHDDSLTFKEDIQKAQVSGQGDSLHEHIANLAGSPAIKKGILQTVKVVDELVKVMGRHKPENIVIEMARENQTTQKGQKNSRERMKRIEEGIKELGSQILKEHPVENTQLQNEKLYLYYLQNGRDMYVDQELDINRLSDYDVDHIVPQSFLKDDSIDNKVLTRSDKARGKSDNVPSEEVVKKMKNYWRQLLNAKLITQRKFDNLTKAERGGLSELDKAGFIKRQLVETRQITKHVAQILDSRMNTKYDENDKLIREVKVITLKSKLVSDFRKDFQFYKVREINNYHHAHDAYLNAVVGTALIKKYPKLESEFVYGDYKVYDVRKMIAKSEQEIGKATAKYFFYSNIMNFFKTEITLANGEIRKRPLIETNGETGEIVWDKGRDFATVRKVLSMPQVNIVKKTEVQTGGFSKESILPKRNSDKLIARKKDWDPKKYGGFDSPTVAYSVLVVAKVEKGKSKKLKSVKELLGITIMERSSFEKNPIDFLEAKGYKEVKKDLIIKLPKYSLFELENGRKRMLASAGELQKGNELALPSKYVNFLYLASHYEKLKGSPEDNEQKQLFVEQHKHYLDEIIEQISEFSKRVILADANLDKVLSAYNKHRDKPIREQAENIIHLFTLTNLGAPAAFKYFDTTIDRKRYTSTKEVLDATLIHQSITGLYETRIDLSQLGGDGGEAAAKPAPGGVLNLEEEYRLHEKPVPSSIDPSWLQLFPTVWAERAGMGLANQVPPVVVELRSGASPVAVRQYPMSKEAREGIRPHIQRFLDLGVLVPCQSPWNTPLLPVKKPGTNDYRPVQDLREINKRVQDIHPTVPNPYNLLSSLPPSHTWYSVLDLKDAFFCLKLHPNSQPLFAFEWRDPEKGNTGQLTWTRLPQGFKNSPTLFNEALHRDLAPFRALNPQVVLLQYVDDLLVAAPTYRDCKEGTQKLLQELSKLGYRVSAKKAQLCQKEVTYLGYLLKEGKRWLTPARKATVMKIPPPTTPRQVREFLGKAGFCRLFIPGFASLAAPLYPLTKPSIPFIWTEEHQKAFDRIKEALLSAPALALPDLTKPFTLYVDERAGVARGVLTQTLGPWRRPVAYLSKKLDPVASGWPTCLKAVAAVALLLKDADKLTLGQNVTVIASHSLESIVRQPPDRWMTNARMTHYQSLLLNERVSFAPPAVLNPATLLPVESEATPVHRCSEILAEETGTRRDLKDQPLPGVPAWYTDGSSFIAEGKRRAGAAIVDGKRTVWASSLPEGTSAQKAELVALTQALRLAEGKDINIYTDSRYAFATAHIHGAIYKQRGWLTSAGKDIKNKEEILALLEAIHLPKRVAIIHCPGHQKGNDPVATGNRRADEAAKQAALSTRVLAETTKPAGKRTADGSEFEKRTADGSEFESPKKKAKVE

SEQ ID NO: 4516 - protein, 2093 aa, synthetic construct
MPAAKRVKLDGGDKKYSIGLDIGTNSVGWAVITDEYKVPSKKFKVLGNTDRHSIKKNLIGALLFDSGETAEATRLKRTARRRYTRRKNRICYLQEIFSNEMAKVDDSFFHRLEESFLVEEDKKHERHPIFGNIVDEVAYHEKYPTIYHLRKKLVDSTDKADLRLIYLALAHMIKFRGHFLIEGDLNPDNSDVDKLFIQLVQTYNQLFEENPINASGVDAKAILSARLSKSRRLENLIAQLPGEKKNGLFGNLIALSLGLTPNFKSNFDLAEDAKLQLSKDTYDDDLDNLLAQIGDQYADLFLAAKNLSDAILLSDILRVNTEITKAPLSASMIKRYDEHHQDLTLLKALVRQQLPEKYKEIFFDQSKNGYAGYIDGGASQEEFYKFIKPILEKMDGTEELLVKLNREDLLRKQRTFDNGSIPHQIHLGELHAILRRQEDFYPFLKDNREKIEKILTFRIPYYVGPLARGNSRFAWMTRKSEETITPWNFEEVVDKGASAQSFIERMTNFDKNLPNEKVLPKHSLLYEYFTVYNELTKVKYVTEGMRKPAFLSGEQKKAIVDLLFKTNRKVTVKQLKEDYFKKIECFDSVEISGVEDRFNASLGTYHDLLKIIKDKDFLDNEENEDILEDIVLTLTLFEDREMIEERLKTYAHLFDDKVMKQLKRRRYTGWGRLSRKLINGIRDKQSGKTILDFLKSDGFANRNFMQLIHDDSLTFKEDIQKAQVSGQGDSLHEHIANLAGSPAIKKGILQTVKVVDELVKVMGRHKPENIVIEMARENQTTQKGQKNSRERMKRIEEGIKELGSQILKEHPVENTQLQNEKLYLYYLQNGRDMYVDQELDINRLSDYDVDHIVPQSFLKDDSIDNKVLTRSDKARGKSDNVPSEEVVKKMKNYWRQLLNAKLITQRKFDNLTKAERGGLSELDKAGFIKRQLVETRQITKHVAQILDSRMNTKYDENDKLIREVKVITLKSKLVSDFRKDFQFYKVREINNYHHAHDAYLNAVVGTALIKKYPKLESEFVYGDYKVYDVRKMIAKSEQEIGKATAKYFFYSNIMNFFKTEITLANGEIRKRPLIETNGETGEIVWDKGRDFATVRKVLSMPQVNIVKKTEVQTGGFSKESILPKRNSDKLIARKKDWDPKKYGGFDSPTVAYSVLVVAKVEKGKSKKLKSVKELLGITIMERSSFEKNPIDFLEAKGYKEVKKDLIIKLPKYSLFELENGRKRMLASAGELQKGNELALPSKYVNFLYLASHYEKLKGSPEDNEQKQLFVEQHKHYLDEIIEQISEFSKRVILADANLDKVLSAYNKHRDKPIREQAENIIHLFTLTNLGAPAAFKYFDTTIDRKRYTSTKEVLDATLIHQSITGLYETRIDLSQLGGDGGPAPEAAAKGGLGIEDEYRLHETSTEPDVSLGSTWLSDFPQAWAETGGMGLAVRQAPLIIPLKATSTPVSIQQYPMSHEARLGIKPHIQRLLDQGILVPCQSPWNTPLLPVKKPGTNDYRPVQDLREVNKRVEDIHPTVPNPYNLLSGLPPSHQWYTVLDLKDAFFCLRLHPTSQPLFAFEWRDPGMGISGQLTWTRLPQGFKNSPTLFNEALHRDLADFRIQHPDLILLQYVDDILLAATSELDCQQGTRALLQTLGDLGYRASAKKAQICQKQVKYLGYLLREGQRWLTEARKETVMGQPVPKTPRQLREFLGKAGFCRLFIPGFAEMAAPLYPLTKPGTLFSWGPDQQKAYQEIKQALLTAPALGLPDLTKPFELFVDEKQGYAKGVLTQKLGPWRRPVAYLSKKLDPVAAGWPPCLRMVAAIAVLTKDAGKLTMGQPLVILAPHAVEALVKQPPDRWLSNARMTHYQAMLLDTDRVQFGPVVALNPATLLPLPEEGAPHDCLEILAETHGTRPDLTDQPIPDADHTWYTDGSSFLQEGQRKAGAAVTTETEVIWAGALPAGTSAQRAELIALTQALKMAEGKRLNVYTDSRYAFATAHIHGEIYRRRGWLTSEGREIKNKSEILALLKALFLPKRLSIIHCLGHQKGDSAEARGNRLADQAAREAAIKTPPDTSTLLIAGKRTADGSEFEKRTADGSEFESPKKKAKVE

SEQ ID NO: 4517 - protein, 2094 aa, synthetic construct
MPAAKRVKLDGGDKKYSIGLDIGTNSVGWAVITDEYKVPSKKFKVLGNTDRHSIKKNLIGALLFDSGETAEATRLKRTARRRYTRRKNRICYLQEIFSNEMAKVDDSFFHRLEESFLVEEDKKHERHPIFGNIVDEVAYHEKYPTIYHLRKKLVDSTDKADLRLIYLALAHMIKFRGHFLIEGDLNPDNSDVDKLFIQLVQTYNQLFEENPINASGVDAKAILSARLSKSRRLENLIAQLPGEKKNGLFGNLIALSLGLTPNFKSNFDLAEDAKLQLSKDTYDDDLDNLLAQIGDQYADLFLAAKNLSDAILLSDILRVNTEITKAPLSASMIKRYDEHHQDLTLLKALVRQQLPEKYKEIFFDQSKNGYAGYIDGGASQEEFYKFIKPILEKMDGTEELLVKLNREDLLRKQRTFDNGSIPHQIHLGELHAILRRQEDFYPFLKDNREKIEKILTFRIPYYVGPLARGNSRFAWMTRKSEETITPWNFEEVVDKGASAQSFIERMTNFDKNLPNEKVLPKHSLLYEYFTVYNELTKVKYVTEGMRKPAFLSGEQKKAIVDLLFKTNRKVTVKQLKEDYFKKIECFDSVEISGVEDRFNASLGTYHDLLKIIKDKDFLDNEENEDILEDIVLTLTLFEDREMIEERLKTYAHLFDDKVMKQLKRRRYTGWGRLSRKLINGIRDKQSGKTILDFLKSDGFANRNFMQLIHDDSLTFKEDIQKAQVSGQGDSLHEHIANLAGSPAIKKGILQTVKVVDELVKVMGRHKPENIVIEMARENQTTQKGQKNSRERMKRIEEGIKELGSQILKEHPVENTQLQNEKLYLYYLQNGRDMYVDQELDINRLSDYDVDHIVPQSFLKDDSIDNKVLTRSDKARGKSDNVPSEEVVKKMKNYWRQLLNAKLITQRKFDNLTKAERGGLSELDKAGFIKRQLVETRQITKHVAQILDSRMNTKYDENDKLIREVKVITLKSKLVSDFRKDFQFYKVREINNYHHAHDAYLNAVVGTALIKKYPKLESEFVYGDYKVYDVRKMIAKSEQEIGKATAKYFFYSNIMNFFKTEITLANGEIRKRPLIETNGETGEIVWDKGRDFATVRKVLSMPQVNIVKKTEVQTGGFSKESILPKRNSDKLIARKKDWDPKKYGGFDSPTVAYSVLVVAKVEKGKSKKLKSVKELLGITIMERSSFEKNPIDFLEAKGYKEVKKDLIIKLPKYSLFELENGRKRMLASAGELQKGNELALPSKYVNFLYLASHYEKLKGSPEDNEQKQLFVEQHKHYLDEIIEQISEFSKRVILADANLDKVLSAYNKHRDKPIREQAENIIHLFTLTNLGAPAAFKYFDTTIDRKRYTSTKEVLDATLIHQSITGLYETRIDLSQLGGDGGGSSGGGGGSGGLGIEDEYRLHETSTEPDVSLGSTWLSDFPQAWAETGGMGLAVRQAPLIIPLKATSTPVSIQQYPMSHEARLGIKPHIQRLLDQGILVPCQSPWNTPLLPVKKPGTNDYRPVQDLREVNKRVEDIHPTVPNPYNLLSGLPPSHQWYTVLDLKDAFFCLRLHPTSQPLFAFEWRDPGMGISGQLTWTRLPQGFKNSPTLFNEALHRDLADFRIQHPDLILLQYVDDILLAATSELDCQQGTRALLQTLGDLGYRASAKKAQICQKQVKYLGYLLREGQRWLTEARKETVMGQPVPKTPRQLREFLGKAGFCRLFIPGFAEMAAPLYPLTKPGTLFSWGPDQQKAYQEIKQALLTAPALGLPDLTKPFELFVDEKQGYAKGVLTQKLGPWRRPVAYLSKKLDPVAAGWPPCLRMVAAIAVLTKDAGKLTMGQPLVILAPHAVEALVKQPPDRWLSNARMTHYQAMLLDTDRVQFGPVVALNPATLLPLPEEGAPHDCLEILAETHGTRPDLTDQPIPDADHTWYTDGSSFLQEGQRKAGAAVTTETEVIWAGALPAGTSAQRAELIALTQALKMAEGKRLNVYTDSRYAFATAHIHGEIYRRRGWLTSEGREIKNKSEILALLKALFLPKRLSIIHCLGHQKGDSAEARGNRLADQAAREAAIKTPPDTSTLLIAGKRTADGSEFEKRTADGSEFESPKKKAKVE

SEQ ID NO: 4518 - protein, 2094 aa, synthetic construct
MPAAKRVKLDGGDKKYSIGLDIGTNSVGWAVITDEYKVPSKKFKVLGNTDRHSIKKNLIGALLFDSGETAEATRLKRTARRRYTRRKNRICYLQEIFSNEMAKVDDSFFHRLEESFLVEEDKKHERHPIFGNIVDEVAYHEKYPTIYHLRKKLVDSTDKADLRLIYLALAHMIKFRGHFLIEGDLNPDNSDVDKLFIQLVQTYNQLFEENPINASGVDAKAILSARLSKSRRLENLIAQLPGEKKNGLFGNLIALSLGLTPNFKSNFDLAEDAKLQLSKDTYDDDLDNLLAQIGDQYADLFLAAKNLSDAILLSDILRVNTEITKAPLSASMIKRYDEHHQDLTLLKALVRQQLPEKYKEIFFDQSKNGYAGYIDGGASQEEFYKFIKPILEKMDGTEELLVKLNREDLLRKQRTFDNGSIPHQIHLGELHAILRRQEDFYPFLKDNREKIEKILTFRIPYYVGPLARGNSRFAWMTRKSEETITPWNFEEVVDKGASAQSFIERMTNFDKNLPNEKVLPKHSLLYEYFTVYNELTKVKYVTEGMRKPAFLSGEQKKAIVDLLFKTNRKVTVKQLKEDYFKKIECFDSVEISGVEDRFNASLGTYHDLLKIIKDKDFLDNEENEDILEDIVLTLTLFEDREMIEERLKTYAHLFDDKVMKQLKRRRYTGWGRLSRKLINGIRDKQSGKTILDFLKSDGFANRNFMQLIHDDSLTFKEDIQKAQVSGQGDSLHEHIANLAGSPAIKKGILQTVKVVDELVKVMGRHKPENIVIEMARENQTTQKGQKNSRERMKRIEEGIKELGSQILKEHPVENTQLQNEKLYLYYLQNGRDMYVDQELDINRLSDYDVDHIVPQSFLKDDSIDNKVLTRSDKARGKSDNVPSEEVVKKMKNYWRQLLNAKLITQRKFDNLTKAERGGLSELDKAGFIKRQLVETRQITKHVAQILDSRMNTKYDENDKLIREVKVITLKSKLVSDFRKDFQFYKVREINNYHHAHDAYLNAVVGTALIKKYPKLESEFVYGDYKVYDVRKMIAKSEQEIGKATAKYFFYSNIMNFFKTEITLANGEIRKRPLIETNGETGEIVWDKGRDFATVRKVLSMPQVNIVKKTEVQTGGFSKESILPKRNSDKLIARKKDWDPKKYGGFDSPTVAYSVLVVAKVEKGKSKKLKSVKELLGITIMERSSFEKNPIDFLEAKGYKEVKKDLIIKLPKYSLFELENGRKRMLASAGELQKGNELALPSKYVNFLYLASHYEKLKGSPEDNEQKQLFVEQHKHYLDEIIEQISEFSKRVILADANLDKVLSAYNKHRDKPIREQAENIIHLFTLTNLGAPAAFKYFDTTIDRKRYTSTKEVLDATLIHQSITGLYETRIDLSQLGGDGGGSSGGGGGSGGTLNIEDEYRLHETSKEPDVPLGSTWLSDFPQAWAETGGMGLAVRQAPLIIPLKATSTPVSIKQYPMSQEARLGIKPHIQRLLDQGILVPCQSPWNTPLLPVKKPGTNDYRPVQDLREVNKRVEDIHPTVPNPYNLLSGLPPSHQWYTVLDLKDAFFCLRLHPTSQPLFAFEWRDPEMGISGQLTWTRLPQGFKNSPTLFNEALHRDLADFRIQHPDLILLQYVDDLLLAATSEQDCQRGTRALLQTLGNLGYRASAKKAQICQKQVKYLGYLLKEGQRWLTEARKETVMGQPTPKTPRQLREFLGKAGFCRLFIPGFAEMAAPLYPLTKPGTLFNWGPDQQKAYQEIKQALLTAPALGLPDLTKPFELFVDEKQGYAKGVLTQKLGPWRRPVAYLSKKLDPVAAGWPPCLRMVAAIAVLTKDAGKLTMGQPLVILAPHAVEALVKQPPDRWLSNARMTHYQAMLLDTDRVQFGPVVALNPATLLPLPEKEAPHDCLEILAETHGTRPDLTDQPIPDADYTWYTDGSSFLQEGQRRAGAAVTTETEVIWARALPAGTSAQRAELIALTQALKMAEGKKLNVYTDSRYAFATAHVHGEIYRRRGWLTSEGREIKNKNEILALLKALFLPKRLSIIHCPGHQKGNSAEARGNRMADQAAREAAMKAVLETSTLLAGKRTADGSEFEKRTADGSEFESPKKKAKVE

SEQ ID NO: 4519 - protein, 2096 aa, synthetic construct
MPAAKRVKLDGGDKKYSIGLDIGTNSVGWAVITDEYKVPSKKFKVLGNTDRHSIKKNLIGALLFDSGETAEATRLKRTARRRYTRRKNRICYLQEIFSNEMAKVDDSFFHRLEESFLVEEDKKHERHPIFGNIVDEVAYHEKYPTIYHLRKKLVDSTDKADLRLIYLALAHMIKFRGHFLIEGDLNPDNSDVDKLFIQLVQTYNQLFEENPINASGVDAKAILSARLSKSRRLENLIAQLPGEKKNGLFGNLIALSLGLTPNFKSNFDLAEDAKLQLSKDTYDDDLDNLLAQIGDQYADLFLAAKNLSDAILLSDILRVNTEITKAPLSASMIKRYDEHHQDLTLLKALVRQQLPEKYKEIFFDQSKNGYAGYIDGGASQEEFYKFIKPILEKMDGTEELLVKLNREDLLRKQRTFDNGSIPHQIHLGELHAILRRQEDFYPFLKDNREKIEKILTFRIPYYVGPLARGNSRFAWMTRKSEETITPWNFEEVVDKGASAQSFIERMTNFDKNLPNEKVLPKHSLLYEYFTVYNELTKVKYVTEGMRKPAFLSGEQKKAIVDLLFKTNRKVTVKQLKEDYFKKIECFDSVEISGVEDRFNASLGTYHDLLKIIKDKDFLDNEENEDILEDIVLTLTLFEDREMIEERLKTYAHLFDDKVMKQLKRRRYTGWGRLSRKLINGIRDKQSGKTILDFLKSDGFANRNFMQLIHDDSLTFKEDIQKAQVSGQGDSLHEHIANLAGSPAIKKGILQTVKVVDELVKVMGRHKPENIVIEMARENQTTQKGQKNSRERMKRIEEGIKELGSQILKEHPVENTQLQNEKLYLYYLQNGRDMYVDQELDINRLSDYDVDHIVPQSFLKDDSIDNKVLTRSDKARGKSDNVPSEEVVKKMKNYWRQLLNAKLITQRKFDNLTKAERGGLSELDKAGFIKRQLVETRQITKHVAQILDSRMNTKYDENDKLIREVKVITLKSKLVSDFRKDFQFYKVREINNYHHAHDAYLNAVVGTALIKKYPKLESEFVYGDYKVYDVRKMIAKSEQEIGKATAKYFFYSNIMNFFKTEITLANGEIRKRPLIETNGETGEIVWDKGRDFATVRKVLSMPQVNIVKKTEVQTGGFSKESILPKRNSDKLIARKKDWDPKKYGGFDSPTVAYSVLVVAKVEKGKSKKLKSVKELLGITIMERSSFEKNPIDFLEAKGYKEVKKDLIIKLPKYSLFELENGRKRMLASAGELQKGNELALPSKYVNFLYLASHYEKLKGSPEDNEQKQLFVEQHKHYLDEIIEQISEFSKRVILADANLDKVLSAYNKHRDKPIREQAENIIHLFTLTNLGAPAAFKYFDTTIDRKRYTSTKEVLDATLIHQSITGLYETRIDLSQLGGDGGGGGGGSEAAAKGGTLNIEDEYRLHETSKEPDVPLGSTWLSDFPQAWAETGGMGLAVRQAPLIIPLKATSTPVSIKQYPMSQEARLGIKPHIQRLLDQGILVPCQSPWNTPLLPVKKPGTNDYRPVQDLREVNKRVEDIHPTVPNPYNLLSGLPPSHQWYTVLDLKDAFFCLRLHPTSQPLFAFEWRDPEMGISGQLTWTRLPQGFKNSPTLFNEALHRDLADFRIQHPDLILLQYVDDLLLAATSEQDCQRGTRALLQTLGNLGYRASAKKAQICQKQVKYLGYLLKEGQRWLTEARKETVMGQPTPKTPRQLREFLGKAGFCRLFIPGFAEMAAPLYPLTKPGTLFNWGPDQQKAYQEIKQALLTAPALGLPDLTKPFELFVDEKQGYAKGVLTQKLGPWRRPVAYLSKKLDPVAAGWPPCLRMVAAIAVLTKDAGKLTMGQPLVILAPHAVEALVKQPPDRWLSNARMTHYQAMLLDTDRVQFGPVVALNPATLLPLPEKEAPHDCLEILAETHGTRPDLTDQPIPDADYTWYTDGSSFLQEGQRRAGAAVTTETEVIWARALPAGTSAQRAELIALTQALKMAEGKKLNVYTDSRYAFATAHVHGEIYRRRGWLTSEGREIKNKNEILALLKALFLPKRLSIIHCPGHQKGNSAEARGNRMADQAAREAAMKAVLETSTLLAGKRTADGSEFEKRTADGSEFESPKKKAKVE

SEQ ID NO: 4520 - protein, 2094 aa, synthetic construct
MPAAKRVKLDGGDKKYSIGLDIGTNSVGWAVITDEYKVPSKKFKVLGNTDRHSIKKNLIGALLFDSGETAEATRLKRTARRRYTRRKNRICYLQEIFSNEMAKVDDSFFHRLEESFLVEEDKKHERHPIFGNIVDEVAYHEKYPTIYHLRKKLVDSTDKADLRLIYLALAHMIKFRGHFLIEGDLNPDNSDVDKLFIQLVQTYNQLFEENPINASGVDAKAILSARLSKSRRLENLIAQLPGEKKNGLFGNLIALSLGLTPNFKSNFDLAEDAKLQLSKDTYDDDLDNLLAQIGDQYADLFLAAKNLSDAILLSDILRVNTEITKAPLSASMIKRYDEHHQDLTLLKALVRQQLPEKYKEIFFDQSKNGYAGYIDGGASQEEFYKFIKPILEKMDGTEELLVKLNREDLLRKQRTFDNGSIPHQIHLGELHAILRRQEDFYPFLKDNREKIEKILTFRIPYYVGPLARGNSRFAWMTRKSEETITPWNFEEVVDKGASAQSFIERMTNFDKNLPNEKVLPKHSLLYEYFTVYNELTKVKYVTEGMRKPAFLSGEQKKAIVDLLFKTNRKVTVKQLKEDYFKKIECFDSVEISGVEDRFNASLGTYHDLLKIIKDKDFLDNEENEDILEDIVLTLTLFEDREMIEERLKTYAHLFDDKVMKQLKRRRYTGWGRLSRKLINGIRDKQSGKTILDFLKSDGFANRNFMQLIHDDSLTFKEDIQKAQVSGQGDSLHEHIANLAGSPAIKKGILQTVKVVDELVKVMGRHKPENIVIEMARENQTTQKGQKNSRERMKRIEEGIKELGSQILKEHPVENTQLQNEKLYLYYLQNGRDMYVDQELDINRLSDYDVDHIVPQSFLKDDSIDNKVLTRSDKARGKSDNVPSEEVVKKMKNYWRQLLNAKLITQRKFDNLTKAERGGLSELDKAGFIKRQLVETRQITKHVAQILDSRMNTKYDENDKLIREVKVITLKSKLVSDFRKDFQFYKVREINNYHHAHDAYLNAVVGTALIKKYPKLESEFVYGDYKVYDVRKMIAKSEQEIGKATAKYFFYSNIMNFFKTEITLANGEIRKRPLIETNGETGEIVWDKGRDFATVRKVLSMPQVNIVKKTEVQTGGFSKESILPKRNSDKLIARKKDWDPKKYGGFDSPTVAYSVLVVAKVEKGKSKKLKSVKELLGITIMERSSFEKNPIDFLEAKGYKEVKKDLIIKLPKYSLFELENGRKRMLASAGELQKGNELALPSKYVNFLYLASHYEKLKGSPEDNEQKQLFVEQHKHYLDEIIEQISEFSKRVILADANLDKVLSAYNKHRDKPIREQAENIIHLFTLTNLGAPAAFKYFDTTIDRKRYTSTKEVLDATLIHQSITGLYETRIDLSQLGGDGGGGGGGSPAPGGTLNLEDEYRLYETSAEPEVSPGSTWLSDFPQAWAETGGMGLAVRQAPLIIPLKATSTPVSIKQYPMSQEAKLGIKPHIQRLLDQGILVPCQSPWNTPLLPVKKPGTNDYRPVQDLREVNKRVEDIHPTVPNPYNLLSGLPPSHRWYTVLDLKDAFFCLRLHPTSQPLFAFEWRDPGMGISGQLTWTRLPQGFKNSPTLFNEALHRDLADFRIQHPDLILLQYVDDILLAATSELDCQQGTRALLLTLGNLGYRASAKKAQLCQKQVKYLGYLLKEGQRWLTEARKETVMGQPTPKTPRQLREFLGKAGFCRLFIPGFAEMAAPLYPLTKPGTLFNWGPDQQKAYQEIKQALLTAPALGLPDLTKPFELFVDEKQGYAKGVLTQKLGPWRRPVAYLSKKLDPVAAGWPPCLRMVAAIAVLRKDAGKLTMGQPLVILAPHAVEALVKQPPDRWLSNARMTHYQAMLLDTDRVQFGPVVALNPATLLPLPEEGAPHDCLEILAETHGTRPDLTDQPIPDADHTWYTDGSSFLQEGQRKAGAAVTTETEVIWARALPAGTSAQRAELIALTQALKMAEGKRLNVYTDSRYAFATAHIHGEIYRRRGWLTSEGREIKNKSEILALLKALFLPKRLSIIHCLGHQKGDSAEARGNRLADQAAREAAIKTPPDTSTLLAGKRTADGSEFEKRTADGSEFESPKKKAKVE

SEQ ID NO: 4521 - protein, 2094 aa, synthetic construct
MPAAKRVKLDGGDKKYSIGLDIGTNSVGWAVITDEYKVPSKKFKVLGNTDRHSIKKNLIGALLFDSGETAEATRLKRTARRRYTRRKNRICYLQEIFSNEMAKVDDSFFHRLEESFLVEEDKKHERHPIFGNIVDEVAYHEKYPTIYHLRKKLVDSTDKADLRLIYLALAHMIKFRGHFLIEGDLNPDNSDVDKLFIQLVQTYNQLFEENPINASGVDAKAILSARLSKSRRLENLIAQLPGEKKNGLFGNLIALSLGLTPNFKSNFDLAEDAKLQLSKDTYDDDLDNLLAQIGDQYADLFLAAKNLSDAILLSDILRVNTEITKAPLSASMIKRYDEHHQDLTLLKALVRQQLPEKYKEIFFDQSKNGYAGYIDGGASQEEFYKFIKPILEKMDGTEELLVKLNREDLLRKQRTFDNGSIPHQIHLGELHAILRRQEDFYPFLKDNREKIEKILTFRIPYYVGPLARGNSRFAWMTRKSEETITPWNFEEVVDKGASAQSFIERMTNFDKNLPNEKVLPKHSLLYEYFTVYNELTKVKYVTEGMRKPAFLSGEQKKAIVDLLFKTNRKVTVKQLKEDYFKKIECFDSVEISGVEDRFNASLGTYHDLLKIIKDKDFLDNEENEDILEDIVLTLTLFEDREMIEERLKTYAHLFDDKVMKQLKRRRYTGWGRLSRKLINGIRDKQSGKTILDFLKSDGFANRNFMQLIHDDSLTFKEDIQKAQVSGQGDSLHEHIANLAGSPAIKKGILQTVKVVDELVKVMGRHKPENIVIEMARENQTTQKGQKNSRERMKRIEEGIKELGSQILKEHPVENTQLQNEKLYLYYLQNGRDMYVDQELDINRLSDYDVDHIVPQSFLKDDSIDNKVLTRSDKARGKSDNVPSEEVVKKMKNYWRQLLNAKLITQRKFDNLTKAERGGLSELDKAGFIKRQLVETRQITKHVAQILDSRMNTKYDENDKLIREVKVITLKSKLVSDFRKDFQFYKVREINNYHHAHDAYLNAVVGTALIKKYPKLESEFVYGDYKVYDVRKMIAKSEQEIGKATAKYFFYSNIMNFFKTEITLANGEIRKRPLIETNGETGEIVWDKGRDFATVRKVLSMPQVNIVKKTEVQTGGFSKESILPKRNSDKLIARKKDWDPKKYGGFDSPTVAYSVLVVAKVEKGKSKKLKSVKELLGITIMERSSFEKNPIDFLEAKGYKEVKKDLIIKLPKYSLFELENGRKRMLASAGELQKGNELALPSKYVNFLYLASHYEKLKGSPEDNEQKQLFVEQHKHYLDEIIEQISEFSKRVILADANLDKVLSAYNKHRDKPIREQAENIIHLFTLTNLGAPAAFKYFDTTIDRKRYTSTKEVLDATLIHQSITGLYETRIDLSQLGGDGGPAPGGGGGSGGTLNIEDEHRLHETSKEPDVSLGSTWLSDFPQAWAETGGMGLAVRQAPLIIPLKATSTPVSIKQYPMSQEARLGIKPHIQRLLDQGILVPCQSPWNTPLLPVKKPGTNDYRPVQDLREVNKRVEDIHPTVPNPYNLLSGLPPSHQWYTVLDLKDAFFCLRLHPTSQPLFAFEWRDPEMGISGQLTWTRLPQGFKNSPTLFNEALHRDLADFRIQHPDLILLQYVDDLLLAATSELDCQQGTRALLQTLGNLGYRASAKKAQICQKQVKYLGYLLKEGQRWLTEARKETVMGQPTPKTPRQLREFLGKAGFCRLFIPGFAEMAAPLYPLTKPGTLFNWGPDQQKAYQEIKQALLTAPALGLPDLTKPFELFVDEKQGYAKGVLTQKLGPWRRPVAYLSKKLDPVAAGWPPCLRMVAAIAVLTKDAGKLTMGQPLVILAPHAVEALVKQPPDRWLSNARMTHYQALLLDTDRVQFGPVVALNPATLLPLPEEGLQHNCLDILAEAHGTRPDLTDQPLPDADHTWYTDGSSLLQEGQRKAGAAVTTETEVIWAKALPAGTSAQRAELIALTQALKMAEGKKLNVYTDSRYAFATAHIHGEIYRRRGWLTSEGKEIKNKDEILALLKALFLPKRLSIIHCPGHQKGHSAEARGNRMADQAARKAAITETPDTSTLLAGKRTADGSEFEKRTADGSEFESPKKKAKVE

SEQ ID NO: 4522 - protein, 2096 aa, synthetic construct
MPAAKRVKLDGGDKKYSIGLDIGTNSVGWAVITDEYKVPSKKFKVLGNTDRHSIKKNLIGALLFDSGETAEATRLKRTARRRYTRRKNRICYLQEIFSNEMAKVDDSFFHRLEESFLVEEDKKHERHPIFGNIVDEVAYHEKYPTIYHLRKKLVDSTDKADLRLIYLALAHMIKFRGHFLIEGDLNPDNSDVDKLFIQLVQTYNQLFEENPINASGVDAKAILSARLSKSRRLENLIAQLPGEKKNGLFGNLIALSLGLTPNFKSNFDLAEDAKLQLSKDTYDDDLDNLLAQIGDQYADLFLAAKNLSDAILLSDILRVNTEITKAPLSASMIKRYDEHHQDLTLLKALVRQQLPEKYKEIFFDQSKNGYAGYIDGGASQEEFYKFIKPILEKMDGTEELLVKLNREDLLRKQRTFDNGSIPHQIHLGELHAILRRQEDFYPFLKDNREKIEKILTFRIPYYVGPLARGNSRFAWMTRKSEETITPWNFEEVVDKGASAQSFIERMTNFDKNLPNEKVLPKHSLLYEYFTVYNELTKVKYVTEGMRKPAFLSGEQKKAIVDLLFKTNRKVTVKQLKEDYFKKIECFDSVEISGVEDRFNASLGTYHDLLKIIKDKDFLDNEENEDILEDIVLTLTLFEDREMIEERLKTYAHLFDDKVMKQLKRRRYTGWGRLSRKLINGIRDKQSGKTILDFLKSDGFANRNFMQLIHDDSLTFKEDIQKAQVSGQGDSLHEHIANLAGSPAIKKGILQTVKVVDELVKVMGRHKPENIVIEMARENQTTQKGQKNSRERMKRIEEGIKELGSQILKEHPVENTQLQNEKLYLYYLQNGRDMYVDQELDINRLSDYDVDHIVPQSFLKDDSIDNKVLTRSDKARGKSDNVPSEEVVKKMKNYWRQLLNAKLITQRKFDNLTKAERGGLSELDKAGFIKRQLVETRQITKHVAQILDSRMNTKYDENDKLIREVKVITLKSKLVSDFRKDFQFYKVREINNYHHAHDAYLNAVVGTALIKKYPKLESEFVYGDYKVYDVRKMIAKSEQEIGKATAKYFFYSNIMNFFKTEITLANGEIRKRPLIETNGETGEIVWDKGRDFATVRKVLSMPQVNIVKKTEVQTGGFSKESILPKRNSDKLIARKKDWDPKKYGGFDSPTVAYSVLVVAKVEKGKSKKLKSVKELLGITIMERSSFEKNPIDFLEAKGYKEVKKDLIIKLPKYSLFELENGRKRMLASAGELQKGNELALPSKYVNFLYLASHYEKLKGSPEDNEQKQLFVEQHKHYLDEIIEQISEFSKRVILADANLDKVLSAYNKHRDKPIREQAENIIHLFTLTNLGAPAAFKYFDTTIDRKRYTSTKEVLDATLIHQSITGLYETRIDLSQLGGDGGGGSEAAAKGSSGGTLNIEDEYRLHETSKEPDVPLGSTWLSDFPQAWAETGGMGLAVRQAPLIIPLKATSTPVSIKQYPMSQEARLGIKPHIQRLLDQGILVPCQSPWNTPLLPVKKPGTNDYRPVQDLREVNKRVEDIHPTVPNPYNLLSGLPPSHQWYTVLDLKDAFFCLRLHPTSQPLFAFEWRDPEMGISGQLTWTRLPQGFKNSPTLFNEALHRDLADFRIQHPDLILLQYVDDLLLAATSEQDCQRGTRALLQTLGNLGYRASAKKAQICQKQVKYLGYLLKEGQRWLTEARKETVMGQPTPKTPRQLREFLGKAGFCRLFIPGFAEMAAPLYPLTKPGTLFNWGPDQQKAYQEIKQALLTAPALGLPDLTKPFELFVDEKQGYAKGVLTQKLGPWRRPVAYLSKKLDPVAAGWPPCLRMVAAIAVLTKDAGKLTMGQPLVILAPHAVEALVKQPPDRWLSNARMTHYQAMLLDTDRVQFGPVVALNPATLLPLPEKEAPHDCLEILAETHGTRPDLTDQPIPDADYTWYTDGSSFLQEGQRRAGAAVTTETEVIWARALPAGTSAQRAELIALTQALKMAEGKKLNVYTDSRYAFATAHVHGEIYRRRGWLTSEGREIKNKNEILALLKALFLPKRLSIIHCPGHQKGNSAEARGNRMADQAAREAAMKAVLETSTLLAGKRTADGSEFEKRTADGSEFESPKKKAKVE

SEQ ID NO: 4523 - protein, 2096 aa, synthetic construct
MPAAKRVKLDGGDKKYSIGLDIGTNSVGWAVITDEYKVPSKKFKVLGNTDRHSIKKNLIGALLFDSGETAEATRLKRTARRRYTRRKNRICYLQEIFSNEMAKVDDSFFHRLEESFLVEEDKKHERHPIFGNIVDEVAYHEKYPTIYHLRKKLVDSTDKADLRLIYLALAHMIKFRGHFLIEGDLNPDNSDVDKLFIQLVQTYNQLFEENPINASGVDAKAILSARLSKSRRLENLIAQLPGEKKNGLFGNLIALSLGLTPNFKSNFDLAEDAKLQLSKDTYDDDLDNLLAQIGDQYADLFLAAKNLSDAILLSDILRVNTEITKAPLSASMIKRYDEHHQDLTLLKALVRQQLPEKYKEIFFDQSKNGYAGYIDGGASQEEFYKFIKPILEKMDGTEELLVKLNREDLLRKQRTFDNGSIPHQIHLGELHAILRRQEDFYPFLKDNREKIEKILTFRIPYYVGPLARGNSRFAWMTRKSEETITPWNFEEVVDKGASAQSFIERMTNFDKNLPNEKVLPKHSLLYEYFTVYNELTKVKYVTEGMRKPAFLSGEQKKAIVDLLFKTNRKVTVKQLKEDYFKKIECFDSVEISGVEDRFNASLGTYHDLLKIIKDKDFLDNEENEDILEDIVLTLTLFEDREMIEERLKTYAHLFDDKVMKQLKRRRYTGWGRLSRKLINGIRDKQSGKTILDFLKSDGFANRNFMQLIHDDSLTFKEDIQKAQVSGQGDSLHEHIANLAGSPAIKKGILQTVKVVDELVKVMGRHKPENIVIEMARENQTTQKGQKNSRERMKRIEEGIKELGSQILKEHPVENTQLQNEKLYLYYLQNGRDMYVDQELDINRLSDYDVDHIVPQSFLKDDSIDNKVLTRSDKARGKSDNVPSEEVVKKMKNYWRQLLNAKLITQRKFDNLTKAERGGLSELDKAGFIKRQLVETRQITKHVAQILDSRMNTKYDENDKLIREVKVITLKSKLVSDFRKDFQFYKVREINNYHHAHDAYLNAVVGTALIKKYPKLESEFVYGDYKVYDVRKMIAKSEQEIGKATAKYFFYSNIMNFFKTEITLANGEIRKRPLIETNGETGEIVWDKGRDFATVRKVLSMPQVNIVKKTEVQTGGFSKESILPKRNSDKLIARKKDWDPKKYGGFDSPTVAYSVLVVAKVEKGKSKKLKSVKELLGITIMERSSFEKNPIDFLEAKGYKEVKKDLIIKLPKYSLFELENGRKRMLASAGELQKGNELALPSKYVNFLYLASHYEKLKGSPEDNEQKQLFVEQHKHYLDEIIEQISEFSKRVILADANLDKVLSAYNKHRDKPIREQAENIIHLFTLTNLGAPAAFKYFDTTIDRKRYTSTKEVLDATLIHQSITGLYETRIDLSQLGGDGGEAAAKGGSGSSGGTLNIEDEYRLHETSKEPDVPLGSTWLSDFPQAWAETGGMGLAVRQAPLIIPLKATSTPVSIKQYPMSQEARLGIKPHIQRLLDQGILVPCQSPWNTPLLPVKKPGTNDYRPVQDLREVNKRVEDIHPTVPNPYNLLSGLPPSHQWYTVLDLKDAFFCLRLHPTSQPLFAFEWRDPEMGISGQLTWTRLPQGFKNSPTLFNEALHRDLADFRIQHPDLILLQYVDDLLLAATSEQDCQRGTRALLQTLGNLGYRASAKKAQICQKQVKYLGYLLKEGQRWLTEARKETVMGQPTPKTPRQLREFLGTAGFCRLWIPGFAEMAAPLYPLTKPGTLFNWGPDQQKAYQEIKQALLTAPALGLPDLTKPFELFVDEKQGYAKGVLTQKLGPWRRPVAYLSKKLDPVAAGWPPCLRMVAAIAVLTKDAGKLTMGQPLVILAPHAVEALVKQPPDRWLSNARMTHYQAMLLDTDRVQFGPVVALNPATLLPLPEKEAPHDCLEILAETHGTRPDLTDQPIPDADYTWYTDGSSFLQEGQRRAGAAVTTETEVIWARALPAGTSAQRAELIALTQALKMAEGKKLNVYTDSRYAFATAHVHGEIYRRRGWLTSEGREIKNKNEILALLKALFLPKRLSIIHCPGHQKGNSAEARGNRMADQAAREAAMKAVLETSTLLAGKRTADGSEFEKRTADGSEFESPKKKAKVE

SEQ ID NO: 4524 - protein, 2096 aa, synthetic construct
MPAAKRVKLDGGDKKYSIGLDIGTNSVGWAVITDEYKVPSKKFKVLGNTDRHSIKKNLIGALLFDSGETAEATRLKRTARRRYTRRKNRICYLQEIFSNEMAKVDDSFFHRLEESFLVEEDKKHERHPIFGNIVDEVAYHEKYPTIYHLRKKLVDSTDKADLRLIYLALAHMIKFRGHFLIEGDLNPDNSDVDKLFIQLVQTYNQLFEENPINASGVDAKAILSARLSKSRRLENLIAQLPGEKKNGLFGNLIALSLGLTPNFKSNFDLAEDAKLQLSKDTYDDDLDNLLAQIGDQYADLFLAAKNLSDAILLSDILRVNTEITKAPLSASMIKRYDEHHQDLTLLKALVRQQLPEKYKEIFFDQSKNGYAGYIDGGASQEEFYKFIKPILEKMDGTEELLVKLNREDLLRKQRTFDNGSIPHQIHLGELHAILRRQEDFYPFLKDNREKIEKILTFRIPYYVGPLARGNSRFAWMTRKSEETITPWNFEEVVDKGASAQSFIERMTNFDKNLPNEKVLPKHSLLYEYFTVYNELTKVKYVTEGMRKPAFLSGEQKKAIVDLLFKTNRKVTVKQLKEDYFKKIECFDSVEISGVEDRFNASLGTYHDLLKIIKDKDFLDNEENEDILEDIVLTLTLFEDREMIEERLKTYAHLFDDKVMKQLKRRRYTGWGRLSRKLINGIRDKQSGKTILDFLKSDGFANRNFMQLIHDDSLTFKEDIQKAQVSGQGDSLHEHIANLAGSPAIKKGILQTVKVVDELVKVMGRHKPENIVIEMARENQTTQKGQKNSRERMKRIEEGIKELGSQILKEHPVENTQLQNEKLYLYYLQNGRDMYVDQELDINRLSDYDVDHIVPQSFLKDDSIDNKVLTRSDKARGKSDNVPSEEVVKKMKNYWRQLLNAKLITQRKFDNLTKAERGGLSELDKAGFIKRQLVETRQITKHVAQILDSRMNTKYDENDKLIREVKVITLKSKLVSDFRKDFQFYKVREINNYHHAHDAYLNAVVGTALIKKYPKLESEFVYGDYKVYDVRKMIAKSEQEIGKATAKYFFYSNIMNFFKTEITLANGEIRKRPLIETNGETGEIVWDKGRDFATVRKVLSMPQVNIVKKTEVQTGGFSKESILPKRNSDKLIARKKDWDPKKYGGFDSPTVAYSVLVVAKVEKGKSKKLKSVKELLGITIMERSSFEKNPIDFLEAKGYKEVKKDLIIKLPKYSLFELENGRKRMLASAGELQKGNELALPSKYVNFLYLASHYEKLKGSPEDNEQKQLFVEQHKHYLDEIIEQISEFSKRVILADANLDKVLSAYNKHRDKPIREQAENIIHLFTLTNLGAPAAFKYFDTTIDRKRYTSTKEVLDATLIHQSITGLYETRIDLSQLGGDGGEAAAKGSSGGSGGTLNIEDEYRLHETSKEPDVPLGSTWLSDFPQAWAETGGMGLAVRQAPLIIPLKATSTPVSIKQYPMSQEARLGIKPHIQRLLDQGILVPCQSPWNTPLLPVKKPGTNDYRPVQDLREVNKRVEDIHPTVPNPYNLLSGLPPSHQWYTVLDLKDAFFCLRLHPTSQPLFAFEWRDPEMGISGQLTWTRLPQGFKNSPTLFNEALHRDLADFRIQHPDLILLQYVDDLLLAATSEQDCQRGTRALLQTLGNLGYRASAKKAQICQKQVKYLGYLLKEGQRWLTEARKETVMGQPTPKTPRQLREFLGTAGFCRLWIPGFAEMAAPLYPLTKPGTLFNWGPDQQKAYQEIKQALLTAPALGLPDLTKPFELFVDEKQGYAKGVLTQKLGPWRRPVAYLSKKLDPVAAGWPPCLRMVAAIAVLTKDAGKLTMGQPLVILAPHAVEALVKQPPDRWLSNARMTHYQAMLLDTDRVQFGPVVALNPATLLPLPEKEAPHDCLEILAETHGTRPDLTDQPIPDADYTWYTDGSSFLQEGQRRAGAAVTTETEVIWARALPAGTSAQRAELIALTQALKMAEGKKLNVYTDSRYAFATAHVHGEIYRRRGWLTSEGREIKNKNEILALLKALFLPKRLSIIHCPGHQKGNSAEARGNRMADQAAREAAMKAVLETSTLLAGKRTADGSEFEKRTADGSEFESPKKKAKVE

SEQ ID NO: 4525 - protein, 2094 aa, synthetic construct
MPAAKRVKLDGGDKKYSIGLDIGTNSVGWAVITDEYKVPSKKFKVLGNTDRHSIKKNLIGALLFDSGETAEATRLKRTARRRYTRRKNRICYLQEIFSNEMAKVDDSFFHRLEESFLVEEDKKHERHPIFGNIVDEVAYHEKYPTIYHLRKKLVDSTDKADLRLIYLALAHMIKFRGHFLIEGDLNPDNSDVDKLFIQLVQTYNQLFEENPINASGVDAKAILSARLSKSRRLENLIAQLPGEKKNGLFGNLIALSLGLTPNFKSNFDLAEDAKLQLSKDTYDDDLDNLLAQIGDQYADLFLAAKNLSDAILLSDILRVNTEITKAPLSASMIKRYDEHHQDLTLLKALVRQQLPEKYKEIFFDQSKNGYAGYIDGGASQEEFYKFIKPILEKMDGTEELLVKLNREDLLRKQRTFDNGSIPHQIHLGELHAILRRQEDFYPFLKDNREKIEKILTFRIPYYVGPLARGNSRFAWMTRKSEETITPWNFEEVVDKGASAQSFIERMTNFDKNLPNEKVLPKHSLLYEYFTVYNELTKVKYVTEGMRKPAFLSGEQKKAIVDLLFKTNRKVTVKQLKEDYFKKIECFDSVEISGVEDRFNASLGTYHDLLKIIKDKDFLDNEENEDILEDIVLTLTLFEDREMIEERLKTYAHLFDDKVMKQLKRRRYTGWGRLSRKLINGIRDKQSGKTILDFLKSDGFANRNFMQLIHDDSLTFKEDIQKAQVSGQGDSLHEHIANLAGSPAIKKGILQTVKVVDELVKVMGRHKPENIVIEMARENQTTQKGQKNSRERMKRIEEGIKELGSQILKEHPVENTQLQNEKLYLYYLQNGRDMYVDQELDINRLSDYDVDHIVPQSFLKDDSIDNKVLTRSDKARGKSDNVPSEEVVKKMKNYWRQLLNAKLITQRKFDNLTKAERGGLSELDKAGFIKRQLVETRQITKHVAQILDSRMNTKYDENDKLIREVKVITLKSKLVSDFRKDFQFYKVREINNYHHAHDAYLNAVVGTALIKKYPKLESEFVYGDYKVYDVRKMIAKSEQEIGKATAKYFFYSNIMNFFKTEITLANGEIRKRPLIETNGETGEIVWDKGRDFATVRKVLSMPQVNIVKKTEVQTGGFSKESILPKRNSDKLIARKKDWDPKKYGGFDSPTVAYSVLVVAKVEKGKSKKLKSVKELLGITIMERSSFEKNPIDFLEAKGYKEVKKDLIIKLPKYSLFELENGRKRMLASAGELQKGNELALPSKYVNFLYLASHYEKLKGSPEDNEQKQLFVEQHKHYLDEIIEQISEFSKRVILADANLDKVLSAYNKHRDKPIREQAENIIHLFTLTNLGAPAAFKYFDTTIDRKRYTSTKEVLDATLIHQSITGLYETRIDLSQLGGDGGGGSPAPGSSGGTLNIEDEYRLHETSKEPDVPLGSTWLSDFPQAWAETGGMGLAVRQAPLIIPLKATSTPVSIKQYPMSQEARLGIKPHIQRLLDQGILVPCQSPWNTPLLPVKKPGTNDYRPVQDLREVNKRVEDIHPTVPNPYNLLSGLPPSHQWYTVLDLKDAFFCLRLHPTSQPLFAFEWRDPEMGISGQLTWTRLPQGFKNSPTLFNEALHRDLADFRIQHPDLILLQYVDDLLLAATSEQDCQRGTRALLQTLGNLGYRASAKKAQICQKQVKYLGYLLKEGQRWLTEARKETVMGQPTPKTPRQLREFLGKAGFCRLFIPGFAEMAAPLYPLTKPGTLFNWGPDQQKAYQEIKQALLTAPALGLPDLTKPFELFVDEKQGYAKGVLTQKLGPWRRPVAYLSKKLDPVAAGWPPCLRMVAAIAVLTKDAGKLTMGQPLVILAPHAVEALVKQPPDRWLSNARMTHYQAMLLDTDRVQFGPVVALNPATLLPLPEKEAPHDCLEILAETHGTRPDLTDQPIPDADYTWYTDGSSFLQEGQRRAGAAVTTETEVIWARALPAGTSAQRAELIALTQALKMAEGKKLNVYTDSRYAFATAHVHGEIYRRRGWLTSEGREIKNKNEILALLKALFLPKRLSIIHCPGHQKGNSAEARGNRMADQAAREAAMKAVLETSTLLAGKRTADGSEFEKRTADGSEFESPKKKAKVE

SEQ ID NO: 4526 - protein, 2125 aa, synthetic construct
MPAAKRVKLDGGDKKYSIGLDIGTNSVGWAVITDEYKVPSKKFKVLGNTDRHSIKKNLIGALLFDSGETAEATRLKRTARRRYTRRKNRICYLQEIFSNEMAKVDDSFFHRLEESFLVEEDKKHERHPIFGNIVDEVAYHEKYPTIYHLRKKLVDSTDKADLRLIYLALAHMIKFRGHFLIEGDLNPDNSDVDKLFIQLVQTYNQLFEENPINASGVDAKAILSARLSKSRRLENLIAQLPGEKKNGLFGNLIALSLGLTPNFKSNFDLAEDAKLQLSKDTYDDDLDNLLAQIGDQYADLFLAAKNLSDAILLSDILRVNTEITKAPLSASMIKRYDEHHQDLTLLKALVRQQLPEKYKEIFFDQSKNGYAGYIDGGASQEEFYKFIKPILEKMDGTEELLVKLNREDLLRKQRTFDNGSIPHQIHLGELHAILRRQEDFYPFLKDNREKIEKILTFRIPYYVGPLARGNSRFAWMTRKSEETITPWNFEEVVDKGASAQSFIERMTNFDKNLPNEKVLPKHSLLYEYFTVYNELTKVKYVTEGMRKPAFLSGEQKKAIVDLLFKTNRKVTVKQLKEDYFKKIECFDSVEISGVEDRFNASLGTYHDLLKIIKDKDFLDNEENEDILEDIVLTLTLFEDREMIEERLKTYAHLFDDKVMKQLKRRRYTGWGRLSRKLINGIRDKQSGKTILDFLKSDGFANRNFMQLIHDDSLTFKEDIQKAQVSGQGDSLHEHIANLAGSPAIKKGILQTVKVVDELVKVMGRHKPENIVIEMARENQTTQKGQKNSRERMKRIEEGIKELGSQILKEHPVENTQLQNEKLYLYYLQNGRDMYVDQELDINRLSDYDVDHIVPQSFLKDDSIDNKVLTRSDKARGKSDNVPSEEVVKKMKNYWRQLLNAKLITQRKFDNLTKAERGGLSELDKAGFIKRQLVETRQITKHVAQILDSRMNTKYDENDKLIREVKVITLKSKLVSDFRKDFQFYKVREINNYHHAHDAYLNAVVGTALIKKYPKLESEFVYGDYKVYDVRKMIAKSEQEIGKATAKYFFYSNIMNFFKTEITLANGEIRKRPLIETNGETGEIVWDKGRDFATVRKVLSMPQVNIVKKTEVQTGGFSKESILPKRNSDKLIARKKDWDPKKYGGFDSPTVAYSVLVVAKVEKGKSKKLKSVKELLGITIMERSSFEKNPIDFLEAKGYKEVKKDLIIKLPKYSLFELENGRKRMLASAGELQKGNELALPSKYVNFLYLASHYEKLKGSPEDNEQKQLFVEQHKHYLDEIIEQISEFSKRVILADANLDKVLSAYNKHRDKPIREQAENIIHLFTLTNLGAPAAFKYFDTTIDRKRYTSTKEVLDATLIHQSITGLYETRIDLSQLGGDGGGSSPAPGGSGGLLGRDLLTKLKAQIQFSTEGPQVTWEDRPAMCLVLNLEEEYRLHEKPVPPSIDPSWLQLFPMVWAEKAGMGLANQVPPVVVELKSDASPVAVRQYPMSKEAREGIRPHIQRFLDLGILVPCQSPWNTPLLPVKKPGTNDYRPVQDLREVNKRVQDIHPTVPNPYNLLSSLPPSHTWYSVLDLKDAFFCLKLHPNSQPLFAFEWRDPEKGNTGQLTWTRLPQGFKNSPTLFNEALHRDLASFRALNPQVVMLQYVDDLLVAAPTYRDCKEGTRRLLQELSKLGYRVSAKKAQLCREEVTYLGYLLKGGKRWLTPARKATVMKIPTPTTPRQVREFLGTAGFCRLWIPGFASLAAPLYPLTRPKVPFTWTEAHQEAFGRIKEALLSAPALALPDLTKPFALYVDEKEGVARGVLTQTLGPWRRPVAYLSKKLDPVASGWPTCLKAIAAVALLLKDADKLTLGQNVLVIAPHNLESIVRQPPDRWMTNARMTHYQSLLLNERVSFAPPAILNPATLLPVESDDTPIHICSEILAEETGTRPDLRDQPLPGVPAWYTDGSSFIMDGRRQAGAAIVDNKRTVWASNLPEGTSAQKAELIALTQALRLAEGKSINIYTDSRYAFATAHVHGAIYKQRGWLTSAGKDIKNKEEILALLEAIHLPKRVAIIHCPGHQRGTDPVATGNRKADEAAKQAAQSTRILTETTKNAGKRTADGSEFEKRTADGSEFESPKKKAKVE

SEQ ID NO: 4527 - protein, 2096 aa, synthetic construct
MPAAKRVKLDGGDKKYSIGLDIGTNSVGWAVITDEYKVPSKKFKVLGNTDRHSIKKNLIGALLFDSGETAEATRLKRTARRRYTRRKNRICYLQEIFSNEMAKVDDSFFHRLEESFLVEEDKKHERHPIFGNIVDEVAYHEKYPTIYHLRKKLVDSTDKADLRLIYLALAHMIKFRGHFLIEGDLNPDNSDVDKLFIQLVQTYNQLFEENPINASGVDAKAILSARLSKSRRLENLIAQLPGEKKNGLFGNLIALSLGLTPNFKSNFDLAEDAKLQLSKDTYDDDLDNLLAQIGDQYADLFLAAKNLSDAILLSDILRVNTEITKAPLSASMIKRYDEHHQDLTLLKALVRQQLPEKYKEIFFDQSKNGYAGYIDGGASQEEFYKFIKPILEKMDGTEELLVKLNREDLLRKQRTFDNGSIPHQIHLGELHAILRRQEDFYPFLKDNREKIEKILTFRIPYYVGPLARGNSRFAWMTRKSEETITPWNFEEVVDKGASAQSFIERMTNFDKNLPNEKVLPKHSLLYEYFTVYNELTKVKYVTEGMRKPAFLSGEQKKAIVDLLFKTNRKVTVKQLKEDYFKKIECFDSVEISGVEDRFNASLGTYHDLLKIIKDKDFLDNEENEDILEDIVLTLTLFEDREMIEERLKTYAHLFDDKVMKQLKRRRYTGWGRLSRKLINGIRDKQSGKTILDFLKSDGFANRNFMQLIHDDSLTFKEDIQKAQVSGQGDSLHEHIANLAGSPAIKKGILQTVKVVDELVKVMGRHKPENIVIEMARENQTTQKGQKNSRERMKRIEEGIKELGSQILKEHPVENTQLQNEKLYLYYLQNGRDMYVDQELDINRLSDYDVDHIVPQSFLKDDSIDNKVLTRSDKARGKSDNVPSEEVVKKMKNYWRQLLNAKLITQRKFDNLTKAERGGLSELDKAGFIKRQLVETRQITKHVAQILDSRMNTKYDENDKLIREVKVITLKSKLVSDFRKDFQFYKVREINNYHHAHDAYLNAVVGTALIKKYPKLESEFVYGDYKVYDVRKMIAKSEQEIGKATAKYFFYSNIMNFFKTEITLANGEIRKRPLIETNGETGEIVWDKGRDFATVRKVLSMPQVNIVKKTEVQTGGFSKESILPKRNSDKLIARKKDWDPKKYGGFDSPTVAYSVLVVAKVEKGKSKKLKSVKELLGITIMERSSFEKNPIDFLEAKGYKEVKKDLIIKLPKYSLFELENGRKRMLASAGELQKGNELALPSKYVNFLYLASHYEKLKGSPEDNEQKQLFVEQHKHYLDEIIEQISEFSKRVILADANLDKVLSAYNKHRDKPIREQAENIIHLFTLTNLGAPAAFKYFDTTIDRKRYTSTKEVLDATLIHQSITGLYETRIDLSQLGGDGGEAAAKPAPGGSGGTLNIEDEYRLHETSKEPDVPLGSTWLSDFPQAWAETGGMGLAVRQAPLIIPLKATSTPVSIKQYPMSQEARLGIKPHIQRLLDQGILVPCQSPWNTPLLPVKKPGTNDYRPVQDLREVNKRVEDIHPTVPNPYNLLSGLPPSHQWYTVLDLKDAFFCLRLHPTSQPLFAFEWRDPEMGISGQLTWTRLPQGFKNSPTLFNEALHRDLADFRIQHPDLILLQYVDDLLLAATSEQDCQRGTRALLQTLGNLGYRASAKKAQICQKQVKYLGYLLKEGQRWLTEARKETVMGQPTPKTPRQLREFLGKAGFCRLFIPGFAEMAAPLYPLTKPGTLFNWGPDQQKAYQEIKQALLTAPALGLPDLTKPFELFVDEKQGYAKGVLTQKLGPWRRPVAYLSKKLDPVAAGWPPCLRMVAAIAVLTKDAGKLTMGQPLVILAPHAVEALVKQPPDRWLSNARMTHYQAMLLDTDRVQFGPVVALNPATLLPLPEKEAPHDCLEILAETHGTRPDLTDQPIPDADYTWYTDGSSFLQEGQRRAGAAVTTETEVIWARALPAGTSAQRAELIALTQALKMAEGKKLNVYTDSRYAFATAHVHGEIYRRRGWLTSEGREIKNKNEILALLKALFLPKRLSIIHCPGHQKGNSAEARGNRMADQAAREAAMKAVLETSTLLAGKRTADGSEFEKRTADGSEFESPKKKAKVE

SEQ ID NO: 4528 - protein, 2096 aa, synthetic construct
MPAAKRVKLDGGDKKYSIGLDIGTNSVGWAVITDEYKVPSKKFKVLGNTDRHSIKKNLIGALLFDSGETAEATRLKRTARRRYTRRKNRICYLQEIFSNEMAKVDDSFFHRLEESFLVEEDKKHERHPIFGNIVDEVAYHEKYPTIYHLRKKLVDSTDKADLRLIYLALAHMIKFRGHFLIEGDLNPDNSDVDKLFIQLVQTYNQLFEENPINASGVDAKAILSARLSKSRRLENLIAQLPGEKKNGLFGNLIALSLGLTPNFKSNFDLAEDAKLQLSKDTYDDDLDNLLAQIGDQYADLFLAAKNLSDAILLSDILRVNTEITKAPLSASMIKRYDEHHQDLTLLKALVRQQLPEKYKEIFFDQSKNGYAGYIDGGASQEEFYKFIKPILEKMDGTEELLVKLNREDLLRKQRTFDNGSIPHQIHLGELHAILRRQEDFYPFLKDNREKIEKILTFRIPYYVGPLARGNSRFAWMTRKSEETITPWNFEEVVDKGASAQSFIERMTNFDKNLPNEKVLPKHSLLYEYFTVYNELTKVKYVTEGMRKPAFLSGEQKKAIVDLLFKTNRKVTVKQLKEDYFKKIECFDSVEISGVEDRFNASLGTYHDLLKIIKDKDFLDNEENEDILEDIVLTLTLFEDREMIEERLKTYAHLFDDKVMKQLKRRRYTGWGRLSRKLINGIRDKQSGKTILDFLKSDGFANRNFMQLIHDDSLTFKEDIQKAQVSGQGDSLHEHIANLAGSPAIKKGILQTVKVVDELVKVMGRHKPENIVIEMARENQTTQKGQKNSRERMKRIEEGIKELGSQILKEHPVENTQLQNEKLYLYYLQNGRDMYVDQELDINRLSDYDVDHIVPQSFLKDDSIDNKVLTRSDKARGKSDNVPSEEVVKKMKNYWRQLLNAKLITQRKFDNLTKAERGGLSELDKAGFIKRQLVETRQITKHVAQILDSRMNTKYDENDKLIREVKVITLKSKLVSDFRKDFQFYKVREINNYHHAHDAYLNAVVGTALIKKYPKLESEFVYGDYKVYDVRKMIAKSEQEIGKATAKYFFYSNIMNFFKTEITLANGEIRKRPLIETNGETGEIVWDKGRDFATVRKVLSMPQVNIVKKTEVQTGGFSKESILPKRNSDKLIARKKDWDPKKYGGFDSPTVAYSVLVVAKVEKGKSKKLKSVKELLGITIMERSSFEKNPIDFLEAKGYKEVKKDLIIKLPKYSLFELENGRKRMLASAGELQKGNELALPSKYVNFLYLASHYEKLKGSPEDNEQKQLFVEQHKHYLDEIIEQISEFSKRVILADANLDKVLSAYNKHRDKPIREQAENIIHLFTLTNLGAPAAFKYFDTTIDRKRYTSTKEVLDATLIHQSITGLYETRIDLSQLGGDGGPAPEAAAKGGSGGTLNLEDEYRLYETSAEPEVSPGSTWLSDFPQAWAETGGMGLAVRQAPLIIPLKATSTPVSIKQYPMSQEAKLGIKPHIQRLLDQGILVPCQSPWNTPLLPVKKPGTNDYRPVQDLREVNKRVEDIHPTVPNPYNLLSGLPPSHRWYTVLDLKDAFFCLRLHPTSQPLFAFEWRDPGMGISGQLTWTRLPQGFKNSPTLFNEALHRDLADFRIQHPDLILLQYVDDILLAATSELDCQQGTRALLLTLGNLGYRASAKKAQLCQKQVKYLGYLLKEGQRWLTEARKETVMGQPTPKTPRQLREFLGKAGFCRLFIPGFAEMAAPLYPLTKPGTLFNWGPDQQKAYQEIKQALLTAPALGLPDLTKPFELFVDEKQGYAKGVLTQKLGPWRRPVAYLSKKLDPVAAGWPPCLRMVAAIAVLRKDAGKLTMGQPLVILAPHAVEALVKQPPDRWLSNARMTHYQAMLLDTDRVQFGPVVALNPATLLPLPEEGAPHDCLEILAETHGTRPDLTDQPIPDADHTWYTDGSSFLQEGQRKAGAAVTTETEVIWARALPAGTSAQRAELIALTQALKMAEGKRLNVYTDSRYAFATAHIHGEIYRRRGWLTSEGREIKNKSEILALLKALFLPKRLSIIHCLGHQKGDSAEARGNRLADQAAREAAIKTPPDTSTLLAGKRTADGSEFEKRTADGSEFESPKKKAKVE

SEQ ID NO: 4529 - protein, 2088 aa, synthetic construct
MPAAKRVKLDGGDKKYSIGLDIGTNSVGWAVITDEYKVPSKKFKVLGNTDRHSIKKNLIGALLFDSGETAEATRLKRTARRRYTRRKNRICYLQEIFSNEMAKVDDSFFHRLEESFLVEEDKKHERHPIFGNIVDEVAYHEKYPTIYHLRKKLVDSTDKADLRLIYLALAHMIKFRGHFLIEGDLNPDNSDVDKLFIQLVQTYNQLFEENPINASGVDAKAILSARLSKSRRLENLIAQLPGEKKNGLFGNLIALSLGLTPNFKSNFDLAEDAKLQLSKDTYDDDLDNLLAQIGDQYADLFLAAKNLSDAILLSDILRVNTEITKAPLSASMIKRYDEHHQDLTLLKALVRQQLPEKYKEIFFDQSKNGYAGYIDGGASQEEFYKFIKPILEKMDGTEELLVKLNREDLLRKQRTFDNGSIPHQIHLGELHAILRRQEDFYPFLKDNREKIEKILTFRIPYYVGPLARGNSRFAWMTRKSEETITPWNFEEVVDKGASAQSFIERMTNFDKNLPNEKVLPKHSLLYEYFTVYNELTKVKYVTEGMRKPAFLSGEQKKAIVDLLFKTNRKVTVKQLKEDYFKKIECFDSVEISGVEDRFNASLGTYHDLLKIIKDKDFLDNEENEDILEDIVLTLTLFEDREMIEERLKTYAHLFDDKVMKQLKRRRYTGWGRLSRKLINGIRDKQSGKTILDFLKSDGFANRNFMQLIHDDSLTFKEDIQKAQVSGQGDSLHEHIANLAGSPAIKKGILQTVKVVDELVKVMGRHKPENIVIEMARENQTTQKGQKNSRERMKRIEEGIKELGSQILKEHPVENTQLQNEKLYLYYLQNGRDMYVDQELDINRLSDYDVDHIVPQSFLKDDSIDNKVLTRSDKARGKSDNVPSEEVVKKMKNYWRQLLNAKLITQRKFDNLTKAERGGLSELDKAGFIKRQLVETRQITKHVAQILDSRMNTKYDENDKLIREVKVITLKSKLVSDFRKDFQFYKVREINNYHHAHDAYLNAVVGTALIKKYPKLESEFVYGDYKVYDVRKMIAKSEQEIGKATAKYFFYSNIMNFFKTEITLANGEIRKRPLIETNGETGEIVWDKGRDFATVRKVLSMPQVNIVKKTEVQTGGFSKESILPKRNSDKLIARKKDWDPKKYGGFDSPTVAYSVLVVAKVEKGKSKKLKSVKELLGITIMERSSFEKNPIDFLEAKGYKEVKKDLIIKLPKYSLFELENGRKRMLASAGELQKGNELALPSKYVNFLYLASHYEKLKGSPEDNEQKQLFVEQHKHYLDEIIEQISEFSKRVILADANLDKVLSAYNKHRDKPIREQAENIIHLFTLTNLGAPAAFKYFDTTIDRKRYTSTKEVLDATLIHQSITGLYETRIDLSQLGGDGGPAPEAAAKGGSGGLDDEYRLYSPLVKPDQNIQFWLEQFPQAWAETAGMGLAKQVPPQVIQLKASATPVSVRQYPLSKEAQEGIRPHVQRLIQQGILVPVQSPWNTPLLPVRKPGTNDYRPVQDLREVNKRVQDIHPTVPNPYNLLCALPPQRSWYTVLDLKDAFFCLRLHPTSQPLFAFEWRDPGTGRTGQLTWTRLPQGFKNSPTIFNEALHRDLANFRIQHPQVTLLQYVDDLLLAGATKQDCLEGTKALLLELSDLGYRASAKKAQICRREVTYLGYSLRDGQRWLTEARKKTVVQIPAPTTAKQVREFLGKAGFCRLFIPGFATLAAPLYPLTKPKGEFSWAPEHQKAFDAIKKALLSAPALALPDVTKPFTLYVDERKGVARGVLTQTLGPWRRPVAYLSKKLDPVASGWPVCLKAIAAVAILVKDADKLTLGQNITVIAPHALENIVRQPPDRWMTNARMTHYQSLLLTERVTFAPPAALNPATLLPEETDEPVTHDCHQLLIEETGVRKDLTDIPLTGEVLTWFTDGSSYVVEGKRMAGAAVVDGTRTIWASSLPEGTSAQKAELMALTQALRLAEGKSINIYTDSRYAFATAHVHGAIYKQRGWLTSAGREIKNKEEILSLLEALHLPKRLAIIHCPGHQKAKDPISRGNQMADRVAKQAAQGVNLLPAGKRTADGSEFEKRTADGSEFESPKKKAKVE

SEQ ID NO: 4530 - protein, 2096 aa, synthetic construct
MPAAKRVKLDGGDKKYSIGLDIGTNSVGWAVITDEYKVPSKKFKVLGNTDRHSIKKNLIGALLFDSGETAEATRLKRTARRRYTRRKNRICYLQEIFSNEMAKVDDSFFHRLEESFLVEEDKKHERHPIFGNIVDEVAYHEKYPTIYHLRKKLVDSTDKADLRLIYLALAHMIKFRGHFLIEGDLNPDNSDVDKLFIQLVQTYNQLFEENPINASGVDAKAILSARLSKSRRLENLIAQLPGEKKNGLFGNLIALSLGLTPNFKSNFDLAEDAKLQLSKDTYDDDLDNLLAQIGDQYADLFLAAKNLSDAILLSDILRVNTEITKAPLSASMIKRYDEHHQDLTLLKALVRQQLPEKYKEIFFDQSKNGYAGYIDGGASQEEFYKFIKPILEKMDGTEELLVKLNREDLLRKQRTFDNGSIPHQIHLGELHAILRRQEDFYPFLKDNREKIEKILTFRIPYYVGPLARGNSRFAWMTRKSEETITPWNFEEVVDKGASAQSFIERMTNFDKNLPNEKVLPKHSLLYEYFTVYNELTKVKYVTEGMRKPAFLSGEQKKAIVDLLFKTNRKVTVKQLKEDYFKKIECFDSVEISGVEDRFNASLGTYHDLLKIIKDKDFLDNEENEDILEDIVLTLTLFEDREMIEERLKTYAHLFDDKVMKQLKRRRYTGWGRLSRKLINGIRDKQSGKTILDFLKSDGFANRNFMQLIHDDSLTFKEDIQKAQVSGQGDSLHEHIANLAGSPAIKKGILQTVKVVDELVKVMGRHKPENIVIEMARENQTTQKGQKNSRERMKRIEEGIKELGSQILKEHPVENTQLQNEKLYLYYLQNGRDMYVDQELDINRLSDYDVDHIVPQSFLKDDSIDNKVLTRSDKARGKSDNVPSEEVVKKMKNYWRQLLNAKLITQRKFDNLTKAERGGLSELDKAGFIKRQLVETRQITKHVAQILDSRMNTKYDENDKLIREVKVITLKSKLVSDFRKDFQFYKVREINNYHHAHDAYLNAVVGTALIKKYPKLESEFVYGDYKVYDVRKMIAKSEQEIGKATAKYFFYSNIMNFFKTEITLANGEIRKRPLIETNGETGEIVWDKGRDFATVRKVLSMPQVNIVKKTEVQTGGFSKESILPKRNSDKLIARKKDWDPKKYGGFDSPTVAYSVLVVAKVEKGKSKKLKSVKELLGITIMERSSFEKNPIDFLEAKGYKEVKKDLIIKLPKYSLFELENGRKRMLASAGELQKGNELALPSKYVNFLYLASHYEKLKGSPEDNEQKQLFVEQHKHYLDEIIEQISEFSKRVILADANLDKVLSAYNKHRDKPIREQAENIIHLFTLTNLGAPAAFKYFDTTIDRKRYTSTKEVLDATLIHQSITGLYETRIDLSQLGGDGGGGGEAAAKGSSGGTLNIEDEHRLHETSKEPDVSLGSTWLSDFPQAWAETGGMGLAVRQAPLIIPLKATSTPVSIKQYPMSQEARLGIKPHIQRLLDQGILVPCQSPWNTPLLPVKKPGTNDYRPVQDLREVNKRVEDIHPTVPNPYNLLSGLPPSHQWYTVLDLKDAFFCLRLHPTSQPLFAFEWRDPEMGISGQLTWTRLPQGFKNSPTLFNEALHRDLADFRIQHPDLILLQYVDDLLLAATSELDCQQGTRALLQTLGNLGYRASAKKAQICQKQVKYLGYLLKEGQRWLTEARKETVMGQPTPKTPRQLREFLGTAGFCRLWIPGFAEMAAPLYPLTKPGTLFNWGPDQQKAYQEIKQALLTAPALGLPDLTKPFELFVDEKQGYAKGVLTQKLGPWRRPVAYLSKKLDPVAAGWPPCLRMVAAIAVLTKDAGKLTMGQPLVILAPHAVEALVKQPPDRWLSNARMTHYQALLLDTDRVQFGPVVALNPATLLPLPEEGLQHNCLDILAEAHGTRPDLTDQPLPDADHTWYTDGSSLLQEGQRKAGAAVTTETEVIWAKALPAGTSAQRAELIALTQALKMAEGKKLNVYTDSRYAFATAHIHGEIYRRRGWLTSEGKEIKNKDEILALLKALFLPKRLSIIHCPGHQKGHSAEARGNRMADQAARKAAITETPDTSTLLAGKRTADGSEFEKRTADGSEFESPKKKAKVE

SEQ ID NO: 4531 - protein, 2094 aa, synthetic construct
MPAAKRVKLDGGDKKYSIGLDIGTNSVGWAVITDEYKVPSKKFKVLGNTDRHSIKKNLIGALLFDSGETAEATRLKRTARRRYTRRKNRICYLQEIFSNEMAKVDDSFFHRLEESFLVEEDKKHERHPIFGNIVDEVAYHEKYPTIYHLRKKLVDSTDKADLRLIYLALAHMIKFRGHFLIEGDLNPDNSDVDKLFIQLVQTYNQLFEENPINASGVDAKAILSARLSKSRRLENLIAQLPGEKKNGLFGNLIALSLGLTPNFKSNFDLAEDAKLQLSKDTYDDDLDNLLAQIGDQYADLFLAAKNLSDAILLSDILRVNTEITKAPLSASMIKRYDEHHQDLTLLKALVRQQLPEKYKEIFFDQSKNGYAGYIDGGASQEEFYKFIKPILEKMDGTEELLVKLNREDLLRKQRTFDNGSIPHQIHLGELHAILRRQEDFYPFLKDNREKIEKILTFRIPYYVGPLARGNSRFAWMTRKSEETITPWNFEEVVDKGASAQSFIERMTNFDKNLPNEKVLPKHSLLYEYFTVYNELTKVKYVTEGMRKPAFLSGEQKKAIVDLLFKTNRKVTVKQLKEDYFKKIECFDSVEISGVEDRFNASLGTYHDLLKIIKDKDFLDNEENEDILEDIVLTLTLFEDREMIEERLKTYAHLFDDKVMKQLKRRRYTGWGRLSRKLINGIRDKQSGKTILDFLKSDGFANRNFMQLIHDDSLTFKEDIQKAQVSGQGDSLHEHIANLAGSPAIKKGILQTVKVVDELVKVMGRHKPENIVIEMARENQTTQKGQKNSRERMKRIEEGIKELGSQILKEHPVENTQLQNEKLYLYYLQNGRDMYVDQELDINRLSDYDVDHIVPQSFLKDDSIDNKVLTRSDKARGKSDNVPSEEVVKKMKNYWRQLLNAKLITQRKFDNLTKAERGGLSELDKAGFIKRQLVETRQITKHVAQILDSRMNTKYDENDKLIREVKVITLKSKLVSDFRKDFQFYKVREINNYHHAHDAYLNAVVGTALIKKYPKLESEFVYGDYKVYDVRKMIAKSEQEIGKATAKYFFYSNIMNFFKTEITLANGEIRKRPLIETNGETGEIVWDKGRDFATVRKVLSMPQVNIVKKTEVQTGGFSKESILPKRNSDKLIARKKDWDPKKYGGFDSPTVAYSVLVVAKVEKGKSKKLKSVKELLGITIMERSSFEKNPIDFLEAKGYKEVKKDLIIKLPKYSLFELENGRKRMLASAGELQKGNELALPSKYVNFLYLASHYEKLKGSPEDNEQKQLFVEQHKHYLDEIIEQISEFSKRVILADANLDKVLSAYNKHRDKPIREQAENIIHLFTLTNLGAPAAFKYFDTTIDRKRYTSTKEVLDATLIHQSITGLYETRIDLSQLGGDGGEAAAKGGGGSSGGVLNLEEEYRLHEKPVPSSIDPSWLQLFPTVWAERAGMGLANQVPPVVVELRSGASPVAVRQYPMSKEAREGIRPHIQRFLDLGVLVPCQSPWNTPLLPVKKPGTNDYRPVQDLREINKRVQDIHPTVPNPYNLLSSLPPSHTWYSVLDLKDAFFCLKLHPNSQPLFAFEWRDPEKGNTGQLTWTRLPQGFKNSPTLFNEALHRDLAPFRALNPQVVLLQYVDDLLVAAPTYRDCKEGTQKLLQELSKLGYRVSAKKAQLCQKEVTYLGYLLKEGKRWLTPARKATVMKIPPPTTPRQVREFLGKAGFCRLFIPGFASLAAPLYPLTKPSIPFIWTEEHQKAFDRIKEALLSAPALALPDLTKPFTLYVDERAGVARGVLTQTLGPWRRPVAYLSKKLDPVASGWPTCLKAVAAVALLLKDADKLTLGQNVTVIASHSLESIVRQPPDRWMTNARMTHYQSLLLNERVSFAPPAVLNPATLLPVESEATPVHRCSEILAEETGTRRDLKDQPLPGVPAWYTDGSSFIAEGKRRAGAAIVDGKRTVWASSLPEGTSAQKAELVALTQALRLAEGKDINIYTDSRYAFATAHIHGAIYKQRGWLTSAGKDIKNKEEILALLEAIHLPKRVAIIHCPGHQKGNDPVATGNRRADEAAKQAALSTRVLAETTKPAGKRTADGSEFEKRTADGSEFESPKKKAKVE

SEQ ID NO: 4532 - protein, 2088 aa, synthetic construct
MPAAKRVKLDGGDKKYSIGLDIGTNSVGWAVITDEYKVPSKKFKVLGNTDRHSIKKNLIGALLFDSGETAEATRLKRTARRRYTRRKNRICYLQEIFSNEMAKVDDSFFHRLEESFLVEEDKKHERHPIFGNIVDEVAYHEKYPTIYHLRKKLVDSTDKADLRLIYLALAHMIKFRGHFLIEGDLNPDNSDVDKLFIQLVQTYNQLFEENPINASGVDAKAILSARLSKSRRLENLIAQLPGEKKNGLFGNLIALSLGLTPNFKSNFDLAEDAKLQLSKDTYDDDLDNLLAQIGDQYADLFLAAKNLSDAILLSDILRVNTEITKAPLSASMIKRYDEHHQDLTLLKALVRQQLPEKYKEIFFDQSKNGYAGYIDGGASQEEFYKFIKPILEKMDGTEELLVKLNREDLLRKQRTFDNGSIPHQIHLGELHAILRRQEDFYPFLKDNREKIEKILTFRIPYYVGPLARGNSRFAWMTRKSEETITPWNFEEVVDKGASAQSFIERMTNFDKNLPNEKVLPKHSLLYEYFTVYNELTKVKYVTEGMRKPAFLSGEQKKAIVDLLFKTNRKVTVKQLKEDYFKKIECFDSVEISGVEDRFNASLGTYHDLLKIIKDKDFLDNEENEDILEDIVLTLTLFEDREMIEERLKTYAHLFDDKVMKQLKRRRYTGWGRLSRKLINGIRDKQSGKTILDFLKSDGFANRNFMQLIHDDSLTFKEDIQKAQVSGQGDSLHEHIANLAGSPAIKKGILQTVKVVDELVKVMGRHKPENIVIEMARENQTTQKGQKNSRERMKRIEEGIKELGSQILKEHPVENTQLQNEKLYLYYLQNGRDMYVDQELDINRLSDYDVDHIVPQSFLKDDSIDNKVLTRSDKARGKSDNVPSEEVVKKMKNYWRQLLNAKLITQRKFDNLTKAERGGLSELDKAGFIKRQLVETRQITKHVAQILDSRMNTKYDENDKLIREVKVITLKSKLVSDFRKDFQFYKVREINNYHHAHDAYLNAVVGTALIKKYPKLESEFVYGDYKVYDVRKMIAKSEQEIGKATAKYFFYSNIMNFFKTEITLANGEIRKRPLIETNGETGEIVWDKGRDFATVRKVLSMPQVNIVKKTEVQTGGFSKESILPKRNSDKLIARKKDWDPKKYGGFDSPTVAYSVLVVAKVEKGKSKKLKSVKELLGITIMERSSFEKNPIDFLEAKGYKEVKKDLIIKLPKYSLFELENGRKRMLASAGELQKGNELALPSKYVNFLYLASHYEKLKGSPEDNEQKQLFVEQHKHYLDEIIEQISEFSKRVILADANLDKVLSAYNKHRDKPIREQAENIIHLFTLTNLGAPAAFKYFDTTIDRKRYTSTKEVLDATLIHQSITGLYETRIDLSQLGGDGGGSSGGGPAPGGTLQLDDEYRLYSPLVKPDQNIQFWLEQFPQAWAETAGMGLAKQVPPQVIQLKASATPVSVRQYPLSKEAQEGIRPHVQRLIQQGILVPVQSPWNTPLLPVRKPGTNDYRPVQDLREVNKRVQDIHPTVPNPYNLLCALPPQRSWYTVLDLKDAFFCLRLHPTSQPLFAFEWRDPGTGRTGQLTWTRLPQGFKNSPTIFNEALHRDLANFRIQHPQVTLLQYVDDLLLAGATKQDCLEGTKALLLELSDLGYRASAKKAQICRREVTYLGYSLRDGQRWLTEARKKTVVQIPAPTTAKQVREFLGTAGFCRLWIPGFATLAAPLYPLTKPKGEFSWAPEHQKAFDAIKKALLSAPALALPDVTKPFTLYVDERKGVARGVLTQTLGPWRRPVAYLSKKLDPVASGWPVCLKAIAAVAILVKDADKLTLGQNITVIAPHALENIVRQPPDRWMTNARMTHYQSLLLTERVTFAPPAALNPATLLPEETDEPVTHDCHQLLIEETGVRKDLTDIPLTGEVLTWFTDGSSYVVEGKRMAGAAVVDGTRTIWASSLPEGTSAQKAELMALTQALRLAEGKSINIYTDSRYAFATAHVHGAIYKQRGWLTSAGREIKNKEEILSLLEALHLPKRLAIIHCPGHQKAKDPISRGNQMADRVAKQAAQGVNLLAGKRTADGSEFEKRTADGSEFESPKKKAKVE

SEQ ID NO: 4533 - protein, 2094 aa, synthetic construct
MPAAKRVKLDGGDKKYSIGLDIGTNSVGWAVITDEYKVPSKKFKVLGNTDRHSIKKNLIGALLFDSGETAEATRLKRTARRRYTRRKNRICYLQEIFSNEMAKVDDSFFHRLEESFLVEEDKKHERHPIFGNIVDEVAYHEKYPTIYHLRKKLVDSTDKADLRLIYLALAHMIKFRGHFLIEGDLNPDNSDVDKLFIQLVQTYNQLFEENPINASGVDAKAILSARLSKSRRLENLIAQLPGEKKNGLFGNLIALSLGLTPNFKSNFDLAEDAKLQLSKDTYDDDLDNLLAQIGDQYADLFLAAKNLSDAILLSDILRVNTEITKAPLSASMIKRYDEHHQDLTLLKALVRQQLPEKYKEIFFDQSKNGYAGYIDGGASQEEFYKFIKPILEKMDGTEELLVKLNREDLLRKQRTFDNGSIPHQIHLGELHAILRRQEDFYPFLKDNREKIEKILTFRIPYYVGPLARGNSRFAWMTRKSEETITPWNFEEVVDKGASAQSFIERMTNFDKNLPNEKVLPKHSLLYEYFTVYNELTKVKYVTEGMRKPAFLSGEQKKAIVDLLFKTNRKVTVKQLKEDYFKKIECFDSVEISGVEDRFNASLGTYHDLLKIIKDKDFLDNEENEDILEDIVLTLTLFEDREMIEERLKTYAHLFDDKVMKQLKRRRYTGWGRLSRKLINGIRDKQSGKTILDFLKSDGFANRNFMQLIHDDSLTFKEDIQKAQVSGQGDSLHEHIANLAGSPAIKKGILQTVKVVDELVKVMGRHKPENIVIEMARENQTTQKGQKNSRERMKRIEEGIKELGSQILKEHPVENTQLQNEKLYLYYLQNGRDMYVDQELDINRLSDYDVDHIVPQSFLKDDSIDNKVLTRSDKARGKSDNVPSEEVVKKMKNYWRQLLNAKLITQRKFDNLTKAERGGLSELDKAGFIKRQLVETRQITKHVAQILDSRMNTKYDENDKLIREVKVITLKSKLVSDFRKDFQFYKVREINNYHHAHDAYLNAVVGTALIKKYPKLESEFVYGDYKVYDVRKMIAKSEQEIGKATAKYFFYSNIMNFFKTEITLANGEIRKRPLIETNGETGEIVWDKGRDFATVRKVLSMPQVNIVKKTEVQTGGFSKESILPKRNSDKLIARKKDWDPKKYGGFDSPTVAYSVLVVAKVEKGKSKKLKSVKELLGITIMERSSFEKNPIDFLEAKGYKEVKKDLIIKLPKYSLFELENGRKRMLASAGELQKGNELALPSKYVNFLYLASHYEKLKGSPEDNEQKQLFVEQHKHYLDEIIEQISEFSKRVILADANLDKVLSAYNKHRDKPIREQAENIIHLFTLTNLGAPAAFKYFDTTIDRKRYTSTKEVLDATLIHQSITGLYETRIDLSQLGGDGGPAPGSSGGGGGTLNLEDEYRLYETSAEPEVSPGSTWLSDFPQAWAETGGMGLAVRQAPLIIPLKATSTPVSIKQYPMSQEAKLGIKPHIQRLLDQGILVPCQSPWNTPLLPVKKPGTNDYRPVQDLREVNKRVEDIHPTVPNPYNLLSGLPPSHRWYTVLDLKDAFFCLRLHPTSQPLFAFEWRDPGMGISGQLTWTRLPQGFKNSPTLFNEALHRDLADFRIQHPDLILLQYVDDILLAATSELDCQQGTRALLLTLGNLGYRASAKKAQLCQKQVKYLGYLLKEGQRWLTEARKETVMGQPTPKTPRQLREFLGKAGFCRLFIPGFAEMAAPLYPLTKPGTLFNWGPDQQKAYQEIKQALLTAPALGLPDLTKPFELFVDEKQGYAKGVLTQKLGPWRRPVAYLSKKLDPVAAGWPPCLRMVAAIAVLRKDAGKLTMGQPLVILAPHAVEALVKQPPDRWLSNARMTHYQAMLLDTDRVQFGPVVALNPATLLPLPEEGAPHDCLEILAETHGTRPDLTDQPIPDADHTWYTDGSSFLQEGQRKAGAAVTTETEVIWARALPAGTSAQRAELIALTQALKMAEGKRLNVYTDSRYAFATAHIHGEIYRRRGWLTSEGREIKNKSEILALLKALFLPKRLSIIHCLGHQKGDSAEARGNRLADQAAREAAIKTPPDTSTLLAGKRTADGSEFEKRTADGSEFESPKKKAKVE

SEQ ID NO: 4534 - protein, 2096 aa, synthetic construct
MPAAKRVKLDGGDKKYSIGLDIGTNSVGWAVITDEYKVPSKKFKVLGNTDRHSIKKNLIGALLFDSGETAEATRLKRTARRRYTRRKNRICYLQEIFSNEMAKVDDSFFHRLEESFLVEEDKKHERHPIFGNIVDEVAYHEKYPTIYHLRKKLVDSTDKADLRLIYLALAHMIKFRGHFLIEGDLNPDNSDVDKLFIQLVQTYNQLFEENPINASGVDAKAILSARLSKSRRLENLIAQLPGEKKNGLFGNLIALSLGLTPNFKSNFDLAEDAKLQLSKDTYDDDLDNLLAQIGDQYADLFLAAKNLSDAILLSDILRVNTEITKAPLSASMIKRYDEHHQDLTLLKALVRQQLPEKYKEIFFDQSKNGYAGYIDGGASQEEFYKFIKPILEKMDGTEELLVKLNREDLLRKQRTFDNGSIPHQIHLGELHAILRRQEDFYPFLKDNREKIEKILTFRIPYYVGPLARGNSRFAWMTRKSEETITPWNFEEVVDKGASAQSFIERMTNFDKNLPNEKVLPKHSLLYEYFTVYNELTKVKYVTEGMRKPAFLSGEQKKAIVDLLFKTNRKVTVKQLKEDYFKKIECFDSVEISGVEDRFNASLGTYHDLLKIIKDKDFLDNEENEDILEDIVLTLTLFEDREMIEERLKTYAHLFDDKVMKQLKRRRYTGWGRLSRKLINGIRDKQSGKTILDFLKSDGFANRNFMQLIHDDSLTFKEDIQKAQVSGQGDSLHEHIANLAGSPAIKKGILQTVKVVDELVKVMGRHKPENIVIEMARENQTTQKGQKNSRERMKRIEEGIKELGSQILKEHPVENTQLQNEKLYLYYLQNGRDMYVDQELDINRLSDYDVDHIVPQSFLKDDSIDNKVLTRSDKARGKSDNVPSEEVVKKMKNYWRQLLNAKLITQRKFDNLTKAERGGLSELDKAGFIKRQLVETRQITKHVAQILDSRMNTKYDENDKLIREVKVITLKSKLVSDFRKDFQFYKVREINNYHHAHDAYLNAVVGTALIKKYPKLESEFVYGDYKVYDVRKMIAKSEQEIGKATAKYFFYSNIMNFFKTEITLANGEIRKRPLIETNGETGEIVWDKGRDFATVRKVLSMPQVNIVKKTEVQTGGFSKESILPKRNSDKLIARKKDWDPKKYGGFDSPTVAYSVLVVAKVEKGKSKKLKSVKELLGITIMERSSFEKNPIDFLEAKGYKEVKKDLIIKLPKYSLFELENGRKRMLASAGELQKGNELALPSKYVNFLYLASHYEKLKGSPEDNEQKQLFVEQHKHYLDEIIEQISEFSKRVILADANLDKVLSAYNKHRDKPIREQAENIIHLFTLTNLGAPAAFKYFDTTIDRKRYTSTKEVLDATLIHQSITGLYETRIDLSQLGGDGGGGGPAPEAAAKGGTLNIEDEHRLHETSKEPDVSLGSTWLSDFPQAWAETGGMGLAVRQAPLIIPLKATSTPVSIKQYPMSQEARLGIKPHIQRLLDQGILVPCQSPWNTPLLPVKKPGTNDYRPVQDLREVNKRVEDIHPTVPNPYNLLSGLPPSHQWYTVLDLKDAFFCLRLHPTSQPLFAFEWRDPEMGISGQLTWTRLPQGFKNSPTLFNEALHRDLADFRIQHPDLILLQYVDDLLLAATSELDCQQGTRALLQTLGNLGYRASAKKAQICQKQVKYLGYLLKEGQRWLTEARKETVMGQPTPKTPRQLREFLGTAGFCRLWIPGFAEMAAPLYPLTKPGTLFNWGPDQQKAYQEIKQALLTAPALGLPDLTKPFELFVDEKQGYAKGVLTQKLGPWRRPVAYLSKKLDPVAAGWPPCLRMVAAIAVLTKDAGKLTMGQPLVILAPHAVEALVKQPPDRWLSNARMTHYQALLLDTDRVQFGPVVALNPATLLPLPEEGLQHNCLDILAEAHGTRPDLTDQPLPDADHTWYTDGSSLLQEGQRKAGAAVTTETEVIWAKALPAGTSAQRAELIALTQALKMAEGKKLNVYTDSRYAFATAHIHGEIYRRRGWLTSEGKEIKNKDEILALLKALFLPKRLSIIHCPGHQKGHSAEARGNRMADQAARKAAITETPDTSTLLAGKRTADGSEFEKRTADGSEFESPKKKAKVE

SEQ ID NO: 4535 - protein, 2096 aa, synthetic construct
MPAAKRVKLDGGDKKYSIGLDIGTNSVGWAVITDEYKVPSKKFKVLGNTDRHSIKKNLIGALLFDSGETAEATRLKRTARRRYTRRKNRICYLQEIFSNEMAKVDDSFFHRLEESFLVEEDKKHERHPIFGNIVDEVAYHEKYPTIYHLRKKLVDSTDKADLRLIYLALAHMIKFRGHFLIEGDLNPDNSDVDKLFIQLVQTYNQLFEENPINASGVDAKAILSARLSKSRRLENLIAQLPGEKKNGLFGNLIALSLGLTPNFKSNFDLAEDAKLQLSKDTYDDDLDNLLAQIGDQYADLFLAAKNLSDAILLSDILRVNTEITKAPLSASMIKRYDEHHQDLTLLKALVRQQLPEKYKEIFFDQSKNGYAGYIDGGASQEEFYKFIKPILEKMDGTEELLVKLNREDLLRKQRTFDNGSIPHQIHLGELHAILRRQEDFYPFLKDNREKIEKILTFRIPYYVGPLARGNSRFAWMTRKSEETITPWNFEEVVDKGASAQSFIERMTNFDKNLPNEKVLPKHSLLYEYFTVYNELTKVKYVTEGMRKPAFLSGEQKKAIVDLLFKTNRKVTVKQLKEDYFKKIECFDSVEISGVEDRFNASLGTYHDLLKIIKDKDFLDNEENEDILEDIVLTLTLFEDREMIEERLKTYAHLFDDKVMKQLKRRRYTGWGRLSRKLINGIRDKQSGKTILDFLKSDGFANRNFMQLIHDDSLTFKEDIQKAQVSGQGDSLHEHIANLAGSPAIKKGILQTVKVVDELVKVMGRHKPENIVIEMARENQTTQKGQKNSRERMKRIEEGIKELGSQILKEHPVENTQLQNEKLYLYYLQNGRDMYVDQELDINRLSDYDVDHIVPQSFLKDDSIDNKVLTRSDKARGKSDNVPSEEVVKKMKNYWRQLLNAKLITQRKFDNLTKAERGGLSELDKAGFIKRQLVETRQITKHVAQILDSRMNTKYDENDKLIREVKVITLKSKLVSDFRKDFQFYKVREINNYHHAHDAYLNAVVGTALIKKYPKLESEFVYGDYKVYDVRKMIAKSEQEIGKATAKYFFYSNIMNFFKTEITLANGEIRKRPLIETNGETGEIVWDKGRDFATVRKVLSMPQVNIVKKTEVQTGGFSKESILPKRNSDKLIARKKDWDPKKYGGFDSPTVAYSVLVVAKVEKGKSKKLKSVKELLGITIMERSSFEKNPIDFLEAKGYKEVKKDLIIKLPKYSLFELENGRKRMLASAGELQKGNELALPSKYVNFLYLASHYEKLKGSPEDNEQKQLFVEQHKHYLDEIIEQISEFSKRVILADANLDKVLSAYNKHRDKPIREQAENIIHLFTLTNLGAPAAFKYFDTTIDRKRYTSTKEVLDATLIHQSITGLYETRIDLSQLGGDGGEAAAKGGGPAPGGTLNIEDEHRLHETSKEPDVSLGSTWLSDFPQAWAETGGMGLAVRQAPLIIPLKATSTPVSIKQYPMSQEARLGIKPHIQRLLDQGILVPCQSPWNTPLLPVKKPGTNDYRPVQDLREVNKRVEDIHPTVPNPYNLLSGLPPSHQWYTVLDLKDAFFCLRLHPTSQPLFAFEWRDPEMGISGQLTWTRLPQGFKNSPTLFNEALHRDLADFRIQHPDLILLQYVDDLLLAATSELDCQQGTRALLQTLGNLGYRASAKKAQICQKQVKYLGYLLKEGQRWLTEARKETVMGQPTPKTPRQLREFLGTAGFCRLWIPGFAEMAAPLYPLTKPGTLFNWGPDQQKAYQEIKQALLTAPALGLPDLTKPFELFVDEKQGYAKGVLTQKLGPWRRPVAYLSKKLDPVAAGWPPCLRMVAAIAVLTKDAGKLTMGQPLVILAPHAVEALVKQPPDRWLSNARMTHYQALLLDTDRVQFGPVVALNPATLLPLPEEGLQHNCLDILAEAHGTRPDLTDQPLPDADHTWYTDGSSLLQEGQRKAGAAVTTETEVIWAKALPAGTSAQRAELIALTQALKMAEGKKLNVYTDSRYAFATAHIHGEIYRRRGWLTSEGKEIKNKDEILALLKALFLPKRLSIIHCPGHQKGHSAEARGNRMADQAARKAAITETPDTSTLLAGKRTADGSEFEKRTADGSEFESPKKKAKVE

SEQ ID NO: 4536 - protein, 2096 aa, synthetic construct
MPAAKRVKLDGGDKKYSIGLDIGTNSVGWAVITDEYKVPSKKFKVLGNTDRHSIKKNLIGALLFDSGETAEATRLKRTARRRYTRRKNRICYLQEIFSNEMAKVDDSFFHRLEESFLVEEDKKHERHPIFGNIVDEVAYHEKYPTIYHLRKKLVDSTDKADLRLIYLALAHMIKFRGHFLIEGDLNPDNSDVDKLFIQLVQTYNQLFEENPINASGVDAKAILSARLSKSRRLENLIAQLPGEKKNGLFGNLIALSLGLTPNFKSNFDLAEDAKLQLSKDTYDDDLDNLLAQIGDQYADLFLAAKNLSDAILLSDILRVNTEITKAPLSASMIKRYDEHHQDLTLLKALVRQQLPEKYKEIFFDQSKNGYAGYIDGGASQEEFYKFIKPILEKMDGTEELLVKLNREDLLRKQRTFDNGSIPHQIHLGELHAILRRQEDFYPFLKDNREKIEKILTFRIPYYVGPLARGNSRFAWMTRKSEETITPWNFEEVVDKGASAQSFIERMTNFDKNLPNEKVLPKHSLLYEYFTVYNELTKVKYVTEGMRKPAFLSGEQKKAIVDLLFKTNRKVTVKQLKEDYFKKIECFDSVEISGVEDRFNASLGTYHDLLKIIKDKDFLDNEENEDILEDIVLTLTLFEDREMIEERLKTYAHLFDDKVMKQLKRRRYTGWGRLSRKLINGIRDKQSGKTILDFLKSDGFANRNFMQLIHDDSLTFKEDIQKAQVSGQGDSLHEHIANLAGSPAIKKGILQTVKVVDELVKVMGRHKPENIVIEMARENQTTQKGQKNSRERMKRIEEGIKELGSQILKEHPVENTQLQNEKLYLYYLQNGRDMYVDQELDINRLSDYDVDHIVPQSFLKDDSIDNKVLTRSDKARGKSDNVPSEEVVKKMKNYWRQLLNAKLITQRKFDNLTKAERGGLSELDKAGFIKRQLVETRQITKHVAQILDSRMNTKYDENDKLIREVKVITLKSKLVSDFRKDFQFYKVREINNYHHAHDAYLNAVVGTALIKKYPKLESEFVYGDYKVYDVRKMIAKSEQEIGKATAKYFFYSNIMNFFKTEITLANGEIRKRPLIETNGETGEIVWDKGRDFATVRKVLSMPQVNIVKKTEVQTGGFSKESILPKRNSDKLIARKKDWDPKKYGGFDSPTVAYSVLVVAKVEKGKSKKLKSVKELLGITIMERSSFEKNPIDFLEAKGYKEVKKDLIIKLPKYSLFELENGRKRMLASAGELQKGNELALPSKYVNFLYLASHYEKLKGSPEDNEQKQLFVEQHKHYLDEIIEQISEFSKRVILADANLDKVLSAYNKHRDKPIREQAENIIHLFTLTNLGAPAAFKYFDTTIDRKRYTSTKEVLDATLIHQSITGLYETRIDLSQLGGDGGEAAAKPAPGGGGGTLNIEDEYRLHETSKEPDVSLGSTWLSDFPQAWAETGGMGLAVRQAPLIIPLKATSTPVSIKQYPMSQEARLGIKPHIQRLLDQGILVPCQSPWNTPLLPVKKPGTNDYRPVQDLREVNKRVEDIHPTVPNPYNLLSGLPPSHQWYTVLDLKDAFFCLRLHPTSQPLFAFEWRDPEMGISGQLTWTRLPQGFKNSPTLFNEALHRDLAGFRIQHPDLILLQYVDDLLLAATSELDCQQGTRALLQTLGDLGYRASAKKAQICQKQVKYLGYLLKEGQRWLTEARKETVMGQPIPKTPRQLREFLGKAGFCRLFIPGFAEMAAPLYPLTKPGTLFNWGPDQQKAFQEIKQALLTAPALGLPDLTKPFELFVDEKQGYAKGVLTQKLGPWRRPVAYLSKKLDPVAAGWPPCLRMVAAIAVLTKDAGKLTMGQPLVILAPHAVEALVKQPPDRWLSNARMTHYQALLLDTDRVQFGPVVALNPATLLPLPEEGLQHDCLDILAEAHGTRSDLMDQPLPDADHTWYTDGSSFLQEGQRKAGAAVTTETEVIWARALPAGTSAQRAELIALTQALKMAEGKKLNVYTDSRYAFATAHIHGEIYRRRGWLTSEGKEIKNKDEILALLKALFLPKRLSIIHCPGHQKGNSAEARGNRMADQAAREVATRETPETSTLLAGKRTADGSEFEKRTADGSEFESPKKKAKVE

SEQ ID NO: 4537 - protein, 2127 aa, synthetic construct
MPAAKRVKLDGGDKKYSIGLDIGTNSVGWAVITDEYKVPSKKFKVLGNTDRHSIKKNLIGALLFDSGETAEATRLKRTARRRYTRRKNRICYLQEIFSNEMAKVDDSFFHRLEESFLVEEDKKHERHPIFGNIVDEVAYHEKYPTIYHLRKKLVDSTDKADLRLIYLALAHMIKFRGHFLIEGDLNPDNSDVDKLFIQLVQTYNQLFEENPINASGVDAKAILSARLSKSRRLENLIAQLPGEKKNGLFGNLIALSLGLTPNFKSNFDLAEDAKLQLSKDTYDDDLDNLLAQIGDQYADLFLAAKNLSDAILLSDILRVNTEITKAPLSASMIKRYDEHHQDLTLLKALVRQQLPEKYKEIFFDQSKNGYAGYIDGGASQEEFYKFIKPILEKMDGTEELLVKLNREDLLRKQRTFDNGSIPHQIHLGELHAILRRQEDFYPFLKDNREKIEKILTFRIPYYVGPLARGNSRFAWMTRKSEETITPWNFEEVVDKGASAQSFIERMTNFDKNLPNEKVLPKHSLLYEYFTVYNELTKVKYVTEGMRKPAFLSGEQKKAIVDLLFKTNRKVTVKQLKEDYFKKIECFDSVEISGVEDRFNASLGTYHDLLKIIKDKDFLDNEENEDILEDIVLTLTLFEDREMIEERLKTYAHLFDDKVMKQLKRRRYTGWGRLSRKLINGIRDKQSGKTILDFLKSDGFANRNFMQLIHDDSLTFKEDIQKAQVSGQGDSLHEHIANLAGSPAIKKGILQTVKVVDELVKVMGRHKPENIVIEMARENQTTQKGQKNSRERMKRIEEGIKELGSQILKEHPVENTQLQNEKLYLYYLQNGRDMYVDQELDINRLSDYDVDHIVPQSFLKDDSIDNKVLTRSDKARGKSDNVPSEEVVKKMKNYWRQLLNAKLITQRKFDNLTKAERGGLSELDKAGFIKRQLVETRQITKHVAQILDSRMNTKYDENDKLIREVKVITLKSKLVSDFRKDFQFYKVREINNYHHAHDAYLNAVVGTALIKKYPKLESEFVYGDYKVYDVRKMIAKSEQEIGKATAKYFFYSNIMNFFKTEITLANGEIRKRPLIETNGETGEIVWDKGRDFATVRKVLSMPQVNIVKKTEVQTGGFSKESILPKRNSDKLIARKKDWDPKKYGGFDSPTVAYSVLVVAKVEKGKSKKLKSVKELLGITIMERSSFEKNPIDFLEAKGYKEVKKDLIIKLPKYSLFELENGRKRMLASAGELQKGNELALPSKYVNFLYLASHYEKLKGSPEDNEQKQLFVEQHKHYLDEIIEQISEFSKRVILADANLDKVLSAYNKHRDKPIREQAENIIHLFTLTNLGAPAAFKYFDTTIDRKRYTSTKEVLDATLIHQSITGLYETRIDLSQLGGDGGPAPEAAAKGGGGGLLGRDLLTKLKAQIQFSTEGPQVTWEDRPAMCLVLNLEEEYRLHEKPVPPSIDPSWLQLFPMVWAEKAGMGLANQVPPVVVELKSDASPVAVRQYPMSKEAREGIRPHIQRFLDLGILVPCQSPWNTPLLPVKKPGTNDYRPVQDLREVNKRVQDIHPTVPNPYNLLSSLPPSHTWYSVLDLKDAFFCLKLHPNSQPLFAFEWRDPEKGNTGQLTWTRLPQGFKNSPTLFNEALHRDLASFRALNPQVVMLQYVDDLLVAAPTYRDCKEGTRRLLQELSKLGYRVSAKKAQLCREEVTYLGYLLKGGKRWLTPARKATVMKIPTPTTPRQVREFLGTAGFCRLWIPGFASLAAPLYPLTRPKVPFTWTEAHQEAFGRIKEALLSAPALALPDLTKPFALYVDEKEGVARGVLTQTLGPWRRPVAYLSKKLDPVASGWPTCLKAIAAVALLLKDADKLTLGQNVLVIAPHNLESIVRQPPDRWMTNARMTHYQSLLLNERVSFAPPAILNPATLLPVESDDTPIHICSEILAEETGTRPDLRDQPLPGVPAWYTDGSSFIMDGRRQAGAAIVDNKRTVWASNLPEGTSAQKAELIALTQALRLAEGKSINIYTDSRYAFATAHVHGAIYKQRGWLTSAGKDIKNKEEILALLEAIHLPKRVAIIHCPGHQRGTDPVATGNRKADEAAKQAAQSTRILTETTKNAGKRTADGSEFEKRTADGSEFESPKKKAKVE

SEQ ID NO: 4538 - protein, 2096 aa, synthetic construct
MPAAKRVKLDGGDKKYSIGLDIGTNSVGWAVITDEYKVPSKKFKVLGNTDRHSIKKNLIGALLFDSGETAEATRLKRTARRRYTRRKNRICYLQEIFSNEMAKVDDSFFHRLEESFLVEEDKKHERHPIFGNIVDEVAYHEKYPTIYHLRKKLVDSTDKADLRLIYLALAHMIKFRGHFLIEGDLNPDNSDVDKLFIQLVQTYNQLFEENPINASGVDAKAILSARLSKSRRLENLIAQLPGEKKNGLFGNLIALSLGLTPNFKSNFDLAEDAKLQLSKDTYDDDLDNLLAQIGDQYADLFLAAKNLSDAILLSDILRVNTEITKAPLSASMIKRYDEHHQDLTLLKALVRQQLPEKYKEIFFDQSKNGYAGYIDGGASQEEFYKFIKPILEKMDGTEELLVKLNREDLLRKQRTFDNGSIPHQIHLGELHAILRRQEDFYPFLKDNREKIEKILTFRIPYYVGPLARGNSRFAWMTRKSEETITPWNFEEVVDKGASAQSFIERMTNFDKNLPNEKVLPKHSLLYEYFTVYNELTKVKYVTEGMRKPAFLSGEQKKAIVDLLFKTNRKVTVKQLKEDYFKKIECFDSVEISGVEDRFNASLGTYHDLLKIIKDKDFLDNEENEDILEDIVLTLTLFEDREMIEERLKTYAHLFDDKVMKQLKRRRYTGWGRLSRKLINGIRDKQSGKTILDFLKSDGFANRNFMQLIHDDSLTFKEDIQKAQVSGQGDSLHEHIANLAGSPAIKKGILQTVKVVDELVKVMGRHKPENIVIEMARENQTTQKGQKNSRERMKRIEEGIKELGSQILKEHPVENTQLQNEKLYLYYLQNGRDMYVDQELDINRLSDYDVDHIVPQSFLKDDSIDNKVLTRSDKARGKSDNVPSEEVVKKMKNYWRQLLNAKLITQRKFDNLTKAERGGLSELDKAGFIKRQLVETRQITKHVAQILDSRMNTKYDENDKLIREVKVITLKSKLVSDFRKDFQFYKVREINNYHHAHDAYLNAVVGTALIKKYPKLESEFVYGDYKVYDVRKMIAKSEQEIGKATAKYFFYSNIMNFFKTEITLANGEIRKRPLIETNGETGEIVWDKGRDFATVRKVLSMPQVNIVKKTEVQTGGFSKESILPKRNSDKLIARKKDWDPKKYGGFDSPTVAYSVLVVAKVEKGKSKKLKSVKELLGITIMERSSFEKNPIDFLEAKGYKEVKKDLIIKLPKYSLFELENGRKRMLASAGELQKGNELALPSKYVNFLYLASHYEKLKGSPEDNEQKQLFVEQHKHYLDEIIEQISEFSKRVILADANLDKVLSAYNKHRDKPIREQAENIIHLFTLTNLGAPAAFKYFDTTIDRKRYTSTKEVLDATLIHQSITGLYETRIDLSQLGGDGGGSSEAAAKPAPGGTLNIEDEYRLHETSKEPDVPLGSTWLSDFPQAWAETGGMGLAVRQAPLIIPLKATSTPVSIKQYPMSQEARLGIKPHIQRLLDQGILVPCQSPWNTPLLPVKKPGTNDYRPVQDLREVNKRVEDIHPTVPNPYNLLSGLPPSHQWYTVLDLKDAFFCLRLHPTSQPLFAFEWRDPEMGISGQLTWTRLPQGFKNSPTLFNEALHRDLADFRIQHPDLILLQYVDDLLLAATSEQDCQRGTRALLQTLGNLGYRASAKKAQICQKQVKYLGYLLKEGQRWLTEARKETVMGQPTPKTPRQLREFLGTAGFCRLWIPGFAEMAAPLYPLTKPGTLFNWGPDQQKAYQEIKQALLTAPALGLPDLTKPFELFVDEKQGYAKGVLTQKLGPWRRPVAYLSKKLDPVAAGWPPCLRMVAAIAVLTKDAGKLTMGQPLVILAPHAVEALVKQPPDRWLSNARMTHYQAMLLDTDRVQFGPVVALNPATLLPLPEKEAPHDCLEILAETHGTRPDLTDQPIPDADYTWYTDGSSFLQEGQRRAGAAVTTETEVIWARALPAGTSAQRAELIALTQALKMAEGKKLNVYTDSRYAFATAHVHGEIYRRRGWLTSEGREIKNKNEILALLKALFLPKRLSIIHCPGHQKGNSAEARGNRMADQAAREAAMKAVLETSTLLAGKRTADGSEFEKRTADGSEFESPKKKAKVE

SEQ ID NO: 4539 - protein, 2098 aa, synthetic construct
MPAAKRVKLDGGDKKYSIGLDIGTNSVGWAVITDEYKVPSKKFKVLGNTDRHSIKKNLIGALLFDSGETAEATRLKRTARRRYTRRKNRICYLQEIFSNEMAKVDDSFFHRLEESFLVEEDKKHERHPIFGNIVDEVAYHEKYPTIYHLRKKLVDSTDKADLRLIYLALAHMIKFRGHFLIEGDLNPDNSDVDKLFIQLVQTYNQLFEENPINASGVDAKAILSARLSKSRRLENLIAQLPGEKKNGLFGNLIALSLGLTPNFKSNFDLAEDAKLQLSKDTYDDDLDNLLAQIGDQYADLFLAAKNLSDAILLSDILRVNTEITKAPLSASMIKRYDEHHQDLTLLKALVRQQLPEKYKEIFFDQSKNGYAGYIDGGASQEEFYKFIKPILEKMDGTEELLVKLNREDLLRKQRTFDNGSIPHQIHLGELHAILRRQEDFYPFLKDNREKIEKILTFRIPYYVGPLARGNSRFAWMTRKSEETITPWNFEEVVDKGASAQSFIERMTNFDKNLPNEKVLPKHSLLYEYFTVYNELTKVKYVTEGMRKPAFLSGEQKKAIVDLLFKTNRKVTVKQLKEDYFKKIECFDSVEISGVEDRFNASLGTYHDLLKIIKDKDFLDNEENEDILEDIVLTLTLFEDREMIEERLKTYAHLFDDKVMKQLKRRRYTGWGRLSRKLINGIRDKQSGKTILDFLKSDGFANRNFMQLIHDDSLTFKEDIQKAQVSGQGDSLHEHIANLAGSPAIKKGILQTVKVVDELVKVMGRHKPENIVIEMARENQTTQKGQKNSRERMKRIEEGIKELGSQILKEHPVENTQLQNEKLYLYYLQNGRDMYVDQELDINRLSDYDVDHIVPQSFLKDDSIDNKVLTRSDKARGKSDNVPSEEVVKKMKNYWRQLLNAKLITQRKFDNLTKAERGGLSELDKAGFIKRQLVETRQITKHVAQILDSRMNTKYDENDKLIREVKVITLKSKLVSDFRKDFQFYKVREINNYHHAHDAYLNAVVGTALIKKYPKLESEFVYGDYKVYDVRKMIAKSEQEIGKATAKYFFYSNIMNFFKTEITLANGEIRKRPLIETNGETGEIVWDKGRDFATVRKVLSMPQVNIVKKTEVQTGGFSKESILPKRNSDKLIARKKDWDPKKYGGFDSPTVAYSVLVVAKVEKGKSKKLKSVKELLGITIMERSSFEKNPIDFLEAKGYKEVKKDLIIKLPKYSLFELENGRKRMLASAGELQKGNELALPSKYVNFLYLASHYEKLKGSPEDNEQKQLFVEQHKHYLDEIIEQISEFSKRVILADANLDKVLSAYNKHRDKPIREQAENIIHLFTLTNLGAPAAFKYFDTTIDRKRYTSTKEVLDATLIHQSITGLYETRIDLSQLGGDGGGSSPAPEAAAKGGTAPLEEEYRLFLEAPIQNVTLLEQWKREIPKVWAEINPPGLASTQAPIHVQLLSTALPVRVRQYPITLEAKRSLRETIRKFRAAGILRPVHSPWNTPLLPVRKSGTSEYRMVQDLREVNKRVETIHPTVPNPYTLLSLLPPDRIWYSVLDLKDAFFCIPLAPESQLIFAFEWADAEEGESGQLTWTRLPQGFKNSPTLFNEALNRDLQGFRLDHPSVSLLQYVDDLLIAADTQAACLSATRDLLMTLAELGYRVSGKKAQLCQEEVTYLGFKIHKGSRSLSNSRTQAILQIPVPKTKRQVREFLGKIGYCRLFIPGFAELAQPLYAATRPGNDPLVWGEKEEEAFQSLKLALTQPPALALPSLDKPFQLFVEETSGAAKGVLTQALGPWKRPVAYLSKRLDPVAAGWPRCLRAIAAAALLTREASKLTFGQDIEITSSHNLESLLRSPPDKWLTNARITQYQVLLLDPPRVRFKQTAALNPATLLPETDDTLPIHHCLDTLDSLTSTRPDLTDQPLAQAEATLFTDGSSYIRDGKRYAGAAVVTLDSVIWAEPLPIGTSAQKAELIALTKALEWSKDKSVNIYTDSRYAFATLHVHGMIYRERGWLTAGGKAIKNAPEILALLTAVWLPKRVAVMHCKGHQKDDAPTSTGNRRADEVAREVAIRPLSTQATISAGKRTADGSEFEKRTADGSEFESPKKKAKVE

SEQ ID NO: 4540 - protein, 2131 aa, synthetic construct
MPAAKRVKLDGGDKKYSIGLDIGTNSVGWAVITDEYKVPSKKFKVLGNTDRHSIKKNLIGALLFDSGETAEATRLKRTARRRYTRRKNRICYLQEIFSNEMAKVDDSFFHRLEESFLVEEDKKHERHPIFGNIVDEVAYHEKYPTIYHLRKKLVDSTDKADLRLIYLALAHMIKFRGHFLIEGDLNPDNSDVDKLFIQLVQTYNQLFEENPINASGVDAKAILSARLSKSRRLENLIAQLPGEKKNGLFGNLIALSLGLTPNFKSNFDLAEDAKLQLSKDTYDDDLDNLLAQIGDQYADLFLAAKNLSDAILLSDILRVNTEITKAPLSASMIKRYDEHHQDLTLLKALVRQQLPEKYKEIFFDQSKNGYAGYIDGGASQEEFYKFIKPILEKMDGTEELLVKLNREDLLRKQRTFDNGSIPHQIHLGELHAILRRQEDFYPFLKDNREKIEKILTFRIPYYVGPLARGNSRFAWMTRKSEETITPWNFEEVVDKGASAQSFIERMTNFDKNLPNEKVLPKHSLLYEYFTVYNELTKVKYVTEGMRKPAFLSGEQKKAIVDLLFKTNRKVTVKQLKEDYFKKIECFDSVEISGVEDRFNASLGTYHDLLKIIKDKDFLDNEENEDILEDIVLTLTLFEDREMIEERLKTYAHLFDDKVMKQLKRRRYTGWGRLSRKLINGIRDKQSGKTILDFLKSDGFANRNFMQLIHDDSLTFKEDIQKAQVSGQGDSLHEHIANLAGSPAIKKGILQTVKVVDELVKVMGRHKPENIVIEMARENQTTQKGQKNSRERMKRIEEGIKELGSQILKEHPVENTQLQNEKLYLYYLQNGRDMYVDQELDINRLSDYDVDHIVPQSFLKDDSIDNKVLTRSDKARGKSDNVPSEEVVKKMKNYWRQLLNAKLITQRKFDNLTKAERGGLSELDKAGFIKRQLVETRQITKHVAQILDSRMNTKYDENDKLIREVKVITLKSKLVSDFRKDFQFYKVREINNYHHAHDAYLNAVVGTALIKKYPKLESEFVYGDYKVYDVRKMIAKSEQEIGKATAKYFFYSNIMNFFKTEITLANGEIRKRPLIETNGETGEIVWDKGRDFATVRKVLSMPQVNIVKKTEVQTGGFSKESILPKRNSDKLIARKKDWDPKKYGGFDSPTVAYSVLVVAKVEKGKSKKLKSVKELLGITIMERSSFEKNPIDFLEAKGYKEVKKDLIIKLPKYSLFELENGRKRMLASAGELQKGNELALPSKYVNFLYLASHYEKLKGSPEDNEQKQLFVEQHKHYLDEIIEQISEFSKRVILADANLDKVLSAYNKHRDKPIREQAENIIHLFTLTNLGAPAAFKYFDTTIDRKRYTSTKEVLDATLIHQSITGLYETRIDLSQLGGDGGAEAAAKEAAAKEAAAKEAAAKALEAEAAAKEAAAKEAAAKEAAAKAGGTLNIEDEYRLHETSKGPDVPLGSTWLSDFPQAWAETGGMGLAVRQAPLIIPLKATSTPVSIKQYPMSQEARLGIKPHIQRLLDQGILVPCQSPWNTPLLPVKKPGTNDYRPVQDLREVNKRVEDIHPTVPNPYNLLSGLPPSHQWYTVLDLKDAFFCLRLHPTSQSLFAFEWRDPEMGISGQLTWTRLPQGFKNSPTLFNEALHRDLADFRIQHPDLILLQYVDDLLLAATSELDCQQGTRALLQTLGDLGYRASAKKAQICQKQVKYLGYLLKEGQRWLTEARKETVMGQPTPKTPRQLREFLGTAGFCRLWIPGFAEMAAPLYPLTKPGTLFEWGPDQQKAYQEIKQALLTAPALGLPDLTKPFELFVDEKQGYAKGVLTQKLGPWRRPVAYLSKKLDPVAAGWPPCLRMVAAIAVLTKDAGKLTMGQPLVILAPHAVEALVKQPPDRWLSNARMTHYQALLLDTDRVQFGPIVALNPATLLPLPEEGLQHDCLDILAEAHGTRPDLTDQPLPDADHTWYTDGSSFLQEGQRKAGAAVTTETEVVWAKALPAGTSAQRAELIALTQALKMAEGKKLNVYTDSRYAFATAHIHGEIYRRRGWLTSEGKEIKNKDEILALLKALFLPKRLSIIHCPGHQKGNRAEARGNRMADQAAREVATRETPETSTLLAGKRTADGSEFEKRTADGSEFESPKKKAKVE

SEQ ID NO: 4541 - protein, 2122 aa, synthetic construct
MPAAKRVKLDGGDKKYSIGLDIGTNSVGWAVITDEYKVPSKKFKVLGNTDRHSIKKNLIGALLFDSGETAEATRLKRTARRRYTRRKNRICYLQEIFSNEMAKVDDSFFHRLEESFLVEEDKKHERHPIFGNIVDEVAYHEKYPTIYHLRKKLVDSTDKADLRLIYLALAHMIKFRGHFLIEGDLNPDNSDVDKLFIQLVQTYNQLFEENPINASGVDAKAILSARLSKSRRLENLIAQLPGEKKNGLFGNLIALSLGLTPNFKSNFDLAEDAKLQLSKDTYDDDLDNLLAQIGDQYADLFLAAKNLSDAILLSDILRVNTEITKAPLSASMIKRYDEHHQDLTLLKALVRQQLPEKYKEIFFDQSKNGYAGYIDGGASQEEFYKFIKPILEKMDGTEELLVKLNREDLLRKQRTFDNGSIPHQIHLGELHAILRRQEDFYPFLKDNREKIEKILTFRIPYYVGPLARGNSRFAWMTRKSEETITPWNFEEVVDKGASAQSFIERMTNFDKNLPNEKVLPKHSLLYEYFTVYNELTKVKYVTEGMRKPAFLSGEQKKAIVDLLFKTNRKVTVKQLKEDYFKKIECFDSVEISGVEDRFNASLGTYHDLLKIIKDKDFLDNEENEDILEDIVLTLTLFEDREMIEERLKTYAHLFDDKVMKQLKRRRYTGWGRLSRKLINGIRDKQSGKTILDFLKSDGFANRNFMQLIHDDSLTFKEDIQKAQVSGQGDSLHEHIANLAGSPAIKKGILQTVKVVDELVKVMGRHKPENIVIEMARENQTTQKGQKNSRERMKRIEEGIKELGSQILKEHPVENTQLQNEKLYLYYLQNGRDMYVDQELDINRLSDYDVDHIVPQSFLKDDSIDNKVLTRSDKARGKSDNVPSEEVVKKMKNYWRQLLNAKLITQRKFDNLTKAERGGLSELDKAGFIKRQLVETRQITKHVAQILDSRMNTKYDENDKLIREVKVITLKSKLVSDFRKDFQFYKVREINNYHHAHDAYLNAVVGTALIKKYPKLESEFVYGDYKVYDVRKMIAKSEQEIGKATAKYFFYSNIMNFFKTEITLANGEIRKRPLIETNGETGEIVWDKGRDFATVRKVLSMPQVNIVKKTEVQTGGFSKESILPKRNSDKLIARKKDWDPKKYGGFDSPTVAYSVLVVAKVEKGKSKKLKSVKELLGITIMERSSFEKNPIDFLEAKGYKEVKKDLIIKLPKYSLFELENGRKRMLASAGELQKGNELALPSKYVNFLYLASHYEKLKGSPEDNEQKQLFVEQHKHYLDEIIEQISEFSKRVILADANLDKVLSAYNKHRDKPIREQAENIIHLFTLTNLGAPAAFKYFDTTIDRKRYTSTKEVLDATLIHQSITGLYETRIDLSQLGGDGGAEAAAKEAAAKEAAAKEAAAKALEAEAAAKEAAAKEAAAKEAAAKAGGIPWLMKKPLQLTTLVPLQEYEERLLKQTMLTGSYKEKLQSLFLKYDALWQHWENQVGHRRIKPHHIATGTVNPRPQKQYPINPKAKASIQTVINDLLKQGVLIQQNSIMNTPVYPVPKPDGKWRMVLDYREVNKTIPLIAAQNQHSAGILSSIFRGKYKTTLDLSNGFWAHSITPESYWLTAFTWLGQQYCWTRLPQGFLNSPALFNADVVDLLKEVPNVQVYVDDIYISHDDPREHLEQLEKVFSLLLNAGYVVSLKKSEIAQHEVEFLGFNITKEGRGLTETFKQKLLNITPPRDLKQLQSILGKLNFARNFIPNFSELVKPLYNIIATAPGKYITWTTDNSQQLQNIISMLNSAENLEERNPEVRLIMKVNTSPSAGYIRFYNEFAKRPIMYLNYVYTKAEVKFTNTEKLLTTIHKGLIKALDLGMGQEILVYSPIVSMTKIQKTPLPERKALPIRWITWMSYLEDPRIQFHYDKTLPELQQVPTVTDDIIAKIKHPSEFSMVFYTDGSAIKHPNVNKSHNAGMGIAQVQFKPEFTVINTWSIPLGDHTAQLAEVAAVEFACKKALKIDGPVLIVTDSFYVAESVNKELPYWQSNGFFNNKKKPLKHVSKWKSIADCIQLKPDIIIIHEKGHQPTASTFHTEGNNLADKLATQGSYVVNAGKRTADGSEFEKRTADGSEFESPKKKAKVE

SEQ ID NO: 4542-6000 - skipped (1459 entries)

SEQ ID NO: 6001 - protein, 2090 aa, synthetic construct
MPAAKRVKLDGGDKKYSIGLDIGTNSVGWAVITDEYKVPSKKFKVLGNTDRHSIKKNLIGALLFDSGETAEATRLKRTARRRYTRRKNRICYLQEIFSNEMAKVDDSFFHRLEESFLVEEDKKHERHPIFGNIVDEVAYHEKYPTIYHLRKKLVDSTDKADLRLIYLALAHMIKFRGHFLIEGDLNPDNSDVDKLFIQLVQTYNQLFEENPINASGVDAKAILSARLSKSRRLENLIAQLPGEKKNGLFGNLIALSLGLTPNFKSNFDLAEDAKLQLSKDTYDDDLDNLLAQIGDQYADLFLAAKNLSDAILLSDILRVNTEITKAPLSASMIKRYDEHHQDLTLLKALVRQQLPEKYKEIFFDQSKNGYAGYIDGGASQEEFYKFIKPILEKMDGTEELLVKLNREDLLRKQRTFDNGSIPHQIHLGELHAILRRQEDFYPFLKDNREKIEKILTFRIPYYVGPLARGNSRFAWMTRKSEETITPWNFEEVVDKGASAQSFIERMTNFDKNLPNEKVLPKHSLLYEYFTVYNELTKVKYVTEGMRKPAFLSGEQKKAIVDLLFKTNRKVTVKQLKEDYFKKIECFDSVEISGVEDRFNASLGTYHDLLKIIKDKDFLDNEENEDILEDIVLTLTLFEDREMIEERLKTYAHLFDDKVMKQLKRRRYTGWGRLSRKLINGIRDKQSGKTILDFLKSDGFANRNFMQLIHDDSLTFKEDIQKAQVSGQGDSLHEHIANLAGSPAIKKGILQTVKVVDELVKVMGRHKPENIVIEMARENQTTQKGQKNSRERMKRIEEGIKELGSQILKEHPVENTQLQNEKLYLYYLQNGRDMYVDQELDINRLSDYDVDHIVPQSFLKDDSIDNKVLTRSDKARGKSDNVPSEEVVKKMKNYWRQLLNAKLITQRKFDNLTKAERGGLSELDKAGFIKRQLVETRQITKHVAQILDSRMNTKYDENDKLIREVKVITLKSKLVSDFRKDFQFYKVREINNYHHAHDAYLNAVVGTALIKKYPKLESEFVYGDYKVYDVRKMIAKSEQEIGKATAKYFFYSNIMNFFKTEITLANGEIRKRPLIETNGETGEIVWDKGRDFATVRKVLSMPQVNIVKKTEVQTGGFSKESILPKRNSDKLIARKKDWDPKKYGGFDSPTVAYSVLVVAKVEKGKSKKLKSVKELLGITIMERSSFEKNPIDFLEAKGYKEVKKDLIIKLPKYSLFELENGRKRMLASAGELQKGNELALPSKYVNFLYLASHYEKLKGSPEDNEQKQLFVEQHKHYLDEIIEQISEFSKRVILADANLDKVLSAYNKHRDKPIREQAENIIHLFTLTNLGAPAAFKYFDTTIDRKRYTSTKEVLDATLIHQSITGLYETRIDLSQLGGDGGGGSGGTAPLEEEYRLFLEAPIQNVTLLEQWKREIPKVWAEINPPGLASTQAPIHVQLLSTALPVRVRQYPITLEAKRSLRETIRKFRAAGILRPVHSPWNTPLLPVRKSGTSEYRMVQDLREVNKRVETIHPTVPNPYTLLSLLPPDRIWYSVLDLKDAFFCIPLAPESQLIFAFEWADAEEGESGQLTWTRLPQGFKNSPTLFNEALNRDLQGFRLDHPSVSLLQYVDDLLIAADTQAACLSATRDLLMTLAELGYRVSGKKAQLCQEEVTYLGFKIHKGSRSLSNSRTQAILQIPVPKTKRQVREFLGKIGYCRLFIPGFAELAQPLYAATRPGNDPLVWGEKEEEAFQSLKLALTQPPALALPSLDKPFQLFVEETSGAAKGVLTQALGPWKRPVAYLSKRLDPVAAGWPRCLRAIAAAALLTREASKLTFGQDIEITSSHNLESLLRSPPDKWLTNARITQYQVLLLDPPRVRFKQTAALNPATLLPETDDTLPIHHCLDTLDSLTSTRPDLTDQPLAQAEATLFTDGSSYIRDGKRYAGAAVVTLDSVIWAEPLPIGTSAQKAELIALTKALEWSKDKSVNIYTDSRYAFATLHVHGMIYRERGWLTAGGKAIKNAPEILALLTAVWLPKRVAVMHCKGHQKDDAPTSTGNRRADEVAREVAIRPLSTQATISAGKRTADGSEFEKRTADGSEFESPKKKAKVE

SEQ ID NO: 6002 - protein, 2094 aa, synthetic construct
MPAAKRVKLDGGDKKYSIGLDIGTNSVGWAVITDEYKVPSKKFKVLGNTDRHSIKKNLIGALLFDSGETAEATRLKRTARRRYTRRKNRICYLQEIFSNEMAKVDDSFFHRLEESFLVEEDKKHERHPIFGNIVDEVAYHEKYPTIYHLRKKLVDSTDKADLRLIYLALAHMIKFRGHFLIEGDLNPDNSDVDKLFIQLVQTYNQLFEENPINASGVDAKAILSARLSKSRRLENLIAQLPGEKKNGLFGNLIALSLGLTPNFKSNFDLAEDAKLQLSKDTYDDDLDNLLAQIGDQYADLFLAAKNLSDAILLSDILRVNTEITKAPLSASMIKRYDEHHQDLTLLKALVRQQLPEKYKEIFFDQSKNGYAGYIDGGASQEEFYKFIKPILEKMDGTEELLVKLNREDLLRKQRTFDNGSIPHQIHLGELHAILRRQEDFYPFLKDNREKIEKILTFRIPYYVGPLARGNSRFAWMTRKSEETITPWNFEEVVDKGASAQSFIERMTNFDKNLPNEKVLPKHSLLYEYFTVYNELTKVKYVTEGMRKPAFLSGEQKKAIVDLLFKTNRKVTVKQLKEDYFKKIECFDSVEISGVEDRFNASLGTYHDLLKIIKDKDFLDNEENEDILEDIVLTLTLFEDREMIEERLKTYAHLFDDKVMKQLKRRRYTGWGRLSRKLINGIRDKQSGKTILDFLKSDGFANRNFMQLIHDDSLTFKEDIQKAQVSGQGDSLHEHIANLAGSPAIKKGILQTVKVVDELVKVMGRHKPENIVIEMARENQTTQKGQKNSRERMKRIEEGIKELGSQILKEHPVENTQLQNEKLYLYYLQNGRDMYVDQELDINRLSDYDVDHIVPQSFLKDDSIDNKVLTRSDKARGKSDNVPSEEVVKKMKNYWRQLLNAKLITQRKFDNLTKAERGGLSELDKAGFIKRQLVETRQITKHVAQILDSRMNTKYDENDKLIREVKVITLKSKLVSDFRKDFQFYKVREINNYHHAHDAYLNAVVGTALIKKYPKLESEFVYGDYKVYDVRKMIAKSEQEIGKATAKYFFYSNIMNFFKTEITLANGEIRKRPLIETNGETGEIVWDKGRDFATVRKVLSMPQVNIVKKTEVQTGGFSKESILPKRNSDKLIARKKDWDPKKYGGFDSPTVAYSVLVVAKVEKGKSKKLKSVKELLGITIMERSSFEKNPIDFLEAKGYKEVKKDLIIKLPKYSLFELENGRKRMLASAGELQKGNELALPSKYVNFLYLASHYEKLKGSPEDNEQKQLFVEQHKHYLDEIIEQISEFSKRVILADANLDKVLSAYNKHRDKPIREQAENIIHLFTLTNLGAPAAFKYFDTTIDRKRYTSTKEVLDATLIHQSITGLYETRIDLSQLGGDGGGGSGGTVSLQDEHRLFDIPVTTSLPDVWLQDFPQAWAETGGLGRAKCQAPIIIDLKPTAVPVSIKQYPMSLEAHMGIRQHIIKFLELGVLRPCRSPWNTPLLPVKKPGTQDYRPVQDLREINKRTVDIHPTVPNPYNLLSTLKPDYSWYTVLDLKDAFFCLPLAPQSQELFAFEWKDPERGISGQLTWTRLPQGFKNSPTLFDEALHRDLTDFRTQHPEVTLLQYVDDLLLAAPTKKACTQGTRHLLQELGEKGYRASAKKAQICQTKVTYLGYILSEGKRWLTPGRIETVARIPPPRNPREVREFLGTAGFCRLWIPGFAELAAPLYALTKESTPFTWQTEHQLAFEALKKALLSAPALGLPDTSKPFTLFLDERQGIAKGVLTQKLGPWKRPVAYLSKKLDPVAAGWPPCLRIMAATAMLVKDSAKLTLGQPLTVITPHTLEAIVRQPPDRWITNARLTHYQALLLDTDRVQFGPPVTLNPATLLPVPENQPSPHDCRQVLAETHGTREDLKDQELPDADHTWYTDGSSYLDSGTRRAGAAVVDGHNTIWAQSLPPGTSAQKAELIALTKALELSKGKKANIYTDSRYAFATAHTHGSIYERRGLLTSEGKEIKNKAEIIALLKALFLPQEVAIIHCPGHQKGQDPVAVGNRQADRVARQAAMAEVLTLATEPDNTSHITAGKRTADGSEFEKRTADGSEFESPKKKAKVE

SEQ ID NO: 6003 - protein, 2079 aa, synthetic construct
MPAAKRVKLDGGDKKYSIGLDIGTNSVGWAVITDEYKVPSKKFKVLGNTDRHSIKKNLIGALLFDSGETAEATRLKRTARRRYTRRKNRICYLQEIFSNEMAKVDDSFFHRLEESFLVEEDKKHERHPIFGNIVDEVAYHEKYPTIYHLRKKLVDSTDKADLRLIYLALAHMIKFRGHFLIEGDLNPDNSDVDKLFIQLVQTYNQLFEENPINASGVDAKAILSARLSKSRRLENLIAQLPGEKKNGLFGNLIALSLGLTPNFKSNFDLAEDAKLQLSKDTYDDDLDNLLAQIGDQYADLFLAAKNLSDAILLSDILRVNTEITKAPLSASMIKRYDEHHQDLTLLKALVRQQLPEKYKEIFFDQSKNGYAGYIDGGASQEEFYKFIKPILEKMDGTEELLVKLNREDLLRKQRTFDNGSIPHQIHLGELHAILRRQEDFYPFLKDNREKIEKILTFRIPYYVGPLARGNSRFAWMTRKSEETITPWNFEEVVDKGASAQSFIERMTNFDKNLPNEKVLPKHSLLYEYFTVYNELTKVKYVTEGMRKPAFLSGEQKKAIVDLLFKTNRKVTVKQLKEDYFKKIECFDSVEISGVEDRFNASLGTYHDLLKIIKDKDFLDNEENEDILEDIVLTLTLFEDREMIEERLKTYAHLFDDKVMKQLKRRRYTGWGRLSRKLINGIRDKQSGKTILDFLKSDGFANRNFMQLIHDDSLTFKEDIQKAQVSGQGDSLHEHIANLAGSPAIKKGILQTVKVVDELVKVMGRHKPENIVIEMARENQTTQKGQKNSRERMKRIEEGIKELGSQILKEHPVENTQLQNEKLYLYYLQNGRDMYVDQELDINRLSDYDVDHIVPQSFLKDDSIDNKVLTRSDKARGKSDNVPSEEVVKKMKNYWRQLLNAKLITQRKFDNLTKAERGGLSELDKAGFIKRQLVETRQITKHVAQILDSRMNTKYDENDKLIREVKVITLKSKLVSDFRKDFQFYKVREINNYHHAHDAYLNAVVGTALIKKYPKLESEFVYGDYKVYDVRKMIAKSEQEIGKATAKYFFYSNIMNFFKTEITLANGEIRKRPLIETNGETGEIVWDKGRDFATVRKVLSMPQVNIVKKTEVQTGGFSKESILPKRNSDKLIARKKDWDPKKYGGFDSPTVAYSVLVVAKVEKGKSKKLKSVKELLGITIMERSSFEKNPIDFLEAKGYKEVKKDLIIKLPKYSLFELENGRKRMLASAGELQKGNELALPSKYVNFLYLASHYEKLKGSPEDNEQKQLFVEQHKHYLDEIIEQISEFSKRVILADANLDKVLSAYNKHRDKPIREQAENIIHLFTLTNLGAPAAFKYFDTTIDRKRYTSTKEVLDATLIHQSITGLYETRIDLSQLGGDGGGGSGGVPWILKKPLELTIKLDLEEQQGTLLNNSILSKKGKEELKQLFEKYSALWQSWENQVGHRRIRPHKIATGTVKPTPQKQYHINPKAKPDIQIVINDLLKQGVLIQKESTMNTPVYPVPKPNGRWRMVLDYRAVNKVTPLIAVQNQHSYGILGSLFKGRYKTTIDLSNGFWAHPIVPEDYWITAFTWQGKQYCWTVLPQGFLNSPGLFTGDVVDLLQGIPNVEVYVDDVYISHDSEKEHLEYLDILFNRLKEAGYIISLKKSNIANSIVDFLGFQITNEGRGLTDTFKEKLENITAPTTLKQLQSILGLLNFARNFIPDFTELIAPLYALIPKSTKNYVPWQIEHSTTLETLITKLNGAEYLQGRKGDKTLIMKVNASYTTGYIRYYNEGEKKPISYVSIVFSKTELKFTELEKLLTTVHKGLLKALDLSMGQNIHVYSPIVSMQNIQKTPQTAKKALASRWLSWLSYLEDPRIRFFYDPQMPALKDLPAVDTGKDNKKHPSNFQHIFYTDGSAITSPTKEGHLNAGMGIVYFINKDGNLQKQQEWSISLGNHTAQFAEIAAFEFALKKCLPLGGNILVVTDSNYVAKAYNEELDVWASNGFVNNRKKPLKHISKWKSVADLKRLRPDVVVTHEPGHQKLDSSPHAYGNNLADQLATQASFKVHAGKRTADGSEFEKRTADGSEFESPKKKAKVE

SEQ ID NO: 6004 - protein, 2087 aa, synthetic construct
MPAAKRVKLDGGDKKYSIGLDIGTNSVGWAVITDEYKVPSKKFKVLGNTDRHSIKKNLIGALLFDSGETAEATRLKRTARRRYTRRKNRICYLQEIFSNEMAKVDDSFFHRLEESFLVEEDKKHERHPIFGNIVDEVAYHEKYPTIYHLRKKLVDSTDKADLRLIYLALAHMIKFRGHFLIEGDLNPDNSDVDKLFIQLVQTYNQLFEENPINASGVDAKAILSARLSKSRRLENLIAQLPGEKKNGLFGNLIALSLGLTPNFKSNFDLAEDAKLQLSKDTYDDDLDNLLAQIGDQYADLFLAAKNLSDAILLSDILRVNTEITKAPLSASMIKRYDEHHQDLTLLKALVRQQLPEKYKEIFFDQSKNGYAGYIDGGASQEEFYKFIKPILEKMDGTEELLVKLNREDLLRKQRTFDNGSIPHQIHLGELHAILRRQEDFYPFLKDNREKIEKILTFRIPYYVGPLARGNSRFAWMTRKSEETITPWNFEEVVDKGASAQSFIERMTNFDKNLPNEKVLPKHSLLYEYFTVYNELTKVKYVTEGMRKPAFLSGEQKKAIVDLLFKTNRKVTVKQLKEDYFKKIECFDSVEISGVEDRFNASLGTYHDLLKIIKDKDFLDNEENEDILEDIVLTLTLFEDREMIEERLKTYAHLFDDKVMKQLKRRRYTGWGRLSRKLINGIRDKQSGKTILDFLKSDGFANRNFMQLIHDDSLTFKEDIQKAQVSGQGDSLHEHIANLAGSPAIKKGILQTVKVVDELVKVMGRHKPENIVIEMARENQTTQKGQKNSRERMKRIEEGIKELGSQILKEHPVENTQLQNEKLYLYYLQNGRDMYVDQELDINRLSDYDVDHIVPQSFLKDDSIDNKVLTRSDKARGKSDNVPSEEVVKKMKNYWRQLLNAKLITQRKFDNLTKAERGGLSELDKAGFIKRQLVETRQITKHVAQILDSRMNTKYDENDKLIREVKVITLKSKLVSDFRKDFQFYKVREINNYHHAHDAYLNAVVGTALIKKYPKLESEFVYGDYKVYDVRKMIAKSEQEIGKATAKYFFYSNIMNFFKTEITLANGEIRKRPLIETNGETGEIVWDKGRDFATVRKVLSMPQVNIVKKTEVQTGGFSKESILPKRNSDKLIARKKDWDPKKYGGFDSPTVAYSVLVVAKVEKGKSKKLKSVKELLGITIMERSSFEKNPIDFLEAKGYKEVKKDLIIKLPKYSLFELENGRKRMLASAGELQKGNELALPSKYVNFLYLASHYEKLKGSPEDNEQKQLFVEQHKHYLDEIIEQISEFSKRVILADANLDKVLSAYNKHRDKPIREQAENIIHLFTLTNLGAPAAFKYFDTTIDRKRYTSTKEVLDATLIHQSITGLYETRIDLSQLGGDGGGGSGGTLQLEEEYRLFEPESTQKQEMDIWLKNFPQAWAETGGMGTAHCQAPVLIQLKATATPISIRQYPMPHEAYQGIKPHIRRMLDQGILKPCQSPWNTPLLPVKKPGTEDYRPVQDLREVNKRVEDIHPTVPNPYNLLSTLPPSHPWYTVLDLKDAFFCLRLHSESQLLFAFEWRDPEIGLSGQLTWTRLPQGFKNSPTLFNEALHSDLADFRVRYPALVLLQYVDDLLLAAATRTECLEGTKALLETLGNKGYRASAKKAQICLQEVTYLGYSLKDGQRWLTKARKEAILSIPVPKNSRQVREFLGKAGYCRLFIPGFAELAAPLYPLTRPGTLFQWGTEQQLAFEDIKKALLSSPALGLPDITKPFELFIDENSGFAKGVLVQKLGPWKRPVAYLSKKLDTVASGWPPCLRMVAAIAILVKDAGKLTLGQPLTILTSHPVEALVRQPPNKWLSNARMTHYQAMLLDAERVHFGPTVSLNPATLLPLPSGGNHHDCLQILAETHGTRPDLTDQPLPDADLTWYTDGSSFIRNGEREAGAAVTTESEVIWAAPLPPGTSAQRAELIALTQALKMAEGKKLTVYTDSRYAFATTHVHGEIYRRRGWLTSEGKEIKNKNEILALLEALFLPKRLSIIHCPGHQKGDSPQAKGNRLADDTAKKAATETHSSLTVLPAGKRTADGSEFEKRTADGSEFESPKKKAKVE

SEQ ID NO: 6005 - protein, 2079 aa, synthetic construct
MPAAKRVKLDGGDKKYSIGLDIGTNSVGWAVITDEYKVPSKKFKVLGNTDRHSIKKNLIGALLFDSGETAEATRLKRTARRRYTRRKNRICYLQEIFSNEMAKVDDSFFHRLEESFLVEEDKKHERHPIFGNIVDEVAYHEKYPTIYHLRKKLVDSTDKADLRLIYLALAHMIKFRGHFLIEGDLNPDNSDVDKLFIQLVQTYNQLFEENPINASGVDAKAILSARLSKSRRLENLIAQLPGEKKNGLFGNLIALSLGLTPNFKSNFDLAEDAKLQLSKDTYDDDLDNLLAQIGDQYADLFLAAKNLSDAILLSDILRVNTEITKAPLSASMIKRYDEHHQDLTLLKALVRQQLPEKYKEIFFDQSKNGYAGYIDGGASQEEFYKFIKPILEKMDGTEELLVKLNREDLLRKQRTFDNGSIPHQIHLGELHAILRRQEDFYPFLKDNREKIEKILTFRIPYYVGPLARGNSRFAWMTRKSEETITPWNFEEVVDKGASAQSFIERMTNFDKNLPNEKVLPKHSLLYEYFTVYNELTKVKYVTEGMRKPAFLSGEQKKAIVDLLFKTNRKVTVKQLKEDYFKKIECFDSVEISGVEDRFNASLGTYHDLLKIIKDKDFLDNEENEDILEDIVLTLTLFEDREMIEERLKTYAHLFDDKVMKQLKRRRYTGWGRLSRKLINGIRDKQSGKTILDFLKSDGFANRNFMQLIHDDSLTFKEDIQKAQVSGQGDSLHEHIANLAGSPAIKKGILQTVKVVDELVKVMGRHKPENIVIEMARENQTTQKGQKNSRERMKRIEEGIKELGSQILKEHPVENTQLQNEKLYLYYLQNGRDMYVDQELDINRLSDYDVDHIVPQSFLKDDSIDNKVLTRSDKARGKSDNVPSEEVVKKMKNYWRQLLNAKLITQRKFDNLTKAERGGLSELDKAGFIKRQLVETRQITKHVAQILDSRMNTKYDENDKLIREVKVITLKSKLVSDFRKDFQFYKVREINNYHHAHDAYLNAVVGTALIKKYPKLESEFVYGDYKVYDVRKMIAKSEQEIGKATAKYFFYSNIMNFFKTEITLANGEIRKRPLIETNGETGEIVWDKGRDFATVRKVLSMPQVNIVKKTEVQTGGFSKESILPKRNSDKLIARKKDWDPKKYGGFDSPTVAYSVLVVAKVEKGKSKKLKSVKELLGITIMERSSFEKNPIDFLEAKGYKEVKKDLIIKLPKYSLFELENGRKRMLASAGELQKGNELALPSKYVNFLYLASHYEKLKGSPEDNEQKQLFVEQHKHYLDEIIEQISEFSKRVILADANLDKVLSAYNKHRDKPIREQAENIIHLFTLTNLGAPAAFKYFDTTIDRKRYTSTKEVLDATLIHQSITGLYETRIDLSQLGGDGGGGSGGVPWLTQQPLQLTILVPLQEYQEKILSKTALPEDQKQQLKTLFVKYDNLWQHWENQVGHRKIRPHNIATGDYPPRPQKQYPINPKAKPSIQIVIDDLLKQGVLTPQNSTMNTPVYPVPKPDGRWRMVLDYREVNKTIPLTAAQNQHSAGILATIVRQKYKTTLDLANGFWAHPITPESYWLTAFTWQGKQYCWTRLPQGFLNSPALFNADVVDLLKEIPNVQVYVDDIYLSHDDPKEHVQQLEKVFQILLQAGYVVSLKKSEIGQKTVEFLGFNITKEGRGLTDTFKTKLLNITPPKDLKQLQSILGKLNFARNFIPNFAELVQPLYNLIAPAKGKYIEWSEENTKQLNMVIEALNTASNLEERLPEQRLVIKVNTSPSAGYVRYYNETGKKPIMYLNYVFSKAELKFSMLEKLLTTMHKALIKAMDLAMGQEILVYSPIVSMTKIQKTPLPERKALPIRWITWMTYLEDPRIQFHYDKTLPELKHIPDVYTSSQSPVKHPSQYEGVFYTDGSAIKSPDPTKSNNAGMGIVHATYKPEYQVLNQWSIPLGNHTAQMAEIAAVEFACKKALKIPGPVLVITDSFYVAESANKELPYWKSNGFVNNKKKPLKHISKWKSIAECLSMKPDITIQHEKGISLQIPVFILKGNALADKLATQGSYVVNAGKRTADGSEFEKRTADGSEFESPKKKAKVE

SEQ ID NO: 6006 - protein, 2210 aa, synthetic construct
MPAAKRVKLDGGDKKYSIGLDIGTNSVGWAVITDEYKVPSKKFKVLGNTDRHSIKKNLIGALLFDSGETAEATRLKRTARRRYTRRKNRICYLQEIFSNEMAKVDDSFFHRLEESFLVEEDKKHERHPIFGNIVDEVAYHEKYPTIYHLRKKLVDSTDKADLRLIYLALAHMIKFRGHFLIEGDLNPDNSDVDKLFIQLVQTYNQLFEENPINASGVDAKAILSARLSKSRRLENLIAQLPGEKKNGLFGNLIALSLGLTPNFKSNFDLAEDAKLQLSKDTYDDDLDNLLAQIGDQYADLFLAAKNLSDAILLSDILRVNTEITKAPLSASMIKRYDEHHQDLTLLKALVRQQLPEKYKEIFFDQSKNGYAGYIDGGASQEEFYKFIKPILEKMDGTEELLVKLNREDLLRKQRTFDNGSIPHQIHLGELHAILRRQEDFYPFLKDNREKIEKILTFRIPYYVGPLARGNSRFAWMTRKSEETITPWNFEEVVDKGASAQSFIERMTNFDKNLPNEKVLPKHSLLYEYFTVYNELTKVKYVTEGMRKPAFLSGEQKKAIVDLLFKTNRKVTVKQLKEDYFKKIECFDSVEISGVEDRFNASLGTYHDLLKIIKDKDFLDNEENEDILEDIVLTLTLFEDREMIEERLKTYAHLFDDKVMKQLKRRRYTGWGRLSRKLINGIRDKQSGKTILDFLKSDGFANRNFMQLIHDDSLTFKEDIQKAQVSGQGDSLHEHIANLAGSPAIKKGILQTVKVVDELVKVMGRHKPENIVIEMARENQTTQKGQKNSRERMKRIEEGIKELGSQILKEHPVENTQLQNEKLYLYYLQNGRDMYVDQELDINRLSDYDVDHIVPQSFLKDDSIDNKVLTRSDKARGKSDNVPSEEVVKKMKNYWRQLLNAKLITQRKFDNLTKAERGGLSELDKAGFIKRQLVETRQITKHVAQILDSRMNTKYDENDKLIREVKVITLKSKLVSDFRKDFQFYKVREINNYHHAHDAYLNAVVGTALIKKYPKLESEFVYGDYKVYDVRKMIAKSEQEIGKATAKYFFYSNIMNFFKTEITLANGEIRKRPLIETNGETGEIVWDKGRDFATVRKVLSMPQVNIVKKTEVQTGGFSKESILPKRNSDKLIARKKDWDPKKYGGFDSPTVAYSVLVVAKVEKGKSKKLKSVKELLGITIMERSSFEKNPIDFLEAKGYKEVKKDLIIKLPKYSLFELENGRKRMLASAGELQKGNELALPSKYVNFLYLASHYEKLKGSPEDNEQKQLFVEQHKHYLDEIIEQISEFSKRVILADANLDKVLSAYNKHRDKPIREQAENIIHLFTLTNLGAPAAFKYFDTTIDRKRYTSTKEVLDATLIHQSITGLYETRIDLSQLGGDGGGGSGGTLGDQGSRGSDPLPEPRVTLTVEGIPTEFLVNTGAEHSVLTKPMGKMGSKRTVVAGATGSKVYPWTTKRLLKIGQKQVTHSFLVIPECPAPLLGRDLLTKLKAQIQFSTEGPQVTWEDRPAMCLVLNLEEEYRLHEKPVPPSIDPSWLQLFPMVWAEKAGMGLANQVPPVVVELKSDASPVAVRQYPMSKEAREGIRPHIQRFLDLGILVPCQSPWNTPLLPVKKPGTNDYRPVQDLREVNKRVQDIHPTVPNPYNLLSSLPPSHTWYSVLDLKDAFFCLKLHPNSQPLFAFEWRDPEKGNTGQLTWTRLPQGFKNSPTLFDEALHRDLASFRALNPQVVMLQYVDDLLVAAPTYRDCKEGTRRLLQELSKLGYRVSAKKAQLCREEVTYLGYLLKGGKRWLTPARKATVMKIPTPTTPRQVREFLGTAGFCRLWIPGFASLAAPLYPLTREKVPFTWTEAHQEAFGRIKEALLSAPALALPDLTKPFALYVDEKEGVARGVLTQTLGPWRRPVAYLSKKLDPVASGWPTCLKAIAAVALLLKDADKLTLGQNVLVIAPHNLESIVRQPPDRWMTNARMTHYQSLLLNERVSFAPPAILNPATLLPVESDDTPIHICSEILAEETGTRPDLRDQPLPGVPAWYTDGSSFIMDGRRQAGAAIVDNKRTVWASNLPEGTSAQKAELIALTQALRLAEGKSINIYTDSRYAFATAHVHGAIYKQRGLLTSAGKDIKNKEEILALLEAIHLPKRVAIIHCPGHQRGTDPVATGNRKADEAAKQAAQSTRILTETTKNAGKRTADGSEFEKRTADGSEFESPKKKAKVE

SEQ ID NO: 6007 - protein, 2210 aa, synthetic construct
MPAAKRVKLDGGDKKYSIGLDIGTNSVGWAVITDEYKVPSKKFKVLGNTDRHSIKKNLIGALLFDSGETAEATRLKRTARRRYTRRKNRICYLQEIFSNEMAKVDDSFFHRLEESFLVEEDKKHERHPIFGNIVDEVAYHEKYPTIYHLRKKLVDSTDKADLRLIYLALAHMIKFRGHFLIEGDLNPDNSDVDKLFIQLVQTYNQLFEENPINASGVDAKAILSARLSKSRRLENLIAQLPGEKKNGLFGNLIALSLGLTPNFKSNFDLAEDAKLQLSKDTYDDDLDNLLAQIGDQYADLFLAAKNLSDAILLSDILRVNTEITKAPLSASMIKRYDEHHQDLTLLKALVRQQLPEKYKEIFFDQSKNGYAGYIDGGASQEEFYKFIKPILEKMDGTEELLVKLNREDLLRKQRTFDNGSIPHQIHLGELHAILRRQEDFYPFLKDNREKIEKILTFRIPYYVGPLARGNSRFAWMTRKSEETITPWNFEEVVDKGASAQSFIERMTNFDKNLPNEKVLPKHSLLYEYFTVYNELTKVKYVTEGMRKPAFLSGEQKKAIVDLLFKTNRKVTVKQLKEDYFKKIECFDSVEISGVEDRFNASLGTYHDLLKIIKDKDFLDNEENEDILEDIVLTLTLFEDREMIEERLKTYAHLFDDKVMKQLKRRRYTGWGRLSRKLINGIRDKQSGKTILDFLKSDGFANRNFMQLIHDDSLTFKEDIQKAQVSGQGDSLHEHIANLAGSPAIKKGILQTVKVVDELVKVMGRHKPENIVIEMARENQTTQKGQKNSRERMKRIEEGIKELGSQILKEHPVENTQLQNEKLYLYYLQNGRDMYVDQELDINRLSDYDVDHIVPQSFLKDDSIDNKVLTRSDKARGKSDNVPSEEVVKKMKNYWRQLLNAKLITQRKFDNLTKAERGGLSELDKAGFIKRQLVETRQITKHVAQILDSRMNTKYDENDKLIREVKVITLKSKLVSDFRKDFQFYKVREINNYHHAHDAYLNAVVGTALIKKYPKLESEFVYGDYKVYDVRKMIAKSEQEIGKATAKYFFYSNIMNFFKTEITLANGEIRKRPLIETNGETGEIVWDKGRDFATVRKVLSMPQVNIVKKTEVQTGGFSKESILPKRNSDKLIARKKDWDPKKYGGFDSPTVAYSVLVVAKVEKGKSKKLKSVKELLGITIMERSSFEKNPIDFLEAKGYKEVKKDLIIKLPKYSLFELENGRKRMLASAGELQKGNELALPSKYVNFLYLASHYEKLKGSPEDNEQKQLFVEQHKHYLDEIIEQISEFSKRVILADANLDKVLSAYNKHRDKPIREQAENIIHLFTLTNLGAPAAFKYFDTTIDRKRYTSTKEVLDATLIHQSITGLYETRIDLSQLGGDGGGGSGGTLGDQGSRGSDPLPEPRVTLTVEGIPTEFLVNTGAEHSVLTKPMGKMGSKRTVVAGATGSKVYPWTTKRLLKIGQKQVTHSFLVIPECPAPLLGRDLLTKLKAQIQFSTEGPQVTWEDRPAMCLVLNLEEEYRLHEKPVPPSIDPSWLQLFPMVWAEKAGMGLANQVPPVVVELKSDASPVAVRQYPMSKEAREGIRPHIQRFLDLGILVPCQSPWNTPLLPVKKPGTNDYRPVQDLREVNKRVQDIHPTVPNPYNLLSSLPPSHTWYSVLDLKDAFFCLKLHPNSQPLFAFEWRDPEKGNTGQLTWTRLPQGFKNSPTLFNEALHRDLASFRALNPQVVMLQYVDDLLVAAPTYRDCKEGTRRLLQELSKLGYRVSAKKAQLCREEVTYLGYLLKGGKRWLTPARKATVMKIPTPTTPRQVREFLGTAGFCRLWIPGFASLAAPLYPLTRPKVPFTWTEAHQEAFGRIKEALLSAPALALPDLTKPFALYVDEKEGVARGVLTQTLGPWRRPVAYLSKKLDPVASGWPTCLKAIAAVALLLKDADKLTLGQNVLVIAPHNLESIVRQPPDRWMTNARMTHYQSLLLNERVSFAPPAILNPATLLPVESDDTPIHICSEILAEETGTRPDLRDQPLPGVPAWYTDGSSFIMDGRRQAGAAIVDNKRTVWASNLPEGTSAQKAELIALTQALRLAEGKSINIYTDSRYAFATAHVHGAIYKQRGWLTSAGKDIKNKEEILALLEAIHLPKRVAIIHCPGHQRGTDPVATGNRKADEAAKQAAQSTRILTETTKNAGKRTADGSEFEKRTADGSEFESPKKKAKVE

SEQ ID NO: 6008 - protein, 2088 aa, synthetic construct
MPAAKRVKLDGGDKKYSIGLDIGTNSVGWAVITDEYKVPSKKFKVLGNTDRHSIKKNLIGALLFDSGETAEATRLKRTARRRYTRRKNRICYLQEIFSNEMAKVDDSFFHRLEESFLVEEDKKHERHPIFGNIVDEVAYHEKYPTIYHLRKKLVDSTDKADLRLIYLALAHMIKFRGHFLIEGDLNPDNSDVDKLFIQLVQTYNQLFEENPINASGVDAKAILSARLSKSRRLENLIAQLPGEKKNGLFGNLIALSLGLTPNFKSNFDLAEDAKLQLSKDTYDDDLDNLLAQIGDQYADLFLAAKNLSDAILLSDILRVNTEITKAPLSASMIKRYDEHHQDLTLLKALVRQQLPEKYKEIFFDQSKNGYAGYIDGGASQEEFYKFIKPILEKMDGTEELLVKLNREDLLRKQRTFDNGSIPHQIHLGELHAILRRQEDFYPFLKDNREKIEKILTFRIPYYVGPLARGNSRFAWMTRKSEETITPWNFEEVVDKGASAQSFIERMTNFDKNLPNEKVLPKHSLLYEYFTVYNELTKVKYVTEGMRKPAFLSGEQKKAIVDLLFKTNRKVTVKQLKEDYFKKIECFDSVEISGVEDRFNASLGTYHDLLKIIKDKDFLDNEENEDILEDIVLTLTLFEDREMIEERLKTYAHLFDDKVMKQLKRRRYTGWGRLSRKLINGIRDKQSGKTILDFLKSDGFANRNFMQLIHDDSLTFKEDIQKAQVSGQGDSLHEHIANLAGSPAIKKGILQTVKVVDELVKVMGRHKPENIVIEMARENQTTQKGQKNSRERMKRIEEGIKELGSQILKEHPVENTQLQNEKLYLYYLQNGRDMYVDQELDINRLSDYDVDHIVPQSFLKDDSIDNKVLTRSDKARGKSDNVPSEEVVKKMKNYWRQLLNAKLITQRKFDNLTKAERGGLSELDKAGFIKRQLVETRQITKHVAQILDSRMNTKYDENDKLIREVKVITLKSKLVSDFRKDFQFYKVREINNYHHAHDAYLNAVVGTALIKKYPKLESEFVYGDYKVYDVRKMIAKSEQEIGKATAKYFFYSNIMNFFKTEITLANGEIRKRPLIETNGETGEIVWDKGRDFATVRKVLSMPQVNIVKKTEVQTGGFSKESILPKRNSDKLIARKKDWDPKKYGGFDSPTVAYSVLVVAKVEKGKSKKLKSVKELLGITIMERSSFEKNPIDFLEAKGYKEVKKDLIIKLPKYSLFELENGRKRMLASAGELQKGNELALPSKYVNFLYLASHYEKLKGSPEDNEQKQLFVEQHKHYLDEIIEQISEFSKRVILADANLDKVLSAYNKHRDKPIREQAENIIHLFTLTNLGAPAAFKYFDTTIDRKRYTSTKEVLDATLIHQSITGLYETRIDLSQLGGDGGGGSGGTLNLEDEYRLYETSAEPEVSPGSTWLSDFPQAWAETGGMGLAVRQAPLIIPLKATSTPVSIKQYPMSQEAKLGIKPHIQRLLDQGILVPCQSPWNTPLLPVKKPGTNDYRPVQDLREVNKRVEDIHPTVPNPYNLLSGLPPSHRWYTVLDLKDAFFCLRLHPTSQPLFAFEWRDPGMGISGQLTWTRLPQGFKNSPTLFNEALHRDLADFRIQHPDLILLQYVDDILLAATSELDCQQGTRALLLTLGNLGYRASAKKAQLCQKQVKYLGYLLKEGQRWLTEARKETVMGQPTPKTPRQLREFLGKAGFCRLFIPGFAEMAAPLYPLTKPGTLFNWGPDQQKAYQEIKQALLTAPALGLPDLTKPFELFVDEKQGYAKGVLTQKLGPWRRPVAYLSKKLDPVAAGWPPCLRMVAAIAVLRKDAGKLTMGQPLVILAPHAVEALVKQPPDRWLSNARMTHYQAMLLDTDRVQFGPVVALNPATLLPLPEEGAPHDCLEILAETHGTRPDLTDQPIPDADHTWYTDGSSFLQEGQRKAGAAVTTETEVIWARALPAGTSAQRAELIALTQALKMAEGKRLNVYTDSRYAFATAHIHGEIYRRRGWLTSEGREIKNKSEILALLKALFLPKRLSIIHCLGHQKGDSAEARGNRLADQAAREAAIKTPPDTSTLLAGKRTADGSEFEKRTADGSEFESPKKKAKVE

SEQ ID NO: 6009 - protein, 2088 aa, synthetic construct
MPAAKRVKLDGGDKKYSIGLDIGTNSVGWAVITDEYKVPSKKFKVLGNTDRHSIKKNLIGALLFDSGETAEATRLKRTARRRYTRRKNRICYLQEIFSNEMAKVDDSFFHRLEESFLVEEDKKHERHPIFGNIVDEVAYHEKYPTIYHLRKKLVDSTDKADLRLIYLALAHMIKFRGHFLIEGDLNPDNSDVDKLFIQLVQTYNQLFEENPINASGVDAKAILSARLSKSRRLENLIAQLPGEKKNGLFGNLIALSLGLTPNFKSNFDLAEDAKLQLSKDTYDDDLDNLLAQIGDQYADLFLAAKNLSDAILLSDILRVNTEITKAPLSASMIKRYDEHHQDLTLLKALVRQQLPEKYKEIFFDQSKNGYAGYIDGGASQEEFYKFIKPILEKMDGTEELLVKLNREDLLRKQRTFDNGSIPHQIHLGELHAILRRQEDFYPFLKDNREKIEKILTFRIPYYVGPLARGNSRFAWMTRKSEETITPWNFEEVVDKGASAQSFIERMTNFDKNLPNEKVLPKHSLLYEYFTVYNELTKVKYVTEGMRKPAFLSGEQKKAIVDLLFKTNRKVTVKQLKEDYFKKIECFDSVEISGVEDRFNASLGTYHDLLKIIKDKDFLDNEENEDILEDIVLTLTLFEDREMIEERLKTYAHLFDDKVMKQLKRRRYTGWGRLSRKLINGIRDKQSGKTILDFLKSDGFANRNFMQLIHDDSLTFKEDIQKAQVSGQGDSLHEHIANLAGSPAIKKGILQTVKVVDELVKVMGRHKPENIVIEMARENQTTQKGQKNSRERMKRIEEGIKELGSQILKEHPVENTQLQNEKLYLYYLQNGRDMYVDQELDINRLSDYDVDHIVPQSFLKDDSIDNKVLTRSDKARGKSDNVPSEEVVKKMKNYWRQLLNAKLITQRKFDNLTKAERGGLSELDKAGFIKRQLVETRQITKHVAQILDSRMNTKYDENDKLIREVKVITLKSKLVSDFRKDFQFYKVREINNYHHAHDAYLNAVVGTALIKKYPKLESEFVYGDYKVYDVRKMIAKSEQEIGKATAKYFFYSNIMNFFKTEITLANGEIRKRPLIETNGETGEIVWDKGRDFATVRKVLSMPQVNIVKKTEVQTGGFSKESILPKRNSDKLIARKKDWDPKKYGGFDSPTVAYSVLVVAKVEKGKSKKLKSVKELLGITIMERSSFEKNPIDFLEAKGYKEVKKDLIIKLPKYSLFELENGRKRMLASAGELQKGNELALPSKYVNFLYLASHYEKLKGSPEDNEQKQLFVEQHKHYLDEIIEQISEFSKRVILADANLDKVLSAYNKHRDKPIREQAENIIHLFTLTNLGAPAAFKYFDTTIDRKRYTSTKEVLDATLIHQSITGLYETRIDLSQLGGDGGGGSGGTLGIEDEYRLHETSTEPDVSLGSTWLSDFPQAWAETGGMGLAVRQAPLIIPLKATSTPVSIQQYPMSHEARLGIKPHIQRLLDQGILVPCQSPWNTPLLPVKKPGTNDYRPVQDLREVNKRVEDIHPTVPNPYNLLSGLPPSHQWYTVLDLKDAFFCLRLHPTSQPLFAFEWRDPGMGISGQLTWTRLPQGFKNSPTLFNEALHRDLADFRIQHPDLILLQYVDDILLAATSELDCQQGTRALLQTLGDLGYRASAKKAQICQKQVKYLGYLLREGQRWLTEARKETVMGQPVPKTPRQLREFLGTAGFCRLWIPGFAEMAAPLYPLTKPGTLFSWGPDQQKAYQEIKQALLTAPALGLPDLTKPFELFVDEKQGYAKGVLTQKLGPWRRPVAYLSKKLDPVAAGWPPCLRMVAAIAVLTKDAGKLTMGQPLVILAPHAVEALVKQPPDRWLSNARMTHYQAMLLDTDRVQFGPVVALNPATLLPLPEEGAPHDCLEILAETHGTRPDLTDQPIPDADHTWYTDGSSFLQEGQRKAGAAVTTETEVIWAGALPAGTSAQRAELIALTQALKMAEGKRLNVYTDSRYAFATAHIHGEIYRRRGWLTSEGREIKNKSEILALLKALFLPKRLSIIHCLGHQKGDSAEARGNRLADQAAREAAIKTPPDTSTLLAGKRTADGSEFEKRTADGSEFESPKKKAKVE

SEQ ID NO: 6010 - protein, 2088 aa, synthetic construct
MPAAKRVKLDGGDKKYSIGLDIGTNSVGWAVITDEYKVPSKKFKVLGNTDRHSIKKNLIGALLFDSGETAEATRLKRTARRRYTRRKNRICYLQEIFSNEMAKVDDSFFHRLEESFLVEEDKKHERHPIFGNIVDEVAYHEKYPTIYHLRKKLVDSTDKADLRLIYLALAHMIKFRGHFLIEGDLNPDNSDVDKLFIQLVQTYNQLFEENPINASGVDAKAILSARLSKSRRLENLIAQLPGEKKNGLFGNLIALSLGLTPNFKSNFDLAEDAKLQLSKDTYDDDLDNLLAQIGDQYADLFLAAKNLSDAILLSDILRVNTEITKAPLSASMIKRYDEHHQDLTLLKALVRQQLPEKYKEIFFDQSKNGYAGYIDGGASQEEFYKFIKPILEKMDGTEELLVKLNREDLLRKQRTFDNGSIPHQIHLGELHAILRRQEDFYPFLKDNREKIEKILTFRIPYYVGPLARGNSRFAWMTRKSEETITPWNFEEVVDKGASAQSFIERMTNFDKNLPNEKVLPKHSLLYEYFTVYNELTKVKYVTEGMRKPAFLSGEQKKAIVDLLFKTNRKVTVKQLKEDYFKKIECFDSVEISGVEDRFNASLGTYHDLLKIIKDKDFLDNEENEDILEDIVLTLTLFEDREMIEERLKTYAHLFDDKVMKQLKRRRYTGWGRLSRKLINGIRDKQSGKTILDFLKSDGFANRNFMQLIHDDSLTFKEDIQKAQVSGQGDSLHEHIANLAGSPAIKKGILQTVKVVDELVKVMGRHKPENIVIEMARENQTTQKGQKNSRERMKRIEEGIKELGSQILKEHPVENTQLQNEKLYLYYLQNGRDMYVDQELDINRLSDYDVDHIVPQSFLKDDSIDNKVLTRSDKARGKSDNVPSEEVVKKMKNYWRQLLNAKLITQRKFDNLTKAERGGLSELDKAGFIKRQLVETRQITKHVAQILDSRMNTKYDENDKLIREVKVITLKSKLVSDFRKDFQFYKVREINNYHHAHDAYLNAVVGTALIKKYPKLESEFVYGDYKVYDVRKMIAKSEQEIGKATAKYFFYSNIMNFFKTEITLANGEIRKRPLIETNGETGEIVWDKGRDFATVRKVLSMPQVNIVKKTEVQTGGFSKESILPKRNSDKLIARKKDWDPKKYGGFDSPTVAYSVLVVAKVEKGKSKKLKSVKELLGITIMERSSFEKNPIDFLEAKGYKEVKKDLIIKLPKYSLFELENGRKRMLASAGELQKGNELALPSKYVNFLYLASHYEKLKGSPEDNEQKQLFVEQHKHYLDEIIEQISEFSKRVILADANLDKVLSAYNKHRDKPIREQAENIIHLFTLTNLGAPAAFKYFDTTIDRKRYTSTKEVLDATLIHQSITGLYETRIDLSQLGGDGGGGSGGTLNIEDEYRLHETSKEPDVSLGSTWLSDFPQAWAETGGMGLAVRQAPLIIPLKATSTPVSIKQYPMSQEARLGIKPHIQRLLDQGILVPCQSPWNTPLLPVKKPGTNDYRPVQDLREVNKRVEDIHPTVPNPYNLLSGLPPSHQWYTVLDLKDAFFCLRLHPTSQPLFAFEWRDPEMGISGQLTWTRLPQGFKNSPTLFNEALHRDLAGFRIQHPDLILLQYVDDLLLAATSELDCQQGTRALLQTLGDLGYRASAKKAQICQKQVKYLGYLLKEGQRWLTEARKETVMGQPIPKTPRQLREFLGTAGFCRLWIPGFAEMAAPLYPLTKPGTLFNWGPDQQKAFQEIKQALLTAPALGLPDLTKPFELFVDEKQGYAKGVLTQKLGPWRRPVAYLSKKLDPVAAGWPPCLRMVAAIAVLTKDAGKLTMGQPLVILAPHAVEALVKQPPDRWLSNARMTHYQALLLDTDRVQFGPVVALNPATLLPLPEEGLQHDCLDILAEAHGTRSDLMDQPLPDADHTWYTDGSSFLQEGQRKAGAAVTTETEVIWARALPAGTSAQRAELIALTQALKMAEGKKLNVYTDSRYAFATAHIHGEIYRRRGWLTSEGKEIKNKDEILALLKALFLPKRLSIIHCPGHQKGNSAEARGNRMADQAAREVATRETPETSTLLAGKRTADGSEFEKRTADGSEFESPKKKAKVE

SEQ ID NO: 6011 - protein, 2088 aa, synthetic construct
MPAAKRVKLDGGDKKYSIGLDIGTNSVGWAVITDEYKVPSKKFKVLGNTDRHSIKKNLIGALLFDSGETAEATRLKRTARRRYTRRKNRICYLQEIFSNEMAKVDDSFFHRLEESFLVEEDKKHERHPIFGNIVDEVAYHEKYPTIYHLRKKLVDSTDKADLRLIYLALAHMIKFRGHFLIEGDLNPDNSDVDKLFIQLVQTYNQLFEENPINASGVDAKAILSARLSKSRRLENLIAQLPGEKKNGLFGNLIALSLGLTPNFKSNFDLAEDAKLQLSKDTYDDDLDNLLAQIGDQYADLFLAAKNLSDAILLSDILRVNTEITKAPLSASMIKRYDEHHQDLTLLKALVRQQLPEKYKEIFFDQSKNGYAGYIDGGASQEEFYKFIKPILEKMDGTEELLVKLNREDLLRKQRTFDNGSIPHQIHLGELHAILRRQEDFYPFLKDNREKIEKILTFRIPYYVGPLARGNSRFAWMTRKSEETITPWNFEEVVDKGASAQSFIERMTNFDKNLPNEKVLPKHSLLYEYFTVYNELTKVKYVTEGMRKPAFLSGEQKKAIVDLLFKTNRKVTVKQLKEDYFKKIECFDSVEISGVEDRFNASLGTYHDLLKIIKDKDFLDNEENEDILEDIVLTLTLFEDREMIEERLKTYAHLFDDKVMKQLKRRRYTGWGRLSRKLINGIRDKQSGKTILDFLKSDGFANRNFMQLIHDDSLTFKEDIQKAQVSGQGDSLHEHIANLAGSPAIKKGILQTVKVVDELVKVMGRHKPENIVIEMARENQTTQKGQKNSRERMKRIEEGIKELGSQILKEHPVENTQLQNEKLYLYYLQNGRDMYVDQELDINRLSDYDVDHIVPQSFLKDDSIDNKVLTRSDKARGKSDNVPSEEVVKKMKNYWRQLLNAKLITQRKFDNLTKAERGGLSELDKAGFIKRQLVETRQITKHVAQILDSRMNTKYDENDKLIREVKVITLKSKLVSDFRKDFQFYKVREINNYHHAHDAYLNAVVGTALIKKYPKLESEFVYGDYKVYDVRKMIAKSEQEIGKATAKYFFYSNIMNFFKTEITLANGEIRKRPLIETNGETGEIVWDKGRDFATVRKVLSMPQVNIVKKTEVQTGGFSKESILPKRNSDKLIARKKDWDPKKYGGFDSPTVAYSVLVVAKVEKGKSKKLKSVKELLGITIMERSSFEKNPIDFLEAKGYKEVKKDLIIKLPKYSLFELENGRKRMLASAGELQKGNELALPSKYVNFLYLASHYEKLKGSPEDNEQKQLFVEQHKHYLDEIIEQISEFSKRVILADANLDKVLSAYNKHRDKPIREQAENIIHLFTLTNLGAPAAFKYFDTTIDRKRYTSTKEVLDATLIHQSITGLYETRIDLSQLGGDGGGGSGGTLNIEDEYRLHETSKGPDVPLGSTWLSDFPQAWAETGGMGLAVRQAPLIIPLKATSTPVSIKQYPMSQEARLGIKPHIQRLLDQGILVPCQSPWNTPLLPVKKPGTNDYRPVQDLREVNKRVEDIHPTVPNPYNLLSGLPPSHQWYTVLDLKDAFFCLRLHPTSQSLFAFEWRDPEMGISGQLTWTRLPQGFKNSPTLFNEALHRDLADFRIQHPDLILLQYVDDLLLAATSELDCQQGTRALLQTLGDLGYRASAKKAQICQKQVKYLGYLLKEGQRWLTEARKETVMGQPTPKTPRQLREFLGTAGFCRLWIPGFAEMAAPLYPLTKPGTLFEWGPDQQKAYQEIKQALLTAPALGLPDLTKPFELFVDEKQGYAKGVLTQKLGPWRRPVAYLSKKLDPVAAGWPPCLRMVAAIAVLTKDAGKLTMGQPLVILAPHAVEALVKQPPDRWLSNARMTHYQALLLDTDRVQFGPIVALNPATLLPLPEEGLQHDCLDILAEAHGTRPDLTDQPLPDADHTWYTDGSSFLQEGQRKAGAAVTTETEVVWAKALPAGTSAQRAELIALTQALKMAEGKKLNVYTDSRYAFATAHIHGEIYRRRGWLTSEGKEIKNKDEILALLKALFLPKRLSIIHCPGHQKGNRAEARGNRMADQAAREVATRETPETSTLLAGKRTADGSEFEKRTADGSEFESPKKKAKVE

SEQ ID NO: 6012 - protein, 2088 aa, synthetic construct
MPAAKRVKLDGGDKKYSIGLDIGTNSVGWAVITDEYKVPSKKFKVLGNTDRHSIKKNLIGALLFDSGETAEATRLKRTARRRYTRRKNRICYLQEIFSNEMAKVDDSFFHRLEESFLVEEDKKHERHPIFGNIVDEVAYHEKYPTIYHLRKKLVDSTDKADLRLIYLALAHMIKFRGHFLIEGDLNPDNSDVDKLFIQLVQTYNQLFEENPINASGVDAKAILSARLSKSRRLENLIAQLPGEKKNGLFGNLIALSLGLTPNFKSNFDLAEDAKLQLSKDTYDDDLDNLLAQIGDQYADLFLAAKNLSDAILLSDILRVNTEITKAPLSASMIKRYDEHHQDLTLLKALVRQQLPEKYKEIFFDQSKNGYAGYIDGGASQEEFYKFIKPILEKMDGTEELLVKLNREDLLRKQRTFDNGSIPHQIHLGELHAILRRQEDFYPFLKDNREKIEKILTFRIPYYVGPLARGNSRFAWMTRKSEETITPWNFEEVVDKGASAQSFIERMTNFDKNLPNEKVLPKHSLLYEYFTVYNELTKVKYVTEGMRKPAFLSGEQKKAIVDLLFKTNRKVTVKQLKEDYFKKIECFDSVEISGVEDRFNASLGTYHDLLKIIKDKDFLDNEENEDILEDIVLTLTLFEDREMIEERLKTYAHLFDDKVMKQLKRRRYTGWGRLSRKLINGIRDKQSGKTILDFLKSDGFANRNFMQLIHDDSLTFKEDIQKAQVSGQGDSLHEHIANLAGSPAIKKGILQTVKVVDELVKVMGRHKPENIVIEMARENQTTQKGQKNSRERMKRIEEGIKELGSQILKEHPVENTQLQNEKLYLYYLQNGRDMYVDQELDINRLSDYDVDHIVPQSFLKDDSIDNKVLTRSDKARGKSDNVPSEEVVKKMKNYWRQLLNAKLITQRKFDNLTKAERGGLSELDKAGFIKRQLVETRQITKHVAQILDSRMNTKYDENDKLIREVKVITLKSKLVSDFRKDFQFYKVREINNYHHAHDAYLNAVVGTALIKKYPKLESEFVYGDYKVYDVRKMIAKSEQEIGKATAKYFFYSNIMNFFKTEITLANGEIRKRPLIETNGETGEIVWDKGRDFATVRKVLSMPQVNIVKKTEVQTGGFSKESILPKRNSDKLIARKKDWDPKKYGGFDSPTVAYSVLVVAKVEKGKSKKLKSVKELLGITIMERSSFEKNPIDFLEAKGYKEVKKDLIIKLPKYSLFELENGRKRMLASAGELQKGNELALPSKYVNFLYLASHYEKLKGSPEDNEQKQLFVEQHKHYLDEIIEQISEFSKRVILADANLDKVLSAYNKHRDKPIREQAENIIHLFTLTNLGAPAAFKYFDTTIDRKRYTSTKEVLDATLIHQSITGLYETRIDLSQLGGDGGGGSGGTLNIEDEYRLHETSKGPDVPLGSTWLSDFPQAWAETGGMGLAVRQAPLIIPLKATSTPVSIKQYPMSQEARLGIKPHIQRLLDQGILVPCQSPWNTPLLPVKKPGTNDYRPVQDLREVNKRVEDIHPTVPNPYNLLSGLPPSHQWYTVLDLKDAFFCLRLHPTSQSLFAFEWRDPEMGISGQLTWTRLPQGFKNSPTLFNEALHRDLADFRIQHPDLILLQYVDDLLLAATSELDCQQGTRALLQTLGDLGYRASAKKAQICQKQVKYLGYLLKEGQRWLTEARKETVMGQPTPKTPRQLREFLGKAGFCRLFIPGFAEMAAPLYPLTKPGTLFEWGPDQQKAYQEIKQALLTAPALGLPDLTKPFELFVDEKQGYAKGVLTQKLGPWRRPVAYLSKKLDPVAAGWPPCLRMVAAIAVLTKDAGKLTMGQPLVILAPHAVEALVKQPPDRWLSNARMTHYQALLLDTDRVQFGPIVALNPATLLPLPEEGLQHDCLDILAEAHGTRPDLTDQPLPDADHTWYTDGSSFLQEGQRKAGAAVTTETEVVWAKALPAGTSAQRAELIALTQALKMAEGKKLNVYTDSRYAFATAHIHGEIYRRRGWLTSEGKEIKNKDEILALLKALFLPKRLSIIHCPGHQKGNRAEARGNRMADQAAREVATRETPETSTLLAGKRTADGSEFEKRTADGSEFESPKKKAKVE

SEQ ID NO: 6013 - protein, 2086 aa, synthetic construct
MPAAKRVKLDGGDKKYSIGLDIGTNSVGWAVITDEYKVPSKKFKVLGNTDRHSIKKNLIGALLFDSGETAEATRLKRTARRRYTRRKNRICYLQEIFSNEMAKVDDSFFHRLEESFLVEEDKKHERHPIFGNIVDEVAYHEKYPTIYHLRKKLVDSTDKADLRLIYLALAHMIKFRGHFLIEGDLNPDNSDVDKLFIQLVQTYNQLFEENPINASGVDAKAILSARLSKSRRLENLIAQLPGEKKNGLFGNLIALSLGLTPNFKSNFDLAEDAKLQLSKDTYDDDLDNLLAQIGDQYADLFLAAKNLSDAILLSDILRVNTEITKAPLSASMIKRYDEHHQDLTLLKALVRQQLPEKYKEIFFDQSKNGYAGYIDGGASQEEFYKFIKPILEKMDGTEELLVKLNREDLLRKQRTFDNGSIPHQIHLGELHAILRRQEDFYPFLKDNREKIEKILTFRIPYYVGPLARGNSRFAWMTRKSEETITPWNFEEVVDKGASAQSFIERMTNFDKNLPNEKVLPKHSLLYEYFTVYNELTKVKYVTEGMRKPAFLSGEQKKAIVDLLFKTNRKVTVKQLKEDYFKKIECFDSVEISGVEDRFNASLGTYHDLLKIIKDKDFLDNEENEDILEDIVLTLTLFEDREMIEERLKTYAHLFDDKVMKQLKRRRYTGWGRLSRKLINGIRDKQSGKTILDFLKSDGFANRNFMQLIHDDSLTFKEDIQKAQVSGQGDSLHEHIANLAGSPAIKKGILQTVKVVDELVKVMGRHKPENIVIEMARENQTTQKGQKNSRERMKRIEEGIKELGSQILKEHPVENTQLQNEKLYLYYLQNGRDMYVDQELDINRLSDYDVDHIVPQSFLKDDSIDNKVLTRSDKARGKSDNVPSEEVVKKMKNYWRQLLNAKLITQRKFDNLTKAERGGLSELDKAGFIKRQLVETRQITKHVAQILDSRMNTKYDENDKLIREVKVITLKSKLVSDFRKDFQFYKVREINNYHHAHDAYLNAVVGTALIKKYPKLESEFVYGDYKVYDVRKMIAKSEQEIGKATAKYFFYSNIMNFFKTEITLANGEIRKRPLIETNGETGEIVWDKGRDFATVRKVLSMPQVNIVKKTEVQTGGFSKESILPKRNSDKLIARKKDWDPKKYGGFDSPTVAYSVLVVAKVEKGKSKKLKSVKELLGITIMERSSFEKNPIDFLEAKGYKEVKKDLIIKLPKYSLFELENGRKRMLASAGELQKGNELALPSKYVNFLYLASHYEKLKGSPEDNEQKQLFVEQHKHYLDEIIEQISEFSKRVILADANLDKVLSAYNKHRDKPIREQAENIIHLFTLTNLGAPAAFKYFDTTIDRKRYTSTKEVLDATLIHQSITGLYETRIDLSQLGGDGGGGSGGVLNLEEEYRLHEKPVPSSIDPSWLQLFPTVWAERAGMGLANQVPPVVVELRSGASPVAVRQYPMSKEAREGIRPHIQRFLDLGVLVPCQSPWNTPLLPVKKPGTNDYRPVQDLREINKRVQDIHPTVPNPYNLLSSLPPSHTWYSVLDLKDAFFCLKLHPNSQPLFAFEWRDPEKGNTGQLTWTRLPQGFKNSPTLFNEALHRDLAPFRALNPQVVLLQYVDDLLVAAPTYRDCKEGTQKLLQELSKLGYRVSAKKAQLCQKEVTYLGYLLKEGKRWLTPARKATVMKIPPPTTPRQVREFLGKAGFCRLFIPGFASLAAPLYPLTKPSIPFIWTEEHQKAFDRIKEALLSAPALALPDLTKPFTLYVDERAGVARGVLTQTLGPWRRPVAYLSKKLDPVASGWPTCLKAVAAVALLLKDADKLTLGQNVTVIASHSLESIVRQPPDRWMTNARMTHYQSLLLNERVSFAPPAVLNPATLLPVESEATPVHRCSEILAEETGTRRDLKDQPLPGVPAWYTDGSSFIAEGKRRAGAAIVDGKRTVWASSLPEGTSAQKAELVALTQALRLAEGKDINIYTDSRYAFATAHIHGAIYKQRGWLTSAGKDIKNKEEILALLEAIHLPKRVAIIHCPGHQKGNDPVATGNRRADEAAKQAALSTRVLAETTKPAGKRTADGSEFEKRTADGSEFESPKKKAKVE

SEQ ID NO: 6014 - protein, 2088 aa, synthetic construct
MPAAKRVKLDGGDKKYSIGLDIGTNSVGWAVITDEYKVPSKKFKVLGNTDRHSIKKNLIGALLFDSGETAEATRLKRTARRRYTRRKNRICYLQEIFSNEMAKVDDSFFHRLEESFLVEEDKKHERHPIFGNIVDEVAYHEKYPTIYHLRKKLVDSTDKADLRLIYLALAHMIKFRGHFLIEGDLNPDNSDVDKLFIQLVQTYNQLFEENPINASGVDAKAILSARLSKSRRLENLIAQLPGEKKNGLFGNLIALSLGLTPNFKSNFDLAEDAKLQLSKDTYDDDLDNLLAQIGDQYADLFLAAKNLSDAILLSDILRVNTEITKAPLSASMIKRYDEHHQDLTLLKALVRQQLPEKYKEIFFDQSKNGYAGYIDGGASQEEFYKFIKPILEKMDGTEELLVKLNREDLLRKQRTFDNGSIPHQIHLGELHAILRRQEDFYPFLKDNREKIEKILTFRIPYYVGPLARGNSRFAWMTRKSEETITPWNFEEVVDKGASAQSFIERMTNFDKNLPNEKVLPKHSLLYEYFTVYNELTKVKYVTEGMRKPAFLSGEQKKAIVDLLFKTNRKVTVKQLKEDYFKKIECFDSVEISGVEDRFNASLGTYHDLLKIIKDKDFLDNEENEDILEDIVLTLTLFEDREMIEERLKTYAHLFDDKVMKQLKRRRYTGWGRLSRKLINGIRDKQSGKTILDFLKSDGFANRNFMQLIHDDSLTFKEDIQKAQVSGQGDSLHEHIANLAGSPAIKKGILQTVKVVDELVKVMGRHKPENIVIEMARENQTTQKGQKNSRERMKRIEEGIKELGSQILKEHPVENTQLQNEKLYLYYLQNGRDMYVDQELDINRLSDYDVDHIVPQSFLKDDSIDNKVLTRSDKARGKSDNVPSEEVVKKMKNYWRQLLNAKLITQRKFDNLTKAERGGLSELDKAGFIKRQLVETRQITKHVAQILDSRMNTKYDENDKLIREVKVITLKSKLVSDFRKDFQFYKVREINNYHHAHDAYLNAVVGTALIKKYPKLESEFVYGDYKVYDVRKMIAKSEQEIGKATAKYFFYSNIMNFFKTEITLANGEIRKRPLIETNGETGEIVWDKGRDFATVRKVLSMPQVNIVKKTEVQTGGFSKESILPKRNSDKLIARKKDWDPKKYGGFDSPTVAYSVLVVAKVEKGKSKKLKSVKELLGITIMERSSFEKNPIDFLEAKGYKEVKKDLIIKLPKYSLFELENGRKRMLASAGELQKGNELALPSKYVNFLYLASHYEKLKGSPEDNEQKQLFVEQHKHYLDEIIEQISEFSKRVILADANLDKVLSAYNKHRDKPIREQAENIIHLFTLTNLGAPAAFKYFDTTIDRKRYTSTKEVLDATLIHQSITGLYETRIDLSQLGGDGGGGSGGTLNIEDEYRLHETSKEPDVPLGSTWLSDFPQAWAETGGMGLAVRQAPLIIPLKATSTPVSIKQYPMSQEARLGIKPHIQRLLDQGILVPCQSPWNTPLLPVKKPGTNDYRPVQDLREVNKRVEDIHPTVPNPYNLLSGLPPSHQWYTVLDLKDAFFCLRLHPTSQPLFAFEWRDPEMGISGQLTWTRLPQGFKNSPTLFNEALHRDLADFRIQHPDLILLQYVDDLLLAATSEQDCQRGTRALLQTLGNLGYRASAKKAQICQKQVKYLGYLLKEGQRWLTEARKETVMGQPTPKTPRQLREFLGKAGFCRLFIPGFAEMAAPLYPLTKPGTLFNWGPDQQKAYQEIKQALLTAPALGLPDLTKPFELFVDEKQGYAKGVLTQKLGPWRRPVAYLSKKLDPVAAGWPPCLRMVAAIAVLTKDAGKLTMGQPLVILAPHAVEALVKQPPDRWLSNARMTHYQAMLLDTDRVQFGPVVALNPATLLPLPEKEAPHDCLEILAETHGTRPDLTDQPIPDADYTWYTDGSSFLQEGQRRAGAAVTTETEVIWARALPAGTSAQRAELIALTQALKMAEGKKLNVYTDSRYAFATAHVHGEIYRRRGWLTSEGREIKNKNEILALLKALFLPKRLSIIHCPGHQKGNSAEARGNRMADQAAREAAMKAVLETSTLLAGKRTADGSEFEKRTADGSEFESPKKKAKVE

SEQ ID NO: 6015 - protein, 2093 aa, synthetic construct
MPAAKRVKLDGGDKKYSIGLDIGTNSVGWAVITDEYKVPSKKFKVLGNTDRHSIKKNLIGALLFDSGETAEATRLKRTARRRYTRRKNRICYLQEIFSNEMAKVDDSFFHRLEESFLVEEDKKHERHPIFGNIVDEVAYHEKYPTIYHLRKKLVDSTDKADLRLIYLALAHMIKFRGHFLIEGDLNPDNSDVDKLFIQLVQTYNQLFEENPINASGVDAKAILSARLSKSRRLENLIAQLPGEKKNGLFGNLIALSLGLTPNFKSNFDLAEDAKLQLSKDTYDDDLDNLLAQIGDQYADLFLAAKNLSDAILLSDILRVNTEITKAPLSASMIKRYDEHHQDLTLLKALVRQQLPEKYKEIFFDQSKNGYAGYIDGGASQEEFYKFIKPILEKMDGTEELLVKLNREDLLRKQRTFDNGSIPHQIHLGELHAILRRQEDFYPFLKDNREKIEKILTFRIPYYVGPLARGNSRFAWMTRKSEETITPWNFEEVVDKGASAQSFIERMTNFDKNLPNEKVLPKHSLLYEYFTVYNELTKVKYVTEGMRKPAFLSGEQKKAIVDLLFKTNRKVTVKQLKEDYFKKIECFDSVEISGVEDRFNASLGTYHDLLKIIKDKDFLDNEENEDILEDIVLTLTLFEDREMIEERLKTYAHLFDDKVMKQLKRRRYTGWGRLSRKLINGIRDKQSGKTILDFLKSDGFANRNFMQLIHDDSLTFKEDIQKAQVSGQGDSLHEHIANLAGSPAIKKGILQTVKVVDELVKVMGRHKPENIVIEMARENQTTQKGQKNSRERMKRIEEGIKELGSQILKEHPVENTQLQNEKLYLYYLQNGRDMYVDQELDINRLSDYDVDHIVPQSFLKDDSIDNKVLTRSDKARGKSDNVPSEEVVKKMKNYWRQLLNAKLITQRKFDNLTKAERGGLSELDKAGFIKRQLVETRQITKHVAQILDSRMNTKYDENDKLIREVKVITLKSKLVSDFRKDFQFYKVREINNYHHAHDAYLNAVVGTALIKKYPKLESEFVYGDYKVYDVRKMIAKSEQEIGKATAKYFFYSNIMNFFKTEITLANGEIRKRPLIETNGETGEIVWDKGRDFATVRKVLSMPQVNIVKKTEVQTGGFSKESILPKRNSDKLIARKKDWDPKKYGGFDSPTVAYSVLVVAKVEKGKSKKLKSVKELLGITIMERSSFEKNPIDFLEAKGYKEVKKDLIIKLPKYSLFELENGRKRMLASAGELQKGNELALPSKYVNFLYLASHYEKLKGSPEDNEQKQLFVEQHKHYLDEIIEQISEFSKRVILADANLDKVLSAYNKHRDKPIREQAENIIHLFTLTNLGAPAAFKYFDTTIDRKRYTSTKEVLDATLIHQSITGLYETRIDLSQLGGDGGGGSGGSGGTAPLEEEYRLFLEAPIQNVTLLEQWKREIPKVWAEINPPGLASTQAPIHVQLLSTALPVRVRQYPITLEAKRSLRETIRKFRAAGILRPVHSPWNTPLLPVRKSGTSEYRMVQDLREVNKRVETIHPTVPNPYTLLSLLPPDRIWYSVLDLKDAFFCIPLAPESQLIFAFEWADAEEGESGQLTWTRLPQGFKNSPTLFNEALNRDLQGFRLDHPSVSLLQYVDDLLIAADTQAACLSATRDLLMTLAELGYRVSGKKAQLCQEEVTYLGFKIHKGSRSLSNSRTQAILQIPVPKTKRQVREFLGTIGYCRLWIPGFAELAQPLYAATRPGNDPLVWGEKEEEAFQSLKLALTQPPALALPSLDKPFQLFVEETSGAAKGVLTQALGPWKRPVAYLSKRLDPVAAGWPRCLRAIAAAALLTREASKLTFGQDIEITSSHNLESLLRSPPDKWLTNARITQYQVLLLDPPRVRFKQTAALNPATLLPETDDTLPIHHCLDTLDSLTSTRPDLTDQPLAQAEATLFTDGSSYIRDGKRYAGAAVVTLDSVIWAEPLPIGTSAQKAELIALTKALEWSKDKSVNIYTDSRYAFATLHVHGMIYRERGWLTAGGKAIKNAPEILALLTAVWLPKRVAVMHCKGHQKDDAPTSTGNRRADEVAREVAIRPLSTQATISAGKRTADGSEFEKRTADGSEFESPKKKAKVE

SEQ ID NO: 6016 - protein, 2082 aa, synthetic construct
MPAAKRVKLDGGDKKYSIGLDIGTNSVGWAVITDEYKVPSKKFKVLGNTDRHSIKKNLIGALLFDSGETAEATRLKRTARRRYTRRKNRICYLQEIFSNEMAKVDDSFFHRLEESFLVEEDKKHERHPIFGNIVDEVAYHEKYPTIYHLRKKLVDSTDKADLRLIYLALAHMIKFRGHFLIEGDLNPDNSDVDKLFIQLVQTYNQLFEENPINASGVDAKAILSARLSKSRRLENLIAQLPGEKKNGLFGNLIALSLGLTPNFKSNFDLAEDAKLQLSKDTYDDDLDNLLAQIGDQYADLFLAAKNLSDAILLSDILRVNTEITKAPLSASMIKRYDEHHQDLTLLKALVRQQLPEKYKEIFFDQSKNGYAGYIDGGASQEEFYKFIKPILEKMDGTEELLVKLNREDLLRKQRTFDNGSIPHQIHLGELHAILRRQEDFYPFLKDNREKIEKILTFRIPYYVGPLARGNSRFAWMTRKSEETITPWNFEEVVDKGASAQSFIERMTNFDKNLPNEKVLPKHSLLYEYFTVYNELTKVKYVTEGMRKPAFLSGEQKKAIVDLLFKTNRKVTVKQLKEDYFKKIECFDSVEISGVEDRFNASLGTYHDLLKIIKDKDFLDNEENEDILEDIVLTLTLFEDREMIEERLKTYAHLFDDKVMKQLKRRRYTGWGRLSRKLINGIRDKQSGKTILDFLKSDGFANRNFMQLIHDDSLTFKEDIQKAQVSGQGDSLHEHIANLAGSPAIKKGILQTVKVVDELVKVMGRHKPENIVIEMARENQTTQKGQKNSRERMKRIEEGIKELGSQILKEHPVENTQLQNEKLYLYYLQNGRDMYVDQELDINRLSDYDVDHIVPQSFLKDDSIDNKVLTRSDKARGKSDNVPSEEVVKKMKNYWRQLLNAKLITQRKFDNLTKAERGGLSELDKAGFIKRQLVETRQITKHVAQILDSRMNTKYDENDKLIREVKVITLKSKLVSDFRKDFQFYKVREINNYHHAHDAYLNAVVGTALIKKYPKLESEFVYGDYKVYDVRKMIAKSEQEIGKATAKYFFYSNIMNFFKTEITLANGEIRKRPLIETNGETGEIVWDKGRDFATVRKVLSMPQVNIVKKTEVQTGGFSKESILPKRNSDKLIARKKDWDPKKYGGFDSPTVAYSVLVVAKVEKGKSKKLKSVKELLGITIMERSSFEKNPIDFLEAKGYKEVKKDLIIKLPKYSLFELENGRKRMLASAGELQKGNELALPSKYVNFLYLASHYEKLKGSPEDNEQKQLFVEQHKHYLDEIIEQISEFSKRVILADANLDKVLSAYNKHRDKPIREQAENIIHLFTLTNLGAPAAFKYFDTTIDRKRYTSTKEVLDATLIHQSITGLYETRIDLSQLGGDGGGGSGGSGGVPWILKKPLELTIKLDLEEQQGTLLNNSILSKKGKEELKQLFEKYSALWQSWENQVGHRRIRPHKIATGTVKPTPQKQYHINPKAKPDIQIVINDLLKQGVLIQKESTMNTPVYPVPKPNGRWRMVLDYRAVNKVTPLIAVQNQHSYGILGSLFKGRYKTTIDLSNGFWAHPIVPEDYWITAFTWQGKQYCWTVLPQGFLNSPGLFNGDVVDLLQGIPNVEVYVDDVYISHDSEKEHLEYLDILFNRLKEAGYIISLKKSNIANSIVDFLGFQITNEGRGLTDTFKEKLENITAPTTLKQLQSILGKLNFARNFIPDFTELIAPLYALIPKSPKNYVPWQIEHSTTLETLITKLNGAEYLQGRKGDKTLIMKVNASYTTGYIRYYNEGEKKPISYVSIVFSKTELKFTELEKLLTTVHKGLLKALDLSMGQNIHVYSPIVSMQNIQKTPQTAKKALASRWLSWLSYLEDPRIRFFYDPQMPALKDLPAVDTGKDNKKHPSNFQHIFYTDGSAITSPTKEGHLNAGMGIVYFINKDGNLQKQQEWSISLGNHTAQFAEIAAFEFALKKCLPLGGNILVVTDSNYVAKAYNEELDVWASNGFVNNRKKPLKHISKWKSVADLKRLRPDVVVTHEPGHQKLDSSPHAYGNNLADQLATQASFKVHAGKRTADGSEFEKRTADGSEFESPKKKAKVE

SEQ ID NO: 6017 - protein, 2090 aa, synthetic construct
MPAAKRVKLDGGDKKYSIGLDIGTNSVGWAVITDEYKVPSKKFKVLGNTDRHSIKKNLIGALLFDSGETAEATRLKRTARRRYTRRKNRICYLQEIFSNEMAKVDDSFFHRLEESFLVEEDKKHERHPIFGNIVDEVAYHEKYPTIYHLRKKLVDSTDKADLRLIYLALAHMIKFRGHFLIEGDLNPDNSDVDKLFIQLVQTYNQLFEENPINASGVDAKAILSARLSKSRRLENLIAQLPGEKKNGLFGNLIALSLGLTPNFKSNFDLAEDAKLQLSKDTYDDDLDNLLAQIGDQYADLFLAAKNLSDAILLSDILRVNTEITKAPLSASMIKRYDEHHQDLTLLKALVRQQLPEKYKEIFFDQSKNGYAGYIDGGASQEEFYKFIKPILEKMDGTEELLVKLNREDLLRKQRTFDNGSIPHQIHLGELHAILRRQEDFYPFLKDNREKIEKILTFRIPYYVGPLARGNSRFAWMTRKSEETITPWNFEEVVDKGASAQSFIERMTNFDKNLPNEKVLPKHSLLYEYFTVYNELTKVKYVTEGMRKPAFLSGEQKKAIVDLLFKTNRKVTVKQLKEDYFKKIECFDSVEISGVEDRFNASLGTYHDLLKIIKDKDFLDNEENEDILEDIVLTLTLFEDREMIEERLKTYAHLFDDKVMKQLKRRRYTGWGRLSRKLINGIRDKQSGKTILDFLKSDGFANRNFMQLIHDDSLTFKEDIQKAQVSGQGDSLHEHIANLAGSPAIKKGILQTVKVVDELVKVMGRHKPENIVIEMARENQTTQKGQKNSRERMKRIEEGIKELGSQILKEHPVENTQLQNEKLYLYYLQNGRDMYVDQELDINRLSDYDVDHIVPQSFLKDDSIDNKVLTRSDKARGKSDNVPSEEVVKKMKNYWRQLLNAKLITQRKFDNLTKAERGGLSELDKAGFIKRQLVETRQITKHVAQILDSRMNTKYDENDKLIREVKVITLKSKLVSDFRKDFQFYKVREINNYHHAHDAYLNAVVGTALIKKYPKLESEFVYGDYKVYDVRKMIAKSEQEIGKATAKYFFYSNIMNFFKTEITLANGEIRKRPLIETNGETGEIVWDKGRDFATVRKVLSMPQVNIVKKTEVQTGGFSKESILPKRNSDKLIARKKDWDPKKYGGFDSPTVAYSVLVVAKVEKGKSKKLKSVKELLGITIMERSSFEKNPIDFLEAKGYKEVKKDLIIKLPKYSLFELENGRKRMLASAGELQKGNELALPSKYVNFLYLASHYEKLKGSPEDNEQKQLFVEQHKHYLDEIIEQISEFSKRVILADANLDKVLSAYNKHRDKPIREQAENIIHLFTLTNLGAPAAFKYFDTTIDRKRYTSTKEVLDATLIHQSITGLYETRIDLSQLGGDGGGGSGGSGGTLQLEEEYRLFEPESTQKQEMDIWLKNFPQAWAETGGMGTAHCQAPVLIQLKATATPISIRQYPMPHEAYQGIKPHIRRMLDQGILKPCQSPWNTPLLPVKKPGTEDYRPVQDLREVNKRVEDIHPTVPNPYNLLSTLPPSHPWYTVLDLKDAFFCLRLHSESQLLFAFEWRDPEIGLSGQLTWTRLPQGFKNSPTLFNEALHSDLADFRVRYPALVLLQYVDDLLLAAATRTECLEGTKALLETLGNKGYRASAKKAQICLQEVTYLGYSLKDGQRWLTKARKEAILSIPVPKNSRQVREFLGKAGYCRLFIPGFAELAAPLYPLTRPGTLFQWGTEQQLAFEDIKKALLSSPALGLPDITKPFELFIDENSGFAKGVLVQKLGPWKRPVAYLSKKLDTVASGWPPCLRMVAAIAILVKDAGKLTLGQPLTILTSHPVEALVRQPPNKWLSNARMTHYQAMLLDAERVHFGPTVSLNPATLLPLPSGGNHHDCLQILAETHGTRPDLTDQPLPDADLTWYTDGSSFIRNGEREAGAAVTTESEVIWAAPLPPGTSAQRAELIALTQALKMAEGKKLTVYTDSRYAFATTHVHGEIYRRRGWLTSEGKEIKNKNEILALLEALFLPKRLSIIHCPGHQKGDSPQAKGNRLADDTAKKAATETHSSLTVLPAGKRTADGSEFEKRTADGSEFESPKKKAKVE

SEQ ID NO: 6018 - protein, 2171 aa, synthetic construct
MPAAKRVKLDGGDKKYSIGLDIGTNSVGWAVITDEYKVPSKKFKVLGNTDRHSIKKNLIGALLFDSGETAEATRLKRTARRRYTRRKNRICYLQEIFSNEMAKVDDSFFHRLEESFLVEEDKKHERHPIFGNIVDEVAYHEKYPTIYHLRKKLVDSTDKADLRLIYLALAHMIKFRGHFLIEGDLNPDNSDVDKLFIQLVQTYNQLFEENPINASGVDAKAILSARLSKSRRLENLIAQLPGEKKNGLFGNLIALSLGLTPNFKSNFDLAEDAKLQLSKDTYDDDLDNLLAQIGDQYADLFLAAKNLSDAILLSDILRVNTEITKAPLSASMIKRYDEHHQDLTLLKALVRQQLPEKYKEIFFDQSKNGYAGYIDGGASQEEFYKFIKPILEKMDGTEELLVKLNREDLLRKQRTFDNGSIPHQIHLGELHAILRRQEDFYPFLKDNREKIEKILTFRIPYYVGPLARGNSRFAWMTRKSEETITPWNFEEVVDKGASAQSFIERMTNFDKNLPNEKVLPKHSLLYEYFTVYNELTKVKYVTEGMRKPAFLSGEQKKAIVDLLFKTNRKVTVKQLKEDYFKKIECFDSVEISGVEDRFNASLGTYHDLLKIIKDKDFLDNEENEDILEDIVLTLTLFEDREMIEERLKTYAHLFDDKVMKQLKRRRYTGWGRLSRKLINGIRDKQSGKTILDFLKSDGFANRNFMQLIHDDSLTFKEDIQKAQVSGQGDSLHEHIANLAGSPAIKKGILQTVKVVDELVKVMGRHKPENIVIEMARENQTTQKGQKNSRERMKRIEEGIKELGSQILKEHPVENTQLQNEKLYLYYLQNGRDMYVDQELDINRLSDYDVDHIVPQSFLKDDSIDNKVLTRSDKARGKSDNVPSEEVVKKMKNYWRQLLNAKLITQRKFDNLTKAERGGLSELDKAGFIKRQLVETRQITKHVAQILDSRMNTKYDENDKLIREVKVITLKSKLVSDFRKDFQFYKVREINNYHHAHDAYLNAVVGTALIKKYPKLESEFVYGDYKVYDVRKMIAKSEQEIGKATAKYFFYSNIMNFFKTEITLANGEIRKRPLIETNGETGEIVWDKGRDFATVRKVLSMPQVNIVKKTEVQTGGFSKESILPKRNSDKLIARKKDWDPKKYGGFDSPTVAYSVLVVAKVEKGKSKKLKSVKELLGITIMERSSFEKNPIDFLEAKGYKEVKKDLIIKLPKYSLFELENGRKRMLASAGELQKGNELALPSKYVNFLYLASHYEKLKGSPEDNEQKQLFVEQHKHYLDEIIEQISEFSKRVILADANLDKVLSAYNKHRDKPIREQAENIIHLFTLTNLGAPAAFKYFDTTIDRKRYTSTKEVLDATLIHQSITGLYETRIDLSQLGGDGGGGSGGSGGMNPLQLLQPLPAEIKGTKLLAHWNSGATITCIPESFLEDEQPIKKTLIKTIHGEKQQNVYYVTFKVKGRKVEAEVIASPYEYILLSPTDVPWLTQQPLQLTILVPLQEYQEKILSKTALPEDQKQQLKTLFVKYDNLWQHWENQVGHRKIRPHNIATGDYPPRPQKQYPINPKAKPSIQIVIDDLLKQGVLTPQNSTMNTPVYPVPKPDGRWRMVLDYREVNKTIPLTAAQNQHSAGILATIVRQKYKTTLDLANGFWAHPITPESYWLTAFTWQGKQYCWTRLPQGFLNSPALFNADVVDLLKEIPNVQVYVDDIYLSHDDPKEHVQQLEKVFQILLQAGYVVSLKKSEIGQKTVEFLGFNITKEGRGLTDTFKTKLLNITPPKDLKQLQSILGLLNFARNFIPNFAELVQPLYNLIAPAKGKYIEWSEENTKQLNMVIEALNTASNLEERLPEQRLVIKVNTSPSAGYVRYYNETGKKPIMYLNYVFSKAELKFSMLEKLLTTMHKALIKAMDLAMGQEILVYSPIVSMTKIQKTPLPERKALPIRWITWMTYLEDPRIQFHYDKTLPELKHIPDVYTSSQSPVKHPSQYEGVFYTDGSAIKSPDPTKSNNAGMGIVHATYKPEYQVLNQWSIPLGNHTAQMAEIAAVEFACKKALKIPGPVLVITDSFYVAESANKELPYWKSNGFVNNKKKPLKHISKWKSIAECLSMKPDITIQHEKGISLQIPVFILKGNALADKLATQGSYVVNAGKRTADGSEFEKRTADGSEFESPKKKAKVE

SEQ ID NO: 6019 - protein, 2213 aa, synthetic construct
MPAAKRVKLDGGDKKYSIGLDIGTNSVGWAVITDEYKVPSKKFKVLGNTDRHSIKKNLIGALLFDSGETAEATRLKRTARRRYTRRKNRICYLQEIFSNEMAKVDDSFFHRLEESFLVEEDKKHERHPIFGNIVDEVAYHEKYPTIYHLRKKLVDSTDKADLRLIYLALAHMIKFRGHFLIEGDLNPDNSDVDKLFIQLVQTYNQLFEENPINASGVDAKAILSARLSKSRRLENLIAQLPGEKKNGLFGNLIALSLGLTPNFKSNFDLAEDAKLQLSKDTYDDDLDNLLAQIGDQYADLFLAAKNLSDAILLSDILRVNTEITKAPLSASMIKRYDEHHQDLTLLKALVRQQLPEKYKEIFFDQSKNGYAGYIDGGASQEEFYKFIKPILEKMDGTEELLVKLNREDLLRKQRTFDNGSIPHQIHLGELHAILRRQEDFYPFLKDNREKIEKILTFRIPYYVGPLARGNSRFAWMTRKSEETITPWNFEEVVDKGASAQSFIERMTNFDKNLPNEKVLPKHSLLYEYFTVYNELTKVKYVTEGMRKPAFLSGEQKKAIVDLLFKTNRKVTVKQLKEDYFKKIECFDSVEISGVEDRFNASLGTYHDLLKIIKDKDFLDNEENEDILEDIVLTLTLFEDREMIEERLKTYAHLFDDKVMKQLKRRRYTGWGRLSRKLINGIRDKQSGKTILDFLKSDGFANRNFMQLIHDDSLTFKEDIQKAQVSGQGDSLHEHIANLAGSPAIKKGILQTVKVVDELVKVMGRHKPENIVIEMARENQTTQKGQKNSRERMKRIEEGIKELGSQILKEHPVENTQLQNEKLYLYYLQNGRDMYVDQELDINRLSDYDVDHIVPQSFLKDDSIDNKVLTRSDKARGKSDNVPSEEVVKKMKNYWRQLLNAKLITQRKFDNLTKAERGGLSELDKAGFIKRQLVETRQITKHVAQILDSRMNTKYDENDKLIREVKVITLKSKLVSDFRKDFQFYKVREINNYHHAHDAYLNAVVGTALIKKYPKLESEFVYGDYKVYDVRKMIAKSEQEIGKATAKYFFYSNIMNFFKTEITLANGEIRKRPLIETNGETGEIVWDKGRDFATVRKVLSMPQVNIVKKTEVQTGGFSKESILPKRNSDKLIARKKDWDPKKYGGFDSPTVAYSVLVVAKVEKGKSKKLKSVKELLGITIMERSSFEKNPIDFLEAKGYKEVKKDLIIKLPKYSLFELENGRKRMLASAGELQKGNELALPSKYVNFLYLASHYEKLKGSPEDNEQKQLFVEQHKHYLDEIIEQISEFSKRVILADANLDKVLSAYNKHRDKPIREQAENIIHLFTLTNLGAPAAFKYFDTTIDRKRYTSTKEVLDATLIHQSITGLYETRIDLSQLGGDGGGGSGGSGGTLGDQGSRGSDPLPEPRVTLTVEGIPTEFLVNTGAEHSVLTKPMGKMGSKRTVVAGATGSKVYPWTTKRLLKIGQKQVTHSFLVIPECPAPLLGRDLLTKLKAQIQFSTEGPQVTWEDRPAMCLVLNLEEEYRLHEKPVPPSIDPSWLQLFPMVWAEKAGMGLANQVPPVVVELKSDASPVAVRQYPMSKEAREGIRPHIQRFLDLGILVPCQSPWNTPLLPVKKPGTNDYRPVQDLREVNKRVQDIHPTVPNPYNLLSSLPPSHTWYSVLDLKDAFFCLKLHPNSQPLFAFEWRDPEKGNTGQLTWTRLPQGFKNSPTLFDEALHRDLASFRALNPQVVMLQYVDDLLVAAPTYRDCKEGTRRLLQELSKLGYRVSAKKAQLCREEVTYLGYLLKGGKRWLTPARKATVMKIPTPTTPRQVREFLGTAGFCRLWIPGFASLAAPLYPLTREKVPFTWTEAHQEAFGRIKEALLSAPALALPDLTKPFALYVDEKEGVARGVLTQTLGPWRRPVAYLSKKLDPVASGWPTCLKAIAAVALLLKDADKLTLGQNVLVIAPHNLESIVRQPPDRWMTNARMTHYQSLLLNERVSFAPPAILNPATLLPVESDDTPIHICSEILAEETGTRPDLRDQPLPGVPAWYTDGSSFIMDGRRQAGAAIVDNKRTVWASNLPEGTSAQKAELIALTQALRLAEGKSINIYTDSRYAFATAHVHGAIYKQRGLLTSAGKDIKNKEEILALLEAIHLPKRVAIIHCPGHQRGTDPVATGNRKADEAAKQAAQSTRILTETTKNAGKRTADGSEFEKRTADGSEFESPKKKAKVE

SEQ ID NO: 6020 - protein, 2122 aa, synthetic construct
MPAAKRVKLDGGDKKYSIGLDIGTNSVGWAVITDEYKVPSKKFKVLGNTDRHSIKKNLIGALLFDSGETAEATRLKRTARRRYTRRKNRICYLQEIFSNEMAKVDDSFFHRLEESFLVEEDKKHERHPIFGNIVDEVAYHEKYPTIYHLRKKLVDSTDKADLRLIYLALAHMIKFRGHFLIEGDLNPDNSDVDKLFIQLVQTYNQLFEENPINASGVDAKAILSARLSKSRRLENLIAQLPGEKKNGLFGNLIALSLGLTPNFKSNFDLAEDAKLQLSKDTYDDDLDNLLAQIGDQYADLFLAAKNLSDAILLSDILRVNTEITKAPLSASMIKRYDEHHQDLTLLKALVRQQLPEKYKEIFFDQSKNGYAGYIDGGASQEEFYKFIKPILEKMDGTEELLVKLNREDLLRKQRTFDNGSIPHQIHLGELHAILRRQEDFYPFLKDNREKIEKILTFRIPYYVGPLARGNSRFAWMTRKSEETITPWNFEEVVDKGASAQSFIERMTNFDKNLPNEKVLPKHSLLYEYFTVYNELTKVKYVTEGMRKPAFLSGEQKKAIVDLLFKTNRKVTVKQLKEDYFKKIECFDSVEISGVEDRFNASLGTYHDLLKIIKDKDFLDNEENEDILEDIVLTLTLFEDREMIEERLKTYAHLFDDKVMKQLKRRRYTGWGRLSRKLINGIRDKQSGKTILDFLKSDGFANRNFMQLIHDDSLTFKEDIQKAQVSGQGDSLHEHIANLAGSPAIKKGILQTVKVVDELVKVMGRHKPENIVIEMARENQTTQKGQKNSRERMKRIEEGIKELGSQILKEHPVENTQLQNEKLYLYYLQNGRDMYVDQELDINRLSDYDVDHIVPQSFLKDDSIDNKVLTRSDKARGKSDNVPSEEVVKKMKNYWRQLLNAKLITQRKFDNLTKAERGGLSELDKAGFIKRQLVETRQITKHVAQILDSRMNTKYDENDKLIREVKVITLKSKLVSDFRKDFQFYKVREINNYHHAHDAYLNAVVGTALIKKYPKLESEFVYGDYKVYDVRKMIAKSEQEIGKATAKYFFYSNIMNFFKTEITLANGEIRKRPLIETNGETGEIVWDKGRDFATVRKVLSMPQVNIVKKTEVQTGGFSKESILPKRNSDKLIARKKDWDPKKYGGFDSPTVAYSVLVVAKVEKGKSKKLKSVKELLGITIMERSSFEKNPIDFLEAKGYKEVKKDLIIKLPKYSLFELENGRKRMLASAGELQKGNELALPSKYVNFLYLASHYEKLKGSPEDNEQKQLFVEQHKHYLDEIIEQISEFSKRVILADANLDKVLSAYNKHRDKPIREQAENIIHLFTLTNLGAPAAFKYFDTTIDRKRYTSTKEVLDATLIHQSITGLYETRIDLSQLGGDGGGGSGGSGGLLGRDLLTKLKAQIQFSTEGPQVTWEDRPAMCLVLNLEEEYRLHEKPVPPSIDPSWLQLFPMVWAEKAGMGLANQVPPVVVELKSDASPVAVRQYPMSKEAREGIRPHIQRFLDLGILVPCQSPWNTPLLPVKKPGTNDYRPVQDLREVNKRVQDIHPTVPNPYNLLSSLPPSHTWYSVLDLKDAFFCLKLHPNSQPLFAFEWRDPEKGNTGQLTWTRLPQGFKNSPTLFDEALHRDLASFRALNPQVVMLQYVDDLLVAAPTYRDCKEGTRRLLQELSKLGYRVSAKKAQLCREEVTYLGYLLKGGKRWLTPARKATVMKIPTPTTPRQVREFLGTAGFCRLWIPGFASLAAPLYPLTREKVPFTWTEAHQEAFGRIKEALLSAPALALPDLTKPFALYVDEKEGVARGVLTQTLGPWRRPVAYLSKKLDPVASGWPTCLKAIAAVALLLKDADKLTLGQNVLVIAPHNLESIVRQPPDRWMTNARMTHYQSLLLNERVSFAPPAILNPATLLPVESDDTPIHICSEILAEETGTRPDLRDQPLPGVPAWYTDGSSFIMDGRRQAGAAIVDNKRTVWASNLPEGTSAQKAELIALTQALRLAEGKSINIYTDSRYAFATAHVHGAIYKQRGLLTSAGKDIKNKEEILALLEAIHLPKRVAIIHCPGHQRGTDPVATGNRKADEAAKQAAQSTRILTETTKNAGKRTADGSEFEKRTADGSEFESPKKKAKVE

SEQ ID NO: 6021 - protein, 2213 aa, synthetic construct
MPAAKRVKLDGGDKKYSIGLDIGTNSVGWAVITDEYKVPSKKFKVLGNTDRHSIKKNLIGALLFDSGETAEATRLKRTARRRYTRRKNRICYLQEIFSNEMAKVDDSFFHRLEESFLVEEDKKHERHPIFGNIVDEVAYHEKYPTIYHLRKKLVDSTDKADLRLIYLALAHMIKFRGHFLIEGDLNPDNSDVDKLFIQLVQTYNQLFEENPINASGVDAKAILSARLSKSRRLENLIAQLPGEKKNGLFGNLIALSLGLTPNFKSNFDLAEDAKLQLSKDTYDDDLDNLLAQIGDQYADLFLAAKNLSDAILLSDILRVNTEITKAPLSASMIKRYDEHHQDLTLLKALVRQQLPEKYKEIFFDQSKNGYAGYIDGGASQEEFYKFIKPILEKMDGTEELLVKLNREDLLRKQRTFDNGSIPHQIHLGELHAILRRQEDFYPFLKDNREKIEKILTFRIPYYVGPLARGNSRFAWMTRKSEETITPWNFEEVVDKGASAQSFIERMTNFDKNLPNEKVLPKHSLLYEYFTVYNELTKVKYVTEGMRKPAFLSGEQKKAIVDLLFKTNRKVTVKQLKEDYFKKIECFDSVEISGVEDRFNASLGTYHDLLKIIKDKDFLDNEENEDILEDIVLTLTLFEDREMIEERLKTYAHLFDDKVMKQLKRRRYTGWGRLSRKLINGIRDKQSGKTILDFLKSDGFANRNFMQLIHDDSLTFKEDIQKAQVSGQGDSLHEHIANLAGSPAIKKGILQTVKVVDELVKVMGRHKPENIVIEMARENQTTQKGQKNSRERMKRIEEGIKELGSQILKEHPVENTQLQNEKLYLYYLQNGRDMYVDQELDINRLSDYDVDHIVPQSFLKDDSIDNKVLTRSDKARGKSDNVPSEEVVKKMKNYWRQLLNAKLITQRKFDNLTKAERGGLSELDKAGFIKRQLVETRQITKHVAQILDSRMNTKYDENDKLIREVKVITLKSKLVSDFRKDFQFYKVREINNYHHAHDAYLNAVVGTALIKKYPKLESEFVYGDYKVYDVRKMIAKSEQEIGKATAKYFFYSNIMNFFKTEITLANGEIRKRPLIETNGETGEIVWDKGRDFATVRKVLSMPQVNIVKKTEVQTGGFSKESILPKRNSDKLIARKKDWDPKKYGGFDSPTVAYSVLVVAKVEKGKSKKLKSVKELLGITIMERSSFEKNPIDFLEAKGYKEVKKDLIIKLPKYSLFELENGRKRMLASAGELQKGNELALPSKYVNFLYLASHYEKLKGSPEDNEQKQLFVEQHKHYLDEIIEQISEFSKRVILADANLDKVLSAYNKHRDKPIREQAENIIHLFTLTNLGAPAAFKYFDTTIDRKRYTSTKEVLDATLIHQSITGLYETRIDLSQLGGDGGGGSGGSGGTLGDQGSRGSDPLPEPRVTLTVEGIPTEFLVNTGAEHSVLTKPMGKMGSKRTVVAGATGSKVYPWTTKRLLKIGQKQVTHSFLVIPECPAPLLGRDLLTKLKAQIQFSTEGPQVTWEDRPAMCLVLNLEEEYRLHEKPVPPSIDPSWLQLFPMVWAEKAGMGLANQVPPVVVELKSDASPVAVRQYPMSKEAREGIRPHIQRFLDLGILVPCQSPWNTPLLPVKKPGTNDYRPVQDLREVNKRVQDIHPTVPNPYNLLSSLPPSHTWYSVLDLKDAFFCLKLHPNSQPLFAFEWRDPEKGNTGQLTWTRLPQGFKNSPTLFNEALHRDLASFRALNPQVVMLQYVDDLLVAAPTYRDCKEGTRRLLQELSKLGYRVSAKKAQLCREEVTYLGYLLKGGKRWLTPARKATVMKIPTPTTPRQVREFLGTAGFCRLWIPGFASLAAPLYPLTRPKVPFTWTEAHQEAFGRIKEALLSAPALALPDLTKPFALYVDEKEGVARGVLTQTLGPWRRPVAYLSKKLDPVASGWPTCLKAIAAVALLLKDADKLTLGQNVLVIAPHNLESIVRQPPDRWMTNARMTHYQSLLLNERVSFAPPAILNPATLLPVESDDTPIHICSEILAEETGTRPDLRDQPLPGVPAWYTDGSSFIMDGRRQAGAAIVDNKRTVWASNLPEGTSAQKAELIALTQALRLAEGKSINIYTDSRYAFATAHVHGAIYKQRGWLTSAGKDIKNKEEILALLEAIHLPKRVAIIHCPGHQRGTDPVATGNRKADEAAKQAAQSTRILTETTKNAGKRTADGSEFEKRTADGSEFESPKKKAKVE

SEQ ID NO: 6022 - protein, 2091 aa, synthetic construct
MPAAKRVKLDGGDKKYSIGLDIGTNSVGWAVITDEYKVPSKKFKVLGNTDRHSIKKNLIGALLFDSGETAEATRLKRTARRRYTRRKNRICYLQEIFSNEMAKVDDSFFHRLEESFLVEEDKKHERHPIFGNIVDEVAYHEKYPTIYHLRKKLVDSTDKADLRLIYLALAHMIKFRGHFLIEGDLNPDNSDVDKLFIQLVQTYNQLFEENPINASGVDAKAILSARLSKSRRLENLIAQLPGEKKNGLFGNLIALSLGLTPNFKSNFDLAEDAKLQLSKDTYDDDLDNLLAQIGDQYADLFLAAKNLSDAILLSDILRVNTEITKAPLSASMIKRYDEHHQDLTLLKALVRQQLPEKYKEIFFDQSKNGYAGYIDGGASQEEFYKFIKPILEKMDGTEELLVKLNREDLLRKQRTFDNGSIPHQIHLGELHAILRRQEDFYPFLKDNREKIEKILTFRIPYYVGPLARGNSRFAWMTRKSEETITPWNFEEVVDKGASAQSFIERMTNFDKNLPNEKVLPKHSLLYEYFTVYNELTKVKYVTEGMRKPAFLSGEQKKAIVDLLFKTNRKVTVKQLKEDYFKKIECFDSVEISGVEDRFNASLGTYHDLLKIIKDKDFLDNEENEDILEDIVLTLTLFEDREMIEERLKTYAHLFDDKVMKQLKRRRYTGWGRLSRKLINGIRDKQSGKTILDFLKSDGFANRNFMQLIHDDSLTFKEDIQKAQVSGQGDSLHEHIANLAGSPAIKKGILQTVKVVDELVKVMGRHKPENIVIEMARENQTTQKGQKNSRERMKRIEEGIKELGSQILKEHPVENTQLQNEKLYLYYLQNGRDMYVDQELDINRLSDYDVDHIVPQSFLKDDSIDNKVLTRSDKARGKSDNVPSEEVVKKMKNYWRQLLNAKLITQRKFDNLTKAERGGLSELDKAGFIKRQLVETRQITKHVAQILDSRMNTKYDENDKLIREVKVITLKSKLVSDFRKDFQFYKVREINNYHHAHDAYLNAVVGTALIKKYPKLESEFVYGDYKVYDVRKMIAKSEQEIGKATAKYFFYSNIMNFFKTEITLANGEIRKRPLIETNGETGEIVWDKGRDFATVRKVLSMPQVNIVKKTEVQTGGFSKESILPKRNSDKLIARKKDWDPKKYGGFDSPTVAYSVLVVAKVEKGKSKKLKSVKELLGITIMERSSFEKNPIDFLEAKGYKEVKKDLIIKLPKYSLFELENGRKRMLASAGELQKGNELALPSKYVNFLYLASHYEKLKGSPEDNEQKQLFVEQHKHYLDEIIEQISEFSKRVILADANLDKVLSAYNKHRDKPIREQAENIIHLFTLTNLGAPAAFKYFDTTIDRKRYTSTKEVLDATLIHQSITGLYETRIDLSQLGGDGGGGSGGSGGLGIEDEYRLHETSTEPDVSLGSTWLSDFPQAWAETGGMGLAVRQAPLIIPLKATSTPVSIQQYPMSHEARLGIKPHIQRLLDQGILVPCQSPWNTPLLPVKKPGTNDYRPVQDLREVNKRVEDIHPTVPNPYNLLSGLPPSHQWYTVLDLKDAFFCLRLHPTSQPLFAFEWRDPGMGISGQLTWTRLPQGFKNSPTLFNEALHRDLADFRIQHPDLILLQYVDDILLAATSELDCQQGTRALLQTLGDLGYRASAKKAQICQKQVKYLGYLLREGQRWLTEARKETVMGQPVPKTPRQLREFLGKAGFCRLFIPGFAEMAAPLYPLTKPGTLFSWGPDQQKAYQEIKQALLTAPALGLPDLTKPFELFVDEKQGYAKGVLTQKLGPWRRPVAYLSKKLDPVAAGWPPCLRMVAAIAVLTKDAGKLTMGQPLVILAPHAVEALVKQPPDRWLSNARMTHYQAMLLDTDRVQFGPVVALNPATLLPLPEEGAPHDCLEILAETHGTRPDLTDQPIPDADHTWYTDGSSFLQEGQRKAGAAVTTETEVIWAGALPAGTSAQRAELIALTQALKMAEGKRLNVYTDSRYAFATAHIHGEIYRRRGWLTSEGREIKNKSEILALLKALFLPKRLSIIHCLGHQKGDSAEARGNRLADQAAREAAIKTPPDTSTLLIAGKRTADGSEFEKRTADGSEFESPKKKAKVE

SEQ ID NO: 6023 - protein, 2091 aa, synthetic construct
MPAAKRVKLDGGDKKYSIGLDIGTNSVGWAVITDEYKVPSKKFKVLGNTDRHSIKKNLIGALLFDSGETAEATRLKRTARRRYTRRKNRICYLQEIFSNEMAKVDDSFFHRLEESFLVEEDKKHERHPIFGNIVDEVAYHEKYPTIYHLRKKLVDSTDKADLRLIYLALAHMIKFRGHFLIEGDLNPDNSDVDKLFIQLVQTYNQLFEENPINASGVDAKAILSARLSKSRRLENLIAQLPGEKKNGLFGNLIALSLGLTPNFKSNFDLAEDAKLQLSKDTYDDDLDNLLAQIGDQYADLFLAAKNLSDAILLSDILRVNTEITKAPLSASMIKRYDEHHQDLTLLKALVRQQLPEKYKEIFFDQSKNGYAGYIDGGASQEEFYKFIKPILEKMDGTEELLVKLNREDLLRKQRTFDNGSIPHQIHLGELHAILRRQEDFYPFLKDNREKIEKILTFRIPYYVGPLARGNSRFAWMTRKSEETITPWNFEEVVDKGASAQSFIERMTNFDKNLPNEKVLPKHSLLYEYFTVYNELTKVKYVTEGMRKPAFLSGEQKKAIVDLLFKTNRKVTVKQLKEDYFKKIECFDSVEISGVEDRFNASLGTYHDLLKIIKDKDFLDNEENEDILEDIVLTLTLFEDREMIEERLKTYAHLFDDKVMKQLKRRRYTGWGRLSRKLINGIRDKQSGKTILDFLKSDGFANRNFMQLIHDDSLTFKEDIQKAQVSGQGDSLHEHIANLAGSPAIKKGILQTVKVVDELVKVMGRHKPENIVIEMARENQTTQKGQKNSRERMKRIEEGIKELGSQILKEHPVENTQLQNEKLYLYYLQNGRDMYVDQELDINRLSDYDVDHIVPQSFLKDDSIDNKVLTRSDKARGKSDNVPSEEVVKKMKNYWRQLLNAKLITQRKFDNLTKAERGGLSELDKAGFIKRQLVETRQITKHVAQILDSRMNTKYDENDKLIREVKVITLKSKLVSDFRKDFQFYKVREINNYHHAHDAYLNAVVGTALIKKYPKLESEFVYGDYKVYDVRKMIAKSEQEIGKATAKYFFYSNIMNFFKTEITLANGEIRKRPLIETNGETGEIVWDKGRDFATVRKVLSMPQVNIVKKTEVQTGGFSKESILPKRNSDKLIARKKDWDPKKYGGFDSPTVAYSVLVVAKVEKGKSKKLKSVKELLGITIMERSSFEKNPIDFLEAKGYKEVKKDLIIKLPKYSLFELENGRKRMLASAGELQKGNELALPSKYVNFLYLASHYEKLKGSPEDNEQKQLFVEQHKHYLDEIIEQISEFSKRVILADANLDKVLSAYNKHRDKPIREQAENIIHLFTLTNLGAPAAFKYFDTTIDRKRYTSTKEVLDATLIHQSITGLYETRIDLSQLGGDGGGGSGGSGGTLGIEDEYRLHETSTEPDVSLGSTWLSDFPQAWAETGGMGLAVRQAPLIIPLKATSTPVSIQQYPMSHEARLGIKPHIQRLLDQGILVPCQSPWNTPLLPVKKPGTNDYRPVQDLREVNKRVEDIHPTVPNPYNLLSGLPPSHQWYTVLDLKDAFFCLRLHPTSQPLFAFEWRDPGMGISGQLTWTRLPQGFKNSPTLFNEALHRDLADFRIQHPDLILLQYVDDILLAATSELDCQQGTRALLQTLGDLGYRASAKKAQICQKQVKYLGYLLREGQRWLTEARKETVMGQPVPKTPRQLREFLGTAGFCRLWIPGFAEMAAPLYPLTKPGTLFSWGPDQQKAYQEIKQALLTAPALGLPDLTKPFELFVDEKQGYAKGVLTQKLGPWRRPVAYLSKKLDPVAAGWPPCLRMVAAIAVLTKDAGKLTMGQPLVILAPHAVEALVKQPPDRWLSNARMTHYQAMLLDTDRVQFGPVVALNPATLLPLPEEGAPHDCLEILAETHGTRPDLTDQPIPDADHTWYTDGSSFLQEGQRKAGAAVTTETEVIWAGALPAGTSAQRAELIALTQALKMAEGKRLNVYTDSRYAFATAHIHGEIYRRRGWLTSEGREIKNKSEILALLKALFLPKRLSIIHCLGHQKGDSAEARGNRLADQAAREAAIKTPPDTSTLLAGKRTADGSEFEKRTADGSEFESPKKKAKVE

SEQ ID NO: 6024 - protein, 2091 aa, synthetic construct
MPAAKRVKLDGGDKKYSIGLDIGTNSVGWAVITDEYKVPSKKFKVLGNTDRHSIKKNLIGALLFDSGETAEATRLKRTARRRYTRRKNRICYLQEIFSNEMAKVDDSFFHRLEESFLVEEDKKHERHPIFGNIVDEVAYHEKYPTIYHLRKKLVDSTDKADLRLIYLALAHMIKFRGHFLIEGDLNPDNSDVDKLFIQLVQTYNQLFEENPINASGVDAKAILSARLSKSRRLENLIAQLPGEKKNGLFGNLIALSLGLTPNFKSNFDLAEDAKLQLSKDTYDDDLDNLLAQIGDQYADLFLAAKNLSDAILLSDILRVNTEITKAPLSASMIKRYDEHHQDLTLLKALVRQQLPEKYKEIFFDQSKNGYAGYIDGGASQEEFYKFIKPILEKMDGTEELLVKLNREDLLRKQRTFDNGSIPHQIHLGELHAILRRQEDFYPFLKDNREKIEKILTFRIPYYVGPLARGNSRFAWMTRKSEETITPWNFEEVVDKGASAQSFIERMTNFDKNLPNEKVLPKHSLLYEYFTVYNELTKVKYVTEGMRKPAFLSGEQKKAIVDLLFKTNRKVTVKQLKEDYFKKIECFDSVEISGVEDRFNASLGTYHDLLKIIKDKDFLDNEENEDILEDIVLTLTLFEDREMIEERLKTYAHLFDDKVMKQLKRRRYTGWGRLSRKLINGIRDKQSGKTILDFLKSDGFANRNFMQLIHDDSLTFKEDIQKAQVSGQGDSLHEHIANLAGSPAIKKGILQTVKVVDELVKVMGRHKPENIVIEMARENQTTQKGQKNSRERMKRIEEGIKELGSQILKEHPVENTQLQNEKLYLYYLQNGRDMYVDQELDINRLSDYDVDHIVPQSFLKDDSIDNKVLTRSDKARGKSDNVPSEEVVKKMKNYWRQLLNAKLITQRKFDNLTKAERGGLSELDKAGFIKRQLVETRQITKHVAQILDSRMNTKYDENDKLIREVKVITLKSKLVSDFRKDFQFYKVREINNYHHAHDAYLNAVVGTALIKKYPKLESEFVYGDYKVYDVRKMIAKSEQEIGKATAKYFFYSNIMNFFKTEITLANGEIRKRPLIETNGETGEIVWDKGRDFATVRKVLSMPQVNIVKKTEVQTGGFSKESILPKRNSDKLIARKKDWDPKKYGGFDSPTVAYSVLVVAKVEKGKSKKLKSVKELLGITIMERSSFEKNPIDFLEAKGYKEVKKDLIIKLPKYSLFELENGRKRMLASAGELQKGNELALPSKYVNFLYLASHYEKLKGSPEDNEQKQLFVEQHKHYLDEIIEQISEFSKRVILADANLDKVLSAYNKHRDKPIREQAENIIHLFTLTNLGAPAAFKYFDTTIDRKRYTSTKEVLDATLIHQSITGLYETRIDLSQLGGDGGGGSGGSGGTLNIEDEYRLHETSKEPDVSLGSTWLSDFPQAWAETGGMGLAVRQAPLIIPLKATSTPVSIKQYPMSQEARLGIKPHIQRLLDQGILVPCQSPWNTPLLPVKKPGTNDYRPVQDLREVNKRVEDIHPTVPNPYNLLSGLPPSHQWYTVLDLKDAFFCLRLHPTSQPLFAFEWRDPEMGISGQLTWTRLPQGFKNSPTLFNEALHRDLAGFRIQHPDLILLQYVDDLLLAATSELDCQQGTRALLQTLGDLGYRASAKKAQICQKQVKYLGYLLKEGQRWLTEARKETVMGQPIPKTPRQLREFLGTAGFCRLWIPGFAEMAAPLYPLTKPGTLFNWGPDQQKAFQEIKQALLTAPALGLPDLTKPFELFVDEKQGYAKGVLTQKLGPWRRPVAYLSKKLDPVAAGWPPCLRMVAAIAVLTKDAGKLTMGQPLVILAPHAVEALVKQPPDRWLSNARMTHYQALLLDTDRVQFGPVVALNPATLLPLPEEGLQHDCLDILAEAHGTRSDLMDQPLPDADHTWYTDGSSFLQEGQRKAGAAVTTETEVIWARALPAGTSAQRAELIALTQALKMAEGKKLNVYTDSRYAFATAHIHGEIYRRRGWLTSEGKEIKNKDEILALLKALFLPKRLSIIHCPGHQKGNSAEARGNRMADQAAREVATRETPETSTLLAGKRTADGSEFEKRTADGSEFESPKKKAKVE

SEQ ID NO: 6025 - protein, 2091 aa, synthetic construct
MPAAKRVKLDGGDKKYSIGLDIGTNSVGWAVITDEYKVPSKKFKVLGNTDRHSIKKNLIGALLFDSGETAEATRLKRTARRRYTRRKNRICYLQEIFSNEMAKVDDSFFHRLEESFLVEEDKKHERHPIFGNIVDEVAYHEKYPTIYHLRKKLVDSTDKADLRLIYLALAHMIKFRGHFLIEGDLNPDNSDVDKLFIQLVQTYNQLFEENPINASGVDAKAILSARLSKSRRLENLIAQLPGEKKNGLFGNLIALSLGLTPNFKSNFDLAEDAKLQLSKDTYDDDLDNLLAQIGDQYADLFLAAKNLSDAILLSDILRVNTEITKAPLSASMIKRYDEHHQDLTLLKALVRQQLPEKYKEIFFDQSKNGYAGYIDGGASQEEFYKFIKPILEKMDGTEELLVKLNREDLLRKQRTFDNGSIPHQIHLGELHAILRRQEDFYPFLKDNREKIEKILTFRIPYYVGPLARGNSRFAWMTRKSEETITPWNFEEVVDKGASAQSFIERMTNFDKNLPNEKVLPKHSLLYEYFTVYNELTKVKYVTEGMRKPAFLSGEQKKAIVDLLFKTNRKVTVKQLKEDYFKKIECFDSVEISGVEDRFNASLGTYHDLLKIIKDKDFLDNEENEDILEDIVLTLTLFEDREMIEERLKTYAHLFDDKVMKQLKRRRYTGWGRLSRKLINGIRDKQSGKTILDFLKSDGFANRNFMQLIHDDSLTFKEDIQKAQVSGQGDSLHEHIANLAGSPAIKKGILQTVKVVDELVKVMGRHKPENIVIEMARENQTTQKGQKNSRERMKRIEEGIKELGSQILKEHPVENTQLQNEKLYLYYLQNGRDMYVDQELDINRLSDYDVDHIVPQSFLKDDSIDNKVLTRSDKARGKSDNVPSEEVVKKMKNYWRQLLNAKLITQRKFDNLTKAERGGLSELDKAGFIKRQLVETRQITKHVAQILDSRMNTKYDENDKLIREVKVITLKSKLVSDFRKDFQFYKVREINNYHHAHDAYLNAVVGTALIKKYPKLESEFVYGDYKVYDVRKMIAKSEQEIGKATAKYFFYSNIMNFFKTEITLANGEIRKRPLIETNGETGEIVWDKGRDFATVRKVLSMPQVNIVKKTEVQTGGFSKESILPKRNSDKLIARKKDWDPKKYGGFDSPTVAYSVLVVAKVEKGKSKKLKSVKELLGITIMERSSFEKNPIDFLEAKGYKEVKKDLIIKLPKYSLFELENGRKRMLASAGELQKGNELALPSKYVNFLYLASHYEKLKGSPEDNEQKQLFVEQHKHYLDEIIEQISEFSKRVILADANLDKVLSAYNKHRDKPIREQAENIIHLFTLTNLGAPAAFKYFDTTIDRKRYTSTKEVLDATLIHQSITGLYETRIDLSQLGGDGGGGSGGSGGTLNIEDEHRLHETSKEPDVSLGSTWLSDFPQAWAETGGMGLAVRQAPLIIPLKATSTPVSIKQYPMSQEARLGIKPHIQRLLDQGILVPCQSPWNTPLLPVKKPGTNDYRPVQDLREVNKRVEDIHPTVPNPYNLLSGLPPSHQWYTVLDLKDAFFCLRLHPTSQPLFAFEWRDPEMGISGQLTWTRLPQGFKNSPTLFNEALHRDLADFRIQHPDLILLQYVDDLLLAATSELDCQQGTRALLQTLGNLGYRASAKKAQICQKQVKYLGYLLKEGQRWLTEARKETVMGQPTPKTPRQLREFLGTAGFCRLWIPGFAEMAAPLYPLTKPGTLFNWGPDQQKAYQEIKQALLTAPALGLPDLTKPFELFVDEKQGYAKGVLTQKLGPWRRPVAYLSKKLDPVAAGWPPCLRMVAAIAVLTKDAGKLTMGQPLVILAPHAVEALVKQPPDRWLSNARMTHYQALLLDTDRVQFGPVVALNPATLLPLPEEGLQHNCLDILAEAHGTRPDLTDQPLPDADHTWYTDGSSLLQEGQRKAGAAVTTETEVIWAKALPAGTSAQRAELIALTQALKMAEGKKLNVYTDSRYAFATAHIHGEIYRRRGWLTSEGKEIKNKDEILALLKALFLPKRLSIIHCPGHQKGHSAEARGNRMADQAARKAAITETPDTSTLLAGKRTADGSEFEKRTADGSEFESPKKKAKVE

SEQ ID NO: 6026 - protein, 2085 aa, synthetic construct
MPAAKRVKLDGGDKKYSIGLDIGTNSVGWAVITDEYKVPSKKFKVLGNTDRHSIKKNLIGALLFDSGETAEATRLKRTARRRYTRRKNRICYLQEIFSNEMAKVDDSFFHRLEESFLVEEDKKHERHPIFGNIVDEVAYHEKYPTIYHLRKKLVDSTDKADLRLIYLALAHMIKFRGHFLIEGDLNPDNSDVDKLFIQLVQTYNQLFEENPINASGVDAKAILSARLSKSRRLENLIAQLPGEKKNGLFGNLIALSLGLTPNFKSNFDLAEDAKLQLSKDTYDDDLDNLLAQIGDQYADLFLAAKNLSDAILLSDILRVNTEITKAPLSASMIKRYDEHHQDLTLLKALVRQQLPEKYKEIFFDQSKNGYAGYIDGGASQEEFYKFIKPILEKMDGTEELLVKLNREDLLRKQRTFDNGSIPHQIHLGELHAILRRQEDFYPFLKDNREKIEKILTFRIPYYVGPLARGNSRFAWMTRKSEETITPWNFEEVVDKGASAQSFIERMTNFDKNLPNEKVLPKHSLLYEYFTVYNELTKVKYVTEGMRKPAFLSGEQKKAIVDLLFKTNRKVTVKQLKEDYFKKIECFDSVEISGVEDRFNASLGTYHDLLKIIKDKDFLDNEENEDILEDIVLTLTLFEDREMIEERLKTYAHLFDDKVMKQLKRRRYTGWGRLSRKLINGIRDKQSGKTILDFLKSDGFANRNFMQLIHDDSLTFKEDIQKAQVSGQGDSLHEHIANLAGSPAIKKGILQTVKVVDELVKVMGRHKPENIVIEMARENQTTQKGQKNSRERMKRIEEGIKELGSQILKEHPVENTQLQNEKLYLYYLQNGRDMYVDQELDINRLSDYDVDHIVPQSFLKDDSIDNKVLTRSDKARGKSDNVPSEEVVKKMKNYWRQLLNAKLITQRKFDNLTKAERGGLSELDKAGFIKRQLVETRQITKHVAQILDSRMNTKYDENDKLIREVKVITLKSKLVSDFRKDFQFYKVREINNYHHAHDAYLNAVVGTALIKKYPKLESEFVYGDYKVYDVRKMIAKSEQEIGKATAKYFFYSNIMNFFKTEITLANGEIRKRPLIETNGETGEIVWDKGRDFATVRKVLSMPQVNIVKKTEVQTGGFSKESILPKRNSDKLIARKKDWDPKKYGGFDSPTVAYSVLVVAKVEKGKSKKLKSVKELLGITIMERSSFEKNPIDFLEAKGYKEVKKDLIIKLPKYSLFELENGRKRMLASAGELQKGNELALPSKYVNFLYLASHYEKLKGSPEDNEQKQLFVEQHKHYLDEIIEQISEFSKRVILADANLDKVLSAYNKHRDKPIREQAENIIHLFTLTNLGAPAAFKYFDTTIDRKRYTSTKEVLDATLIHQSITGLYETRIDLSQLGGDGGGGSGGSGGTLQLDDEYRLYSPLVKPDQNIQFWLEQFPQAWAETAGMGLAKQVPPQVIQLKASATPVSVRQYPLSKEAQEGIRPHVQRLIQQGILVPVQSPWNTPLLPVRKPGTNDYRPVQDLREVNKRVQDIHPTVPNPYNLLCALPPQRSWYTVLDLKDAFFCLRLHPTSQPLFAFEWRDPGTGRTGQLTWTRLPQGFKNSPTIFDEALHRDLANFRIQHPQVTLLQYVDDLLLAGATKQDCLEGTKALLLELSDLGYRASAKKAQICRREVTYLGYSLRDGQRWLTEARKKTVVQIPAPTTAKQVREFLGTAGFCRLWIPGFATLAAPLYPLTKEKGEFSWAPEHQKAFDAIKKALLSAPALALPDVTKPFTLYVDERKGVARGVLTQTLGPWRRPVAYLSKKLDPVASGWPVCLKAIAAVAILVKDADKLTLGQNITVIAPHALENIVRQPPDRWMTNARMTHYQSLLLTERVTFAPPAALNPATLLPEETDEPVTHDCHQLLIEETGVRKDLTDIPLTGEVLTWFTDGSSYVVEGKRMAGAAVVDGTRTIWASSLPEGTSAQKAELMALTQALRLAEGKSINIYTDSRYAFATAHVHGAIYKQRGLLTSAGREIKNKEEILSLLEALHLPKRLAIIHCPGHQKAKDPISRGNQMADRVAKQAAQGVNLLAGKRTADGSEFEKRTADGSEFESPKKKAKVE

SEQ ID NO: 6027 - protein, 2171 aa, synthetic construct
MPAAKRVKLDGGDKKYSIGLDIGTNSVGWAVITDEYKVPSKKFKVLGNTDRHSIKKNLIGALLFDSGETAEATRLKRTARRRYTRRKNRICYLQEIFSNEMAKVDDSFFHRLEESFLVEEDKKHERHPIFGNIVDEVAYHEKYPTIYHLRKKLVDSTDKADLRLIYLALAHMIKFRGHFLIEGDLNPDNSDVDKLFIQLVQTYNQLFEENPINASGVDAKAILSARLSKSRRLENLIAQLPGEKKNGLFGNLIALSLGLTPNFKSNFDLAEDAKLQLSKDTYDDDLDNLLAQIGDQYADLFLAAKNLSDAILLSDILRVNTEITKAPLSASMIKRYDEHHQDLTLLKALVRQQLPEKYKEIFFDQSKNGYAGYIDGGASQEEFYKFIKPILEKMDGTEELLVKLNREDLLRKQRTFDNGSIPHQIHLGELHAILRRQEDFYPFLKDNREKIEKILTFRIPYYVGPLARGNSRFAWMTRKSEETITPWNFEEVVDKGASAQSFIERMTNFDKNLPNEKVLPKHSLLYEYFTVYNELTKVKYVTEGMRKPAFLSGEQKKAIVDLLFKTNRKVTVKQLKEDYFKKIECFDSVEISGVEDRFNASLGTYHDLLKIIKDKDFLDNEENEDILEDIVLTLTLFEDREMIEERLKTYAHLFDDKVMKQLKRRRYTGWGRLSRKLINGIRDKQSGKTILDFLKSDGFANRNFMQLIHDDSLTFKEDIQKAQVSGQGDSLHEHIANLAGSPAIKKGILQTVKVVDELVKVMGRHKPENIVIEMARENQTTQKGQKNSRERMKRIEEGIKELGSQILKEHPVENTQLQNEKLYLYYLQNGRDMYVDQELDINRLSDYDVDHIVPQSFLKDDSIDNKVLTRSDKARGKSDNVPSEEVVKKMKNYWRQLLNAKLITQRKFDNLTKAERGGLSELDKAGFIKRQLVETRQITKHVAQILDSRMNTKYDENDKLIREVKVITLKSKLVSDFRKDFQFYKVREINNYHHAHDAYLNAVVGTALIKKYPKLESEFVYGDYKVYDVRKMIAKSEQEIGKATAKYFFYSNIMNFFKTEITLANGEIRKRPLIETNGETGEIVWDKGRDFATVRKVLSMPQVNIVKKTEVQTGGFSKESILPKRNSDKLIARKKDWDPKKYGGFDSPTVAYSVLVVAKVEKGKSKKLKSVKELLGITIMERSSFEKNPIDFLEAKGYKEVKKDLIIKLPKYSLFELENGRKRMLASAGELQKGNELALPSKYVNFLYLASHYEKLKGSPEDNEQKQLFVEQHKHYLDEIIEQISEFSKRVILADANLDKVLSAYNKHRDKPIREQAENIIHLFTLTNLGAPAAFKYFDTTIDRKRYTSTKEVLDATLIHQSITGLYETRIDLSQLGGDGGGGSGGSGGMDPLQLLQPLEAEIKGTKLKAHWNSGATITCVPQAFLEEEVPIKNIWIKTIHGEKEQPVYYLTFKIQGRKVEAEVISSPYDYILVSPSDIPWLMKKPLQLTTLVPLQEYEERLLKQTMLTGSYKEKLQSLFLKYDALWQHWENQVGHRRIKPHHIATGTVNPRPQKQYPINPKAKASIQTVINDLLKQGVLIQQNSIMNTPVYPVPKPDGKWRMVLDYREVNKTIPLIAAQNQHSAGILSSIFRGKYKTTLDLSNGFWAHSITPESYWLTAFTWLGQQYCWTRLPQGFLNSPALFNADVVDLLKEVPNVQVYVDDIYISHDDPREHLEQLEKVFSLLLNAGYVVSLKKSEIAQHEVEFLGFNITKEGRGLTETFKQKLLNITPPRDLKQLQSILGLLNFARNFIPNFSELVKPLYNIIATAPGKYITWTTDNSQQLQNIISMLNSAENLEERNPEVRLIMKVNTSPSAGYIRFYNEFAKRPIMYLNYVYTKAEVKFTNTEKLLTTIHKGLIKALDLGMGQEILVYSPIVSMTKIQKTPLPERKALPIRWITWMSYLEDPRIQFHYDKTLPELQQVPTVTDDIIAKIKHPSEFSMVFYTDGSAIKHPNVNKSHNAGMGIAQVQFKPEFTVINTWSIPLGDHTAQLAEVAAVEFACKKALKIDGPVLIVTDSFYVAESVNKELPYWQSNGFFNNKKKPLKHVSKWKSIADCIQLKPDIIIIHEKGHQPTASTFHTEGNNLADKLATQGSYVVNAGKRTADGSEFEKRTADGSEFESPKKKAKVE

SEQ ID NO: 6028 - protein, 2091 aa, synthetic construct
MPAAKRVKLDGGDKKYSIGLDIGTNSVGWAVITDEYKVPSKKFKVLGNTDRHSIKKNLIGALLFDSGETAEATRLKRTARRRYTRRKNRICYLQEIFSNEMAKVDDSFFHRLEESFLVEEDKKHERHPIFGNIVDEVAYHEKYPTIYHLRKKLVDSTDKADLRLIYLALAHMIKFRGHFLIEGDLNPDNSDVDKLFIQLVQTYNQLFEENPINASGVDAKAILSARLSKSRRLENLIAQLPGEKKNGLFGNLIALSLGLTPNFKSNFDLAEDAKLQLSKDTYDDDLDNLLAQIGDQYADLFLAAKNLSDAILLSDILRVNTEITKAPLSASMIKRYDEHHQDLTLLKALVRQQLPEKYKEIFFDQSKNGYAGYIDGGASQEEFYKFIKPILEKMDGTEELLVKLNREDLLRKQRTFDNGSIPHQIHLGELHAILRRQEDFYPFLKDNREKIEKILTFRIPYYVGPLARGNSRFAWMTRKSEETITPWNFEEVVDKGASAQSFIERMTNFDKNLPNEKVLPKHSLLYEYFTVYNELTKVKYVTEGMRKPAFLSGEQKKAIVDLLFKTNRKVTVKQLKEDYFKKIECFDSVEISGVEDRFNASLGTYHDLLKIIKDKDFLDNEENEDILEDIVLTLTLFEDREMIEERLKTYAHLFDDKVMKQLKRRRYTGWGRLSRKLINGIRDKQSGKTILDFLKSDGFANRNFMQLIHDDSLTFKEDIQKAQVSGQGDSLHEHIANLAGSPAIKKGILQTVKVVDELVKVMGRHKPENIVIEMARENQTTQKGQKNSRERMKRIEEGIKELGSQILKEHPVENTQLQNEKLYLYYLQNGRDMYVDQELDINRLSDYDVDHIVPQSFLKDDSIDNKVLTRSDKARGKSDNVPSEEVVKKMKNYWRQLLNAKLITQRKFDNLTKAERGGLSELDKAGFIKRQLVETRQITKHVAQILDSRMNTKYDENDKLIREVKVITLKSKLVSDFRKDFQFYKVREINNYHHAHDAYLNAVVGTALIKKYPKLESEFVYGDYKVYDVRKMIAKSEQEIGKATAKYFFYSNIMNFFKTEITLANGEIRKRPLIETNGETGEIVWDKGRDFATVRKVLSMPQVNIVKKTEVQTGGFSKESILPKRNSDKLIARKKDWDPKKYGGFDSPTVAYSVLVVAKVEKGKSKKLKSVKELLGITIMERSSFEKNPIDFLEAKGYKEVKKDLIIKLPKYSLFELENGRKRMLASAGELQKGNELALPSKYVNFLYLASHYEKLKGSPEDNEQKQLFVEQHKHYLDEIIEQISEFSKRVILADANLDKVLSAYNKHRDKPIREQAENIIHLFTLTNLGAPAAFKYFDTTIDRKRYTSTKEVLDATLIHQSITGLYETRIDLSQLGGDGGGGSGGSGGTLNIEDEYRLHETSKEPDVPLGSTWLSDFPQAWAETGGMGLAVRQAPLIIPLKATSTPVSIKQYPMSQEARLGIKPHIQRLLDQGILVPCQSPWNTPLLPVKKPGTNDYRPVQDLREVNKRVEDIHPTVPNPYNLLSGLPPSHQWYTVLDLKDAFFCLRLHPTSQPLFAFEWRDPEMGISGQLTWTRLPQGFKNSPTLFNEALHRDLADFRIQHPDLILLQYVDDLLLAATSEQDCQRGTRALLQTLGNLGYRASAKKAQICQKQVKYLGYLLKEGQRWLTEARKETVMGQPTPKTPRQLREFLGTAGFCRLWIPGFAEMAAPLYPLTKPGTLFNWGPDQQKAYQEIKQALLTAPALGLPDLTKPFELFVDEKQGYAKGVLTQKLGPWRRPVAYLSKKLDPVAAGWPPCLRMVAAIAVLTKDAGKLTMGQPLVILAPHAVEALVKQPPDRWLSNARMTHYQAMLLDTDRVQFGPVVALNPATLLPLPEKEAPHDCLEILAETHGTRPDLTDQPIPDADYTWYTDGSSFLQEGQRRAGAAVTTETEVIWARALPAGTSAQRAELIALTQALKMAEGKKLNVYTDSRYAFATAHVHGEIYRRRGWLTSEGREIKNKNEILALLKALFLPKRLSIIHCPGHQKGNSAEARGNRMADQAAREAAMKAVLETSTLLAGKRTADGSEFEKRTADGSEFESPKKKAKVE

SEQ ID NO: 6029 - protein, 2096 aa, synthetic construct
MPAAKRVKLDGGDKKYSIGLDIGTNSVGWAVITDEYKVPSKKFKVLGNTDRHSIKKNLIGALLFDSGETAEATRLKRTARRRYTRRKNRICYLQEIFSNEMAKVDDSFFHRLEESFLVEEDKKHERHPIFGNIVDEVAYHEKYPTIYHLRKKLVDSTDKADLRLIYLALAHMIKFRGHFLIEGDLNPDNSDVDKLFIQLVQTYNQLFEENPINASGVDAKAILSARLSKSRRLENLIAQLPGEKKNGLFGNLIALSLGLTPNFKSNFDLAEDAKLQLSKDTYDDDLDNLLAQIGDQYADLFLAAKNLSDAILLSDILRVNTEITKAPLSASMIKRYDEHHQDLTLLKALVRQQLPEKYKEIFFDQSKNGYAGYIDGGASQEEFYKFIKPILEKMDGTEELLVKLNREDLLRKQRTFDNGSIPHQIHLGELHAILRRQEDFYPFLKDNREKIEKILTFRIPYYVGPLARGNSRFAWMTRKSEETITPWNFEEVVDKGASAQSFIERMTNFDKNLPNEKVLPKHSLLYEYFTVYNELTKVKYVTEGMRKPAFLSGEQKKAIVDLLFKTNRKVTVKQLKEDYFKKIECFDSVEISGVEDRFNASLGTYHDLLKIIKDKDFLDNEENEDILEDIVLTLTLFEDREMIEERLKTYAHLFDDKVMKQLKRRRYTGWGRLSRKLINGIRDKQSGKTILDFLKSDGFANRNFMQLIHDDSLTFKEDIQKAQVSGQGDSLHEHIANLAGSPAIKKGILQTVKVVDELVKVMGRHKPENIVIEMARENQTTQKGQKNSRERMKRIEEGIKELGSQILKEHPVENTQLQNEKLYLYYLQNGRDMYVDQELDINRLSDYDVDHIVPQSFLKDDSIDNKVLTRSDKARGKSDNVPSEEVVKKMKNYWRQLLNAKLITQRKFDNLTKAERGGLSELDKAGFIKRQLVETRQITKHVAQILDSRMNTKYDENDKLIREVKVITLKSKLVSDFRKDFQFYKVREINNYHHAHDAYLNAVVGTALIKKYPKLESEFVYGDYKVYDVRKMIAKSEQEIGKATAKYFFYSNIMNFFKTEITLANGEIRKRPLIETNGETGEIVWDKGRDFATVRKVLSMPQVNIVKKTEVQTGGFSKESILPKRNSDKLIARKKDWDPKKYGGFDSPTVAYSVLVVAKVEKGKSKKLKSVKELLGITIMERSSFEKNPIDFLEAKGYKEVKKDLIIKLPKYSLFELENGRKRMLASAGELQKGNELALPSKYVNFLYLASHYEKLKGSPEDNEQKQLFVEQHKHYLDEIIEQISEFSKRVILADANLDKVLSAYNKHRDKPIREQAENIIHLFTLTNLGAPAAFKYFDTTIDRKRYTSTKEVLDATLIHQSITGLYETRIDLSQLGGDGGGGSGGSGGSGGTAPLEEEYRLFLEAPIQNVTLLEQWKREIPKVWAEINPPGLASTQAPIHVQLLSTALPVRVRQYPITLEAKRSLRETIRKFRAAGILRPVHSPWNTPLLPVRKSGTSEYRMVQDLREVNKRVETIHPTVPNPYTLLSLLPPDRIWYSVLDLKDAFFCIPLAPESQLIFAFEWADAEEGESGQLTWTRLPQGFKNSPTLFNEALNRDLQGFRLDHPSVSLLQYVDDLLIAADTQAACLSATRDLLMTLAELGYRVSGKKAQLCQEEVTYLGFKIHKGSRSLSNSRTQAILQIPVPKTKRQVREFLGTIGYCRLWIPGFAELAQPLYAATRPGNDPLVWGEKEEEAFQSLKLALTQPPALALPSLDKPFQLFVEETSGAAKGVLTQALGPWKRPVAYLSKRLDPVAAGWPRCLRAIAAAALLTREASKLTFGQDIEITSSHNLESLLRSPPDKWLTNARITQYQVLLLDPPRVRFKQTAALNPATLLPETDDTLPIHHCLDTLDSLTSTRPDLTDQPLAQAEATLFTDGSSYIRDGKRYAGAAVVTLDSVIWAEPLPIGTSAQKAELIALTKALEWSKDKSVNIYTDSRYAFATLHVHGMIYRERGWLTAGGKAIKNAPEILALLTAVWLPKRVAVMHCKGHQKDDAPTSTGNRRADEVAREVAIRPLSTQATISAGKRTADGSEFEKRTADGSEFESPKKKAKVE

SEQ ID NO: 6030 - protein, 2096 aa, synthetic construct; identical to SEQ ID NO: 4501

SEQ ID NO: 6031 - protein, 2093 aa, synthetic construct
MPAAKRVKLDGGDKKYSIGLDIGTNSVGWAVITDEYKVPSKKFKVLGNTDRHSIKKNLIGALLFDSGETAEATRLKRTARRRYTRRKNRICYLQEIFSNEMAKVDDSFFHRLEESFLVEEDKKHERHPIFGNIVDEVAYHEKYPTIYHLRKKLVDSTDKADLRLIYLALAHMIKFRGHFLIEGDLNPDNSDVDKLFIQLVQTYNQLFEENPINASGVDAKAILSARLSKSRRLENLIAQLPGEKKNGLFGNLIALSLGLTPNFKSNFDLAEDAKLQLSKDTYDDDLDNLLAQIGDQYADLFLAAKNLSDAILLSDILRVNTEITKAPLSASMIKRYDEHHQDLTLLKALVRQQLPEKYKEIFFDQSKNGYAGYIDGGASQEEFYKFIKPILEKMDGTEELLVKLNREDLLRKQRTFDNGSIPHQIHLGELHAILRRQEDFYPFLKDNREKIEKILTFRIPYYVGPLARGNSRFAWMTRKSEETITPWNFEEVVDKGASAQSFIERMTNFDKNLPNEKVLPKHSLLYEYFTVYNELTKVKYVTEGMRKPAFLSGEQKKAIVDLLFKTNRKVTVKQLKEDYFKKIECFDSVEISGVEDRFNASLGTYHDLLKIIKDKDFLDNEENEDILEDIVLTLTLFEDREMIEERLKTYAHLFDDKVMKQLKRRRYTGWGRLSRKLINGIRDKQSGKTILDFLKSDGFANRNFMQLIHDDSLTFKEDIQKAQVSGQGDSLHEHIANLAGSPAIKKGILQTVKVVDELVKVMGRHKPENIVIEMARENQTTQKGQKNSRERMKRIEEGIKELGSQILKEHPVENTQLQNEKLYLYYLQNGRDMYVDQELDINRLSDYDVDHIVPQSFLKDDSIDNKVLTRSDKARGKSDNVPSEEVVKKMKNYWRQLLNAKLITQRKFDNLTKAERGGLSELDKAGFIKRQLVETRQITKHVAQILDSRMNTKYDENDKLIREVKVITLKSKLVSDFRKDFQFYKVREINNYHHAHDAYLNAVVGTALIKKYPKLESEFVYGDYKVYDVRKMIAKSEQEIGKATAKYFFYSNIMNFFKTEITLANGEIRKRPLIETNGETGEIVWDKGRDFATVRKVLSMPQVNIVKKTEVQTGGFSKESILPKRNSDKLIARKKDWDPKKYGGFDSPTVAYSVLVVAKVEKGKSKKLKSVKELLGITIMERSSFEKNPIDFLEAKGYKEVKKDLIIKLPKYSLFELENGRKRMLASAGELQKGNELALPSKYVNFLYLASHYEKLKGSPEDNEQKQLFVEQHKHYLDEIIEQISEFSKRVILADANLDKVLSAYNKHRDKPIREQAENIIHLFTLTNLGAPAAFKYFDTTIDRKRYTSTKEVLDATLIHQSITGLYETRIDLSQLGGDGGGGSGGSGGSGGTLQLEEEYRLFEPESTQKQEMDIWLKNFPQAWAETGGMGTAHCQAPVLIQLKATATPISIRQYPMPHEAYQGIKPHIRRMLDQGILKPCQSPWNTPLLPVKKPGTEDYRPVQDLREVNKRVEDIHPTVPNPYNLLSTLPPSHPWYTVLDLKDAFFCLRLHSESQLLFAFEWRDPEIGLSGQLTWTRLPQGFKNSPTLFNEALHSDLADFRVRYPALVLLQYVDDLLLAAATRTECLEGTKALLETLGNKGYRASAKKAQICLQEVTYLGYSLKDGQRWLTKARKEAILSIPVPKNSRQVREFLGKAGYCRLFIPGFAELAAPLYPLTRPGTLFQWGTEQQLAFEDIKKALLSSPALGLPDITKPFELFIDENSGFAKGVLVQKLGPWKRPVAYLSKKLDTVASGWPPCLRMVAAIAILVKDAGKLTLGQPLTILTSHPVEALVRQPPNKWLSNARMTHYQAMLLDAERVHFGPTVSLNPATLLPLPSGGNHHDCLQILAETHGTRPDLTDQPLPDADLTWYTDGSSFIRNGEREAGAAVTTESEVIWAAPLPPGTSAQRAELIALTQALKMAEGKKLTVYTDSRYAFATTHVHGEIYRRRGWLTSEGKEIKNKNEILALLEALFLPKRLSIIHCPGHQKGDSPQAKGNRLADDTAKKAATETHSSLTVLPAGKRTADGSEFEKRTADGSEFESPKKKAKVE

SEQ ID NO: 6032 - protein, 2094 aa, synthetic construct
MPAAKRVKLDGGDKKYSIGLDIGTNSVGWAVITDEYKVPSKKFKVLGNTDRHSIKKNLIGALLFDSGETAEATRLKRTARRRYTRRKNRICYLQEIFSNEMAKVDDSFFHRLEESFLVEEDKKHERHPIFGNIVDEVAYHEKYPTIYHLRKKLVDSTDKADLRLIYLALAHMIKFRGHFLIEGDLNPDNSDVDKLFIQLVQTYNQLFEENPINASGVDAKAILSARLSKSRRLENLIAQLPGEKKNGLFGNLIALSLGLTPNFKSNFDLAEDAKLQLSKDTYDDDLDNLLAQIGDQYADLFLAAKNLSDAILLSDILRVNTEITKAPLSASMIKRYDEHHQDLTLLKALVRQQLPEKYKEIFFDQSKNGYAGYIDGGASQEEFYKFIKPILEKMDGTEELLVKLNREDLLRKQRTFDNGSIPHQIHLGELHAILRRQEDFYPFLKDNREKIEKILTFRIPYYVGPLARGNSRFAWMTRKSEETITPWNFEEVVDKGASAQSFIERMTNFDKNLPNEKVLPKHSLLYEYFTVYNELTKVKYVTEGMRKPAFLSGEQKKAIVDLLFKTNRKVTVKQLKEDYFKKIECFDSVEISGVEDRFNASLGTYHDLLKIIKDKDFLDNEENEDILEDIVLTLTLFEDREMIEERLKTYAHLFDDKVMKQLKRRRYTGWGRLSRKLINGIRDKQSGKTILDFLKSDGFANRNFMQLIHDDSLTFKEDIQKAQVSGQGDSLHEHIANLAGSPAIKKGILQTVKVVDELVKVMGRHKPENIVIEMARENQTTQKGQKNSRERMKRIEEGIKELGSQILKEHPVENTQLQNEKLYLYYLQNGRDMYVDQELDINRLSDYDVDHIVPQSFLKDDSIDNKVLTRSDKARGKSDNVPSEEVVKKMKNYWRQLLNAKLITQRKFDNLTKAERGGLSELDKAGFIKRQLVETRQITKHVAQILDSRMNTKYDENDKLIREVKVITLKSKLVSDFRKDFQFYKVREINNYHHAHDAYLNAVVGTALIKKYPKLESEFVYGDYKVYDVRKMIAKSEQEIGKATAKYFFYSNIMNFFKTEITLANGEIRKRPLIETNGETGEIVWDKGRDFATVRKVLSMPQVNIVKKTEVQTGGFSKESILPKRNSDKLIARKKDWDPKKYGGFDSPTVAYSVLVVAKVEKGKSKKLKSVKELLGITIMERSSFEKNPIDFLEAKGYKEVKKDLIIKLPKYSLFELENGRKRMLASAGELQKGNELALPSKYVNFLYLASHYEKLKGSPEDNEQKQLFVEQHKHYLDEIIEQISEFSKRVILADANLDKVLSAYNKHRDKPIREQAENIIHLFTLTNLGAPAAFKYFDTTIDRKRYTSTKEVLDATLIHQSITGLYETRIDLSQLGGDGGGGSGGSGGSGGTLNLEDEYRLYETSAEPEVSPGSTWLSDFPQAWAETGGMGLAVRQAPLIIPLKATSTPVSIKQYPMSQEAKLGIKPHIQRLLDQGILVPCQSPWNTPLLPVKKPGTNDYRPVQDLREVNKRVEDIHPTVPNPYNLLSGLPPSHRWYTVLDLKDAFFCLRLHPTSQPLFAFEWRDPGMGISGQLTWTRLPQGFKNSPTLFNEALHRDLADFRIQHPDLILLQYVDDILLAATSELDCQQGTRALLLTLGNLGYRASAKKAQLCQKQVKYLGYLLKEGQRWLTEARKETVMGQPTPKTPRQLREFLGTAGFCRLWIPGFAEMAAPLYPLTKPGTLFNWGPDQQKAYQEIKQALLTAPALGLPDLTKPFELFVDEKQGYAKGVLTQKLGPWRRPVAYLSKKLDPVAAGWPPCLRMVAAIAVLRKDAGKLTMGQPLVILAPHAVEALVKQPPDRWLSNARMTHYQAMLLDTDRVQFGPVVALNPATLLPLPEEGAPHDCLEILAETHGTRPDLTDQPIPDADHTWYTDGSSFLQEGQRKAGAAVTTETEVIWARALPAGTSAQRAELIALTQALKMAEGKRLNVYTDSRYAFATAHIHGEIYRRRGWLTSEGREIKNKSEILALLKALFLPKRLSIIHCLGHQKGDSAEARGNRLADQAAREAAIKTPPDTSTLLAGKRTADGSEFEKRTADGSEFESPKKKAKVE

SEQ ID NO: 6033 - protein, 2094 aa, synthetic construct
MPAAKRVKLDGGDKKYSIGLDIGTNSVGWAVITDEYKVPSKKFKVLGNTDRHSIKKNLIGALLFDSGETAEATRLKRTARRRYTRRKNRICYLQEIFSNEMAKVDDSFFHRLEESFLVEEDKKHERHPIFGNIVDEVAYHEKYPTIYHLRKKLVDSTDKADLRLIYLALAHMIKFRGHFLIEGDLNPDNSDVDKLFIQLVQTYNQLFEENPINASGVDAKAILSARLSKSRRLENLIAQLPGEKKNGLFGNLIALSLGLTPNFKSNFDLAEDAKLQLSKDTYDDDLDNLLAQIGDQYADLFLAAKNLSDAILLSDILRVNTEITKAPLSASMIKRYDEHHQDLTLLKALVRQQLPEKYKEIFFDQSKNGYAGYIDGGASQEEFYKFIKPILEKMDGTEELLVKLNREDLLRKQRTFDNGSIPHQIHLGELHAILRRQEDFYPFLKDNREKIEKILTFRIPYYVGPLARGNSRFAWMTRKSEETITPWNFEEVVDKGASAQSFIERMTNFDKNLPNEKVLPKHSLLYEYFTVYNELTKVKYVTEGMRKPAFLSGEQKKAIVDLLFKTNRKVTVKQLKEDYFKKIECFDSVEISGVEDRFNASLGTYHDLLKIIKDKDFLDNEENEDILEDIVLTLTLFEDREMIEERLKTYAHLFDDKVMKQLKRRRYTGWGRLSRKLINGIRDKQSGKTILDFLKSDGFANRNFMQLIHDDSLTFKEDIQKAQVSGQGDSLHEHIANLAGSPAIKKGILQTVKVVDELVKVMGRHKPENIVIEMARENQTTQKGQKNSRERMKRIEEGIKELGSQILKEHPVENTQLQNEKLYLYYLQNGRDMYVDQELDINRLSDYDVDHIVPQSFLKDDSIDNKVLTRSDKARGKSDNVPSEEVVKKMKNYWRQLLNAKLITQRKFDNLTKAERGGLSELDKAGFIKRQLVETRQITKHVAQILDSRMNTKYDENDKLIREVKVITLKSKLVSDFRKDFQFYKVREINNYHHAHDAYLNAVVGTALIKKYPKLESEFVYGDYKVYDVRKMIAKSEQEIGKATAKYFFYSNIMNFFKTEITLANGEIRKRPLIETNGETGEIVWDKGRDFATVRKVLSMPQVNIVKKTEVQTGGFSKESILPKRNSDKLIARKKDWDPKKYGGFDSPTVAYSVLVVAKVEKGKSKKLKSVKELLGITIMERSSFEKNPIDFLEAKGYKEVKKDLIIKLPKYSLFELENGRKRMLASAGELQKGNELALPSKYVNFLYLASHYEKLKGSPEDNEQKQLFVEQHKHYLDEIIEQISEFSKRVILADANLDKVLSAYNKHRDKPIREQAENIIHLFTLTNLGAPAAFKYFDTTIDRKRYTSTKEVLDATLIHQSITGLYETRIDLSQLGGDGGGGSGGSGGSGGTLNLEDEYRLYETSAEPEVSPGSTWLSDFPQAWAETGGMGLAVRQAPLIIPLKATSTPVSIKQYPMSQEAKLGIKPHIQRLLDQGILVPCQSPWNTPLLPVKKPGTNDYRPVQDLREVNKRVEDIHPTVPNPYNLLSGLPPSHRWYTVLDLKDAFFCLRLHPTSQPLFAFEWRDPGMGISGQLTWTRLPQGFKNSPTLFNEALHRDLADFRIQHPDLILLQYVDDILLAATSELDCQQGTRALLLTLGNLGYRASAKKAQLCQKQVKYLGYLLKEGQRWLTEARKETVMGQPTPKTPRQLREFLGKAGFCRLFIPGFAEMAAPLYPLTKPGTLFNWGPDQQKAYQEIKQALLTAPALGLPDLTKPFELFVDEKQGYAKGVLTQKLGPWRRPVAYLSKKLDPVAAGWPPCLRMVAAIAVLRKDAGKLTMGQPLVILAPHAVEALVKQPPDRWLSNARMTHYQAMLLDTDRVQFGPVVALNPATLLPLPEEGAPHDCLEILAETHGTRPDLTDQPIPDADHTWYTDGSSFLQEGQRKAGAAVTTETEVIWARALPAGTSAQRAELIALTQALKMAEGKRLNVYTDSRYAFATAHIHGEIYRRRGWLTSEGREIKNKSEILALLKALFLPKRLSIIHCLGHQKGDSAEARGNRLADQAAREAAIKTPPDTSTLLAGKRTADGSEFEKRTADGSEFESPKKKAKVE

SEQ ID NO: 6034 - protein, 2094 aa, synthetic construct
MPAAKRVKLDGGDKKYSIGLDIGTNSVGWAVITDEYKVPSKKFKVLGNTDRHSIKKNLIGALLFDSGETAEATRLKRTARRRYTRRKNRICYLQEIFSNEMAKVDDSFFHRLEESFLVEEDKKHERHPIFGNIVDEVAYHEKYPTIYHLRKKLVDSTDKADLRLIYLALAHMIKFRGHFLIEGDLNPDNSDVDKLFIQLVQTYNQLFEENPINASGVDAKAILSARLSKSRRLENLIAQLPGEKKNGLFGNLIALSLGLTPNFKSNFDLAEDAKLQLSKDTYDDDLDNLLAQIGDQYADLFLAAKNLSDAILLSDILRVNTEITKAPLSASMIKRYDEHHQDLTLLKALVRQQLPEKYKEIFFDQSKNGYAGYIDGGASQEEFYKFIKPILEKMDGTEELLVKLNREDLLRKQRTFDNGSIPHQIHLGELHAILRRQEDFYPFLKDNREKIEKILTFRIPYYVGPLARGNSRFAWMTRKSEETITPWNFEEVVDKGASAQSFIERMTNFDKNLPNEKVLPKHSLLYEYFTVYNELTKVKYVTEGMRKPAFLSGEQKKAIVDLLFKTNRKVTVKQLKEDYFKKIECFDSVEISGVEDRFNASLGTYHDLLKIIKDKDFLDNEENEDILEDIVLTLTLFEDREMIEERLKTYAHLFDDKVMKQLKRRRYTGWGRLSRKLINGIRDKQSGKTILDFLKSDGFANRNFMQLIHDDSLTFKEDIQKAQVSGQGDSLHEHIANLAGSPAIKKGILQTVKVVDELVKVMGRHKPENIVIEMARENQTTQKGQKNSRERMKRIEEGIKELGSQILKEHPVENTQLQNEKLYLYYLQNGRDMYVDQELDINRLSDYDVDHIVPQSFLKDDSIDNKVLTRSDKARGKSDNVPSEEVVKKMKNYWRQLLNAKLITQRKFDNLTKAERGGLSELDKAGFIKRQLVETRQITKHVAQILDSRMNTKYDENDKLIREVKVITLKSKLVSDFRKDFQFYKVREINNYHHAHDAYLNAVVGTALIKKYPKLESEFVYGDYKVYDVRKMIAKSEQEIGKATAKYFFYSNIMNFFKTEITLANGEIRKRPLIETNGETGEIVWDKGRDFATVRKVLSMPQVNIVKKTEVQTGGFSKESILPKRNSDKLIARKKDWDPKKYGGFDSPTVAYSVLVVAKVEKGKSKKLKSVKELLGITIMERSSFEKNPIDFLEAKGYKEVKKDLIIKLPKYSLFELENGRKRMLASAGELQKGNELALPSKYVNFLYLASHYEKLKGSPEDNEQKQLFVEQHKHYLDEIIEQISEFSKRVILADANLDKVLSAYNKHRDKPIREQAENIIHLFTLTNLGAPAAFKYFDTTIDRKRYTSTKEVLDATLIHQSITGLYETRIDLSQLGGDGGGGSGGSGGSGGLGIEDEYRLHETSTEPDVSLGSTWLSDFPQAWAETGGMGLAVRQAPLIIPLKATSTPVSIQQYPMSHEARLGIKPHIQRLLDQGILVPCQSPWNTPLLPVKKPGTNDYRPVQDLREVNKRVEDIHPTVPNPYNLLSGLPPSHQWYTVLDLKDAFFCLRLHPTSQPLFAFEWRDPGMGISGQLTWTRLPQGFKNSPTLFNEALHRDLADFRIQHPDLILLQYVDDILLAATSELDCQQGTRALLQTLGDLGYRASAKKAQICQKQVKYLGYLLREGQRWLTEARKETVMGQPVPKTPRQLREFLGKAGFCRLFIPGFAEMAAPLYPLTKPGTLFSWGPDQQKAYQEIKQALLTAPALGLPDLTKPFELFVDEKQGYAKGVLTQKLGPWRRPVAYLSKKLDPVAAGWPPCLRMVAAIAVLTKDAGKLTMGQPLVILAPHAVEALVKQPPDRWLSNARMTHYQAMLLDTDRVQFGPVVALNPATLLPLPEEGAPHDCLEILAETHGTRPDLTDQPIPDADHTWYTDGSSFLQEGQRKAGAAVTTETEVIWAGALPAGTSAQRAELIALTQALKMAEGKRLNVYTDSRYAFATAHIHGEIYRRRGWLTSEGREIKNKSEILALLKALFLPKRLSIIHCLGHQKGDSAEARGNRLADQAAREAAIKTPPDTSTLLIAGKRTADGSEFEKRTADGSEFESPKKKAKVE

SEQ ID NO: 6035 - protein, 2094 aa, synthetic construct
MPAAKRVKLDGGDKKYSIGLDIGTNSVGWAVITDEYKVPSKKFKVLGNTDRHSIKKNLIGALLFDSGETAEATRLKRTARRRYTRRKNRICYLQEIFSNEMAKVDDSFFHRLEESFLVEEDKKHERHPIFGNIVDEVAYHEKYPTIYHLRKKLVDSTDKADLRLIYLALAHMIKFRGHFLIEGDLNPDNSDVDKLFIQLVQTYNQLFEENPINASGVDAKAILSARLSKSRRLENLIAQLPGEKKNGLFGNLIALSLGLTPNFKSNFDLAEDAKLQLSKDTYDDDLDNLLAQIGDQYADLFLAAKNLSDAILLSDILRVNTEITKAPLSASMIKRYDEHHQDLTLLKALVRQQLPEKYKEIFFDQSKNGYAGYIDGGASQEEFYKFIKPILEKMDGTEELLVKLNREDLLRKQRTFDNGSIPHQIHLGELHAILRRQEDFYPFLKDNREKIEKILTFRIPYYVGPLARGNSRFAWMTRKSEETITPWNFEEVVDKGASAQSFIERMTNFDKNLPNEKVLPKHSLLYEYFTVYNELTKVKYVTEGMRKPAFLSGEQKKAIVDLLFKTNRKVTVKQLKEDYFKKIECFDSVEISGVEDRFNASLGTYHDLLKIIKDKDFLDNEENEDILEDIVLTLTLFEDREMIEERLKTYAHLFDDKVMKQLKRRRYTGWGRLSRKLINGIRDKQSGKTILDFLKSDGFANRNFMQLIHDDSLTFKEDIQKAQVSGQGDSLHEHIANLAGSPAIKKGILQTVKVVDELVKVMGRHKPENIVIEMARENQTTQKGQKNSRERMKRIEEGIKELGSQILKEHPVENTQLQNEKLYLYYLQNGRDMYVDQELDINRLSDYDVDHIVPQSFLKDDSIDNKVLTRSDKARGKSDNVPSEEVVKKMKNYWRQLLNAKLITQRKFDNLTKAERGGLSELDKAGFIKRQLVETRQITKHVAQILDSRMNTKYDENDKLIREVKVITLKSKLVSDFRKDFQFYKVREINNYHHAHDAYLNAVVGTALIKKYPKLESEFVYGDYKVYDVRKMIAKSEQEIGKATAKYFFYSNIMNFFKTEITLANGEIRKRPLIETNGETGEIVWDKGRDFATVRKVLSMPQVNIVKKTEVQTGGFSKESILPKRNSDKLIARKKDWDPKKYGGFDSPTVAYSVLVVAKVEKGKSKKLKSVKELLGITIMERSSFEKNPIDFLEAKGYKEVKKDLIIKLPKYSLFELENGRKRMLASAGELQKGNELALPSKYVNFLYLASHYEKLKGSPEDNEQKQLFVEQHKHYLDEIIEQISEFSKRVILADANLDKVLSAYNKHRDKPIREQAENIIHLFTLTNLGAPAAFKYFDTTIDRKRYTSTKEVLDATLIHQSITGLYETRIDLSQLGGDGGGGSGGSGGSGGTLGIEDEYRLHETSTEPDVSLGSTWLSDFPQAWAETGGMGLAVRQAPLIIPLKATSTPVSIQQYPMSHEARLGIKPHIQRLLDQGILVPCQSPWNTPLLPVKKPGTNDYRPVQDLREVNKRVEDIHPTVPNPYNLLSGLPPSHQWYTVLDLKDAFFCLRLHPTSQPLFAFEWRDPGMGISGQLTWTRLPQGFKNSPTLFNEALHRDLADFRIQHPDLILLQYVDDILLAATSELDCQQGTRALLQTLGDLGYRASAKKAQICQKQVKYLGYLLREGQRWLTEARKETVMGQPVPKTPRQLREFLGTAGFCRLWIPGFAEMAAPLYPLTKPGTLFSWGPDQQKAYQEIKQALLTAPALGLPDLTKPFELFVDEKQGYAKGVLTQKLGPWRRPVAYLSKKLDPVAAGWPPCLRMVAAIAVLTKDAGKLTMGQPLVILAPHAVEALVKQPPDRWLSNARMTHYQAMLLDTDRVQFGPVVALNPATLLPLPEEGAPHDCLEILAETHGTRPDLTDQPIPDADHTWYTDGSSFLQEGQRKAGAAVTTETEVIWAGALPAGTSAQRAELIALTQALKMAEGKRLNVYTDSRYAFATAHIHGEIYRRRGWLTSEGREIKNKSEILALLKALFLPKRLSIIHCLGHQKGDSAEARGNRLADQAAREAAIKTPPDTSTLLAGKRTADGSEFEKRTADGSEFESPKKKAKVE

SEQ ID NO: 6036 - protein, 2094 aa, synthetic construct; identical to SEQ ID NO: 6034

SEQ ID NO: 6037 - protein, 2094 aa, synthetic construct
MPAAKRVKLDGGDKKYSIGLDIGTNSVGWAVITDEYKVPSKKFKVLGNTDRHSIKKNLIGALLFDSGETAEATRLKRTARRRYTRRKNRICYLQEIFSNEMAKVDDSFFHRLEESFLVEEDKKHERHPIFGNIVDEVAYHEKYPTIYHLRKKLVDSTDKADLRLIYLALAHMIKFRGHFLIEGDLNPDNSDVDKLFIQLVQTYNQLFEENPINASGVDAKAILSARLSKSRRLENLIAQLPGEKKNGLFGNLIALSLGLTPNFKSNFDLAEDAKLQLSKDTYDDDLDNLLAQIGDQYADLFLAAKNLSDAILLSDILRVNTEITKAPLSASMIKRYDEHHQDLTLLKALVRQQLPEKYKEIFFDQSKNGYAGYIDGGASQEEFYKFIKPILEKMDGTEELLVKLNREDLLRKQRTFDNGSIPHQIHLGELHAILRRQEDFYPFLKDNREKIEKILTFRIPYYVGPLARGNSRFAWMTRKSEETITPWNFEEVVDKGASAQSFIERMTNFDKNLPNEKVLPKHSLLYEYFTVYNELTKVKYVTEGMRKPAFLSGEQKKAIVDLLFKTNRKVTVKQLKEDYFKKIECFDSVEISGVEDRFNASLGTYHDLLKIIKDKDFLDNEENEDILEDIVLTLTLFEDREMIEERLKTYAHLFDDKVMKQLKRRRYTGWGRLSRKLINGIRDKQSGKTILDFLKSDGFANRNFMQLIHDDSLTFKEDIQKAQVSGQGDSLHEHIANLAGSPAIKKGILQTVKVVDELVKVMGRHKPENIVIEMARENQTTQKGQKNSRERMKRIEEGIKELGSQILKEHPVENTQLQNEKLYLYYLQNGRDMYVDQELDINRLSDYDVDHIVPQSFLKDDSIDNKVLTRSDKARGKSDNVPSEEVVKKMKNYWRQLLNAKLITQRKFDNLTKAERGGLSELDKAGFIKRQLVETRQITKHVAQILDSRMNTKYDENDKLIREVKVITLKSKLVSDFRKDFQFYKVREINNYHHAHDAYLNAVVGTALIKKYPKLESEFVYGDYKVYDVRKMIAKSEQEIGKATAKYFFYSNIMNFFKTEITLANGEIRKRPLIETNGETGEIVWDKGRDFATVRKVLSMPQVNIVKKTEVQTGGFSKESILPKRNSDKLIARKKDWDPKKYGGFDSPTVAYSVLVVAKVEKGKSKKLKSVKELLGITIMERSSFEKNPIDFLEAKGYKEVKKDLIIKLPKYSLFELENGRKRMLASAGELQKGNELALPSKYVNFLYLASHYEKLKGSPEDNEQKQLFVEQHKHYLDEIIEQISEFSKRVILADANLDKVLSAYNKHRDKPIREQAENIIHLFTLTNLGAPAAFKYFDTTIDRKRYTSTKEVLDATLIHQSITGLYETRIDLSQLGGDGGGGSGGSGGSGGTLGIEDEYRLHETSTEPDVSLGSTWLSDFPQAWAETGGMGLAVRQAPLIIPLKATSTPVSIQQYPMSHEARLGIKPHIQRLLDQGILVPCQSPWNTPLLPVKKPGTNDYRPVQDLREVNKRVEDIHPTVPNPYNLLSGLPPSHQWYTVLDLKDAFFCLRLHPTSQPLFAFEWRDPGMGISGQLTWTRLPQGFKNSPTLFDEALHRDLADFRIQHPDLILLQYVDDILLAATSELDCQQGTRALLQTLGDLGYRASAKKAQICQKQVKYLGYLLREGQRWLTEARKETVMGQPVPKTPRQLREFLGTAGFCRLWIPGFAEMAAPLYPLTKTGTLFSWGPDQQKAYQEIKQALLTAPALGLPDLTKPFELFVDEKQGYAKGVLTQKLGPWRRPVAYLSKKLDPVAAGWPPCLRMVAAIAVLTKDAGKLTMGQPLVILAPHAVEALVKQPPDRWLSNARMTHYQAMLLDTDRVQFGPVVALNPATLLPLPEEGAPHDCLEILAETHGTRPDLTDQPIPDADHTWYTDGSSFLQEGQRKAGAAVTTETEVIWAGALPAGTSAQRAELIALTQALKMAEGKRLNVYTDSRYAFATAHIHGEIYRRRGLLTSEGREIKNKSEILALLKALFLPKRLSIIHCLGHQKGDSAEARGNRLADQAAREAAIKTPPDTSTLLAGKRTADGSEFEKRTADGSEFESPKKKAKVE

SEQ ID NO: 6038 - protein, 2094 aa, synthetic construct; identical to SEQ ID NO: 6035

SEQ ID NO: 6039 - protein, 2094 aa, synthetic construct
MPAAKRVKLDGGDKKYSIGLDIGTNSVGWAVITDEYKVPSKKFKVLGNTDRHSIKKNLIGALLFDSGETAEATRLKRTARRRYTRRKNRICYLQEIFSNEMAKVDDSFFHRLEESFLVEEDKKHERHPIFGNIVDEVAYHEKYPTIYHLRKKLVDSTDKADLRLIYLALAHMIKFRGHFLIEGDLNPDNSDVDKLFIQLVQTYNQLFEENPINASGVDAKAILSARLSKSRRLENLIAQLPGEKKNGLFGNLIALSLGLTPNFKSNFDLAEDAKLQLSKDTYDDDLDNLLAQIGDQYADLFLAAKNLSDAILLSDILRVNTEITKAPLSASMIKRYDEHHQDLTLLKALVRQQLPEKYKEIFFDQSKNGYAGYIDGGASQEEFYKFIKPILEKMDGTEELLVKLNREDLLRKQRTFDNGSIPHQIHLGELHAILRRQEDFYPFLKDNREKIEKILTFRIPYYVGPLARGNSRFAWMTRKSEETITPWNFEEVVDKGASAQSFIERMTNFDKNLPNEKVLPKHSLLYEYFTVYNELTKVKYVTEGMRKPAFLSGEQKKAIVDLLFKTNRKVTVKQLKEDYFKKIECFDSVEISGVEDRFNASLGTYHDLLKIIKDKDFLDNEENEDILEDIVLTLTLFEDREMIEERLKTYAHLFDDKVMKQLKRRRYTGWGRLSRKLINGIRDKQSGKTILDFLKSDGFANRNFMQLIHDDSLTFKEDIQKAQVSGQGDSLHEHIANLAGSPAIKKGILQTVKVVDELVKVMGRHKPENIVIEMARENQTTQKGQKNSRERMKRIEEGIKELGSQILKEHPVENTQLQNEKLYLYYLQNGRDMYVDQELDINRLSDYDVDHIVPQSFLKDDSIDNKVLTRSDKARGKSDNVPSEEVVKKMKNYWRQLLNAKLITQRKFDNLTKAERGGLSELDKAGFIKRQLVETRQITKHVAQILDSRMNTKYDENDKLIREVKVITLKSKLVSDFRKDFQFYKVREINNYHHAHDAYLNAVVGTALIKKYPKLESEFVYGDYKVYDVRKMIAKSEQEIGKATAKYFFYSNIMNFFKTEITLANGEIRKRPLIETNGETGEIVWDKGRDFATVRKVLSMPQVNIVKKTEVQTGGFSKESILPKRNSDKLIARKKDWDPKKYGGFDSPTVAYSVLVVAKVEKGKSKKLKSVKELLGITIMERSSFEKNPIDFLEAKGYKEVKKDLIIKLPKYSLFELENGRKRMLASAGELQKGNELALPSKYVNFLYLASHYEKLKGSPEDNEQKQLFVEQHKHYLDEIIEQISEFSKRVILADANLDKVLSAYNKHRDKPIREQAENIIHLFTLTNLGAPAAFKYFDTTIDRKRYTSTKEVLDATLIHQSITGLYETRIDLSQLGGDGGGGSGGSGGSGGTLNIEDEYRLHETSKGPDVPLGSTWLSDFPQAWAETGGMGLAFRQAPLIISLKATSTPVSIKQYPMSQEARLGIKPHIQRLLDQGILVPCQSPWNTPLLPVKKPGTNDYRPVQDLREVNKRVEDIHPTVPNPYNLLSGLPPSHQWYTVLDLKDAFFCLRLHPTSQSLFAFEWKDPEMGISGQLTWTRLPQGFKNSPTLFNEALHRDLADFRIQHPDLILLQYVDDLLLAATSELDCQQGTRALLQTLGDLGYRASAKKAQICQKQVKYLGYLLKEGQRWLTEARKETVMGQPTPKTPRQLREFLGKAGLCRLFIPGFAEMAAPLYPLTKPGTLFKWGPDQQKAYQEIKQALLTAPALGLPDLTKPFELFVDEKQGYAKGVLTQKLGPWRRPVAYLSKKLDPVAAGWPPCLRMVAAIAVLTKDVGKLTMGQPLVILAPHAVEALVKQPPDRWLSNARMTHYQALLLDTDRVQFGPIVALNPATLLPLPEEGLQHDCLDILAEAHGTRPDLTDQPLPDADHTWYTDGSSFLQEGQRRAGAAVTTETEVIWAKALPAGTSAQRAELIALTQALKMAAGKKLNVYTDSRYAFATAHIHGEIYRRRGWLTSEGKEIKNKDEILALLKALFLPKRLSIIHCPGHQKGNHAEARGNRMADQAAREVATRETPETSTLLAGKRTADGSEFEKRTADGSEFESPKKKAKVE

SEQ ID NO: 6040 - protein, 2094 aa, synthetic construct
MPAAKRVKLDGGDKKYSIGLDIGTNSVGWAVITDEYKVPSKKFKVLGNTDRHSIKKNLIGALLFDSGETAEATRLKRTARRRYTRRKNRICYLQEIFSNEMAKVDDSFFHRLEESFLVEEDKKHERHPIFGNIVDEVAYHEKYPTIYHLRKKLVDSTDKADLRLIYLALAHMIKFRGHFLIEGDLNPDNSDVDKLFIQLVQTYNQLFEENPINASGVDAKAILSARLSKSRRLENLIAQLPGEKKNGLFGNLIALSLGLTPNFKSNFDLAEDAKLQLSKDTYDDDLDNLLAQIGDQYADLFLAAKNLSDAILLSDILRVNTEITKAPLSASMIKRYDEHHQDLTLLKALVRQQLPEKYKEIFFDQSKNGYAGYIDGGASQEEFYKFIKPILEKMDGTEELLVKLNREDLLRKQRTFDNGSIPHQIHLGELHAILRRQEDFYPFLKDNREKIEKILTFRIPYYVGPLARGNSRFAWMTRKSEETITPWNFEEVVDKGASAQSFIERMTNFDKNLPNEKVLPKHSLLYEYFTVYNELTKVKYVTEGMRKPAFLSGEQKKAIVDLLFKTNRKVTVKQLKEDYFKKIECFDSVEISGVEDRFNASLGTYHDLLKIIKDKDFLDNEENEDILEDIVLTLTLFEDREMIEERLKTYAHLFDDKVMKQLKRRRYTGWGRLSRKLINGIRDKQSGKTILDFLKSDGFANRNFMQLIHDDSLTFKEDIQKAQVSGQGDSLHEHIANLAGSPAIKKGILQTVKVVDELVKVMGRHKPENIVIEMARENQTTQKGQKNSRERMKRIEEGIKELGSQILKEHPVENTQLQNEKLYLYYLQNGRDMYVDQELDINRLSDYDVDHIVPQSFLKDDSIDNKVLTRSDKARGKSDNVPSEEVVKKMKNYWRQLLNAKLITQRKFDNLTKAERGGLSELDKAGFIKRQLVETRQITKHVAQILDSRMNTKYDENDKLIREVKVITLKSKLVSDFRKDFQFYKVREINNYHHAHDAYLNAVVGTALIKKYPKLESEFVYGDYKVYDVRKMIAKSEQEIGKATAKYFFYSNIMNFFKTEITLANGEIRKRPLIETNGETGEIVWDKGRDFATVRKVLSMPQVNIVKKTEVQTGGFSKESILPKRNSDKLIARKKDWDPKKYGGFDSPTVAYSVLVVAKVEKGKSKKLKSVKELLGITIMERSSFEKNPIDFLEAKGYKEVKKDLIIKLPKYSLFELENGRKRMLASAGELQKGNELALPSKYVNFLYLASHYEKLKGSPEDNEQKQLFVEQHKHYLDEIIEQISEFSKRVILADANLDKVLSAYNKHRDKPIREQAENIIHLFTLTNLGAPAAFKYFDTTIDRKRYTSTKEVLDATLIHQSITGLYETRIDLSQLGGDGGGGSGGSGGSGGTLNIEDEYRLHETSKGPDVPLGSTWLSDFPQAWAETGGMGLAVRQAPLIIPLKATSTPVSIKQYPMSQEARLGIKPHIQRLLDQGILVPCQSPWNTPLLPVKKPGTNDYRPVQDLREVNKRVEDIHPTVPNPYNLLSGLPPSHQWYTVLDLKDAFFCLRLHPTSQSLFAFEWRDPEMGISGQLTWTRLPQGFKNSPTLFDEALHRDLADFRIQHPDLILLQYVDDLLLAATSELDCQQGTRALLQTLGDLGYRASAKKAQICQKQVKYLGYLLKEGQRWLTEARKETVMGQPTPKTPRQLREFLGTAGFCRLWIPGFAEMAAPLYPLTKTGTLFEWGPDQQKAYQEIKQALLTAPALGLPDLTKPFELFVDEKQGYAKGVLTQKLGPWRRPVAYLSKKLDPVAAGWPPCLRMVAAIAVLTKDAGKLTMGQPLVILAPHAVEALVKQPPDRWLSNARMTHYQALLLDTDRVQFGPIVALNPATLLPLPEEGLQHDCLDILAEAHGTRPDLTDQPLPDADHTWYTDGSSFLQEGQRKAGAAVTTETEVVWAKALPAGTSAQRAELIALTQALKMAEGKKLNVYTDSRYAFATAHIHGEIYRRRGLLTSEGKEIKNKDEILALLKALFLPKRLSIIHCPGHQKGNRAEARGNRMADQAAREVATRETPETSTLLAGKRTADGSEFEKRTADGSEFESPKKKAKVE

SEQ ID NO: 6041 - protein, 2094 aa, synthetic construct
MPAAKRVKLDGGDKKYSIGLDIGTNSVGWAVITDEYKVPSKKFKVLGNTDRHSIKKNLIGALLFDSGETAEATRLKRTARRRYTRRKNRICYLQEIFSNEMAKVDDSFFHRLEESFLVEEDKKHERHPIFGNIVDEVAYHEKYPTIYHLRKKLVDSTDKADLRLIYLALAHMIKFRGHFLIEGDLNPDNSDVDKLFIQLVQTYNQLFEENPINASGVDAKAILSARLSKSRRLENLIAQLPGEKKNGLFGNLIALSLGLTPNFKSNFDLAEDAKLQLSKDTYDDDLDNLLAQIGDQYADLFLAAKNLSDAILLSDILRVNTEITKAPLSASMIKRYDEHHQDLTLLKALVRQQLPEKYKEIFFDQSKNGYAGYIDGGASQEEFYKFIKPILEKMDGTEELLVKLNREDLLRKQRTFDNGSIPHQIHLGELHAILRRQEDFYPFLKDNREKIEKILTFRIPYYVGPLARGNSRFAWMTRKSEETITPWNFEEVVDKGASAQSFIERMTNFDKNLPNEKVLPKHSLLYEYFTVYNELTKVKYVTEGMRKPAFLSGEQKKAIVDLLFKTNRKVTVKQLKEDYFKKIECFDSVEISGVEDRFNASLGTYHDLLKIIKDKDFLDNEENEDILEDIVLTLTLFEDREMIEERLKTYAHLFDDKVMKQLKRRRYTGWGRLSRKLINGIRDKQSGKTILDFLKSDGFANRNFMQLIHDDSLTFKEDIQKAQVSGQGDSLHEHIANLAGSPAIKKGILQTVKVVDELVKVMGRHKPENIVIEMARENQTTQKGQKNSRERMKRIEEGIKELGSQILKEHPVENTQLQNEKLYLYYLQNGRDMYVDQELDINRLSDYDVDHIVPQSFLKDDSIDNKVLTRSDKARGKSDNVPSEEVVKKMKNYWRQLLNAKLITQRKFDNLTKAERGGLSELDKAGFIKRQLVETRQITKHVAQILDSRMNTKYDENDKLIREVKVITLKSKLVSDFRKDFQFYKVREINNYHHAHDAYLNAVVGTALIKKYPKLESEFVYGDYKVYDVRKMIAKSEQEIGKATAKYFFYSNIMNFFKTEITLANGEIRKRPLIETNGETGEIVWDKGRDFATVRKVLSMPQVNIVKKTEVQTGGFSKESILPKRNSDKLIARKKDWDPKKYGGFDSPTVAYSVLVVAKVEKGKSKKLKSVKELLGITIMERSSFEKNPIDFLEAKGYKEVKKDLIIKLPKYSLFELENGRKRMLASAGELQKGNELALPSKYVNFLYLASHYEKLKGSPEDNEQKQLFVEQHKHYLDEIIEQISEFSKRVILADANLDKVLSAYNKHRDKPIREQAENIIHLFTLTNLGAPAAFKYFDTTIDRKRYTSTKEVLDATLIHQSITGLYETRIDLSQLGGDGGGGSGGSGGSGGTLNIEDEHRLHETSKEPDVSLGSTWLSDFPQAWAETGGMGLAVRQAPLIIPLKATSTPVSIKQYPMSQEARLGIKPHIQRLLDQGILVPCQSPWNTPLLPVKKPGTNDYRPVQDLREVNKRVEDIHPTVPNPYNLLSGLPPSHQWYTVLDLKDAFFCLRLHPTSQPLFAFEWRDPEMGISGQLTWTRLPQGFKNSPTLFNEALHRDLADFRIQHPDLILLQYVDDLLLAATSELDCQQGTRALLQTLGNLGYRASAKKAQICQKQVKYLGYLLKEGQRWLTEARKETVMGQPTPKTPRQLREFLGTAGFCRLWIPGFAEMAAPLYPLTKPGTLFNWGPDQQKAYQEIKQALLTAPALGLPDLTKPFELFVDEKQGYAKGVLTQKLGPWRRPVAYLSKKLDPVAAGWPPCLRMVAAIAVLTKDAGKLTMGQPLVILAPHAVEALVKQPPDRWLSNARMTHYQALLLDTDRVQFGPVVALNPATLLPLPEEGLQHNCLDILAEAHGTRPDLTDQPLPDADHTWYTDGSSLLQEGQRKAGAAVTTETEVIWAKALPAGTSAQRAELIALTQALKMAEGKKLNVYTDSRYAFATAHIHGEIYRRRGWLTSEGKEIKNKDEILALLKALFLPKRLSIIHCPGHQKGHSAEARGNRMADQAARKAAITETPDTSTLLAGKRTADGSEFEKRTADGSEFESPKKKAKVE

SEQ ID NO: 6042 - protein, 2094 aa, synthetic construct
MPAAKRVKLDGGDKKYSIGLDIGTNSVGWAVITDEYKVPSKKFKVLGNTDRHSIKKNLIGALLFDSGETAEATRLKRTARRRYTRRKNRICYLQEIFSNEMAKVDDSFFHRLEESFLVEEDKKHERHPIFGNIVDEVAYHEKYPTIYHLRKKLVDSTDKADLRLIYLALAHMIKFRGHFLIEGDLNPDNSDVDKLFIQLVQTYNQLFEENPINASGVDAKAILSARLSKSRRLENLIAQLPGEKKNGLFGNLIALSLGLTPNFKSNFDLAEDAKLQLSKDTYDDDLDNLLAQIGDQYADLFLAAKNLSDAILLSDILRVNTEITKAPLSASMIKRYDEHHQDLTLLKALVRQQLPEKYKEIFFDQSKNGYAGYIDGGASQEEFYKFIKPILEKMDGTEELLVKLNREDLLRKQRTFDNGSIPHQIHLGELHAILRRQEDFYPFLKDNREKIEKILTFRIPYYVGPLARGNSRFAWMTRKSEETITPWNFEEVVDKGASAQSFIERMTNFDKNLPNEKVLPKHSLLYEYFTVYNELTKVKYVTEGMRKPAFLSGEQKKAIVDLLFKTNRKVTVKQLKEDYFKKIECFDSVEISGVEDRFNASLGTYHDLLKIIKDKDFLDNEENEDILEDIVLTLTLFEDREMIEERLKTYAHLFDDKVMKQLKRRRYTGWGRLSRKLINGIRDKQSGKTILDFLKSDGFANRNFMQLIHDDSLTFKEDIQKAQVSGQGDSLHEHIANLAGSPAIKKGILQTVKVVDELVKVMGRHKPENIVIEMARENQTTQKGQKNSRERMKRIEEGIKELGSQILKEHPVENTQLQNEKLYLYYLQNGRDMYVDQELDINRLSDYDVDHIVPQSFLKDDSIDNKVLTRSDKARGKSDNVPSEEVVKKMKNYWRQLLNAKLITQRKFDNLTKAERGGLSELDKAGFIKRQLVETRQITKHVAQILDSRMNTKYDENDKLIREVKVITLKSKLVSDFRKDFQFYKVREINNYHHAHDAYLNAVVGTALIKKYPKLESEFVYGDYKVYDVRKMIAKSEQEIGKATAKYFFYSNIMNFFKTEITLANGEIRKRPLIETNGETGEIVWDKGRDFATVRKVLSMPQVNIVKKTEVQTGGFSKESILPKRNSDKLIARKKDWDPKKYGGFDSPTVAYSVLVVAKVEKGKSKKLKSVKELLGITIMERSSFEKNPIDFLEAKGYKEVKKDLIIKLPKYSLFELENGRKRMLASAGELQKGNELALPSKYVNFLYLASHYEKLKGSPEDNEQKQLFVEQHKHYLDEIIEQISEFSKRVILADANLDKVLSAYNKHRDKPIREQAENIIHLFTLTNLGAPAAFKYFDTTIDRKRYTSTKEVLDATLIHQSITGLYETRIDLSQLGGDGGGGSGGSGGSGGTLNIEDEHRLHETSKEPDVSLGSTWLSDFPQAWAETGGMGLAVRQAPLIIPLKATSTPVSIKQYPMSQEARLGIKPHIQRLLDQGILVPCQSPWNTPLLPVKKPGTNDYRPVQDLREVNKRVEDIHPTVPNPYNLLSGLPPSHQWYTVLDLKDAFFCLRLHPTSQPLFAFEWRDPEMGISGQLTWTRLPQGFKNSPTLFDEALHRDLADFRIQHPDLILLQYVDDLLLAATSELDCQQGTRALLQTLGNLGYRASAKKAQICQKQVKYLGYLLKEGQRWLTEARKETVMGQPTPKTPRQLREFLGTAGFCRLWIPGFAEMAAPLYPLTKTGTLFNWGPDQQKAYQEIKQALLTAPALGLPDLTKPFELFVDEKQGYAKGVLTQKLGPWRRPVAYLSKKLDPVAAGWPPCLRMVAAIAVLTKDAGKLTMGQPLVILAPHAVEALVKQPPDRWLSNARMTHYQALLLDTDRVQFGPVVALNPATLLPLPEEGLQHNCLDILAEAHGTRPDLTDQPLPDADHTWYTDGSSLLQEGQRKAGAAVTTETEVIWAKALPAGTSAQRAELIALTQALKMAEGKKLNVYTDSRYAFATAHIHGEIYRRRGLLTSEGKEIKNKDEILALLKALFLPKRLSIIHCPGHQKGHSAEARGNRMADQAARKAAITETPDTSTLLAGKRTADGSEFEKRTADGSEFESPKKKAKVE

SEQ ID NO: 6043 - protein, 2094 aa, synthetic construct; identical to SEQ ID NO: 6041

SEQ ID NO: 6044 - protein, 2092 aa, synthetic construct
MPAAKRVKLDGGDKKYSIGLDIGTNSVGWAVITDEYKVPSKKFKVLGNTDRHSIKKNLIGALLFDSGETAEATRLKRTARRRYTRRKNRICYLQEIFSNEMAKVDDSFFHRLEESFLVEEDKKHERHPIFGNIVDEVAYHEKYPTIYHLRKKLVDSTDKADLRLIYLALAHMIKFRGHFLIEGDLNPDNSDVDKLFIQLVQTYNQLFEENPINASGVDAKAILSARLSKSRRLENLIAQLPGEKKNGLFGNLIALSLGLTPNFKSNFDLAEDAKLQLSKDTYDDDLDNLLAQIGDQYADLFLAAKNLSDAILLSDILRVNTEITKAPLSASMIKRYDEHHQDLTLLKALVRQQLPEKYKEIFFDQSKNGYAGYIDGGASQEEFYKFIKPILEKMDGTEELLVKLNREDLLRKQRTFDNGSIPHQIHLGELHAILRRQEDFYPFLKDNREKIEKILTFRIPYYVGPLARGNSRFAWMTRKSEETITPWNFEEVVDKGASAQSFIERMTNFDKNLPNEKVLPKHSLLYEYFTVYNELTKVKYVTEGMRKPAFLSGEQKKAIVDLLFKTNRKVTVKQLKEDYFKKIECFDSVEISGVEDRFNASLGTYHDLLKIIKDKDFLDNEENEDILEDIVLTLTLFEDREMIEERLKTYAHLFDDKVMKQLKRRRYTGWGRLSRKLINGIRDKQSGKTILDFLKSDGFANRNFMQLIHDDSLTFKEDIQKAQVSGQGDSLHEHIANLAGSPAIKKGILQTVKVVDELVKVMGRHKPENIVIEMARENQTTQKGQKNSRERMKRIEEGIKELGSQILKEHPVENTQLQNEKLYLYYLQNGRDMYVDQELDINRLSDYDVDHIVPQSFLKDDSIDNKVLTRSDKARGKSDNVPSEEVVKKMKNYWRQLLNAKLITQRKFDNLTKAERGGLSELDKAGFIKRQLVETRQITKHVAQILDSRMNTKYDENDKLIREVKVITLKSKLVSDFRKDFQFYKVREINNYHHAHDAYLNAVVGTALIKKYPKLESEFVYGDYKVYDVRKMIAKSEQEIGKATAKYFFYSNIMNFFKTEITLANGEIRKRPLIETNGETGEIVWDKGRDFATVRKVLSMPQVNIVKKTEVQTGGFSKESILPKRNSDKLIARKKDWDPKKYGGFDSPTVAYSVLVVAKVEKGKSKKLKSVKELLGITIMERSSFEKNPIDFLEAKGYKEVKKDLIIKLPKYSLFELENGRKRMLASAGELQKGNELALPSKYVNFLYLASHYEKLKGSPEDNEQKQLFVEQHKHYLDEIIEQISEFSKRVILADANLDKVLSAYNKHRDKPIREQAENIIHLFTLTNLGAPAAFKYFDTTIDRKRYTSTKEVLDATLIHQSITGLYETRIDLSQLGGDGGGGSGGSGGSGGVLNLEEEYRLHEKPVPSSIDPSWLQLFPTVWAERAGMGLANQVPPVVVELRSGASPVAVRQYPMSKEAREGIRPHIQRFLDLGVLVPCQSPWNTPLLPVKKPGTNDYRPVQDLREINKRVQDIHPTVPNPYNLLSSLPPSHTWYSVLDLKDAFFCLKLHPNSQPLFAFEWRDPEKGNTGQLTWTRLPQGFKNSPTLFDEALHRDLAPFRALNPQVVLLQYVDDLLVAAPTYRDCKEGTQKLLQELSKLGYRVSAKKAQLCQKEVTYLGYLLKEGKRWLTPARKATVMKIPPPTTPRQVREFLGTAGFCRLWIPGFASLAAPLYPLTKESIPFIWTEEHQKAFDRIKEALLSAPALALPDLTKPFTLYVDERAGVARGVLTQTLGPWRRPVAYLSKKLDPVASGWPTCLKAVAAVALLLKDADKLTLGQNVTVIASHSLESIVRQPPDRWMTNARMTHYQSLLLNERVSFAPPAVLNPATLLPVESEATPVHRCSEILAEETGTRRDLKDQPLPGVPAWYTDGSSFIAEGKRRAGAAIVDGKRTVWASSLPEGTSAQKAELVALTQALRLAEGKDINIYTDSRYAFATAHIHGAIYKQRGLLTSAGKDIKNKEEILALLEAIHLPKRVAIIHCPGHQKGNDPVATGNRRADEAAKQAALSTRVLAETTKPAGKRTADGSEFEKRTADGSEFESPKKKAKVE

SEQ ID NO: 6045 - protein, 2099 aa, synthetic construct
MPAAKRVKLDGGDKKYSIGLDIGTNSVGWAVITDEYKVPSKKFKVLGNTDRHSIKKNLIGALLFDSGETAEATRLKRTARRRYTRRKNRICYLQEIFSNEMAKVDDSFFHRLEESFLVEEDKKHERHPIFGNIVDEVAYHEKYPTIYHLRKKLVDSTDKADLRLIYLALAHMIKFRGHFLIEGDLNPDNSDVDKLFIQLVQTYNQLFEENPINASGVDAKAILSARLSKSRRLENLIAQLPGEKKNGLFGNLIALSLGLTPNFKSNFDLAEDAKLQLSKDTYDDDLDNLLAQIGDQYADLFLAAKNLSDAILLSDILRVNTEITKAPLSASMIKRYDEHHQDLTLLKALVRQQLPEKYKEIFFDQSKNGYAGYIDGGASQEEFYKFIKPILEKMDGTEELLVKLNREDLLRKQRTFDNGSIPHQIHLGELHAILRRQEDFYPFLKDNREKIEKILTFRIPYYVGPLARGNSRFAWMTRKSEETITPWNFEEVVDKGASAQSFIERMTNFDKNLPNEKVLPKHSLLYEYFTVYNELTKVKYVTEGMRKPAFLSGEQKKAIVDLLFKTNRKVTVKQLKEDYFKKIECFDSVEISGVEDRFNASLGTYHDLLKIIKDKDFLDNEENEDILEDIVLTLTLFEDREMIEERLKTYAHLFDDKVMKQLKRRRYTGWGRLSRKLINGIRDKQSGKTILDFLKSDGFANRNFMQLIHDDSLTFKEDIQKAQVSGQGDSLHEHIANLAGSPAIKKGILQTVKVVDELVKVMGRHKPENIVIEMARENQTTQKGQKNSRERMKRIEEGIKELGSQILKEHPVENTQLQNEKLYLYYLQNGRDMYVDQELDINRLSDYDVDHIVPQSFLKDDSIDNKVLTRSDKARGKSDNVPSEEVVKKMKNYWRQLLNAKLITQRKFDNLTKAERGGLSELDKAGFIKRQLVETRQITKHVAQILDSRMNTKYDENDKLIREVKVITLKSKLVSDFRKDFQFYKVREINNYHHAHDAYLNAVVGTALIKKYPKLESEFVYGDYKVYDVRKMIAKSEQEIGKATAKYFFYSNIMNFFKTEITLANGEIRKRPLIETNGETGEIVWDKGRDFATVRKVLSMPQVNIVKKTEVQTGGFSKESILPKRNSDKLIARKKDWDPKKYGGFDSPTVAYSVLVVAKVEKGKSKKLKSVKELLGITIMERSSFEKNPIDFLEAKGYKEVKKDLIIKLPKYSLFELENGRKRMLASAGELQKGNELALPSKYVNFLYLASHYEKLKGSPEDNEQKQLFVEQHKHYLDEIIEQISEFSKRVILADANLDKVLSAYNKHRDKPIREQAENIIHLFTLTNLGAPAAFKYFDTTIDRKRYTSTKEVLDATLIHQSITGLYETRIDLSQLGGDGGGGSGGSGGSGGSGGTAPLEEEYRLFLEAPIQNVTLLEQWKREIPKVWAEINPPGLASTQAPIHVQLLSTALPVRVRQYPITLEAKRSLRETIRKFRAAGILRPVHSPWNTPLLPVRKSGTSEYRMVQDLREVNKRVETIHPTVPNPYTLLSLLPPDRIWYSVLDLKDAFFCIPLAPESQLIFAFEWADAEEGESGQLTWTRLPQGFKNSPTLFNEALNRDLQGFRLDHPSVSLLQYVDDLLIAADTQAACLSATRDLLMTLAELGYRVSGKKAQLCQEEVTYLGFKIHKGSRSLSNSRTQAILQIPVPKTKRQVREFLGTIGYCRLWIPGFAELAQPLYAATRPGNDPLVWGEKEEEAFQSLKLALTQPPALALPSLDKPFQLFVEETSGAAKGVLTQALGPWKRPVAYLSKRLDPVAAGWPRCLRAIAAAALLTREASKLTFGQDIEITSSHNLESLLRSPPDKWLTNARITQYQVLLLDPPRVRFKQTAALNPATLLPETDDTLPIHHCLDTLDSLTSTRPDLTDQPLAQAEATLFTDGSSYIRDGKRYAGAAVVTLDSVIWAEPLPIGTSAQKAELIALTKALEWSKDKSVNIYTDSRYAFATLHVHGMIYRERGWLTAGGKAIKNAPEILALLTAVWLPKRVAVMHCKGHQKDDAPTSTGNRRADEVAREVAIRPLSTQATISAGKRTADGSEFEKRTADGSEFESPKKKAKVE

SEQ ID NO: 6046 - protein, 2103 aa, synthetic construct
MPAAKRVKLDGGDKKYSIGLDIGTNSVGWAVITDEYKVPSKKFKVLGNTDRHSIKKNLIGALLFDSGETAEATRLKRTARRRYTRRKNRICYLQEIFSNEMAKVDDSFFHRLEESFLVEEDKKHERHPIFGNIVDEVAYHEKYPTIYHLRKKLVDSTDKADLRLIYLALAHMIKFRGHFLIEGDLNPDNSDVDKLFIQLVQTYNQLFEENPINASGVDAKAILSARLSKSRRLENLIAQLPGEKKNGLFGNLIALSLGLTPNFKSNFDLAEDAKLQLSKDTYDDDLDNLLAQIGDQYADLFLAAKNLSDAILLSDILRVNTEITKAPLSASMIKRYDEHHQDLTLLKALVRQQLPEKYKEIFFDQSKNGYAGYIDGGASQEEFYKFIKPILEKMDGTEELLVKLNREDLLRKQRTFDNGSIPHQIHLGELHAILRRQEDFYPFLKDNREKIEKILTFRIPYYVGPLARGNSRFAWMTRKSEETITPWNFEEVVDKGASAQSFIERMTNFDKNLPNEKVLPKHSLLYEYFTVYNELTKVKYVTEGMRKPAFLSGEQKKAIVDLLFKTNRKVTVKQLKEDYFKKIECFDSVEISGVEDRFNASLGTYHDLLKIIKDKDFLDNEENEDILEDIVLTLTLFEDREMIEERLKTYAHLFDDKVMKQLKRRRYTGWGRLSRKLINGIRDKQSGKTILDFLKSDGFANRNFMQLIHDDSLTFKEDIQKAQVSGQGDSLHEHIANLAGSPAIKKGILQTVKVVDELVKVMGRHKPENIVIEMARENQTTQKGQKNSRERMKRIEEGIKELGSQILKEHPVENTQLQNEKLYLYYLQNGRDMYVDQELDINRLSDYDVDHIVPQSFLKDDSIDNKVLTRSDKARGKSDNVPSEEVVKKMKNYWRQLLNAKLITQRKFDNLTKAERGGLSELDKAGFIKRQLVETRQITKHVAQILDSRMNTKYDENDKLIREVKVITLKSKLVSDFRKDFQFYKVREINNYHHAHDAYLNAVVGTALIKKYPKLESEFVYGDYKVYDVRKMIAKSEQEIGKATAKYFFYSNIMNFFKTEITLANGEIRKRPLIETNGETGEIVWDKGRDFATVRKVLSMPQVNIVKKTEVQTGGFSKESILPKRNSDKLIARKKDWDPKKYGGFDSPTVAYSVLVVAKVEKGKSKKLKSVKELLGITIMERSSFEKNPIDFLEAKGYKEVKKDLIIKLPKYSLFELENGRKRMLASAGELQKGNELALPSKYVNFLYLASHYEKLKGSPEDNEQKQLFVEQHKHYLDEIIEQISEFSKRVILADANLDKVLSAYNKHRDKPIREQAENIIHLFTLTNLGAPAAFKYFDTTIDRKRYTSTKEVLDATLIHQSITGLYETRIDLSQLGGDGGGGSGGSGGSGGSGGTVSLQDEHRLFDIPVTTSLPDVWLQDFPQAWAETGGLGRAKCQAPIIIDLKPTAVPVSIKQYPMSLEAHMGIRQHIIKFLELGVLRPCRSPWNTPLLPVKKPGTQDYRPVQDLREINKRTVDIHPTVPNPYNLLSTLKPDYSWYTVLDLKDAFFCLPLAPQSQELFAFEWKDPERGISGQLTWTRLPQGFKNSPTLFNEALHRDLTDFRTQHPEVTLLQYVDDLLLAAPTKKACTQGTRHLLQELGEKGYRASAKKAQICQTKVTYLGYILSEGKRWLTPGRIETVARIPPPRNPREVREFLGTAGFCRLWIPGFAELAAPLYALTKPSTPFTWQTEHQLAFEALKKALLSAPALGLPDTSKPFTLFLDERQGIAKGVLTQKLGPWKRPVAYLSKKLDPVAAGWPPCLRIMAATAMLVKDSAKLTLGQPLTVITPHTLEAIVRQPPDRWITNARLTHYQALLLDTDRVQFGPPVTLNPATLLPVPENQPSPHDCRQVLAETHGTREDLKDQELPDADHTWYTDGSSYLDSGTRRAGAAVVDGHNTIWAQSLPPGTSAQKAELIALTKALELSKGKKANIYTDSRYAFATAHTHGSIYERRGWLTSEGKEIKNKAEIIALLKALFLPQEVAIIHCPGHQKGQDPVAVGNRQADRVARQAAMAEVLTLATEPDNTSHITAGKRTADGSEFEKRTADGSEFESPKKKAKVE

SEQ ID NO: 6047 - protein, 2088 aa, synthetic construct
MPAAKRVKLDGGDKKYSIGLDIGTNSVGWAVITDEYKVPSKKFKVLGNTDRHSIKKNLIGALLFDSGETAEATRLKRTARRRYTRRKNRICYLQEIFSNEMAKVDDSFFHRLEESFLVEEDKKHERHPIFGNIVDEVAYHEKYPTIYHLRKKLVDSTDKADLRLIYLALAHMIKFRGHFLIEGDLNPDNSDVDKLFIQLVQTYNQLFEENPINASGVDAKAILSARLSKSRRLENLIAQLPGEKKNGLFGNLIALSLGLTPNFKSNFDLAEDAKLQLSKDTYDDDLDNLLAQIGDQYADLFLAAKNLSDAILLSDILRVNTEITKAPLSASMIKRYDEHHQDLTLLKALVRQQLPEKYKEIFFDQSKNGYAGYIDGGASQEEFYKFIKPILEKMDGTEELLVKLNREDLLRKQRTFDNGSIPHQIHLGELHAILRRQEDFYPFLKDNREKIEKILTFRIPYYVGPLARGNSRFAWMTRKSEETITPWNFEEVVDKGASAQSFIERMTNFDKNLPNEKVLPKHSLLYEYFTVYNELTKVKYVTEGMRKPAFLSGEQKKAIVDLLFKTNRKVTVKQLKEDYFKKIECFDSVEISGVEDRFNASLGTYHDLLKIIKDKDFLDNEENEDILEDIVLTLTLFEDREMIEERLKTYAHLFDDKVMKQLKRRRYTGWGRLSRKLINGIRDKQSGKTILDFLKSDGFANRNFMQLIHDDSLTFKEDIQKAQVSGQGDSLHEHIANLAGSPAIKKGILQTVKVVDELVKVMGRHKPENIVIEMARENQTTQKGQKNSRERMKRIEEGIKELGSQILKEHPVENTQLQNEKLYLYYLQNGRDMYVDQELDINRLSDYDVDHIVPQSFLKDDSIDNKVLTRSDKARGKSDNVPSEEVVKKMKNYWRQLLNAKLITQRKFDNLTKAERGGLSELDKAGFIKRQLVETRQITKHVAQILDSRMNTKYDENDKLIREVKVITLKSKLVSDFRKDFQFYKVREINNYHHAHDAYLNAVVGTALIKKYPKLESEFVYGDYKVYDVRKMIAKSEQEIGKATAKYFFYSNIMNFFKTEITLANGEIRKRPLIETNGETGEIVWDKGRDFATVRKVLSMPQVNIVKKTEVQTGGFSKESILPKRNSDKLIARKKDWDPKKYGGFDSPTVAYSVLVVAKVEKGKSKKLKSVKELLGITIMERSSFEKNPIDFLEAKGYKEVKKDLIIKLPKYSLFELENGRKRMLASAGELQKGNELALPSKYVNFLYLASHYEKLKGSPEDNEQKQLFVEQHKHYLDEIIEQISEFSKRVILADANLDKVLSAYNKHRDKPIREQAENIIHLFTLTNLGAPAAFKYFDTTIDRKRYTSTKEVLDATLIHQSITGLYETRIDLSQLGGDGGGGSGGSGGSGGSGGVPWLTQQPLQLTILVPLQEYQEKILSKTALPEDQKQQLKTLFVKYDNLWQHWENQVGHRKIRPHNIATGDYPPRPQKQYPINPKAKPSIQIVIDDLLKQGVLTPQNSTMNTPVYPVPKPDGRWRMVLDYREVNKTIPLTAAQNQHSAGILATIVRQKYKTTLDLANGFWAHPITPESYWLTAFTWQGKQYCWTRLPQGFLNSPALFTADVVDLLKEIPNVQVYVDDIYLSHDDPKEHVQQLEKVFQILLQAGYVVSLKKSEIGQKTVEFLGFNITKEGRGLTDTFKTKLLNITPPKDLKQLQSILGLLNFARNFIPNFAELVQPLYNLIASAKGKYIEWSEENTKQLNMVIEALNTASNLEERLPEQRLVIKVNTSPSAGYVRYYNETGKKPIMYLNYVFSKAELKFSMLEKLLTTMHKALIKAMDLAMGQEILVYSPIVSMTKIQKTPLPERKALPIRWITWMTYLEDPRIQFHYDKTLPELKHIPDVYTSSQSPVKHPSQYEGVFYTDGSAIKSPDPTKSNNAGMGIVHATYKPEYQVLNQWSIPLGNHTAQMAEIAAVEFACKKALKIPGPVLVITDSFYVAESANKELPYWKSNGFVNNKKKPLKHISKWKSIAECLSMKPDITIQHEKGISLQIPVFILKGNALADKLATQGSYVVNAGKRTADGSEFEKRTADGSEFESPKKKAKVE

SEQ ID NO: 6048 - protein, 2128 aa, synthetic construct
MPAAKRVKLDGGDKKYSIGLDIGTNSVGWAVITDEYKVPSKKFKVLGNTDRHSIKKNLIGALLFDSGETAEATRLKRTARRRYTRRKNRICYLQEIFSNEMAKVDDSFFHRLEESFLVEEDKKHERHPIFGNIVDEVAYHEKYPTIYHLRKKLVDSTDKADLRLIYLALAHMIKFRGHFLIEGDLNPDNSDVDKLFIQLVQTYNQLFEENPINASGVDAKAILSARLSKSRRLENLIAQLPGEKKNGLFGNLIALSLGLTPNFKSNFDLAEDAKLQLSKDTYDDDLDNLLAQIGDQYADLFLAAKNLSDAILLSDILRVNTEITKAPLSASMIKRYDEHHQDLTLLKALVRQQLPEKYKEIFFDQSKNGYAGYIDGGASQEEFYKFIKPILEKMDGTEELLVKLNREDLLRKQRTFDNGSIPHQIHLGELHAILRRQEDFYPFLKDNREKIEKILTFRIPYYVGPLARGNSRFAWMTRKSEETITPWNFEEVVDKGASAQSFIERMTNFDKNLPNEKVLPKHSLLYEYFTVYNELTKVKYVTEGMRKPAFLSGEQKKAIVDLLFKTNRKVTVKQLKEDYFKKIECFDSVEISGVEDRFNASLGTYHDLLKIIKDKDFLDNEENEDILEDIVLTLTLFEDREMIEERLKTYAHLFDDKVMKQLKRRRYTGWGRLSRKLINGIRDKQSGKTILDFLKSDGFANRNFMQLIHDDSLTFKEDIQKAQVSGQGDSLHEHIANLAGSPAIKKGILQTVKVVDELVKVMGRHKPENIVIEMARENQTTQKGQKNSRERMKRIEEGIKELGSQILKEHPVENTQLQNEKLYLYYLQNGRDMYVDQELDINRLSDYDVDHIVPQSFLKDDSIDNKVLTRSDKARGKSDNVPSEEVVKKMKNYWRQLLNAKLITQRKFDNLTKAERGGLSELDKAGFIKRQLVETRQITKHVAQILDSRMNTKYDENDKLIREVKVITLKSKLVSDFRKDFQFYKVREINNYHHAHDAYLNAVVGTALIKKYPKLESEFVYGDYKVYDVRKMIAKSEQEIGKATAKYFFYSNIMNFFKTEITLANGEIRKRPLIETNGETGEIVWDKGRDFATVRKVLSMPQVNIVKKTEVQTGGFSKESILPKRNSDKLIARKKDWDPKKYGGFDSPTVAYSVLVVAKVEKGKSKKLKSVKELLGITIMERSSFEKNPIDFLEAKGYKEVKKDLIIKLPKYSLFELENGRKRMLASAGELQKGNELALPSKYVNFLYLASHYEKLKGSPEDNEQKQLFVEQHKHYLDEIIEQISEFSKRVILADANLDKVLSAYNKHRDKPIREQAENIIHLFTLTNLGAPAAFKYFDTTIDRKRYTSTKEVLDATLIHQSITGLYETRIDLSQLGGDGGGGSGGSGGSGGSGGLLGRDLLTKLKAQIQFSTEGPQVTWEDRPAMCLVLNLEEEYRLHEKPVPPSIDPSWLQLFPMVWAEKAGMGLANQVPPVVVELKSDASPVAVRQYPMSKEAREGIRPHIQRFLDLGILVPCQSPWNTPLLPVKKPGTNDYRPVQDLREVNKRVQDIHPTVPNPYNLLSSLPPSHTWYSVLDLKDAFFCLKLHPNSQPLFAFEWRDPEKGNTGQLTWTRLPQGFKNSPTLFNEALHRDLASFRALNPQVVMLQYVDDLLVAAPTYRDCKEGTRRLLQELSKLGYRVSAKKAQLCREEVTYLGYLLKGGKRWLTPARKATVMKIPTPTTPRQVREFLGTAGFCRLWIPGFASLAAPLYPLTRPKVPFTWTEAHQEAFGRIKEALLSAPALALPDLTKPFALYVDEKEGVARGVLTQTLGPWRRPVAYLSKKLDPVASGWPTCLKAIAAVALLLKDADKLTLGQNVLVIAPHNLESIVRQPPDRWMTNARMTHYQSLLLNERVSFAPPAILNPATLLPVESDDTPIHICSEILAEETGTRPDLRDQPLPGVPAWYTDGSSFIMDGRRQAGAAIVDNKRTVWASNLPEGTSAQKAELIALTQALRLAEGKSINIYTDSRYAFATAHVHGAIYKQRGWLTSAGKDIKNKEEILALLEAIHLPKRVAIIHCPGHQRGTDPVATGNRKADEAAKQAAQSTRILTETTKNAGKRTADGSEFEKRTADGSEFESPKKKAKVE

SEQ ID NO: 6049 - protein, 2219 aa, synthetic construct
MPAAKRVKLDGGDKKYSIGLDIGTNSVGWAVITDEYKVPSKKFKVLGNTDRHSIKKNLIGALLFDSGETAEATRLKRTARRRYTRRKNRICYLQEIFSNEMAKVDDSFFHRLEESFLVEEDKKHERHPIFGNIVDEVAYHEKYPTIYHLRKKLVDSTDKADLRLIYLALAHMIKFRGHFLIEGDLNPDNSDVDKLFIQLVQTYNQLFEENPINASGVDAKAILSARLSKSRRLENLIAQLPGEKKNGLFGNLIALSLGLTPNFKSNFDLAEDAKLQLSKDTYDDDLDNLLAQIGDQYADLFLAAKNLSDAILLSDILRVNTEITKAPLSASMIKRYDEHHQDLTLLKALVRQQLPEKYKEIFFDQSKNGYAGYIDGGASQEEFYKFIKPILEKMDGTEELLVKLNREDLLRKQRTFDNGSIPHQIHLGELHAILRRQEDFYPFLKDNREKIEKILTFRIPYYVGPLARGNSRFAWMTRKSEETITPWNFEEVVDKGASAQSFIERMTNFDKNLPNEKVLPKHSLLYEYFTVYNELTKVKYVTEGMRKPAFLSGEQKKAIVDLLFKTNRKVTVKQLKEDYFKKIECFDSVEISGVEDRFNASLGTYHDLLKIIKDKDFLDNEENEDILEDIVLTLTLFEDREMIEERLKTYAHLFDDKVMKQLKRRRYTGWGRLSRKLINGIRDKQSGKTILDFLKSDGFANRNFMQLIHDDSLTFKEDIQKAQVSGQGDSLHEHIANLAGSPAIKKGILQTVKVVDELVKVMGRHKPENIVIEMARENQTTQKGQKNSRERMKRIEEGIKELGSQILKEHPVENTQLQNEKLYLYYLQNGRDMYVDQELDINRLSDYDVDHIVPQSFLKDDSIDNKVLTRSDKARGKSDNVPSEEVVKKMKNYWRQLLNAKLITQRKFDNLTKAERGGLSELDKAGFIKRQLVETRQITKHVAQILDSRMNTKYDENDKLIREVKVITLKSKLVSDFRKDFQFYKVREINNYHHAHDAYLNAVVGTALIKKYPKLESEFVYGDYKVYDVRKMIAKSEQEIGKATAKYFFYSNIMNFFKTEITLANGEIRKRPLIETNGETGEIVWDKGRDFATVRKVLSMPQVNIVKKTEVQTGGFSKESILPKRNSDKLIARKKDWDPKKYGGFDSPTVAYSVLVVAKVEKGKSKKLKSVKELLGITIMERSSFEKNPIDFLEAKGYKEVKKDLIIKLPKYSLFELENGRKRMLASAGELQKGNELALPSKYVNFLYLASHYEKLKGSPEDNEQKQLFVEQHKHYLDEIIEQISEFSKRVILADANLDKVLSAYNKHRDKPIREQAENIIHLFTLTNLGAPAAFKYFDTTIDRKRYTSTKEVLDATLIHQSITGLYETRIDLSQLGGDGGGGSGGSGGSGGSGGTLGDQGSRGSDPLPEPRVTLTVEGIPTEFLVNTGAEHSVLTKPMGKMGSKRTVVAGATGSKVYPWTTKRLLKIGQKQVTHSFLVIPECPAPLLGRDLLTKLKAQIQFSTEGPQVTWEDRPAMCLVLNLEEEYRLHEKPVPPSIDPSWLQLFPMVWAEKAGMGLANQVPPVVVELKSDASPVAVRQYPMSKEAREGIRPHIQRFLDLGILVPCQSPWNTPLLPVKKPGTNDYRPVQDLREVNKRVQDIHPTVPNPYNLLSSLPPSHTWYSVLDLKDAFFCLKLHPNSQPLFAFEWRDPEKGNTGQLTWTRLPQGFKNSPTLFNEALHRDLASFRALNPQVVMLQYVDDLLVAAPTYRDCKEGTRRLLQELSKLGYRVSAKKAQLCREEVTYLGYLLKGGKRWLTPARKATVMKIPTPTTPRQVREFLGKAGFCRLFIPGFASLAAPLYPLTRPKVPFTWTEAHQEAFGRIKEALLSAPALALPDLTKPFALYVDEKEGVARGVLTQTLGPWRRPVAYLSKKLDPVASGWPTCLKAIAAVALLLKDADKLTLGQNVLVIAPHNLESIVRQPPDRWMTNARMTHYQSLLLNERVSFAPPAILNPATLLPVESDDTPIHICSEILAEETGTRPDLRDQPLPGVPAWYTDGSSFIMDGRRQAGAAIVDNKRTVWASNLPEGTSAQKAELIALTQALRLAEGKSINIYTDSRYAFATAHVHGAIYKQRGWLTSAGKDIKNKEEILALLEAIHLPKRVAIIHCPGHQRGTDPVATGNRKADEAAKQAAQSTRILTETTKNAGKRTADGSEFEKRTADGSEFESPKKKAKVE

SEQ ID NO: 6050 - protein, 2097 aa, synthetic construct
MPAAKRVKLDGGDKKYSIGLDIGTNSVGWAVITDEYKVPSKKFKVLGNTDRHSIKKNLIGALLFDSGETAEATRLKRTARRRYTRRKNRICYLQEIFSNEMAKVDDSFFHRLEESFLVEEDKKHERHPIFGNIVDEVAYHEKYPTIYHLRKKLVDSTDKADLRLIYLALAHMIKFRGHFLIEGDLNPDNSDVDKLFIQLVQTYNQLFEENPINASGVDAKAILSARLSKSRRLENLIAQLPGEKKNGLFGNLIALSLGLTPNFKSNFDLAEDAKLQLSKDTYDDDLDNLLAQIGDQYADLFLAAKNLSDAILLSDILRVNTEITKAPLSASMIKRYDEHHQDLTLLKALVRQQLPEKYKEIFFDQSKNGYAGYIDGGASQEEFYKFIKPILEKMDGTEELLVKLNREDLLRKQRTFDNGSIPHQIHLGELHAILRRQEDFYPFLKDNREKIEKILTFRIPYYVGPLARGNSRFAWMTRKSEETITPWNFEEVVDKGASAQSFIERMTNFDKNLPNEKVLPKHSLLYEYFTVYNELTKVKYVTEGMRKPAFLSGEQKKAIVDLLFKTNRKVTVKQLKEDYFKKIECFDSVEISGVEDRFNASLGTYHDLLKIIKDKDFLDNEENEDILEDIVLTLTLFEDREMIEERLKTYAHLFDDKVMKQLKRRRYTGWGRLSRKLINGIRDKQSGKTILDFLKSDGFANRNFMQLIHDDSLTFKEDIQKAQVSGQGDSLHEHIANLAGSPAIKKGILQTVKVVDELVKVMGRHKPENIVIEMARENQTTQKGQKNSRERMKRIEEGIKELGSQILKEHPVENTQLQNEKLYLYYLQNGRDMYVDQELDINRLSDYDVDHIVPQSFLKDDSIDNKVLTRSDKARGKSDNVPSEEVVKKMKNYWRQLLNAKLITQRKFDNLTKAERGGLSELDKAGFIKRQLVETRQITKHVAQILDSRMNTKYDENDKLIREVKVITLKSKLVSDFRKDFQFYKVREINNYHHAHDAYLNAVVGTALIKKYPKLESEFVYGDYKVYDVRKMIAKSEQEIGKATAKYFFYSNIMNFFKTEITLANGEIRKRPLIETNGETGEIVWDKGRDFATVRKVLSMPQVNIVKKTEVQTGGFSKESILPKRNSDKLIARKKDWDPKKYGGFDSPTVAYSVLVVAKVEKGKSKKLKSVKELLGITIMERSSFEKNPIDFLEAKGYKEVKKDLIIKLPKYSLFELENGRKRMLASAGELQKGNELALPSKYVNFLYLASHYEKLKGSPEDNEQKQLFVEQHKHYLDEIIEQISEFSKRVILADANLDKVLSAYNKHRDKPIREQAENIIHLFTLTNLGAPAAFKYFDTTIDRKRYTSTKEVLDATLIHQSITGLYETRIDLSQLGGDGGGGSGGSGGSGGSGGTLNIEDEYRLHETSKGPDVPLGSTWLSDFPQAWAETGGMGLAVRQAPLIIPLKATSTPVSIKQYPMSQEARLGIKPHIQRLLDQGILVPCQSPWNTPLLPVKKPGTNDYRPVQDLREVNKRVEDIHPTVPNPYNLLSGLPPSHQWYTVLDLKDAFFCLRLHPTSQSLFAFEWRDPEMGISGQLTWTRLPQGFKNSPTLFNEALHRDLADFRIQHPDLILLQYVDDLLLAATSELDCQQGTRALLQTLGDLGYRASAKKAQICQKQVKYLGYLLKEGQRWLTEARKETVMGQPTPKTPRQLREFLGTAGFCRLWIPGFAEMAAPLYPLTKPGTLFEWGPDQQKAYQEIKQALLTAPALGLPDLTKPFELFVDEKQGYAKGVLTQKLGPWRRPVAYLSKKLDPVAAGWPPCLRMVAAIAVLTKDAGKLTMGQPLVILAPHAVEALVKQPPDRWLSNARMTHYQALLLDTDRVQFGPIVALNPATLLPLPEEGLQHDCLDILAEAHGTRPDLTDQPLPDADHTWYTDGSSFLQEGQRKAGAAVTTETEVVWAKALPAGTSAQRAELIALTQALKMAEGKKLNVYTDSRYAFATAHIHGEIYRRRGWLTSEGKEIKNKDEILALLKALFLPKRLSIIHCPGHQKGNRAEARGNRMADQAAREVATRETPETSTLLAGKRTADGSEFEKRTADGSEFESPKKKAKVE

SEQ ID NO: 6051 - protein, 2088 aa, synthetic construct
MPAAKRVKLDGGDKKYSIGLDIGTNSVGWAVITDEYKVPSKKFKVLGNTDRHSIKKNLIGALLFDSGETAEATRLKRTARRRYTRRKNRICYLQEIFSNEMAKVDDSFFHRLEESFLVEEDKKHERHPIFGNIVDEVAYHEKYPTIYHLRKKLVDSTDKADLRLIYLALAHMIKFRGHFLIEGDLNPDNSDVDKLFIQLVQTYNQLFEENPINASGVDAKAILSARLSKSRRLENLIAQLPGEKKNGLFGNLIALSLGLTPNFKSNFDLAEDAKLQLSKDTYDDDLDNLLAQIGDQYADLFLAAKNLSDAILLSDILRVNTEITKAPLSASMIKRYDEHHQDLTLLKALVRQQLPEKYKEIFFDQSKNGYAGYIDGGASQEEFYKFIKPILEKMDGTEELLVKLNREDLLRKQRTFDNGSIPHQIHLGELHAILRRQEDFYPFLKDNREKIEKILTFRIPYYVGPLARGNSRFAWMTRKSEETITPWNFEEVVDKGASAQSFIERMTNFDKNLPNEKVLPKHSLLYEYFTVYNELTKVKYVTEGMRKPAFLSGEQKKAIVDLLFKTNRKVTVKQLKEDYFKKIECFDSVEISGVEDRFNASLGTYHDLLKIIKDKDFLDNEENEDILEDIVLTLTLFEDREMIEERLKTYAHLFDDKVMKQLKRRRYTGWGRLSRKLINGIRDKQSGKTILDFLKSDGFANRNFMQLIHDDSLTFKEDIQKAQVSGQGDSLHEHIANLAGSPAIKKGILQTVKVVDELVKVMGRHKPENIVIEMARENQTTQKGQKNSRERMKRIEEGIKELGSQILKEHPVENTQLQNEKLYLYYLQNGRDMYVDQELDINRLSDYDVDHIVPQSFLKDDSIDNKVLTRSDKARGKSDNVPSEEVVKKMKNYWRQLLNAKLITQRKFDNLTKAERGGLSELDKAGFIKRQLVETRQITKHVAQILDSRMNTKYDENDKLIREVKVITLKSKLVSDFRKDFQFYKVREINNYHHAHDAYLNAVVGTALIKKYPKLESEFVYGDYKVYDVRKMIAKSEQEIGKATAKYFFYSNIMNFFKTEITLANGEIRKRPLIETNGETGEIVWDKGRDFATVRKVLSMPQVNIVKKTEVQTGGFSKESILPKRNSDKLIARKKDWDPKKYGGFDSPTVAYSVLVVAKVEKGKSKKLKSVKELLGITIMERSSFEKNPIDFLEAKGYKEVKKDLIIKLPKYSLFELENGRKRMLASAGELQKGNELALPSKYVNFLYLASHYEKLKGSPEDNEQKQLFVEQHKHYLDEIIEQISEFSKRVILADANLDKVLSAYNKHRDKPIREQAENIIHLFTLTNLGAPAAFKYFDTTIDRKRYTSTKEVLDATLIHQSITGLYETRIDLSQLGGDGGGGSGGSGGSGGSGGIPWLMKKPLQLTTLVPLQEYEERLLKQTMLTGSYKEKLQSLFLKYDALWQHWENQVGHRRIKPHHIATGTVNPRPQKQYPINPKAKASIQTVINDLLKQGVLIQQNSIMNTPVYPVPKPDGKWRMVLDYREVNKTIPLIAAQNQHSAGILSSIFRGKYKTTLDLSNGFWAHSITPESYWLTAFTWLGQQYCWTRLPQGFLNSPALFNADVVDLLKEVPNVQVYVDDIYISHDDPREHLEQLEKVFSLLLNAGYVVSLKKSEIAQHEVEFLGFNITKEGRGLTETFKQKLLNITPPRDLKQLQSILGKLNFARNFIPNFSELVKPLYNIIATAPGKYITWTTDNSQQLQNIISMLNSAENLEERNPEVRLIMKVNTSPSAGYIRFYNEFAKRPIMYLNYVYTKAEVKFTNTEKLLTTIHKGLIKALDLGMGQEILVYSPIVSMTKIQKTPLPERKALPIRWITWMSYLEDPRIQFHYDKTLPELQQVPTVTDDIIAKIKHPSEFSMVFYTDGSAIKHPNVNKSHNAGMGIAQVQFKPEFTVINTWSIPLGDHTAQLAEVAAVEFACKKALKIDGPVLIVTDSFYVAESVNKELPYWQSNGFFNNKKKPLKHVSKWKSIADCIQLKPDIIIIHEKGHQPTASTFHTEGNNLADKLATQGSYVVNAGKRTADGSEFEKRTADGSEFESPKKKAKVE

SEQ ID NO: 6052 - protein, 2177 aa, synthetic construct
MPAAKRVKLDGGDKKYSIGLDIGTNSVGWAVITDEYKVPSKKFKVLGNTDRHSIKKNLIGALLFDSGETAEATRLKRTARRRYTRRKNRICYLQEIFSNEMAKVDDSFFHRLEESFLVEEDKKHERHPIFGNIVDEVAYHEKYPTIYHLRKKLVDSTDKADLRLIYLALAHMIKFRGHFLIEGDLNPDNSDVDKLFIQLVQTYNQLFEENPINASGVDAKAILSARLSKSRRLENLIAQLPGEKKNGLFGNLIALSLGLTPNFKSNFDLAEDAKLQLSKDTYDDDLDNLLAQIGDQYADLFLAAKNLSDAILLSDILRVNTEITKAPLSASMIKRYDEHHQDLTLLKALVRQQLPEKYKEIFFDQSKNGYAGYIDGGASQEEFYKFIKPILEKMDGTEELLVKLNREDLLRKQRTFDNGSIPHQIHLGELHAILRRQEDFYPFLKDNREKIEKILTFRIPYYVGPLARGNSRFAWMTRKSEETITPWNFEEVVDKGASAQSFIERMTNFDKNLPNEKVLPKHSLLYEYFTVYNELTKVKYVTEGMRKPAFLSGEQKKAIVDLLFKTNRKVTVKQLKEDYFKKIECFDSVEISGVEDRFNASLGTYHDLLKIIKDKDFLDNEENEDILEDIVLTLTLFEDREMIEERLKTYAHLFDDKVMKQLKRRRYTGWGRLSRKLINGIRDKQSGKTILDFLKSDGFANRNFMQLIHDDSLTFKEDIQKAQVSGQGDSLHEHIANLAGSPAIKKGILQTVKVVDELVKVMGRHKPENIVIEMARENQTTQKGQKNSRERMKRIEEGIKELGSQILKEHPVENTQLQNEKLYLYYLQNGRDMYVDQELDINRLSDYDVDHIVPQSFLKDDSIDNKVLTRSDKARGKSDNVPSEEVVKKMKNYWRQLLNAKLITQRKFDNLTKAERGGLSELDKAGFIKRQLVETRQITKHVAQILDSRMNTKYDENDKLIREVKVITLKSKLVSDFRKDFQFYKVREINNYHHAHDAYLNAVVGTALIKKYPKLESEFVYGDYKVYDVRKMIAKSEQEIGKATAKYFFYSNIMNFFKTEITLANGEIRKRPLIETNGETGEIVWDKGRDFATVRKVLSMPQVNIVKKTEVQTGGFSKESILPKRNSDKLIARKKDWDPKKYGGFDSPTVAYSVLVVAKVEKGKSKKLKSVKELLGITIMERSSFEKNPIDFLEAKGYKEVKKDLIIKLPKYSLFELENGRKRMLASAGELQKGNELALPSKYVNFLYLASHYEKLKGSPEDNEQKQLFVEQHKHYLDEIIEQISEFSKRVILADANLDKVLSAYNKHRDKPIREQAENIIHLFTLTNLGAPAAFKYFDTTIDRKRYTSTKEVLDATLIHQSITGLYETRIDLSQLGGDGGGGSGGSGGSGGSGGMDPLQLLQPLEAEIKGTKLKAHWNSGATITCVPQAFLEEEVPIKNIWIKTIHGEKEQPVYYLTFKIQGRKVEAEVISSPYDYILVSPSDIPWLMKKPLQLTTLVPLQEYEERLLKQTMLTGSYKEKLQSLFLKYDALWQHWENQVGHRRIKPHHIATGTVNPRPQKQYPINPKAKASIQTVINDLLKQGVLIQQNSIMNTPVYPVPKPDGKWRMVLDYREVNKTIPLIAAQNQHSAGILSSIFRGKYKTTLDLSNGFWAHSITPESYWLTAFTWLGQQYCWTRLPQGFLNSPALFNADVVDLLKEVPNVQVYVDDIYISHDDPREHLEQLEKVFSLLLNAGYVVSLKKSEIAQHEVEFLGFNITKEGRGLTETFKQKLLNITPPRDLKQLQSILGKLNFARNFIPNFSELVKPLYNIIATAPGKYITWTTDNSQQLQNIISMLNSAENLEERNPEVRLIMKVNTSPSAGYIRFYNEFAKRPIMYLNYVYTKAEVKFTNTEKLLTTIHKGLIKALDLGMGQEILVYSPIVSMTKIQKTPLPERKALPIRWITWMSYLEDPRIQFHYDKTLPELQQVPTVTDDIIAKIKHPSEFSMVFYTDGSAIKHPNVNKSHNAGMGIAQVQFKPEFTVINTWSIPLGDHTAQLAEVAAVEFACKKALKIDGPVLIVTDSFYVAESVNKELPYWQSNGFFNNKKKPLKHVSKWKSIADCIQLKPDIIIIHEKGHQPTASTFHTEGNNLADKLATQGSYVVNAGKRTADGSEFEKRTADGSEFESPKKKAKVE

SEQ ID NO: 6053 - protein, 2095 aa, synthetic construct
MPAAKRVKLDGGDKKYSIGLDIGTNSVGWAVITDEYKVPSKKFKVLGNTDRHSIKKNLIGALLFDSGETAEATRLKRTARRRYTRRKNRICYLQEIFSNEMAKVDDSFFHRLEESFLVEEDKKHERHPIFGNIVDEVAYHEKYPTIYHLRKKLVDSTDKADLRLIYLALAHMIKFRGHFLIEGDLNPDNSDVDKLFIQLVQTYNQLFEENPINASGVDAKAILSARLSKSRRLENLIAQLPGEKKNGLFGNLIALSLGLTPNFKSNFDLAEDAKLQLSKDTYDDDLDNLLAQIGDQYADLFLAAKNLSDAILLSDILRVNTEITKAPLSASMIKRYDEHHQDLTLLKALVRQQLPEKYKEIFFDQSKNGYAGYIDGGASQEEFYKFIKPILEKMDGTEELLVKLNREDLLRKQRTFDNGSIPHQIHLGELHAILRRQEDFYPFLKDNREKIEKILTFRIPYYVGPLARGNSRFAWMTRKSEETITPWNFEEVVDKGASAQSFIERMTNFDKNLPNEKVLPKHSLLYEYFTVYNELTKVKYVTEGMRKPAFLSGEQKKAIVDLLFKTNRKVTVKQLKEDYFKKIECFDSVEISGVEDRFNASLGTYHDLLKIIKDKDFLDNEENEDILEDIVLTLTLFEDREMIEERLKTYAHLFDDKVMKQLKRRRYTGWGRLSRKLINGIRDKQSGKTILDFLKSDGFANRNFMQLIHDDSLTFKEDIQKAQVSGQGDSLHEHIANLAGSPAIKKGILQTVKVVDELVKVMGRHKPENIVIEMARENQTTQKGQKNSRERMKRIEEGIKELGSQILKEHPVENTQLQNEKLYLYYLQNGRDMYVDQELDINRLSDYDVDHIVPQSFLKDDSIDNKVLTRSDKARGKSDNVPSEEVVKKMKNYWRQLLNAKLITQRKFDNLTKAERGGLSELDKAGFIKRQLVETRQITKHVAQILDSRMNTKYDENDKLIREVKVITLKSKLVSDFRKDFQFYKVREINNYHHAHDAYLNAVVGTALIKKYPKLESEFVYGDYKVYDVRKMIAKSEQEIGKATAKYFFYSNIMNFFKTEITLANGEIRKRPLIETNGETGEIVWDKGRDFATVRKVLSMPQVNIVKKTEVQTGGFSKESILPKRNSDKLIARKKDWDPKKYGGFDSPTVAYSVLVVAKVEKGKSKKLKSVKELLGITIMERSSFEKNPIDFLEAKGYKEVKKDLIIKLPKYSLFELENGRKRMLASAGELQKGNELALPSKYVNFLYLASHYEKLKGSPEDNEQKQLFVEQHKHYLDEIIEQISEFSKRVILADANLDKVLSAYNKHRDKPIREQAENIIHLFTLTNLGAPAAFKYFDTTIDRKRYTSTKEVLDATLIHQSITGLYETRIDLSQLGGDGGGGSGGSGGSGGSGGVLNLEEEYRLHEKPVPSSIDPSWLQLFPTVWAERAGMGLANQVPPVVVELRSGASPVAVRQYPMSKEAREGIRPHIQRFLDLGVLVPCQSPWNTPLLPVKKPGTNDYRPVQDLREINKRVQDIHPTVPNPYNLLSSLPPSHTWYSVLDLKDAFFCLKLHPNSQPLFAFEWRDPEKGNTGQLTWTRLPQGFKNSPTLFDEALHRDLAPFRALNPQVVLLQYVDDLLVAAPTYRDCKEGTQKLLQELSKLGYRVSAKKAQLCQKEVTYLGYLLKEGKRWLTPARKATVMKIPPPTTPRQVREFLGTAGFCRLWIPGFASLAAPLYPLTKESIPFIWTEEHQKAFDRIKEALLSAPALALPDLTKPFTLYVDERAGVARGVLTQTLGPWRRPVAYLSKKLDPVASGWPTCLKAVAAVALLLKDADKLTLGQNVTVIASHSLESIVRQPPDRWMTNARMTHYQSLLLNERVSFAPPAVLNPATLLPVESEATPVHRCSEILAEETGTRRDLKDQPLPGVPAWYTDGSSFIAEGKRRAGAAIVDGKRTVWASSLPEGTSAQKAELVALTQALRLAEGKDINIYTDSRYAFATAHIHGAIYKQRGLLTSAGKDIKNKEEILALLEAIHLPKRVAIIHCPGHQKGNDPVATGNRRADEAAKQAALSTRVLAETTKPAGKRTADGSEFEKRTADGSEFESPKKKAKVE

SEQ ID NO: 6054 - protein, 2097 aa, synthetic construct
MPAAKRVKLDGGDKKYSIGLDIGTNSVGWAVITDEYKVPSKKFKVLGNTDRHSIKKNLIGALLFDSGETAEATRLKRTARRRYTRRKNRICYLQEIFSNEMAKVDDSFFHRLEESFLVEEDKKHERHPIFGNIVDEVAYHEKYPTIYHLRKKLVDSTDKADLRLIYLALAHMIKFRGHFLIEGDLNPDNSDVDKLFIQLVQTYNQLFEENPINASGVDAKAILSARLSKSRRLENLIAQLPGEKKNGLFGNLIALSLGLTPNFKSNFDLAEDAKLQLSKDTYDDDLDNLLAQIGDQYADLFLAAKNLSDAILLSDILRVNTEITKAPLSASMIKRYDEHHQDLTLLKALVRQQLPEKYKEIFFDQSKNGYAGYIDGGASQEEFYKFIKPILEKMDGTEELLVKLNREDLLRKQRTFDNGSIPHQIHLGELHAILRRQEDFYPFLKDNREKIEKILTFRIPYYVGPLARGNSRFAWMTRKSEETITPWNFEEVVDKGASAQSFIERMTNFDKNLPNEKVLPKHSLLYEYFTVYNELTKVKYVTEGMRKPAFLSGEQKKAIVDLLFKTNRKVTVKQLKEDYFKKIECFDSVEISGVEDRFNASLGTYHDLLKIIKDKDFLDNEENEDILEDIVLTLTLFEDREMIEERLKTYAHLFDDKVMKQLKRRRYTGWGRLSRKLINGIRDKQSGKTILDFLKSDGFANRNFMQLIHDDSLTFKEDIQKAQVSGQGDSLHEHIANLAGSPAIKKGILQTVKVVDELVKVMGRHKPENIVIEMARENQTTQKGQKNSRERMKRIEEGIKELGSQILKEHPVENTQLQNEKLYLYYLQNGRDMYVDQELDINRLSDYDVDHIVPQSFLKDDSIDNKVLTRSDKARGKSDNVPSEEVVKKMKNYWRQLLNAKLITQRKFDNLTKAERGGLSELDKAGFIKRQLVETRQITKHVAQILDSRMNTKYDENDKLIREVKVITLKSKLVSDFRKDFQFYKVREINNYHHAHDAYLNAVVGTALIKKYPKLESEFVYGDYKVYDVRKMIAKSEQEIGKATAKYFFYSNIMNFFKTEITLANGEIRKRPLIETNGETGEIVWDKGRDFATVRKVLSMPQVNIVKKTEVQTGGFSKESILPKRNSDKLIARKKDWDPKKYGGFDSPTVAYSVLVVAKVEKGKSKKLKSVKELLGITIMERSSFEKNPIDFLEAKGYKEVKKDLIIKLPKYSLFELENGRKRMLASAGELQKGNELALPSKYVNFLYLASHYEKLKGSPEDNEQKQLFVEQHKHYLDEIIEQISEFSKRVILADANLDKVLSAYNKHRDKPIREQAENIIHLFTLTNLGAPAAFKYFDTTIDRKRYTSTKEVLDATLIHQSITGLYETRIDLSQLGGDGGGGSGGSGGSGGSGGTLNIEDEYRLHETSKEPDVPLGSTWLSDFPQAWAETGGMGLAVRQAPLIIPLKATSTPVSIKQYPMSQEARLGIKPHIQRLLDQGILVPCQSPWNTPLLPVKKPGTNDYRPVQDLREVNKRVEDIHPTVPNPYNLLSGLPPSHQWYTVLDLKDAFFCLRLHPTSQPLFAFEWRDPEMGISGQLTWTRLPQGFKNSPTLFNEALHRDLADFRIQHPDLILLQYVDDLLLAATSEQDCQRGTRALLQTLGNLGYRASAKKAQICQKQVKYLGYLLKEGQRWLTEARKETVMGQPTPKTPRQLREFLGTAGFCRLWIPGFAEMAAPLYPLTKPGTLFNWGPDQQKAYQEIKQALLTAPALGLPDLTKPFELFVDEKQGYAKGVLTQKLGPWRRPVAYLSKKLDPVAAGWPPCLRMVAAIAVLTKDAGKLTMGQPLVILAPHAVEALVKQPPDRWLSNARMTHYQAMLLDTDRVQFGPVVALNPATLLPLPEKEAPHDCLEILAETHGTRPDLTDQPIPDADYTWYTDGSSFLQEGQRRAGAAVTTETEVIWARALPAGTSAQRAELIALTQALKMAEGKKLNVYTDSRYAFATAHVHGEIYRRRGWLTSEGREIKNKNEILALLKALFLPKRLSIIHCPGHQKGNSAEARGNRMADQAAREAAMKAVLETSTLLAGKRTADGSEFEKRTADGSEFESPKKKAKVE

SEQ ID NO: 6055 - protein, 2005 aa, synthetic construct
MPAAKRVKLDGGDKKYSIGLDIGTNSVGWAVITDEYKVPSKKFKVLGNTDRHSIKKNLIGALLFDSGETAEATRLKRTARRRYTRRKNRICYLQEIFSNEMAKVDDSFFHRLEESFLVEEDKKHERHPIFGNIVDEVAYHEKYPTIYHLRKKLVDSTDKADLRLIYLALAHMIKFRGHFLIEGDLNPDNSDVDKLFIQLVQTYNQLFEENPINASGVDAKAILSARLSKSRRLENLIAQLPGEKKNGLFGNLIALSLGLTPNFKSNFDLAEDAKLQLSKDTYDDDLDNLLAQIGDQYADLFLAAKNLSDAILLSDILRVNTEITKAPLSASMIKRYDEHHQDLTLLKALVRQQLPEKYKEIFFDQSKNGYAGYIDGGASQEEFYKFIKPILEKMDGTEELLVKLNREDLLRKQRTFDNGSIPHQIHLGELHAILRRQEDFYPFLKDNREKIEKILTFRIPYYVGPLARGNSRFAWMTRKSEETITPWNFEEVVDKGASAQSFIERMTNFDKNLPNEKVLPKHSLLYEYFTVYNELTKVKYVTEGMRKPAFLSGEQKKAIVDLLFKTNRKVTVKQLKEDYFKKIECFDSVEISGVEDRFNASLGTYHDLLKIIKDKDFLDNEENEDILEDIVLTLTLFEDREMIEERLKTYAHLFDDKVMKQLKRRRYTGWGRLSRKLINGIRDKQSGKTILDFLKSDGFANRNFMQLIHDDSLTFKEDIQKAQVSGQGDSLHEHIANLAGSPAIKKGILQTVKVVDELVKVMGRHKPENIVIEMARENQTTQKGQKNSRERMKRIEEGIKELGSQILKEHPVENTQLQNEKLYLYYLQNGRDMYVDQELDINRLSDYDVDHIVPQSFLKDDSIDNKVLTRSDKARGKSDNVPSEEVVKKMKNYWRQLLNAKLITQRKFDNLTKAERGGLSELDKAGFIKRQLVETRQITKHVAQILDSRMNTKYDENDKLIREVKVITLKSKLVSDFRKDFQFYKVREINNYHHAHDAYLNAVVGTALIKKYPKLESEFVYGDYKVYDVRKMIAKSEQEIGKATAKYFFYSNIMNFFKTEITLANGEIRKRPLIETNGETGEIVWDKGRDFATVRKVLSMPQVNIVKKTEVQTGGFSKESILPKRNSDKLIARKKDWDPKKYGGFDSPTVAYSVLVVAKVEKGKSKKLKSVKELLGITIMERSSFEKNPIDFLEAKGYKEVKKDLIIKLPKYSLFELENGRKRMLASAGELQKGNELALPSKYVNFLYLASHYEKLKGSPEDNEQKQLFVEQHKHYLDEIIEQISEFSKRVILADANLDKVLSAYNKHRDKPIREQAENIIHLFTLTNLGAPAAFKYFDTTIDRKRYTSTKEVLDATLIHQSITGLYETRIDLSQLGGDGGGGSGGSGGSGGSGGSGGGVLDTPPSHIGLEHLPPPPEVPQFPLNLERLQALQDLVHRSLEAGYISPWDGPGNNPVFPVRKPNGAWRFVHDLRATNALTKPIPALSPGPPDLTAPPTHPPHIICLDLKDAFFQIPVEDRFRFYLSFTLPSPGGLQPHRRFAWRVLPQGFINSPALFQRALQEPLRQVSAAFSQSLLVSYMDDILYASPTEEQRSQCYQALAARLRDLGFQVASEKTSQTPSPVPFLGQMVHEQIVTYQSLPTLQISSPISLHQLQAVLGDLQWVSRGTPTTRRPLQLLYSSLKRHHDPRAIIQLSPEQLQGIAELRQALSHNARSRYNEQEPLLAYVHLTRAGSTLVLFQKGAQFPLAYFQTPLTDNQASPWGLLLLLGCQYLQTQALSSYAKPILKYYHNLPKTSLDNWIQSSEDPRVQELLQLWPQISSQGIQPPGPWKTLITRAEVFLTPQFSPDPIPAALCLFSDGATGRGAYCLWKDHLLDFQAVPAPESAQKGELAGLLAGLAAAPPEPVNIWVDSKYLYSLLRTWVLGAWLQPDPVPSYALLYKSLLRHPAIVVGHVRSHSSASHPIASLNNYVDQLAGKRTADGSEFEKRTADGSEFESPKKKAKVE

SEQ ID NO: 6056 - protein, 2177 aa, synthetic construct
MPAAKRVKLDGGDKKYSIGLDIGTNSVGWAVITDEYKVPSKKFKVLGNTDRHSIKKNLIGALLFDSGETAEATRLKRTARRRYTRRKNRICYLQEIFSNEMAKVDDSFFHRLEESFLVEEDKKHERHPIFGNIVDEVAYHEKYPTIYHLRKKLVDSTDKADLRLIYLALAHMIKFRGHFLIEGDLNPDNSDVDKLFIQLVQTYNQLFEENPINASGVDAKAILSARLSKSRRLENLIAQLPGEKKNGLFGNLIALSLGLTPNFKSNFDLAEDAKLQLSKDTYDDDLDNLLAQIGDQYADLFLAAKNLSDAILLSDILRVNTEITKAPLSASMIKRYDEHHQDLTLLKALVRQQLPEKYKEIFFDQSKNGYAGYIDGGASQEEFYKFIKPILEKMDGTEELLVKLNREDLLRKQRTFDNGSIPHQIHLGELHAILRRQEDFYPFLKDNREKIEKILTFRIPYYVGPLARGNSRFAWMTRKSEETITPWNFEEVVDKGASAQSFIERMTNFDKNLPNEKVLPKHSLLYEYFTVYNELTKVKYVTEGMRKPAFLSGEQKKAIVDLLFKTNRKVTVKQLKEDYFKKIECFDSVEISGVEDRFNASLGTYHDLLKIIKDKDFLDNEENEDILEDIVLTLTLFEDREMIEERLKTYAHLFDDKVMKQLKRRRYTGWGRLSRKLINGIRDKQSGKTILDFLKSDGFANRNFMQLIHDDSLTFKEDIQKAQVSGQGDSLHEHIANLAGSPAIKKGILQTVKVVDELVKVMGRHKPENIVIEMARENQTTQKGQKNSRERMKRIEEGIKELGSQILKEHPVENTQLQNEKLYLYYLQNGRDMYVDQELDINRLSDYDVDHIVPQSFLKDDSIDNKVLTRSDKARGKSDNVPSEEVVKKMKNYWRQLLNAKLITQRKFDNLTKAERGGLSELDKAGFIKRQLVETRQITKHVAQILDSRMNTKYDENDKLIREVKVITLKSKLVSDFRKDFQFYKVREINNYHHAHDAYLNAVVGTALIKKYPKLESEFVYGDYKVYDVRKMIAKSEQEIGKATAKYFFYSNIMNFFKTEITLANGEIRKRPLIETNGETGEIVWDKGRDFATVRKVLSMPQVNIVKKTEVQTGGFSKESILPKRNSDKLIARKKDWDPKKYGGFDSPTVAYSVLVVAKVEKGKSKKLKSVKELLGITIMERSSFEKNPIDFLEAKGYKEVKKDLIIKLPKYSLFELENGRKRMLASAGELQKGNELALPSKYVNFLYLASHYEKLKGSPEDNEQKQLFVEQHKHYLDEIIEQISEFSKRVILADANLDKVLSAYNKHRDKPIREQAENIIHLFTLTNLGAPAAFKYFDTTIDRKRYTSTKEVLDATLIHQSITGLYETRIDLSQLGGDGGGGSGGSGGSGGSGGSGGMDLLKPLTVERKGVKIKGYWNSQADITCVPKDLLQGEEPVRQQNVTTIHGTQEGDVYYVNLKIDGRRINTEVIGTTLDYAIITPGDVPWILKKPLELTIKLDLEEQQGTLLNNSILSKKGKEELKQLFEKYSALWQSWENQVGHRRIRPHKIATGTVKPTPQKQYHINPKAKPDIQIVINDLLKQGVLIQKESTMNTPVYPVPKPNGRWRMVLDYRAVNKVTPLIAVQNQHSYGILGSLFKGRYKTTIDLSNGFWAHPIVPEDYWITAFTWQGKQYCWTVLPQGFLNSPGLFTGDVVDLLQGIPNVEVYVDDVYISHDSEKEHLEYLDILFNRLKEAGYIISLKKSNIANSIVDFLGFQITNEGRGLTDTFKEKLENITAPTTLKQLQSILGLLNFARNFIPDFTELIAPLYALIPKSTKNYVPWQIEHSTTLETLITKLNGAEYLQGRKGDKTLIMKVNASYTTGYIRYYNEGEKKPISYVSIVFSKTELKFTELEKLLTTVHKGLLKALDLSMGQNIHVYSPIVSMQNIQKTPQTAKKALASRWLSWLSYLEDPRIRFFYDPQMPALKDLPAVDTGKDNKKHPSNFQHIFYTDGSAITSPTKEGHLNAGMGIVYFINKDGNLQKQQEWSISLGNHTAQFAEIAAFEFALKKCLPLGGNILVVTDSNYVAKAYNEELDVWASNGFVNNRKKPLKHISKWKSVADLKRLRPDVVVTHEPGHQKLDSSPHAYGNNLADQLATQASFKVHAGKRTADGSEFEKRTADGSEFESPKKKAKVE

SEQ ID NO: 6057 - protein, 2177 aa, synthetic construct
MPAAKRVKLDGGDKKYSIGLDIGTNSVGWAVITDEYKVPSKKFKVLGNTDRHSIKKNLIGALLFDSGETAEATRLKRTARRRYTRRKNRICYLQEIFSNEMAKVDDSFFHRLEESFLVEEDKKHERHPIFGNIVDEVAYHEKYPTIYHLRKKLVDSTDKADLRLIYLALAHMIKFRGHFLIEGDLNPDNSDVDKLFIQLVQTYNQLFEENPINASGVDAKAILSARLSKSRRLENLIAQLPGEKKNGLFGNLIALSLGLTPNFKSNFDLAEDAKLQLSKDTYDDDLDNLLAQIGDQYADLFLAAKNLSDAILLSDILRVNTEITKAPLSASMIKRYDEHHQDLTLLKALVRQQLPEKYKEIFFDQSKNGYAGYIDGGASQEEFYKFIKPILEKMDGTEELLVKLNREDLLRKQRTFDNGSIPHQIHLGELHAILRRQEDFYPFLKDNREKIEKILTFRIPYYVGPLARGNSRFAWMTRKSEETITPWNFEEVVDKGASAQSFIERMTNFDKNLPNEKVLPKHSLLYEYFTVYNELTKVKYVTEGMRKPAFLSGEQKKAIVDLLFKTNRKVTVKQLKEDYFKKIECFDSVEISGVEDRFNASLGTYHDLLKIIKDKDFLDNEENEDILEDIVLTLTLFEDREMIEERLKTYAHLFDDKVMKQLKRRRYTGWGRLSRKLINGIRDKQSGKTILDFLKSDGFANRNFMQLIHDDSLTFKEDIQKAQVSGQGDSLHEHIANLAGSPAIKKGILQTVKVVDELVKVMGRHKPENIVIEMARENQTTQKGQKNSRERMKRIEEGIKELGSQILKEHPVENTQLQNEKLYLYYLQNGRDMYVDQELDINRLSDYDVDHIVPQSFLKDDSIDNKVLTRSDKARGKSDNVPSEEVVKKMKNYWRQLLNAKLITQRKFDNLTKAERGGLSELDKAGFIKRQLVETRQITKHVAQILDSRMNTKYDENDKLIREVKVITLKSKLVSDFRKDFQFYKVREINNYHHAHDAYLNAVVGTALIKKYPKLESEFVYGDYKVYDVRKMIAKSEQEIGKATAKYFFYSNIMNFFKTEITLANGEIRKRPLIETNGETGEIVWDKGRDFATVRKVLSMPQVNIVKKTEVQTGGFSKESILPKRNSDKLIARKKDWDPKKYGGFDSPTVAYSVLVVAKVEKGKSKKLKSVKELLGITIMERSSFEKNPIDFLEAKGYKEVKKDLIIKLPKYSLFELENGRKRMLASAGELQKGNELALPSKYVNFLYLASHYEKLKGSPEDNEQKQLFVEQHKHYLDEIIEQISEFSKRVILADANLDKVLSAYNKHRDKPIREQAENIIHLFTLTNLGAPAAFKYFDTTIDRKRYTSTKEVLDATLIHQSITGLYETRIDLSQLGGDGGGGSGGSGGSGGSGGSGGMDLLKPLTVERKGVKIKGYWNSQADITCVPKDLLQGEEPVRQQNVTTIHGTQEGDVYYVNLKIDGRRINTEVIGTTLDYAIITPGDVPWILKKPLELTIKLDLEEQQGTLLNNSILSKKGKEELKQLFEKYSALWQSWENQVGHRRIRPHKIATGTVKPTPQKQYHINPKAKPDIQIVINDLLKQGVLIQKESTMNTPVYPVPKPNGRWRMVLDYRAVNKVTPLIAVQNQHSYGILGSLFKGRYKTTIDLSNGFWAHPIVPEDYWITAFTWQGKQYCWTVLPQGFLNSPGLFNGDVVDLLQGIPNVEVYVDDVYISHDSEKEHLEYLDILFNRLKEAGYIISLKKSNIANSIVDFLGFQITNEGRGLTDTFKEKLENITAPTTLKQLQSILGLLNFARNFIPDFTELIAPLYALIPKSPKNYVPWQIEHSTTLETLITKLNGAEYLQGRKGDKTLIMKVNASYTTGYIRYYNEGEKKPISYVSIVFSKTELKFTELEKLLTTVHKGLLKALDLSMGQNIHVYSPIVSMQNIQKTPQTAKKALASRWLSWLSYLEDPRIRFFYDPQMPALKDLPAVDTGKDNKKHPSNFQHIFYTDGSAITSPTKEGHLNAGMGIVYFINKDGNLQKQQEWSISLGNHTAQFAEIAAFEFALKKCLPLGGNILVVTDSNYVAKAYNEELDVWASNGFVNNRKKPLKHISKWKSVADLKRLRPDVVVTHEPGHQKLDSSPHAYGNNLADQLATQASFKVHAGKRTADGSEFEKRTADGSEFESPKKKAKVE

SEQ ID NO: 6058 - protein, 2099 aa, synthetic construct
MPAAKRVKLDGGDKKYSIGLDIGTNSVGWAVITDEYKVPSKKFKVLGNTDRHSIKKNLIGALLFDSGETAEATRLKRTARRRYTRRKNRICYLQEIFSNEMAKVDDSFFHRLEESFLVEEDKKHERHPIFGNIVDEVAYHEKYPTIYHLRKKLVDSTDKADLRLIYLALAHMIKFRGHFLIEGDLNPDNSDVDKLFIQLVQTYNQLFEENPINASGVDAKAILSARLSKSRRLENLIAQLPGEKKNGLFGNLIALSLGLTPNFKSNFDLAEDAKLQLSKDTYDDDLDNLLAQIGDQYADLFLAAKNLSDAILLSDILRVNTEITKAPLSASMIKRYDEHHQDLTLLKALVRQQLPEKYKEIFFDQSKNGYAGYIDGGASQEEFYKFIKPILEKMDGTEELLVKLNREDLLRKQRTFDNGSIPHQIHLGELHAILRRQEDFYPFLKDNREKIEKILTFRIPYYVGPLARGNSRFAWMTRKSEETITPWNFEEVVDKGASAQSFIERMTNFDKNLPNEKVLPKHSLLYEYFTVYNELTKVKYVTEGMRKPAFLSGEQKKAIVDLLFKTNRKVTVKQLKEDYFKKIECFDSVEISGVEDRFNASLGTYHDLLKIIKDKDFLDNEENEDILEDIVLTLTLFEDREMIEERLKTYAHLFDDKVMKQLKRRRYTGWGRLSRKLINGIRDKQSGKTILDFLKSDGFANRNFMQLIHDDSLTFKEDIQKAQVSGQGDSLHEHIANLAGSPAIKKGILQTVKVVDELVKVMGRHKPENIVIEMARENQTTQKGQKNSRERMKRIEEGIKELGSQILKEHPVENTQLQNEKLYLYYLQNGRDMYVDQELDINRLSDYDVDHIVPQSFLKDDSIDNKVLTRSDKARGKSDNVPSEEVVKKMKNYWRQLLNAKLITQRKFDNLTKAERGGLSELDKAGFIKRQLVETRQITKHVAQILDSRMNTKYDENDKLIREVKVITLKSKLVSDFRKDFQFYKVREINNYHHAHDAYLNAVVGTALIKKYPKLESEFVYGDYKVYDVRKMIAKSEQEIGKATAKYFFYSNIMNFFKTEITLANGEIRKRPLIETNGETGEIVWDKGRDFATVRKVLSMPQVNIVKKTEVQTGGFSKESILPKRNSDKLIARKKDWDPKKYGGFDSPTVAYSVLVVAKVEKGKSKKLKSVKELLGITIMERSSFEKNPIDFLEAKGYKEVKKDLIIKLPKYSLFELENGRKRMLASAGELQKGNELALPSKYVNFLYLASHYEKLKGSPEDNEQKQLFVEQHKHYLDEIIEQISEFSKRVILADANLDKVLSAYNKHRDKPIREQAENIIHLFTLTNLGAPAAFKYFDTTIDRKRYTSTKEVLDATLIHQSITGLYETRIDLSQLGGDGGGGSGGSGGSGGSGGSGGTLQLEEEYRLFEPESTQKQEMDIWLKNFPQAWAETGGMGTAHCQAPVLIQLKATATPISIRQYPMPHEAYQGIKPHIRRMLDQGILKPCQSPWNTPLLPVKKPGTEDYRPVQDLREVNKRVEDIHPTVPNPYNLLSTLPPSHPWYTVLDLKDAFFCLRLHSESQLLFAFEWRDPEIGLSGQLTWTRLPQGFKNSPTLFNEALHSDLADFRVRYPALVLLQYVDDLLLAAATRTECLEGTKALLETLGNKGYRASAKKAQICLQEVTYLGYSLKDGQRWLTKARKEAILSIPVPKNSRQVREFLGTAGYCRLWIPGFAELAAPLYPLTRPGTLFQWGTEQQLAFEDIKKALLSSPALGLPDITKPFELFIDENSGFAKGVLVQKLGPWKRPVAYLSKKLDTVASGWPPCLRMVAAIAILVKDAGKLTLGQPLTILTSHPVEALVRQPPNKWLSNARMTHYQAMLLDAERVHFGPTVSLNPATLLPLPSGGNHHDCLQILAETHGTRPDLTDQPLPDADLTWYTDGSSFIRNGEREAGAAVTTESEVIWAAPLPPGTSAQRAELIALTQALKMAEGKKLTVYTDSRYAFATTHVHGEIYRRRGWLTSEGKEIKNKNEILALLEALFLPKRLSIIHCPGHQKGDSPQAKGNRLADDTAKKAATETHSSLTVLPAGKRTADGSEFEKRTADGSEFESPKKKAKVE

SEQ ID NO: 6059 - protein, 2099 aa, synthetic construct
MPAAKRVKLDGGDKKYSIGLDIGTNSVGWAVITDEYKVPSKKFKVLGNTDRHSIKKNLIGALLFDSGETAEATRLKRTARRRYTRRKNRICYLQEIFSNEMAKVDDSFFHRLEESFLVEEDKKHERHPIFGNIVDEVAYHEKYPTIYHLRKKLVDSTDKADLRLIYLALAHMIKFRGHFLIEGDLNPDNSDVDKLFIQLVQTYNQLFEENPINASGVDAKAILSARLSKSRRLENLIAQLPGEKKNGLFGNLIALSLGLTPNFKSNFDLAEDAKLQLSKDTYDDDLDNLLAQIGDQYADLFLAAKNLSDAILLSDILRVNTEITKAPLSASMIKRYDEHHQDLTLLKALVRQQLPEKYKEIFFDQSKNGYAGYIDGGASQEEFYKFIKPILEKMDGTEELLVKLNREDLLRKQRTFDNGSIPHQIHLGELHAILRRQEDFYPFLKDNREKIEKILTFRIPYYVGPLARGNSRFAWMTRKSEETITPWNFEEVVDKGASAQSFIERMTNFDKNLPNEKVLPKHSLLYEYFTVYNELTKVKYVTEGMRKPAFLSGEQKKAIVDLLFKTNRKVTVKQLKEDYFKKIECFDSVEISGVEDRFNASLGTYHDLLKIIKDKDFLDNEENEDILEDIVLTLTLFEDREMIEERLKTYAHLFDDKVMKQLKRRRYTGWGRLSRKLINGIRDKQSGKTILDFLKSDGFANRNFMQLIHDDSLTFKEDIQKAQVSGQGDSLHEHIANLAGSPAIKKGILQTVKVVDELVKVMGRHKPENIVIEMARENQTTQKGQKNSRERMKRIEEGIKELGSQILKEHPVENTQLQNEKLYLYYLQNGRDMYVDQELDINRLSDYDVDHIVPQSFLKDDSIDNKVLTRSDKARGKSDNVPSEEVVKKMKNYWRQLLNAKLITQRKFDNLTKAERGGLSELDKAGFIKRQLVETRQITKHVAQILDSRMNTKYDENDKLIREVKVITLKSKLVSDFRKDFQFYKVREINNYHHAHDAYLNAVVGTALIKKYPKLESEFVYGDYKVYDVRKMIAKSEQEIGKATAKYFFYSNIMNFFKTEITLANGEIRKRPLIETNGETGEIVWDKGRDFATVRKVLSMPQVNIVKKTEVQTGGFSKESILPKRNSDKLIARKKDWDPKKYGGFDSPTVAYSVLVVAKVEKGKSKKLKSVKELLGITIMERSSFEKNPIDFLEAKGYKEVKKDLIIKLPKYSLFELENGRKRMLASAGELQKGNELALPSKYVNFLYLASHYEKLKGSPEDNEQKQLFVEQHKHYLDEIIEQISEFSKRVILADANLDKVLSAYNKHRDKPIREQAENIIHLFTLTNLGAPAAFKYFDTTIDRKRYTSTKEVLDATLIHQSITGLYETRIDLSQLGGDGGGGSGGSGGSGGSGGSGGTLQLEEEYRLFEPESTQKQEMDIWLKNFPQAWAETGGMGTAHCQAPVLIQLKATATPISIRQYPMPHEAYQGIKPHIRRMLDQGILKPCQSPWNTPLLPVKKPGTEDYRPVQDLREVNKRVEDIHPTVPNPYNLLSTLPPSHPWYTVLDLKDAFFCLRLHSESQLLFAFEWRDPEIGLSGQLTWTRLPQGFKNSPTLFNEALHSDLADFRVRYPALVLLQYVDDLLLAAATRTECLEGTKALLETLGNKGYRASAKKAQICLQEVTYLGYSLKDGQRWLTKARKEAILSIPVPKNSRQVREFLGKAGYCRLFIPGFAELAAPLYPLTRPGTLFQWGTEQQLAFEDIKKALLSSPALGLPDITKPFELFIDENSGFAKGVLVQKLGPWKRPVAYLSKKLDTVASGWPPCLRMVAAIAILVKDAGKLTLGQPLTILTSHPVEALVRQPPNKWLSNARMTHYQAMLLDAERVHFGPTVSLNPATLLPLPSGGNHHDCLQILAETHGTRPDLTDQPLPDADLTWYTDGSSFIRNGEREAGAAVTTESEVIWAAPLPPGTSAQRAELIALTQALKMAEGKKLTVYTDSRYAFATTHVHGEIYRRRGWLTSEGKEIKNKNEILALLEALFLPKRLSIIHCPGHQKGDSPQAKGNRLADDTAKKAATETHSSLTVLPAGKRTADGSEFEKRTADGSEFESPKKKAKVE

SEQ ID NO: 6060 - protein, 2180 aa, synthetic construct
MPAAKRVKLDGGDKKYSIGLDIGTNSVGWAVITDEYKVPSKKFKVLGNTDRHSIKKNLIGALLFDSGETAEATRLKRTARRRYTRRKNRICYLQEIFSNEMAKVDDSFFHRLEESFLVEEDKKHERHPIFGNIVDEVAYHEKYPTIYHLRKKLVDSTDKADLRLIYLALAHMIKFRGHFLIEGDLNPDNSDVDKLFIQLVQTYNQLFEENPINASGVDAKAILSARLSKSRRLENLIAQLPGEKKNGLFGNLIALSLGLTPNFKSNFDLAEDAKLQLSKDTYDDDLDNLLAQIGDQYADLFLAAKNLSDAILLSDILRVNTEITKAPLSASMIKRYDEHHQDLTLLKALVRQQLPEKYKEIFFDQSKNGYAGYIDGGASQEEFYKFIKPILEKMDGTEELLVKLNREDLLRKQRTFDNGSIPHQIHLGELHAILRRQEDFYPFLKDNREKIEKILTFRIPYYVGPLARGNSRFAWMTRKSEETITPWNFEEVVDKGASAQSFIERMTNFDKNLPNEKVLPKHSLLYEYFTVYNELTKVKYVTEGMRKPAFLSGEQKKAIVDLLFKTNRKVTVKQLKEDYFKKIECFDSVEISGVEDRFNASLGTYHDLLKIIKDKDFLDNEENEDILEDIVLTLTLFEDREMIEERLKTYAHLFDDKVMKQLKRRRYTGWGRLSRKLINGIRDKQSGKTILDFLKSDGFANRNFMQLIHDDSLTFKEDIQKAQVSGQGDSLHEHIANLAGSPAIKKGILQTVKVVDELVKVMGRHKPENIVIEMARENQTTQKGQKNSRERMKRIEEGIKELGSQILKEHPVENTQLQNEKLYLYYLQNGRDMYVDQELDINRLSDYDVDHIVPQSFLKDDSIDNKVLTRSDKARGKSDNVPSEEVVKKMKNYWRQLLNAKLITQRKFDNLTKAERGGLSELDKAGFIKRQLVETRQITKHVAQILDSRMNTKYDENDKLIREVKVITLKSKLVSDFRKDFQFYKVREINNYHHAHDAYLNAVVGTALIKKYPKLESEFVYGDYKVYDVRKMIAKSEQEIGKATAKYFFYSNIMNFFKTEITLANGEIRKRPLIETNGETGEIVWDKGRDFATVRKVLSMPQVNIVKKTEVQTGGFSKESILPKRNSDKLIARKKDWDPKKYGGFDSPTVAYSVLVVAKVEKGKSKKLKSVKELLGITIMERSSFEKNPIDFLEAKGYKEVKKDLIIKLPKYSLFELENGRKRMLASAGELQKGNELALPSKYVNFLYLASHYEKLKGSPEDNEQKQLFVEQHKHYLDEIIEQISEFSKRVILADANLDKVLSAYNKHRDKPIREQAENIIHLFTLTNLGAPAAFKYFDTTIDRKRYTSTKEVLDATLIHQSITGLYETRIDLSQLGGDGGGGSGGSGGSGGSGGSGGMNPLQLLQPLPAEIKGTKLLAHWNSGATITCIPESFLEDEQPIKKTLIKTIHGEKQQNVYYVTFKVKGRKVEAEVIASPYEYILLSPTDVPWLTQQPLQLTILVPLQEYQEKILSKTALPEDQKQQLKTLFVKYDNLWQHWENQVGHRKIRPHNIATGDYPPRPQKQYPINPKAKPSIQIVIDDLLKQGVLTPQNSTMNTPVYPVPKPDGRWRMVLDYREVNKTIPLTAAQNQHSAGILATIVRQKYKTTLDLANGFWAHPITPESYWLTAFTWQGKQYCWTRLPQGFLNSPALFNADVVDLLKEIPNVQVYVDDIYLSHDDPKEHVQQLEKVFQILLQAGYVVSLKKSEIGQKTVEFLGFNITKEGRGLTDTFKTKLLNITPPKDLKQLQSILGKLNFARNFIPNFAELVQPLYNLIAPAKGKYIEWSEENTKQLNMVIEALNTASNLEERLPEQRLVIKVNTSPSAGYVRYYNETGKKPIMYLNYVFSKAELKFSMLEKLLTTMHKALIKAMDLAMGQEILVYSPIVSMTKIQKTPLPERKALPIRWITWMTYLEDPRIQFHYDKTLPELKHIPDVYTSSQSPVKHPSQYEGVFYTDGSAIKSPDPTKSNNAGMGIVHATYKPEYQVLNQWSIPLGNHTAQMAEIAAVEFACKKALKIPGPVLVITDSFYVAESANKELPYWKSNGFVNNKKKPLKHISKWKSIAECLSMKPDITIQHEKGISLQIPVFILKGNALADKLATQGSYVVNAGKRTADGSEFEKRTADGSEFESPKKKAKVE

SEQ ID NO: 6061 - protein, 2098 aa, synthetic construct
MPAAKRVKLDGGDKKYSIGLDIGTNSVGWAVITDEYKVPSKKFKVLGNTDRHSIKKNLIGALLFDSGETAEATRLKRTARRRYTRRKNRICYLQEIFSNEMAKVDDSFFHRLEESFLVEEDKKHERHPIFGNIVDEVAYHEKYPTIYHLRKKLVDSTDKADLRLIYLALAHMIKFRGHFLIEGDLNPDNSDVDKLFIQLVQTYNQLFEENPINASGVDAKAILSARLSKSRRLENLIAQLPGEKKNGLFGNLIALSLGLTPNFKSNFDLAEDAKLQLSKDTYDDDLDNLLAQIGDQYADLFLAAKNLSDAILLSDILRVNTEITKAPLSASMIKRYDEHHQDLTLLKALVRQQLPEKYKEIFFDQSKNGYAGYIDGGASQEEFYKFIKPILEKMDGTEELLVKLNREDLLRKQRTFDNGSIPHQIHLGELHAILRRQEDFYPFLKDNREKIEKILTFRIPYYVGPLARGNSRFAWMTRKSEETITPWNFEEVVDKGASAQSFIERMTNFDKNLPNEKVLPKHSLLYEYFTVYNELTKVKYVTEGMRKPAFLSGEQKKAIVDLLFKTNRKVTVKQLKEDYFKKIECFDSVEISGVEDRFNASLGTYHDLLKIIKDKDFLDNEENEDILEDIVLTLTLFEDREMIEERLKTYAHLFDDKVMKQLKRRRYTGWGRLSRKLINGIRDKQSGKTILDFLKSDGFANRNFMQLIHDDSLTFKEDIQKAQVSGQGDSLHEHIANLAGSPAIKKGILQTVKVVDELVKVMGRHKPENIVIEMARENQTTQKGQKNSRERMKRIEEGIKELGSQILKEHPVENTQLQNEKLYLYYLQNGRDMYVDQELDINRLSDYDVDHIVPQSFLKDDSIDNKVLTRSDKARGKSDNVPSEEVVKKMKNYWRQLLNAKLITQRKFDNLTKAERGGLSELDKAGFIKRQLVETRQITKHVAQILDSRMNTKYDENDKLIREVKVITLKSKLVSDFRKDFQFYKVREINNYHHAHDAYLNAVVGTALIKKYPKLESEFVYGDYKVYDVRKMIAKSEQEIGKATAKYFFYSNIMNFFKTEITLANGEIRKRPLIETNGETGEIVWDKGRDFATVRKVLSMPQVNIVKKTEVQTGGFSKESILPKRNSDKLIARKKDWDPKKYGGFDSPTVAYSVLVVAKVEKGKSKKLKSVKELLGITIMERSSFEKNPIDFLEAKGYKEVKKDLIIKLPKYSLFELENGRKRMLASAGELQKGNELALPSKYVNFLYLASHYEKLKGSPEDNEQKQLFVEQHKHYLDEIIEQISEFSKRVILADANLDKVLSAYNKHRDKPIREQAENIIHLFTLTNLGAPAAFKYFDTTIDRKRYTSTKEVLDATLIHQSITGLYETRIDLSQLGGDGGGGSGGSGGSGGSGGSGGVLNLEEEYRLHEKPVPSSIDPSWLQLFPTVWAERAGMGLANQVPPVVVELRSGASPVAVRQYPMSKEAREGIRPHIQKFLDLGVLVPCRSPWNTPLLPVKKPGTNDYRPVQDLREINKRVQDIHPTVPNPYNLLSSLPPSYTWYSVLDLKDAFFCLRLHPNSQPLFAFEWKDPEKGNTGQLTWTRLPQGFKNSPTLFNEALHRDLAPFRALNPQVVLLQYVDDLLVAAPTYEDCKKGTQKLLQELSKLGYRVSAKKAQLCQREVTYLGYLLKEGKRWLTPARKATVMKIPVPTTPRQVREFLGKAGFCRLFIPGFASLAAPLYPLTKPSIPFIWTEEHQQAFDHIKKALLSAPALALPDLTKPFTLYIDERAGVARGVLTQTLGPWRRPVAYLSKKLDPVASGWPTCLKAVAAVALLLKDADKLTLGQNVTVIASHSLESIVRQPPDRWMTNARMTHYQSLLLNERVSFAPPAVLNPATLLPVESEATPVHRCSEILAEETGTRRDLEDQPLPGVPTWYTDGSSFITEGKRRAGAPIVDGKRTVWASSLPEGTSAQKAELVALTQALRLAEGKNINIYTDSRYAFATAHIHGAIYKQRGWLTSAGKDIKNKEEILALLEAIHLPRRVAIIHCPGHQRGSNPVATGNRRADEAAKQAALSTRVLAGTTKPAGKRTADGSEFEKRTADGSEFESPKKKAKVE

SEQ ID NO: 6062 - protein, 2010 aa, synthetic construct
MPAAKRVKLDGGDKKYSIGLDIGTNSVGWAVITDEYKVPSKKFKVLGNTDRHSIKKNLIGALLFDSGETAEATRLKRTARRRYTRRKNRICYLQEIFSNEMAKVDDSFFHRLEESFLVEEDKKHERHPIFGNIVDEVAYHEKYPTIYHLRKKLVDSTDKADLRLIYLALAHMIKFRGHFLIEGDLNPDNSDVDKLFIQLVQTYNQLFEENPINASGVDAKAILSARLSKSRRLENLIAQLPGEKKNGLFGNLIALSLGLTPNFKSNFDLAEDAKLQLSKDTYDDDLDNLLAQIGDQYADLFLAAKNLSDAILLSDILRVNTEITKAPLSASMIKRYDEHHQDLTLLKALVRQQLPEKYKEIFFDQSKNGYAGYIDGGASQEEFYKFIKPILEKMDGTEELLVKLNREDLLRKQRTFDNGSIPHQIHLGELHAILRRQEDFYPFLKDNREKIEKILTFRIPYYVGPLARGNSRFAWMTRKSEETITPWNFEEVVDKGASAQSFIERMTNFDKNLPNEKVLPKHSLLYEYFTVYNELTKVKYVTEGMRKPAFLSGEQKKAIVDLLFKTNRKVTVKQLKEDYFKKIECFDSVEISGVEDRFNASLGTYHDLLKIIKDKDFLDNEENEDILEDIVLTLTLFEDREMIEERLKTYAHLFDDKVMKQLKRRRYTGWGRLSRKLINGIRDKQSGKTILDFLKSDGFANRNFMQLIHDDSLTFKEDIQKAQVSGQGDSLHEHIANLAGSPAIKKGILQTVKVVDELVKVMGRHKPENIVIEMARENQTTQKGQKNSRERMKRIEEGIKELGSQILKEHPVENTQLQNEKLYLYYLQNGRDMYVDQELDINRLSDYDVDHIVPQSFLKDDSIDNKVLTRSDKARGKSDNVPSEEVVKKMKNYWRQLLNAKLITQRKFDNLTKAERGGLSELDKAGFIKRQLVETRQITKHVAQILDSRMNTKYDENDKLIREVKVITLKSKLVSDFRKDFQFYKVREINNYHHAHDAYLNAVVGTALIKKYPKLESEFVYGDYKVYDVRKMIAKSEQEIGKATAKYFFYSNIMNFFKTEITLANGEIRKRPLIETNGETGEIVWDKGRDFATVRKVLSMPQVNIVKKTEVQTGGFSKESILPKRNSDKLIARKKDWDPKKYGGFDSPTVAYSVLVVAKVEKGKSKKLKSVKELLGITIMERSSFEKNPIDFLEAKGYKEVKKDLIIKLPKYSLFELENGRKRMLASAGELQKGNELALPSKYVNFLYLASHYEKLKGSPEDNEQKQLFVEQHKHYLDEIIEQISEFSKRVILADANLDKVLSAYNKHRDKPIREQAENIIHLFTLTNLGAPAAFKYFDTTIDRKRYTSTKEVLDATLIHQSITGLYETRIDLSQLGGDGGGGSGGSGGSGGSGGSGGPLGTSDSPVTHADPIDWKSEEPVWVDQWPLTQEKLSAAQQLVQEQLRLGHIEPSTSAWNSPIFVIKKKSGKWRLLQDLRKVNETMMHMGALQPGLPTPSAIPDKSYIIVIDLKDCFYTIPLAPQDCKRFAFSLPSVNFKEPMQRYQWRVLPQGMTNSPTLCQKFVATAIAPVRQRFPQLYLVHYMDDILLAHTDEHLLYQAFSILKQHLSLNGLVIADEKIQTHFPYNYLGFSLYPRVYNTQLVKLQTDHLKTLNDFQKLLGDINWIRPYLKLPTYTLQPLFDILKGDSDPASPRTLSLEGRTALQSIEEAIRQQQITYCDYQRSWGLYILPTPRAPTGVLYQDKPLRWIYLSATPTKHLLPYYELVAKIIAKGRHEAIQYFGMEPPFICVPYALEQQDWLFQFSDNWSIAFANYPGQITHHYPSDKLLQFASSHAFIFPKIVRRQPIPEATLIFTDGSSNGTAALIINHQTYYAQTSFSSAQVVELFAVHQALLTVPTSFNLFTDSSYVVGALQMIETVPIIGTTSPEVLNLFTLIQQVLHCRQHPCFFGHIRAHSTLPGALVQGNHTADVLTKQVFFQSAGKRTADGSEFEKRTADGSEFESPKKKAKVE

SEQ ID NO: 6063 - protein, 2131 aa, synthetic construct
MPAAKRVKLDGGDKKYSIGLDIGTNSVGWAVITDEYKVPSKKFKVLGNTDRHSIKKNLIGALLFDSGETAEATRLKRTARRRYTRRKNRICYLQEIFSNEMAKVDDSFFHRLEESFLVEEDKKHERHPIFGNIVDEVAYHEKYPTIYHLRKKLVDSTDKADLRLIYLALAHMIKFRGHFLIEGDLNPDNSDVDKLFIQLVQTYNQLFEENPINASGVDAKAILSARLSKSRRLENLIAQLPGEKKNGLFGNLIALSLGLTPNFKSNFDLAEDAKLQLSKDTYDDDLDNLLAQIGDQYADLFLAAKNLSDAILLSDILRVNTEITKAPLSASMIKRYDEHHQDLTLLKALVRQQLPEKYKEIFFDQSKNGYAGYIDGGASQEEFYKFIKPILEKMDGTEELLVKLNREDLLRKQRTFDNGSIPHQIHLGELHAILRRQEDFYPFLKDNREKIEKILTFRIPYYVGPLARGNSRFAWMTRKSEETITPWNFEEVVDKGASAQSFIERMTNFDKNLPNEKVLPKHSLLYEYFTVYNELTKVKYVTEGMRKPAFLSGEQKKAIVDLLFKTNRKVTVKQLKEDYFKKIECFDSVEISGVEDRFNASLGTYHDLLKIIKDKDFLDNEENEDILEDIVLTLTLFEDREMIEERLKTYAHLFDDKVMKQLKRRRYTGWGRLSRKLINGIRDKQSGKTILDFLKSDGFANRNFMQLIHDDSLTFKEDIQKAQVSGQGDSLHEHIANLAGSPAIKKGILQTVKVVDELVKVMGRHKPENIVIEMARENQTTQKGQKNSRERMKRIEEGIKELGSQILKEHPVENTQLQNEKLYLYYLQNGRDMYVDQELDINRLSDYDVDHIVPQSFLKDDSIDNKVLTRSDKARGKSDNVPSEEVVKKMKNYWRQLLNAKLITQRKFDNLTKAERGGLSELDKAGFIKRQLVETRQITKHVAQILDSRMNTKYDENDKLIREVKVITLKSKLVSDFRKDFQFYKVREINNYHHAHDAYLNAVVGTALIKKYPKLESEFVYGDYKVYDVRKMIAKSEQEIGKATAKYFFYSNIMNFFKTEITLANGEIRKRPLIETNGETGEIVWDKGRDFATVRKVLSMPQVNIVKKTEVQTGGFSKESILPKRNSDKLIARKKDWDPKKYGGFDSPTVAYSVLVVAKVEKGKSKKLKSVKELLGITIMERSSFEKNPIDFLEAKGYKEVKKDLIIKLPKYSLFELENGRKRMLASAGELQKGNELALPSKYVNFLYLASHYEKLKGSPEDNEQKQLFVEQHKHYLDEIIEQISEFSKRVILADANLDKVLSAYNKHRDKPIREQAENIIHLFTLTNLGAPAAFKYFDTTIDRKRYTSTKEVLDATLIHQSITGLYETRIDLSQLGGDGGGGSGGSGGSGGSGGSGGLLGRDLLTKLKAQIQFSTEGPQVTWEDRPAMCLVLNLEEEYRLHEKPVPPSIDPSWLQLFPMVWAEKAGMGLANQVPPVVVELKSDASPVAVRQYPMSKEAREGIRPHIQRFLDLGILVPCQSPWNTPLLPVKKPGTNDYRPVQDLREVNKRVQDIHPTVPNPYNLLSSLPPSHTWYSVLDLKDAFFCLKLHPNSQPLFAFEWRDPEKGNTGQLTWTRLPQGFKNSPTLFNEALHRDLASFRALNPQVVMLQYVDDLLVAAPTYRDCKEGTRRLLQELSKLGYRVSAKKAQLCREEVTYLGYLLKGGKRWLTPARKATVMKIPTPTTPRQVREFLGTAGFCRLWIPGFASLAAPLYPLTRPKVPFTWTEAHQEAFGRIKEALLSAPALALPDLTKPFALYVDEKEGVARGVLTQTLGPWRRPVAYLSKKLDPVASGWPTCLKAIAAVALLLKDADKLTLGQNVLVIAPHNLESIVRQPPDRWMTNARMTHYQSLLLNERVSFAPPAILNPATLLPVESDDTPIHICSEILAEETGTRPDLRDQPLPGVPAWYTDGSSFIMDGRRQAGAAIVDNKRTVWASNLPEGTSAQKAELIALTQALRLAEGKSINIYTDSRYAFATAHVHGAIYKQRGWLTSAGKDIKNKEEILALLEAIHLPKRVAIIHCPGHQRGTDPVATGNRKADEAAKQAAQSTRILTETTKNAGKRTADGSEFEKRTADGSEFESPKKKAKVE

SEQ ID NO: 6064 - protein, 2222 aa, synthetic construct
MPAAKRVKLDGGDKKYSIGLDIGTNSVGWAVITDEYKVPSKKFKVLGNTDRHSIKKNLIGALLFDSGETAEATRLKRTARRRYTRRKNRICYLQEIFSNEMAKVDDSFFHRLEESFLVEEDKKHERHPIFGNIVDEVAYHEKYPTIYHLRKKLVDSTDKADLRLIYLALAHMIKFRGHFLIEGDLNPDNSDVDKLFIQLVQTYNQLFEENPINASGVDAKAILSARLSKSRRLENLIAQLPGEKKNGLFGNLIALSLGLTPNFKSNFDLAEDAKLQLSKDTYDDDLDNLLAQIGDQYADLFLAAKNLSDAILLSDILRVNTEITKAPLSASMIKRYDEHHQDLTLLKALVRQQLPEKYKEIFFDQSKNGYAGYIDGGASQEEFYKFIKPILEKMDGTEELLVKLNREDLLRKQRTFDNGSIPHQIHLGELHAILRRQEDFYPFLKDNREKIEKILTFRIPYYVGPLARGNSRFAWMTRKSEETITPWNFEEVVDKGASAQSFIERMTNFDKNLPNEKVLPKHSLLYEYFTVYNELTKVKYVTEGMRKPAFLSGEQKKAIVDLLFKTNRKVTVKQLKEDYFKKIECFDSVEISGVEDRFNASLGTYHDLLKIIKDKDFLDNEENEDILEDIVLTLTLFEDREMIEERLKTYAHLFDDKVMKQLKRRRYTGWGRLSRKLINGIRDKQSGKTILDFLKSDGFANRNFMQLIHDDSLTFKEDIQKAQVSGQGDSLHEHIANLAGSPAIKKGILQTVKVVDELVKVMGRHKPENIVIEMARENQTTQKGQKNSRERMKRIEEGIKELGSQILKEHPVENTQLQNEKLYLYYLQNGRDMYVDQELDINRLSDYDVDHIVPQSFLKDDSIDNKVLTRSDKARGKSDNVPSEEVVKKMKNYWRQLLNAKLITQRKFDNLTKAERGGLSELDKAGFIKRQLVETRQITKHVAQILDSRMNTKYDENDKLIREVKVITLKSKLVSDFRKDFQFYKVREINNYHHAHDAYLNAVVGTALIKKYPKLESEFVYGDYKVYDVRKMIAKSEQEIGKATAKYFFYSNIMNFFKTEITLANGEIRKRPLIETNGETGEIVWDKGRDFATVRKVLSMPQVNIVKKTEVQTGGFSKESILPKRNSDKLIARKKDWDPKKYGGFDSPTVAYSVLVVAKVEKGKSKKLKSVKELLGITIMERSSFEKNPIDFLEAKGYKEVKKDLIIKLPKYSLFELENGRKRMLASAGELQKGNELALPSKYVNFLYLASHYEKLKGSPEDNEQKQLFVEQHKHYLDEIIEQISEFSKRVILADANLDKVLSAYNKHRDKPIREQAENIIHLFTLTNLGAPAAFKYFDTTIDRKRYTSTKEVLDATLIHQSITGLYETRIDLSQLGGDGGGGSGGSGGSGGSGGSGGTLGDQGSRGSDPLPEPRVTLTVEGIPTEFLVNTGAEHSVLTKPMGKMGSKRTVVAGATGSKVYPWTTKRLLKIGQKQVTHSFLVIPECPAPLLGRDLLTKLKAQIQFSTEGPQVTWEDRPAMCLVLNLEEEYRLHEKPVPPSIDPSWLQLFPMVWAEKAGMGLANQVPPVVVELKSDASPVAVRQYPMSKEAREGIRPHIQRFLDLGILVPCQSPWNTPLLPVKKPGTNDYRPVQDLREVNKRVQDIHPTVPNPYNLLSSLPPSHTWYSVLDLKDAFFCLKLHPNSQPLFAFEWRDPEKGNTGQLTWTRLPQGFKNSPTLFNEALHRDLASFRALNPQVVMLQYVDDLLVAAPTYRDCKEGTRRLLQELSKLGYRVSAKKAQLCREEVTYLGYLLKGGKRWLTPARKATVMKIPTPTTPRQVREFLGTAGFCRLWIPGFASLAAPLYPLTRPKVPFTWTEAHQEAFGRIKEALLSAPALALPDLTKPFALYVDEKEGVARGVLTQTLGPWRRPVAYLSKKLDPVASGWPTCLKAIAAVALLLKDADKLTLGQNVLVIAPHNLESIVRQPPDRWMTNARMTHYQSLLLNERVSFAPPAILNPATLLPVESDDTPIHICSEILAEETGTRPDLRDQPLPGVPAWYTDGSSFIMDGRRQAGAAIVDNKRTVWASNLPEGTSAQKAELIALTQALRLAEGKSINIYTDSRYAFATAHVHGAIYKQRGWLTSAGKDIKNKEEILALLEAIHLPKRVAIIHCPGHQRGTDPVATGNRKADEAAKQAAQSTRILTETTKNAGKRTADGSEFEKRTADGSEFESPKKKAKVE

SEQ ID NO: 6065 - protein, 2222 aa, synthetic construct
MPAAKRVKLDGGDKKYSIGLDIGTNSVGWAVITDEYKVPSKKFKVLGNTDRHSIKKNLIGALLFDSGETAEATRLKRTARRRYTRRKNRICYLQEIFSNEMAKVDDSFFHRLEESFLVEEDKKHERHPIFGNIVDEVAYHEKYPTIYHLRKKLVDSTDKADLRLIYLALAHMIKFRGHFLIEGDLNPDNSDVDKLFIQLVQTYNQLFEENPINASGVDAKAILSARLSKSRRLENLIAQLPGEKKNGLFGNLIALSLGLTPNFKSNFDLAEDAKLQLSKDTYDDDLDNLLAQIGDQYADLFLAAKNLSDAILLSDILRVNTEITKAPLSASMIKRYDEHHQDLTLLKALVRQQLPEKYKEIFFDQSKNGYAGYIDGGASQEEFYKFIKPILEKMDGTEELLVKLNREDLLRKQRTFDNGSIPHQIHLGELHAILRRQEDFYPFLKDNREKIEKILTFRIPYYVGPLARGNSRFAWMTRKSEETITPWNFEEVVDKGASAQSFIERMTNFDKNLPNEKVLPKHSLLYEYFTVYNELTKVKYVTEGMRKPAFLSGEQKKAIVDLLFKTNRKVTVKQLKEDYFKKIECFDSVEISGVEDRFNASLGTYHDLLKIIKDKDFLDNEENEDILEDIVLTLTLFEDREMIEERLKTYAHLFDDKVMKQLKRRRYTGWGRLSRKLINGIRDKQSGKTILDFLKSDGFANRNFMQLIHDDSLTFKEDIQKAQVSGQGDSLHEHIANLAGSPAIKKGILQTVKVVDELVKVMGRHKPENIVIEMARENQTTQKGQKNSRERMKRIEEGIKELGSQILKEHPVENTQLQNEKLYLYYLQNGRDMYVDQELDINRLSDYDVDHIVPQSFLKDDSIDNKVLTRSDKARGKSDNVPSEEVVKKMKNYWRQLLNAKLITQRKFDNLTKAERGGLSELDKAGFIKRQLVETRQITKHVAQILDSRMNTKYDENDKLIREVKVITLKSKLVSDFRKDFQFYKVREINNYHHAHDAYLNAVVGTALIKKYPKLESEFVYGDYKVYDVRKMIAKSEQEIGKATAKYFFYSNIMNFFKTEITLANGEIRKRPLIETNGETGEIVWDKGRDFATVRKVLSMPQVNIVKKTEVQTGGFSKESILPKRNSDKLIARKKDWDPKKYGGFDSPTVAYSVLVVAKVEKGKSKKLKSVKELLGITIMERSSFEKNPIDFLEAKGYKEVKKDLIIKLPKYSLFELENGRKRMLASAGELQKGNELALPSKYVNFLYLASHYEKLKGSPEDNEQKQLFVEQHKHYLDEIIEQISEFSKRVILADANLDKVLSAYNKHRDKPIREQAENIIHLFTLTNLGAPAAFKYFDTTIDRKRYTSTKEVLDATLIHQSITGLYETRIDLSQLGGDGGGGSGGSGGSGGSGGSGGTLGDQGSRGSDPLPEPRVTLTVEGIPTEFLVNTGAEHSVLTKPMGKMGSKRTVVAGATGSKVYPWTTKRLLKIGQKQVTHSFLVIPECPAPLLGRDLLTKLKAQIQFSTEGPQVTWEDRPAMCLVLNLEEEYRLHEKPVPPSIDPSWLQLFPMVWAEKAGMGLANQVPPVVVELKSDASPVAVRQYPMSKEAREGIRPHIQRFLDLGILVPCQSPWNTPLLPVKKPGTNDYRPVQDLREVNKRVQDIHPTVPNPYNLLSSLPPSHTWYSVLDLKDAFFCLKLHPNSQPLFAFEWRDPEKGNTGQLTWTRLPQGFKNSPTLFNEALHRDLASFRALNPQVVMLQYVDDLLVAAPTYRDCKEGTRRLLQELSKLGYRVSAKKAQLCREEVTYLGYLLKGGKRWLTPARKATVMKIPTPTTPRQVREFLGKAGFCRLFIPGFASLAAPLYPLTRPKVPFTWTEAHQEAFGRIKEALLSAPALALPDLTKPFALYVDEKEGVARGVLTQTLGPWRRPVAYLSKKLDPVASGWPTCLKAIAAVALLLKDADKLTLGQNVLVIAPHNLESIVRQPPDRWMTNARMTHYQSLLLNERVSFAPPAILNPATLLPVESDDTPIHICSEILAEETGTRPDLRDQPLPGVPAWYTDGSSFIMDGRRQAGAAIVDNKRTVWASNLPEGTSAQKAELIALTQALRLAEGKSINIYTDSRYAFATAHVHGAIYKQRGWLTSAGKDIKNKEEILALLEAIHLPKRVAIIHCPGHQRGTDPVATGNRKADEAAKQAAQSTRILTETTKNAGKRTADGSEFEKRTADGSEFESPKKKAKVE

SEQ ID NO: 6066 - protein, 2100 aa, synthetic construct
MPAAKRVKLDGGDKKYSIGLDIGTNSVGWAVITDEYKVPSKKFKVLGNTDRHSIKKNLIGALLFDSGETAEATRLKRTARRRYTRRKNRICYLQEIFSNEMAKVDDSFFHRLEESFLVEEDKKHERHPIFGNIVDEVAYHEKYPTIYHLRKKLVDSTDKADLRLIYLALAHMIKFRGHFLIEGDLNPDNSDVDKLFIQLVQTYNQLFEENPINASGVDAKAILSARLSKSRRLENLIAQLPGEKKNGLFGNLIALSLGLTPNFKSNFDLAEDAKLQLSKDTYDDDLDNLLAQIGDQYADLFLAAKNLSDAILLSDILRVNTEITKAPLSASMIKRYDEHHQDLTLLKALVRQQLPEKYKEIFFDQSKNGYAGYIDGGASQEEFYKFIKPILEKMDGTEELLVKLNREDLLRKQRTFDNGSIPHQIHLGELHAILRRQEDFYPFLKDNREKIEKILTFRIPYYVGPLARGNSRFAWMTRKSEETITPWNFEEVVDKGASAQSFIERMTNFDKNLPNEKVLPKHSLLYEYFTVYNELTKVKYVTEGMRKPAFLSGEQKKAIVDLLFKTNRKVTVKQLKEDYFKKIECFDSVEISGVEDRFNASLGTYHDLLKIIKDKDFLDNEENEDILEDIVLTLTLFEDREMIEERLKTYAHLFDDKVMKQLKRRRYTGWGRLSRKLINGIRDKQSGKTILDFLKSDGFANRNFMQLIHDDSLTFKEDIQKAQVSGQGDSLHEHIANLAGSPAIKKGILQTVKVVDELVKVMGRHKPENIVIEMARENQTTQKGQKNSRERMKRIEEGIKELGSQILKEHPVENTQLQNEKLYLYYLQNGRDMYVDQELDINRLSDYDVDHIVPQSFLKDDSIDNKVLTRSDKARGKSDNVPSEEVVKKMKNYWRQLLNAKLITQRKFDNLTKAERGGLSELDKAGFIKRQLVETRQITKHVAQILDSRMNTKYDENDKLIREVKVITLKSKLVSDFRKDFQFYKVREINNYHHAHDAYLNAVVGTALIKKYPKLESEFVYGDYKVYDVRKMIAKSEQEIGKATAKYFFYSNIMNFFKTEITLANGEIRKRPLIETNGETGEIVWDKGRDFATVRKVLSMPQVNIVKKTEVQTGGFSKESILPKRNSDKLIARKKDWDPKKYGGFDSPTVAYSVLVVAKVEKGKSKKLKSVKELLGITIMERSSFEKNPIDFLEAKGYKEVKKDLIIKLPKYSLFELENGRKRMLASAGELQKGNELALPSKYVNFLYLASHYEKLKGSPEDNEQKQLFVEQHKHYLDEIIEQISEFSKRVILADANLDKVLSAYNKHRDKPIREQAENIIHLFTLTNLGAPAAFKYFDTTIDRKRYTSTKEVLDATLIHQSITGLYETRIDLSQLGGDGGGGSGGSGGSGGSGGSGGTLGIEDEYRLHETSTEPDVSLGSTWLSDFPQAWAETGGMGLAVRQAPLIIPLKATSTPVSIQQYPMSHEARLGIKPHIQRLLDQGILVPCQSPWNTPLLPVKKPGTNDYRPVQDLREVNKRVEDIHPTVPNPYNLLSGLPPSHQWYTVLDLKDAFFCLRLHPTSQPLFAFEWRDPGMGISGQLTWTRLPQGFKNSPTLFNEALHRDLADFRIQHPDLILLQYVDDILLAATSELDCQQGTRALLQTLGDLGYRASAKKAQICQKQVKYLGYLLREGQRWLTEARKETVMGQPVPKTPRQLREFLGTAGFCRLWIPGFAEMAAPLYPLTKPGTLFSWGPDQQKAYQEIKQALLTAPALGLPDLTKPFELFVDEKQGYAKGVLTQKLGPWRRPVAYLSKKLDPVAAGWPPCLRMVAAIAVLTKDAGKLTMGQPLVILAPHAVEALVKQPPDRWLSNARMTHYQAMLLDTDRVQFGPVVALNPATLLPLPEEGAPHDCLEILAETHGTRPDLTDQPIPDADHTWYTDGSSFLQEGQRKAGAAVTTETEVIWAGALPAGTSAQRAELIALTQALKMAEGKRLNVYTDSRYAFATAHIHGEIYRRRGWLTSEGREIKNKSEILALLKALFLPKRLSIIHCLGHQKGDSAEARGNRLADQAAREAAIKTPPDTSTLLAGKRTADGSEFEKRTADGSEFESPKKKAKVE

SEQ ID NO: 6067 - protein, 2100 aa, synthetic construct
MPAAKRVKLDGGDKKYSIGLDIGTNSVGWAVITDEYKVPSKKFKVLGNTDRHSIKKNLIGALLFDSGETAEATRLKRTARRRYTRRKNRICYLQEIFSNEMAKVDDSFFHRLEESFLVEEDKKHERHPIFGNIVDEVAYHEKYPTIYHLRKKLVDSTDKADLRLIYLALAHMIKFRGHFLIEGDLNPDNSDVDKLFIQLVQTYNQLFEENPINASGVDAKAILSARLSKSRRLENLIAQLPGEKKNGLFGNLIALSLGLTPNFKSNFDLAEDAKLQLSKDTYDDDLDNLLAQIGDQYADLFLAAKNLSDAILLSDILRVNTEITKAPLSASMIKRYDEHHQDLTLLKALVRQQLPEKYKEIFFDQSKNGYAGYIDGGASQEEFYKFIKPILEKMDGTEELLVKLNREDLLRKQRTFDNGSIPHQIHLGELHAILRRQEDFYPFLKDNREKIEKILTFRIPYYVGPLARGNSRFAWMTRKSEETITPWNFEEVVDKGASAQSFIERMTNFDKNLPNEKVLPKHSLLYEYFTVYNELTKVKYVTEGMRKPAFLSGEQKKAIVDLLFKTNRKVTVKQLKEDYFKKIECFDSVEISGVEDRFNASLGTYHDLLKIIKDKDFLDNEENEDILEDIVLTLTLFEDREMIEERLKTYAHLFDDKVMKQLKRRRYTGWGRLSRKLINGIRDKQSGKTILDFLKSDGFANRNFMQLIHDDSLTFKEDIQKAQVSGQGDSLHEHIANLAGSPAIKKGILQTVKVVDELVKVMGRHKPENIVIEMARENQTTQKGQKNSRERMKRIEEGIKELGSQILKEHPVENTQLQNEKLYLYYLQNGRDMYVDQELDINRLSDYDVDHIVPQSFLKDDSIDNKVLTRSDKARGKSDNVPSEEVVKKMKNYWRQLLNAKLITQRKFDNLTKAERGGLSELDKAGFIKRQLVETRQITKHVAQILDSRMNTKYDENDKLIREVKVITLKSKLVSDFRKDFQFYKVREINNYHHAHDAYLNAVVGTALIKKYPKLESEFVYGDYKVYDVRKMIAKSEQEIGKATAKYFFYSNIMNFFKTEITLANGEIRKRPLIETNGETGEIVWDKGRDFATVRKVLSMPQVNIVKKTEVQTGGFSKESILPKRNSDKLIARKKDWDPKKYGGFDSPTVAYSVLVVAKVEKGKSKKLKSVKELLGITIMERSSFEKNPIDFLEAKGYKEVKKDLIIKLPKYSLFELENGRKRMLASAGELQKGNELALPSKYVNFLYLASHYEKLKGSPEDNEQKQLFVEQHKHYLDEIIEQISEFSKRVILADANLDKVLSAYNKHRDKPIREQAENIIHLFTLTNLGAPAAFKYFDTTIDRKRYTSTKEVLDATLIHQSITGLYETRIDLSQLGGDGGGGSGGSGGSGGSGGSGGTLNIEDEYRLHETSKEPDVSLGSTWLSDFPQAWAETGGMGLAVRQAPLIIPLKATSTPVSIKQYPMSQEARLGIKPHIQRLLDQGILVPCQSPWNTPLLPVKKPGTNDYRPVQDLREVNKRVEDIHPTVPNPYNLLSGLPPSHQWYTVLDLKDAFFCLRLHPTSQPLFAFEWRDPEMGISGQLTWTRLPQGFKNSPTLFNEALHRDLAGFRIQHPDLILLQYVDDLLLAATSELDCQQGTRALLQTLGDLGYRASAKKAQICQKQVKYLGYLLKEGQRWLTEARKETVMGQPIPKTPRQLREFLGTAGFCRLWIPGFAEMAAPLYPLTKPGTLFNWGPDQQKAFQEIKQALLTAPALGLPDLTKPFELFVDEKQGYAKGVLTQKLGPWRRPVAYLSKKLDPVAAGWPPCLRMVAAIAVLTKDAGKLTMGQPLVILAPHAVEALVKQPPDRWLSNARMTHYQALLLDTDRVQFGPVVALNPATLLPLPEEGLQHDCLDILAEAHGTRSDLMDQPLPDADHTWYTDGSSFLQEGQRKAGAAVTTETEVIWARALPAGTSAQRAELIALTQALKMAEGKKLNVYTDSRYAFATAHIHGEIYRRRGWLTSEGKEIKNKDEILALLKALFLPKRLSIIHCPGHQKGNSAEARGNRMADQAAREVATRETPETSTLLAGKRTADGSEFEKRTADGSEFESPKKKAKVE

SEQ ID NO: 6068 - protein, 2100 aa, synthetic construct
MPAAKRVKLDGGDKKYSIGLDIGTNSVGWAVITDEYKVPSKKFKVLGNTDRHSIKKNLIGALLFDSGETAEATRLKRTARRRYTRRKNRICYLQEIFSNEMAKVDDSFFHRLEESFLVEEDKKHERHPIFGNIVDEVAYHEKYPTIYHLRKKLVDSTDKADLRLIYLALAHMIKFRGHFLIEGDLNPDNSDVDKLFIQLVQTYNQLFEENPINASGVDAKAILSARLSKSRRLENLIAQLPGEKKNGLFGNLIALSLGLTPNFKSNFDLAEDAKLQLSKDTYDDDLDNLLAQIGDQYADLFLAAKNLSDAILLSDILRVNTEITKAPLSASMIKRYDEHHQDLTLLKALVRQQLPEKYKEIFFDQSKNGYAGYIDGGASQEEFYKFIKPILEKMDGTEELLVKLNREDLLRKQRTFDNGSIPHQIHLGELHAILRRQEDFYPFLKDNREKIEKILTFRIPYYVGPLARGNSRFAWMTRKSEETITPWNFEEVVDKGASAQSFIERMTNFDKNLPNEKVLPKHSLLYEYFTVYNELTKVKYVTEGMRKPAFLSGEQKKAIVDLLFKTNRKVTVKQLKEDYFKKIECFDSVEISGVEDRFNASLGTYHDLLKIIKDKDFLDNEENEDILEDIVLTLTLFEDREMIEERLKTYAHLFDDKVMKQLKRRRYTGWGRLSRKLINGIRDKQSGKTILDFLKSDGFANRNFMQLIHDDSLTFKEDIQKAQVSGQGDSLHEHIANLAGSPAIKKGILQTVKVVDELVKVMGRHKPENIVIEMARENQTTQKGQKNSRERMKRIEEGIKELGSQILKEHPVENTQLQNEKLYLYYLQNGRDMYVDQELDINRLSDYDVDHIVPQSFLKDDSIDNKVLTRSDKARGKSDNVPSEEVVKKMKNYWRQLLNAKLITQRKFDNLTKAERGGLSELDKAGFIKRQLVETRQITKHVAQILDSRMNTKYDENDKLIREVKVITLKSKLVSDFRKDFQFYKVREINNYHHAHDAYLNAVVGTALIKKYPKLESEFVYGDYKVYDVRKMIAKSEQEIGKATAKYFFYSNIMNFFKTEITLANGEIRKRPLIETNGETGEIVWDKGRDFATVRKVLSMPQVNIVKKTEVQTGGFSKESILPKRNSDKLIARKKDWDPKKYGGFDSPTVAYSVLVVAKVEKGKSKKLKSVKELLGITIMERSSFEKNPIDFLEAKGYKEVKKDLIIKLPKYSLFELENGRKRMLASAGELQKGNELALPSKYVNFLYLASHYEKLKGSPEDNEQKQLFVEQHKHYLDEIIEQISEFSKRVILADANLDKVLSAYNKHRDKPIREQAENIIHLFTLTNLGAPAAFKYFDTTIDRKRYTSTKEVLDATLIHQSITGLYETRIDLSQLGGDGGGGSGGSGGSGGSGGSGGTLNIEDEHRLHETSKEPDVSLGSTWLSDFPQAWAETGGMGLAVRQAPLIIPLKATSTPVSIKQYPMSQEARLGIKPHIQRLLDQGILVPCQSPWNTPLLPVKKPGTNDYRPVQDLREVNKRVEDIHPTVPNPYNLLSGLPPSHQWYTVLDLKDAFFCLRLHPTSQPLFAFEWRDPEMGISGQLTWTRLPQGFKNSPTLFDEALHRDLADFRIQHPDLILLQYVDDLLLAATSELDCQQGTRALLQTLGNLGYRASAKKAQICQKQVKYLGYLLKEGQRWLTEARKETVMGQPTPKTPRQLREFLGTAGFCRLWIPGFAEMAAPLYPLTKTGTLFNWGPDQQKAYQEIKQALLTAPALGLPDLTKPFELFVDEKQGYAKGVLTQKLGPWRRPVAYLSKKLDPVAAGWPPCLRMVAAIAVLTKDAGKLTMGQPLVILAPHAVEALVKQPPDRWLSNARMTHYQALLLDTDRVQFGPVVALNPATLLPLPEEGLQHNCLDILAEAHGTRPDLTDQPLPDADHTWYTDGSSLLQEGQRKAGAAVTTETEVIWAKALPAGTSAQRAELIALTQALKMAEGKKLNVYTDSRYAFATAHIHGEIYRRRGLLTSEGKEIKNKDEILALLKALFLPKRLSIIHCPGHQKGHSAEARGNRMADQAARKAAITETPDTSTLLAGKRTADGSEFEKRTADGSEFESPKKKAKVE

SEQ ID NO: 6069 - protein, 2094 aa, synthetic construct
MPAAKRVKLDGGDKKYSIGLDIGTNSVGWAVITDEYKVPSKKFKVLGNTDRHSIKKNLIGALLFDSGETAEATRLKRTARRRYTRRKNRICYLQEIFSNEMAKVDDSFFHRLEESFLVEEDKKHERHPIFGNIVDEVAYHEKYPTIYHLRKKLVDSTDKADLRLIYLALAHMIKFRGHFLIEGDLNPDNSDVDKLFIQLVQTYNQLFEENPINASGVDAKAILSARLSKSRRLENLIAQLPGEKKNGLFGNLIALSLGLTPNFKSNFDLAEDAKLQLSKDTYDDDLDNLLAQIGDQYADLFLAAKNLSDAILLSDILRVNTEITKAPLSASMIKRYDEHHQDLTLLKALVRQQLPEKYKEIFFDQSKNGYAGYIDGGASQEEFYKFIKPILEKMDGTEELLVKLNREDLLRKQRTFDNGSIPHQIHLGELHAILRRQEDFYPFLKDNREKIEKILTFRIPYYVGPLARGNSRFAWMTRKSEETITPWNFEEVVDKGASAQSFIERMTNFDKNLPNEKVLPKHSLLYEYFTVYNELTKVKYVTEGMRKPAFLSGEQKKAIVDLLFKTNRKVTVKQLKEDYFKKIECFDSVEISGVEDRFNASLGTYHDLLKIIKDKDFLDNEENEDILEDIVLTLTLFEDREMIEERLKTYAHLFDDKVMKQLKRRRYTGWGRLSRKLINGIRDKQSGKTILDFLKSDGFANRNFMQLIHDDSLTFKEDIQKAQVSGQGDSLHEHIANLAGSPAIKKGILQTVKVVDELVKVMGRHKPENIVIEMARENQTTQKGQKNSRERMKRIEEGIKELGSQILKEHPVENTQLQNEKLYLYYLQNGRDMYVDQELDINRLSDYDVDHIVPQSFLKDDSIDNKVLTRSDKARGKSDNVPSEEVVKKMKNYWRQLLNAKLITQRKFDNLTKAERGGLSELDKAGFIKRQLVETRQITKHVAQILDSRMNTKYDENDKLIREVKVITLKSKLVSDFRKDFQFYKVREINNYHHAHDAYLNAVVGTALIKKYPKLESEFVYGDYKVYDVRKMIAKSEQEIGKATAKYFFYSNIMNFFKTEITLANGEIRKRPLIETNGETGEIVWDKGRDFATVRKVLSMPQVNIVKKTEVQTGGFSKESILPKRNSDKLIARKKDWDPKKYGGFDSPTVAYSVLVVAKVEKGKSKKLKSVKELLGITIMERSSFEKNPIDFLEAKGYKEVKKDLIIKLPKYSLFELENGRKRMLASAGELQKGNELALPSKYVNFLYLASHYEKLKGSPEDNEQKQLFVEQHKHYLDEIIEQISEFSKRVILADANLDKVLSAYNKHRDKPIREQAENIIHLFTLTNLGAPAAFKYFDTTIDRKRYTSTKEVLDATLIHQSITGLYETRIDLSQLGGDGGGGSGGSGGSGGSGGSGGTLQLDDEYRLYSPLVKPDQNIQFWLEQFPQAWAETAGMGLAKQVPPQVIQLKASATPVSVRQYPLSKEAQEGIRPHVQRLIQQGILVPVQSPWNTPLLPVRKPGTNDYRPVQDLREVNKRVQDIHPTVPNPYNLLCALPPQRSWYTVLDLKDAFFCLRLHPTSQPLFAFEWRDPGTGRTGQLTWTRLPQGFKNSPTIFDEALHRDLANFRIQHPQVTLLQYVDDLLLAGATKQDCLEGTKALLLELSDLGYRASAKKAQICRREVTYLGYSLRDGQRWLTEARKKTVVQIPAPTTAKQVREFLGTAGFCRLWIPGFATLAAPLYPLTKEKGEFSWAPEHQKAFDAIKKALLSAPALALPDVTKPFTLYVDERKGVARGVLTQTLGPWRRPVAYLSKKLDPVASGWPVCLKAIAAVAILVKDADKLTLGQNITVIAPHALENIVRQPPDRWMTNARMTHYQSLLLTERVTFAPPAALNPATLLPEETDEPVTHDCHQLLIEETGVRKDLTDIPLTGEVLTWFTDGSSYVVEGKRMAGAAVVDGTRTIWASSLPEGTSAQKAELMALTQALRLAEGKSINIYTDSRYAFATAHVHGAIYKQRGLLTSAGREIKNKEEILSLLEALHLPKRLAIIHCPGHQKAKDPISRGNQMADRVAKQAAQGVNLLAGKRTADGSEFEKRTADGSEFESPKKKAKVE

SEQ ID NO: 6070 - protein, 2094 aa, synthetic construct; identical to SEQ ID NO: 6069

SEQ ID NO: 6071 - protein, 2180 aa, synthetic construct
MPAAKRVKLDGGDKKYSIGLDIGTNSVGWAVITDEYKVPSKKFKVLGNTDRHSIKKNLIGALLFDSGETAEATRLKRTARRRYTRRKNRICYLQEIFSNEMAKVDDSFFHRLEESFLVEEDKKHERHPIFGNIVDEVAYHEKYPTIYHLRKKLVDSTDKADLRLIYLALAHMIKFRGHFLIEGDLNPDNSDVDKLFIQLVQTYNQLFEENPINASGVDAKAILSARLSKSRRLENLIAQLPGEKKNGLFGNLIALSLGLTPNFKSNFDLAEDAKLQLSKDTYDDDLDNLLAQIGDQYADLFLAAKNLSDAILLSDILRVNTEITKAPLSASMIKRYDEHHQDLTLLKALVRQQLPEKYKEIFFDQSKNGYAGYIDGGASQEEFYKFIKPILEKMDGTEELLVKLNREDLLRKQRTFDNGSIPHQIHLGELHAILRRQEDFYPFLKDNREKIEKILTFRIPYYVGPLARGNSRFAWMTRKSEETITPWNFEEVVDKGASAQSFIERMTNFDKNLPNEKVLPKHSLLYEYFTVYNELTKVKYVTEGMRKPAFLSGEQKKAIVDLLFKTNRKVTVKQLKEDYFKKIECFDSVEISGVEDRFNASLGTYHDLLKIIKDKDFLDNEENEDILEDIVLTLTLFEDREMIEERLKTYAHLFDDKVMKQLKRRRYTGWGRLSRKLINGIRDKQSGKTILDFLKSDGFANRNFMQLIHDDSLTFKEDIQKAQVSGQGDSLHEHIANLAGSPAIKKGILQTVKVVDELVKVMGRHKPENIVIEMARENQTTQKGQKNSRERMKRIEEGIKELGSQILKEHPVENTQLQNEKLYLYYLQNGRDMYVDQELDINRLSDYDVDHIVPQSFLKDDSIDNKVLTRSDKARGKSDNVPSEEVVKKMKNYWRQLLNAKLITQRKFDNLTKAERGGLSELDKAGFIKRQLVETRQITKHVAQILDSRMNTKYDENDKLIREVKVITLKSKLVSDFRKDFQFYKVREINNYHHAHDAYLNAVVGTALIKKYPKLESEFVYGDYKVYDVRKMIAKSEQEIGKATAKYFFYSNIMNFFKTEITLANGEIRKRPLIETNGETGEIVWDKGRDFATVRKVLSMPQVNIVKKTEVQTGGFSKESILPKRNSDKLIARKKDWDPKKYGGFDSPTVAYSVLVVAKVEKGKSKKLKSVKELLGITIMERSSFEKNPIDFLEAKGYKEVKKDLIIKLPKYSLFELENGRKRMLASAGELQKGNELALPSKYVNFLYLASHYEKLKGSPEDNEQKQLFVEQHKHYLDEIIEQISEFSKRVILADANLDKVLSAYNKHRDKPIREQAENIIHLFTLTNLGAPAAFKYFDTTIDRKRYTSTKEVLDATLIHQSITGLYETRIDLSQLGGDGGGGSGGSGGSGGSGGSGGMDPLQLLQPLEAEIKGTKLKAHWNSGATITCVPQAFLEEEVPIKNIWIKTIHGEKEQPVYYLTFKIQGRKVEAEVISSPYDYILVSPSDIPWLMKKPLQLTTLVPLQEYEERLLKQTMLTGSYKEKLQSLFLKYDALWQHWENQVGHRRIKPHHIATGTVNPRPQKQYPINPKAKASIQTVINDLLKQGVLIQQNSIMNTPVYPVPKPDGKWRMVLDYREVNKTIPLIAAQNQHSAGILSSIFRGKYKTTLDLSNGFWAHSITPESYWLTAFTWLGQQYCWTRLPQGFLNSPALFNADVVDLLKEVPNVQVYVDDIYISHDDPREHLEQLEKVFSLLLNAGYVVSLKKSEIAQHEVEFLGFNITKEGRGLTETFKQKLLNITPPRDLKQLQSILGLLNFARNFIPNFSELVKPLYNIIATAPGKYITWTTDNSQQLQNIISMLNSAENLEERNPEVRLIMKVNTSPSAGYIRFYNEFAKRPIMYLNYVYTKAEVKFTNTEKLLTTIHKGLIKALDLGMGQEILVYSPIVSMTKIQKTPLPERKALPIRWITWMSYLEDPRIQFHYDKTLPELQQVPTVTDDIIAKIKHPSEFSMVFYTDGSAIKHPNVNKSHNAGMGIAQVQFKPEFTVINTWSIPLGDHTAQLAEVAAVEFACKKALKIDGPVLIVTDSFYVAESVNKELPYWQSNGFFNNKKKPLKHVSKWKSIADCIQLKPDIIIIHEKGHQPTASTFHTEGNNLADKLATQGSYVVNAGKRTADGSEFEKRTADGSEFESPKKKAKVE

SEQ ID NO: 6072 - protein, 2180 aa, synthetic construct
MPAAKRVKLDGGDKKYSIGLDIGTNSVGWAVITDEYKVPSKKFKVLGNTDRHSIKKNLIGALLFDSGETAEATRLKRTARRRYTRRKNRICYLQEIFSNEMAKVDDSFFHRLEESFLVEEDKKHERHPIFGNIVDEVAYHEKYPTIYHLRKKLVDSTDKADLRLIYLALAHMIKFRGHFLIEGDLNPDNSDVDKLFIQLVQTYNQLFEENPINASGVDAKAILSARLSKSRRLENLIAQLPGEKKNGLFGNLIALSLGLTPNFKSNFDLAEDAKLQLSKDTYDDDLDNLLAQIGDQYADLFLAAKNLSDAILLSDILRVNTEITKAPLSASMIKRYDEHHQDLTLLKALVRQQLPEKYKEIFFDQSKNGYAGYIDGGASQEEFYKFIKPILEKMDGTEELLVKLNREDLLRKQRTFDNGSIPHQIHLGELHAILRRQEDFYPFLKDNREKIEKILTFRIPYYVGPLARGNSRFAWMTRKSEETITPWNFEEVVDKGASAQSFIERMTNFDKNLPNEKVLPKHSLLYEYFTVYNELTKVKYVTEGMRKPAFLSGEQKKAIVDLLFKTNRKVTVKQLKEDYFKKIECFDSVEISGVEDRFNASLGTYHDLLKIIKDKDFLDNEENEDILEDIVLTLTLFEDREMIEERLKTYAHLFDDKVMKQLKRRRYTGWGRLSRKLINGIRDKQSGKTILDFLKSDGFANRNFMQLIHDDSLTFKEDIQKAQVSGQGDSLHEHIANLAGSPAIKKGILQTVKVVDELVKVMGRHKPENIVIEMARENQTTQKGQKNSRERMKRIEEGIKELGSQILKEHPVENTQLQNEKLYLYYLQNGRDMYVDQELDINRLSDYDVDHIVPQSFLKDDSIDNKVLTRSDKARGKSDNVPSEEVVKKMKNYWRQLLNAKLITQRKFDNLTKAERGGLSELDKAGFIKRQLVETRQITKHVAQILDSRMNTKYDENDKLIREVKVITLKSKLVSDFRKDFQFYKVREINNYHHAHDAYLNAVVGTALIKKYPKLESEFVYGDYKVYDVRKMIAKSEQEIGKATAKYFFYSNIMNFFKTEITLANGEIRKRPLIETNGETGEIVWDKGRDFATVRKVLSMPQVNIVKKTEVQTGGFSKESILPKRNSDKLIARKKDWDPKKYGGFDSPTVAYSVLVVAKVEKGKSKKLKSVKELLGITIMERSSFEKNPIDFLEAKGYKEVKKDLIIKLPKYSLFELENGRKRMLASAGELQKGNELALPSKYVNFLYLASHYEKLKGSPEDNEQKQLFVEQHKHYLDEIIEQISEFSKRVILADANLDKVLSAYNKHRDKPIREQAENIIHLFTLTNLGAPAAFKYFDTTIDRKRYTSTKEVLDATLIHQSITGLYETRIDLSQLGGDGGGGSGGSGGSGGSGGSGGMDPLQLLQPLEAEIKGTKLKAHWNSGATITCVPQAFLEEEVPIKNIWIKTIHGEKEQPVYYLTFKIQGRKVEAEVISSPYDYILVSPSDIPWLMKKPLQLTTLVPLQEYEERLLKQTMLTGSYKEKLQSLFLKYDALWQHWENQVGHRRIKPHHIATGTVNPRPQKQYPINPKAKASIQTVINDLLKQGVLIQQNSIMNTPVYPVPKPDGKWRMVLDYREVNKTIPLIAAQNQHSAGILSSIFRGKYKTTLDLSNGFWAHSITPESYWLTAFTWLGQQYCWTRLPQGFLNSPALFNADVVDLLKEVPNVQVYVDDIYISHDDPREHLEQLEKVFSLLLNAGYVVSLKKSEIAQHEVEFLGFNITKEGRGLTETFKQKLLNITPPRDLKQLQSILGKLNFARNFIPNFSELVKPLYNIIATAPGKYITWTTDNSQQLQNIISMLNSAENLEERNPEVRLIMKVNTSPSAGYIRFYNEFAKRPIMYLNYVYTKAEVKFTNTEKLLTTIHKGLIKALDLGMGQEILVYSPIVSMTKIQKTPLPERKALPIRWITWMSYLEDPRIQFHYDKTLPELQQVPTVTDDIIAKIKHPSEFSMVFYTDGSAIKHPNVNKSHNAGMGIAQVQFKPEFTVINTWSIPLGDHTAQLAEVAAVEFACKKALKIDGPVLIVTDSFYVAESVNKELPYWQSNGFFNNKKKPLKHVSKWKSIADCIQLKPDIIIIHEKGHQPTASTFHTEGNNLADKLATQGSYVVNAGKRTADGSEFEKRTADGSEFESPKKKAKVE

SEQ ID NO: 6073 - protein, 2098 aa, synthetic construct; identical to SEQ ID NO: 4502

SEQ ID NO: 6074 - protein, 2098 aa, synthetic construct
MPAAKRVKLDGGDKKYSIGLDIGTNSVGWAVITDEYKVPSKKFKVLGNTDRHSIKKNLIGALLFDSGETAEATRLKRTARRRYTRRKNRICYLQEIFSNEMAKVDDSFFHRLEESFLVEEDKKHERHPIFGNIVDEVAYHEKYPTIYHLRKKLVDSTDKADLRLIYLALAHMIKFRGHFLIEGDLNPDNSDVDKLFIQLVQTYNQLFEENPINASGVDAKAILSARLSKSRRLENLIAQLPGEKKNGLFGNLIALSLGLTPNFKSNFDLAEDAKLQLSKDTYDDDLDNLLAQIGDQYADLFLAAKNLSDAILLSDILRVNTEITKAPLSASMIKRYDEHHQDLTLLKALVRQQLPEKYKEIFFDQSKNGYAGYIDGGASQEEFYKFIKPILEKMDGTEELLVKLNREDLLRKQRTFDNGSIPHQIHLGELHAILRRQEDFYPFLKDNREKIEKILTFRIPYYVGPLARGNSRFAWMTRKSEETITPWNFEEVVDKGASAQSFIERMTNFDKNLPNEKVLPKHSLLYEYFTVYNELTKVKYVTEGMRKPAFLSGEQKKAIVDLLFKTNRKVTVKQLKEDYFKKIECFDSVEISGVEDRFNASLGTYHDLLKIIKDKDFLDNEENEDILEDIVLTLTLFEDREMIEERLKTYAHLFDDKVMKQLKRRRYTGWGRLSRKLINGIRDKQSGKTILDFLKSDGFANRNFMQLIHDDSLTFKEDIQKAQVSGQGDSLHEHIANLAGSPAIKKGILQTVKVVDELVKVMGRHKPENIVIEMARENQTTQKGQKNSRERMKRIEEGIKELGSQILKEHPVENTQLQNEKLYLYYLQNGRDMYVDQELDINRLSDYDVDHIVPQSFLKDDSIDNKVLTRSDKARGKSDNVPSEEVVKKMKNYWRQLLNAKLITQRKFDNLTKAERGGLSELDKAGFIKRQLVETRQITKHVAQILDSRMNTKYDENDKLIREVKVITLKSKLVSDFRKDFQFYKVREINNYHHAHDAYLNAVVGTALIKKYPKLESEFVYGDYKVYDVRKMIAKSEQEIGKATAKYFFYSNIMNFFKTEITLANGEIRKRPLIETNGETGEIVWDKGRDFATVRKVLSMPQVNIVKKTEVQTGGFSKESILPKRNSDKLIARKKDWDPKKYGGFDSPTVAYSVLVVAKVEKGKSKKLKSVKELLGITIMERSSFEKNPIDFLEAKGYKEVKKDLIIKLPKYSLFELENGRKRMLASAGELQKGNELALPSKYVNFLYLASHYEKLKGSPEDNEQKQLFVEQHKHYLDEIIEQISEFSKRVILADANLDKVLSAYNKHRDKPIREQAENIIHLFTLTNLGAPAAFKYFDTTIDRKRYTSTKEVLDATLIHQSITGLYETRIDLSQLGGDGGGGSGGSGGSGGSGGSGGVLNLEEEYRLHEKPVPSSIDPSWLQLFPTVWAERAGMGLANQVPPVVVELRSGASPVAVRQYPMSKEAREGIRPHIQRFLDLGVLVPCQSPWNTPLLPVKKPGTNDYRPVQDLREINKRVQDIHPTVPNPYNLLSSLPPSHTWYSVLDLKDAFFCLKLHPNSQPLFAFEWRDPEKGNTGQLTWTRLPQGFKNSPTLFNEALHRDLAPFRALNPQVVLLQYVDDLLVAAPTYRDCKEGTQKLLQELSKLGYRVSAKKAQLCQKEVTYLGYLLKEGKRWLTPARKATVMKIPPPTTPRQVREFLGKAGFCRLFIPGFASLAAPLYPLTKPSIPFIWTEEHQKAFDRIKEALLSAPALALPDLTKPFTLYVDERAGVARGVLTQTLGPWRRPVAYLSKKLDPVASGWPTCLKAVAAVALLLKDADKLTLGQNVTVIASHSLESIVRQPPDRWMTNARMTHYQSLLLNERVSFAPPAVLNPATLLPVESEATPVHRCSEILAEETGTRRDLKDQPLPGVPAWYTDGSSFIAEGKRRAGAAIVDGKRTVWASSLPEGTSAQKAELVALTQALRLAEGKDINIYTDSRYAFATAHIHGAIYKQRGWLTSAGKDIKNKEEILALLEAIHLPKRVAIIHCPGHQKGNDPVATGNRRADEAAKQAALSTRVLAETTKPAGKRTADGSEFEKRTADGSEFESPKKKAKVE

SEQ ID NO: 6075 - protein, 2100 aa, synthetic construct
MPAAKRVKLDGGDKKYSIGLDIGTNSVGWAVITDEYKVPSKKFKVLGNTDRHSIKKNLIGALLFDSGETAEATRLKRTARRRYTRRKNRICYLQEIFSNEMAKVDDSFFHRLEESFLVEEDKKHERHPIFGNIVDEVAYHEKYPTIYHLRKKLVDSTDKADLRLIYLALAHMIKFRGHFLIEGDLNPDNSDVDKLFIQLVQTYNQLFEENPINASGVDAKAILSARLSKSRRLENLIAQLPGEKKNGLFGNLIALSLGLTPNFKSNFDLAEDAKLQLSKDTYDDDLDNLLAQIGDQYADLFLAAKNLSDAILLSDILRVNTEITKAPLSASMIKRYDEHHQDLTLLKALVRQQLPEKYKEIFFDQSKNGYAGYIDGGASQEEFYKFIKPILEKMDGTEELLVKLNREDLLRKQRTFDNGSIPHQIHLGELHAILRRQEDFYPFLKDNREKIEKILTFRIPYYVGPLARGNSRFAWMTRKSEETITPWNFEEVVDKGASAQSFIERMTNFDKNLPNEKVLPKHSLLYEYFTVYNELTKVKYVTEGMRKPAFLSGEQKKAIVDLLFKTNRKVTVKQLKEDYFKKIECFDSVEISGVEDRFNASLGTYHDLLKIIKDKDFLDNEENEDILEDIVLTLTLFEDREMIEERLKTYAHLFDDKVMKQLKRRRYTGWGRLSRKLINGIRDKQSGKTILDFLKSDGFANRNFMQLIHDDSLTFKEDIQKAQVSGQGDSLHEHIANLAGSPAIKKGILQTVKVVDELVKVMGRHKPENIVIEMARENQTTQKGQKNSRERMKRIEEGIKELGSQILKEHPVENTQLQNEKLYLYYLQNGRDMYVDQELDINRLSDYDVDHIVPQSFLKDDSIDNKVLTRSDKARGKSDNVPSEEVVKKMKNYWRQLLNAKLITQRKFDNLTKAERGGLSELDKAGFIKRQLVETRQITKHVAQILDSRMNTKYDENDKLIREVKVITLKSKLVSDFRKDFQFYKVREINNYHHAHDAYLNAVVGTALIKKYPKLESEFVYGDYKVYDVRKMIAKSEQEIGKATAKYFFYSNIMNFFKTEITLANGEIRKRPLIETNGETGEIVWDKGRDFATVRKVLSMPQVNIVKKTEVQTGGFSKESILPKRNSDKLIARKKDWDPKKYGGFDSPTVAYSVLVVAKVEKGKSKKLKSVKELLGITIMERSSFEKNPIDFLEAKGYKEVKKDLIIKLPKYSLFELENGRKRMLASAGELQKGNELALPSKYVNFLYLASHYEKLKGSPEDNEQKQLFVEQHKHYLDEIIEQISEFSKRVILADANLDKVLSAYNKHRDKPIREQAENIIHLFTLTNLGAPAAFKYFDTTIDRKRYTSTKEVLDATLIHQSITGLYETRIDLSQLGGDGGGGSGGSGGSGGSGGSGGTLNIEDEYRLHETSKEPDVPLGSTWLSDFPQAWAETGGMGLAVRQAPLIIPLKATSTPVSIKQYPMSQEARLGIKPHIQRLLDQGILVPCQSPWNTPLLPVKKPGTNDYRPVQDLREVNKRVEDIHPTVPNPYNLLSGLPPSHQWYTVLDLKDAFFCLRLHPTSQPLFAFEWRDPEMGISGQLTWTRLPQGFKNSPTLFNEALHRDLADFRIQHPDLILLQYVDDLLLAATSEQDCQRGTRALLQTLGNLGYRASAKKAQICQKQVKYLGYLLKEGQRWLTEARKETVMGQPTPKTPRQLREFLGKAGFCRLFIPGFAEMAAPLYPLTKPGTLFNWGPDQQKAYQEIKQALLTAPALGLPDLTKPFELFVDEKQGYAKGVLTQKLGPWRRPVAYLSKKLDPVAAGWPPCLRMVAAIAVLTKDAGKLTMGQPLVILAPHAVEALVKQPPDRWLSNARMTHYQAMLLDTDRVQFGPVVALNPATLLPLPEKEAPHDCLEILAETHGTRPDLTDQPIPDADYTWYTDGSSFLQEGQRRAGAAVTTETEVIWARALPAGTSAQRAELIALTQALKMAEGKKLNVYTDSRYAFATAHVHGEIYRRRGWLTSEGREIKNKNEILALLKALFLPKRLSIIHCPGHQKGNSAEARGNRMADQAAREAAMKAVLETSTLLAGKRTADGSEFEKRTADGSEFESPKKKAKVE

SEQ ID NO: 6076 - protein, 2105 aa, synthetic construct
MPAAKRVKLDGGDKKYSIGLDIGTNSVGWAVITDEYKVPSKKFKVLGNTDRHSIKKNLIGALLFDSGETAEATRLKRTARRRYTRRKNRICYLQEIFSNEMAKVDDSFFHRLEESFLVEEDKKHERHPIFGNIVDEVAYHEKYPTIYHLRKKLVDSTDKADLRLIYLALAHMIKFRGHFLIEGDLNPDNSDVDKLFIQLVQTYNQLFEENPINASGVDAKAILSARLSKSRRLENLIAQLPGEKKNGLFGNLIALSLGLTPNFKSNFDLAEDAKLQLSKDTYDDDLDNLLAQIGDQYADLFLAAKNLSDAILLSDILRVNTEITKAPLSASMIKRYDEHHQDLTLLKALVRQQLPEKYKEIFFDQSKNGYAGYIDGGASQEEFYKFIKPILEKMDGTEELLVKLNREDLLRKQRTFDNGSIPHQIHLGELHAILRRQEDFYPFLKDNREKIEKILTFRIPYYVGPLARGNSRFAWMTRKSEETITPWNFEEVVDKGASAQSFIERMTNFDKNLPNEKVLPKHSLLYEYFTVYNELTKVKYVTEGMRKPAFLSGEQKKAIVDLLFKTNRKVTVKQLKEDYFKKIECFDSVEISGVEDRFNASLGTYHDLLKIIKDKDFLDNEENEDILEDIVLTLTLFEDREMIEERLKTYAHLFDDKVMKQLKRRRYTGWGRLSRKLINGIRDKQSGKTILDFLKSDGFANRNFMQLIHDDSLTFKEDIQKAQVSGQGDSLHEHIANLAGSPAIKKGILQTVKVVDELVKVMGRHKPENIVIEMARENQTTQKGQKNSRERMKRIEEGIKELGSQILKEHPVENTQLQNEKLYLYYLQNGRDMYVDQELDINRLSDYDVDHIVPQSFLKDDSIDNKVLTRSDKARGKSDNVPSEEVVKKMKNYWRQLLNAKLITQRKFDNLTKAERGGLSELDKAGFIKRQLVETRQITKHVAQILDSRMNTKYDENDKLIREVKVITLKSKLVSDFRKDFQFYKVREINNYHHAHDAYLNAVVGTALIKKYPKLESEFVYGDYKVYDVRKMIAKSEQEIGKATAKYFFYSNIMNFFKTEITLANGEIRKRPLIETNGETGEIVWDKGRDFATVRKVLSMPQVNIVKKTEVQTGGFSKESILPKRNSDKLIARKKDWDPKKYGGFDSPTVAYSVLVVAKVEKGKSKKLKSVKELLGITIMERSSFEKNPIDFLEAKGYKEVKKDLIIKLPKYSLFELENGRKRMLASAGELQKGNELALPSKYVNFLYLASHYEKLKGSPEDNEQKQLFVEQHKHYLDEIIEQISEFSKRVILADANLDKVLSAYNKHRDKPIREQAENIIHLFTLTNLGAPAAFKYFDTTIDRKRYTSTKEVLDATLIHQSITGLYETRIDLSQLGGDGGGGSGGSGGSGGSGGSGGSGGTAPLEEEYRLFLEAPIQNVTLLEQWKREIPKVWAEINPPGLASTQAPIHVQLLSTALPVRVRQYPITLEAKRSLRETIRKFRAAGILRPVHSPWNTPLLPVRKSGTSEYRMVQDLREVNKRVETIHPTVPNPYTLLSLLPPDRIWYSVLDLKDAFFCIPLAPESQLIFAFEWADAEEGESGQLTWTRLPQGFKNSPTLFDEALNRDLQGFRLDHPSVSLLQYVDDLLIAADTQAACLSATRDLLMTLAELGYRVSGKKAQLCQEEVTYLGFKIHKGSRSLSNSRTQAILQIPVPKTKRQVREFLGTIGYCRLWIPGFAELAQPLYAATRGGNDPLVWGEKEEEAFQSLKLALTQPPALALPSLDKPFQLFVEETSGAAKGVLTQALGPWKRPVAYLSKRLDPVAAGWPRCLRAIAAAALLTREASKLTFGQDIEITSSHNLESLLRSPPDKWLTNARITQYQVLLLDPPRVRFKQTAALNPATLLPETDDTLPIHHCLDTLDSLTSTRPDLTDQPLAQAEATLFTDGSSYIRDGKRYAGAAVVTLDSVIWAEPLPIGTSAQKAELIALTKALEWSKDKSVNIYTDSRYAFATLHVHGMIYRERGLLTAGGKAIKNAPEILALLTAVWLPKRVAVMHCKGHQKDDAPTSTGNRRADEVAREVAIRPLSTQATISAGKRTADGSEFEKRTADGSEFESPKKKAKVE

SEQ ID NO: 6077 - protein, 2105 aa, synthetic construct
MPAAKRVKLDGGDKKYSIGLDIGTNSVGWAVITDEYKVPSKKFKVLGNTDRHSIKKNLIGALLFDSGETAEATRLKRTARRRYTRRKNRICYLQEIFSNEMAKVDDSFFHRLEESFLVEEDKKHERHPIFGNIVDEVAYHEKYPTIYHLRKKLVDSTDKADLRLIYLALAHMIKFRGHFLIEGDLNPDNSDVDKLFIQLVQTYNQLFEENPINASGVDAKAILSARLSKSRRLENLIAQLPGEKKNGLFGNLIALSLGLTPNFKSNFDLAEDAKLQLSKDTYDDDLDNLLAQIGDQYADLFLAAKNLSDAILLSDILRVNTEITKAPLSASMIKRYDEHHQDLTLLKALVRQQLPEKYKEIFFDQSKNGYAGYIDGGASQEEFYKFIKPILEKMDGTEELLVKLNREDLLRKQRTFDNGSIPHQIHLGELHAILRRQEDFYPFLKDNREKIEKILTFRIPYYVGPLARGNSRFAWMTRKSEETITPWNFEEVVDKGASAQSFIERMTNFDKNLPNEKVLPKHSLLYEYFTVYNELTKVKYVTEGMRKPAFLSGEQKKAIVDLLFKTNRKVTVKQLKEDYFKKIECFDSVEISGVEDRFNASLGTYHDLLKIIKDKDFLDNEENEDILEDIVLTLTLFEDREMIEERLKTYAHLFDDKVMKQLKRRRYTGWGRLSRKLINGIRDKQSGKTILDFLKSDGFANRNFMQLIHDDSLTFKEDIQKAQVSGQGDSLHEHIANLAGSPAIKKGILQTVKVVDELVKVMGRHKPENIVIEMARENQTTQKGQKNSRERMKRIEEGIKELGSQILKEHPVENTQLQNEKLYLYYLQNGRDMYVDQELDINRLSDYDVDHIVPQSFLKDDSIDNKVLTRSDKARGKSDNVPSEEVVKKMKNYWRQLLNAKLITQRKFDNLTKAERGGLSELDKAGFIKRQLVETRQITKHVAQILDSRMNTKYDENDKLIREVKVITLKSKLVSDFRKDFQFYKVREINNYHHAHDAYLNAVVGTALIKKYPKLESEFVYGDYKVYDVRKMIAKSEQEIGKATAKYFFYSNIMNFFKTEITLANGEIRKRPLIETNGETGEIVWDKGRDFATVRKVLSMPQVNIVKKTEVQTGGFSKESILPKRNSDKLIARKKDWDPKKYGGFDSPTVAYSVLVVAKVEKGKSKKLKSVKELLGITIMERSSFEKNPIDFLEAKGYKEVKKDLIIKLPKYSLFELENGRKRMLASAGELQKGNELALPSKYVNFLYLASHYEKLKGSPEDNEQKQLFVEQHKHYLDEIIEQISEFSKRVILADANLDKVLSAYNKHRDKPIREQAENIIHLFTLTNLGAPAAFKYFDTTIDRKRYTSTKEVLDATLIHQSITGLYETRIDLSQLGGDGGGGSGGSGGSGGSGGSGGSGGTAPLEEEYRLFLEAPIQNVTLLEQWKREIPKVWAEINPPGLASTQAPIHVQLLSTALPVRVRQYPITLEAKRSLRETIRKFRAAGILRPVHSPWNTPLLPVRKSGTSEYRMVQDLREVNKRVETIHPTVPNPYTLLSLLPPDRIWYSVLDLKDAFFCIPLAPESQLIFAFEWADAEEGESGQLTWTRLPQGFKNSPTLFNEALNRDLQGFRLDHPSVSLLQYVDDLLIAADTQAACLSATRDLLMTLAELGYRVSGKKAQLCQEEVTYLGFKIHKGSRSLSNSRTQAILQIPVPKTKRQVREFLGTIGYCRLWIPGFAELAQPLYAATRPGNDPLVWGEKEEEAFQSLKLALTQPPALALPSLDKPFQLFVEETSGAAKGVLTQALGPWKRPVAYLSKRLDPVAAGWPRCLRAIAAAALLTREASKLTFGQDIEITSSHNLESLLRSPPDKWLTNARITQYQVLLLDPPRVRFKQTAALNPATLLPETDDTLPIHHCLDTLDSLTSTRPDLTDQPLAQAEATLFTDGSSYIRDGKRYAGAAVVTLDSVIWAEPLPIGTSAQKAELIALTKALEWSKDKSVNIYTDSRYAFATLHVHGMIYRERGWLTAGGKAIKNAPEILALLTAVWLPKRVAVMHCKGHQKDDAPTSTGNRRADEVAREVAIRPLSTQATISAGKRTADGSEFEKRTADGSEFESPKKKAKVE

SEQ ID NO: 6078 - protein, 2105 aa, synthetic construct
MPAAKRVKLDGGDKKYSIGLDIGTNSVGWAVITDEYKVPSKKFKVLGNTDRHSIKKNLIGALLFDSGETAEATRLKRTARRRYTRRKNRICYLQEIFSNEMAKVDDSFFHRLEESFLVEEDKKHERHPIFGNIVDEVAYHEKYPTIYHLRKKLVDSTDKADLRLIYLALAHMIKFRGHFLIEGDLNPDNSDVDKLFIQLVQTYNQLFEENPINASGVDAKAILSARLSKSRRLENLIAQLPGEKKNGLFGNLIALSLGLTPNFKSNFDLAEDAKLQLSKDTYDDDLDNLLAQIGDQYADLFLAAKNLSDAILLSDILRVNTEITKAPLSASMIKRYDEHHQDLTLLKALVRQQLPEKYKEIFFDQSKNGYAGYIDGGASQEEFYKFIKPILEKMDGTEELLVKLNREDLLRKQRTFDNGSIPHQIHLGELHAILRRQEDFYPFLKDNREKIEKILTFRIPYYVGPLARGNSRFAWMTRKSEETITPWNFEEVVDKGASAQSFIERMTNFDKNLPNEKVLPKHSLLYEYFTVYNELTKVKYVTEGMRKPAFLSGEQKKAIVDLLFKTNRKVTVKQLKEDYFKKIECFDSVEISGVEDRFNASLGTYHDLLKIIKDKDFLDNEENEDILEDIVLTLTLFEDREMIEERLKTYAHLFDDKVMKQLKRRRYTGWGRLSRKLINGIRDKQSGKTILDFLKSDGFANRNFMQLIHDDSLTFKEDIQKAQVSGQGDSLHEHIANLAGSPAIKKGILQTVKVVDELVKVMGRHKPENIVIEMARENQTTQKGQKNSRERMKRIEEGIKELGSQILKEHPVENTQLQNEKLYLYYLQNGRDMYVDQELDINRLSDYDVDHIVPQSFLKDDSIDNKVLTRSDKARGKSDNVPSEEVVKKMKNYWRQLLNAKLITQRKFDNLTKAERGGLSELDKAGFIKRQLVETRQITKHVAQILDSRMNTKYDENDKLIREVKVITLKSKLVSDFRKDFQFYKVREINNYHHAHDAYLNAVVGTALIKKYPKLESEFVYGDYKVYDVRKMIAKSEQEIGKATAKYFFYSNIMNFFKTEITLANGEIRKRPLIETNGETGEIVWDKGRDFATVRKVLSMPQVNIVKKTEVQTGGFSKESILPKRNSDKLIARKKDWDPKKYGGFDSPTVAYSVLVVAKVEKGKSKKLKSVKELLGITIMERSSFEKNPIDFLEAKGYKEVKKDLIIKLPKYSLFELENGRKRMLASAGELQKGNELALPSKYVNFLYLASHYEKLKGSPEDNEQKQLFVEQHKHYLDEIIEQISEFSKRVILADANLDKVLSAYNKHRDKPIREQAENIIHLFTLTNLGAPAAFKYFDTTIDRKRYTSTKEVLDATLIHQSITGLYETRIDLSQLGGDGGGGSGGSGGSGGSGGSGGSGGTAPLEEEYRLFLEAPIQNVTLLEQWKREIPKVWAEINPPGLASTQAPIHVQLLSTALPVRVRQYPITLEAKRSLRETIRKFRAAGILRPVHSPWNTPLLPVRKSGTSEYRMVQDLREVNKRVETIHPTVPNPYTLLSLLPPDRIWYSVLDLKDAFFCIPLAPESQLIFAFEWADAEEGESGQLTWTRLPQGFKNSPTLFNEALNRDLQGFRLDHPSVSLLQYVDDLLIAADTQAACLSATRDLLMTLAELGYRVSGKKAQLCQEEVTYLGFKIHKGSRSLSNSRTQAILQIPVPKTKRQVREFLGKIGYCRLFIPGFAELAQPLYAATRPGNDPLVWGEKEEEAFQSLKLALTQPPALALPSLDKPFQLFVEETSGAAKGVLTQALGPWKRPVAYLSKRLDPVAAGWPRCLRAIAAAALLTREASKLTFGQDIEITSSHNLESLLRSPPDKWLTNARITQYQVLLLDPPRVRFKQTAALNPATLLPETDDTLPIHHCLDTLDSLTSTRPDLTDQPLAQAEATLFTDGSSYIRDGKRYAGAAVVTLDSVIWAEPLPIGTSAQKAELIALTKALEWSKDKSVNIYTDSRYAFATLHVHGMIYRERGWLTAGGKAIKNAPEILALLTAVWLPKRVAVMHCKGHQKDDAPTSTGNRRADEVAREVAIRPLSTQATISAGKRTADGSEFEKRTADGSEFESPKKKAKVE

SEQ ID NO: 6079 - protein, 2109 aa, synthetic construct
MPAAKRVKLDGGDKKYSIGLDIGTNSVGWAVITDEYKVPSKKFKVLGNTDRHSIKKNLIGALLFDSGETAEATRLKRTARRRYTRRKNRICYLQEIFSNEMAKVDDSFFHRLEESFLVEEDKKHERHPIFGNIVDEVAYHEKYPTIYHLRKKLVDSTDKADLRLIYLALAHMIKFRGHFLIEGDLNPDNSDVDKLFIQLVQTYNQLFEENPINASGVDAKAILSARLSKSRRLENLIAQLPGEKKNGLFGNLIALSLGLTPNFKSNFDLAEDAKLQLSKDTYDDDLDNLLAQIGDQYADLFLAAKNLSDAILLSDILRVNTEITKAPLSASMIKRYDEHHQDLTLLKALVRQQLPEKYKEIFFDQSKNGYAGYIDGGASQEEFYKFIKPILEKMDGTEELLVKLNREDLLRKQRTFDNGSIPHQIHLGELHAILRRQEDFYPFLKDNREKIEKILTFRIPYYVGPLARGNSRFAWMTRKSEETITPWNFEEVVDKGASAQSFIERMTNFDKNLPNEKVLPKHSLLYEYFTVYNELTKVKYVTEGMRKPAFLSGEQKKAIVDLLFKTNRKVTVKQLKEDYFKKIECFDSVEISGVEDRFNASLGTYHDLLKIIKDKDFLDNEENEDILEDIVLTLTLFEDREMIEERLKTYAHLFDDKVMKQLKRRRYTGWGRLSRKLINGIRDKQSGKTILDFLKSDGFANRNFMQLIHDDSLTFKEDIQKAQVSGQGDSLHEHIANLAGSPAIKKGILQTVKVVDELVKVMGRHKPENIVIEMARENQTTQKGQKNSRERMKRIEEGIKELGSQILKEHPVENTQLQNEKLYLYYLQNGRDMYVDQELDINRLSDYDVDHIVPQSFLKDDSIDNKVLTRSDKARGKSDNVPSEEVVKKMKNYWRQLLNAKLITQRKFDNLTKAERGGLSELDKAGFIKRQLVETRQITKHVAQILDSRMNTKYDENDKLIREVKVITLKSKLVSDFRKDFQFYKVREINNYHHAHDAYLNAVVGTALIKKYPKLESEFVYGDYKVYDVRKMIAKSEQEIGKATAKYFFYSNIMNFFKTEITLANGEIRKRPLIETNGETGEIVWDKGRDFATVRKVLSMPQVNIVKKTEVQTGGFSKESILPKRNSDKLIARKKDWDPKKYGGFDSPTVAYSVLVVAKVEKGKSKKLKSVKELLGITIMERSSFEKNPIDFLEAKGYKEVKKDLIIKLPKYSLFELENGRKRMLASAGELQKGNELALPSKYVNFLYLASHYEKLKGSPEDNEQKQLFVEQHKHYLDEIIEQISEFSKRVILADANLDKVLSAYNKHRDKPIREQAENIIHLFTLTNLGAPAAFKYFDTTIDRKRYTSTKEVLDATLIHQSITGLYETRIDLSQLGGDGGGGSGGSGGSGGSGGSGGSGGTVSLQDEHRLFDIPVTTSLPDVWLQDFPQAWAETGGLGRAKCQAPIIIDLKPTAVPVSIKQYPMSLEAHMGIRQHIIKFLELGVLRPCRSPWNTPLLPVKKPGTQDYRPVQDLREINKRTVDIHPTVPNPYNLLSTLKPDYSWYTVLDLKDAFFCLPLAPQSQELFAFEWKDPERGISGQLTWTRLPQGFKNSPTLFNEALHRDLTDFRTQHPEVTLLQYVDDLLLAAPTKKACTQGTRHLLQELGEKGYRASAKKAQICQTKVTYLGYILSEGKRWLTPGRIETVARIPPPRNPREVREFLGTAGFCRLWIPGFAELAAPLYALTKPSTPFTWQTEHQLAFEALKKALLSAPALGLPDTSKPFTLFLDERQGIAKGVLTQKLGPWKRPVAYLSKKLDPVAAGWPPCLRIMAATAMLVKDSAKLTLGQPLTVITPHTLEAIVRQPPDRWITNARLTHYQALLLDTDRVQFGPPVTLNPATLLPVPENQPSPHDCRQVLAETHGTREDLKDQELPDADHTWYTDGSSYLDSGTRRAGAAVVDGHNTIWAQSLPPGTSAQKAELIALTKALELSKGKKANIYTDSRYAFATAHTHGSIYERRGWLTSEGKEIKNKAEIIALLKALFLPQEVAIIHCPGHQKGQDPVAVGNRQADRVARQAAMAEVLTLATEPDNTSHITAGKRTADGSEFEKRTADGSEFESPKKKAKVE

SEQ ID NO: 6080 - protein, 2094 aa, synthetic construct
MPAAKRVKLDGGDKKYSIGLDIGTNSVGWAVITDEYKVPSKKFKVLGNTDRHSIKKNLIGALLFDSGETAEATRLKRTARRRYTRRKNRICYLQEIFSNEMAKVDDSFFHRLEESFLVEEDKKHERHPIFGNIVDEVAYHEKYPTIYHLRKKLVDSTDKADLRLIYLALAHMIKFRGHFLIEGDLNPDNSDVDKLFIQLVQTYNQLFEENPINASGVDAKAILSARLSKSRRLENLIAQLPGEKKNGLFGNLIALSLGLTPNFKSNFDLAEDAKLQLSKDTYDDDLDNLLAQIGDQYADLFLAAKNLSDAILLSDILRVNTEITKAPLSASMIKRYDEHHQDLTLLKALVRQQLPEKYKEIFFDQSKNGYAGYIDGGASQEEFYKFIKPILEKMDGTEELLVKLNREDLLRKQRTFDNGSIPHQIHLGELHAILRRQEDFYPFLKDNREKIEKILTFRIPYYVGPLARGNSRFAWMTRKSEETITPWNFEEVVDKGASAQSFIERMTNFDKNLPNEKVLPKHSLLYEYFTVYNELTKVKYVTEGMRKPAFLSGEQKKAIVDLLFKTNRKVTVKQLKEDYFKKIECFDSVEISGVEDRFNASLGTYHDLLKIIKDKDFLDNEENEDILEDIVLTLTLFEDREMIEERLKTYAHLFDDKVMKQLKRRRYTGWGRLSRKLINGIRDKQSGKTILDFLKSDGFANRNFMQLIHDDSLTFKEDIQKAQVSGQGDSLHEHIANLAGSPAIKKGILQTVKVVDELVKVMGRHKPENIVIEMARENQTTQKGQKNSRERMKRIEEGIKELGSQILKEHPVENTQLQNEKLYLYYLQNGRDMYVDQELDINRLSDYDVDHIVPQSFLKDDSIDNKVLTRSDKARGKSDNVPSEEVVKKMKNYWRQLLNAKLITQRKFDNLTKAERGGLSELDKAGFIKRQLVETRQITKHVAQILDSRMNTKYDENDKLIREVKVITLKSKLVSDFRKDFQFYKVREINNYHHAHDAYLNAVVGTALIKKYPKLESEFVYGDYKVYDVRKMIAKSEQEIGKATAKYFFYSNIMNFFKTEITLANGEIRKRPLIETNGETGEIVWDKGRDFATVRKVLSMPQVNIVKKTEVQTGGFSKESILPKRNSDKLIARKKDWDPKKYGGFDSPTVAYSVLVVAKVEKGKSKKLKSVKELLGITIMERSSFEKNPIDFLEAKGYKEVKKDLIIKLPKYSLFELENGRKRMLASAGELQKGNELALPSKYVNFLYLASHYEKLKGSPEDNEQKQLFVEQHKHYLDEIIEQISEFSKRVILADANLDKVLSAYNKHRDKPIREQAENIIHLFTLTNLGAPAAFKYFDTTIDRKRYTSTKEVLDATLIHQSITGLYETRIDLSQLGGDGGGGSGGSGGSGGSGGSGGSGGVPWILKKPLELTIKLDLEEQQGTLLNNSILSKKGKEELKQLFEKYSALWQSWENQVGHRRIRPHKIATGTVKPTPQKQYHINPKAKPDIQIVINDLLKQGVLIQKESTMNTPVYPVPKPNGRWRMVLDYRAVNKVTPLIAVQNQHSYGILGSLFKGRYKTTIDLSNGFWAHPIVPEDYWITAFTWQGKQYCWTVLPQGFLNSPGLFTGDVVDLLQGIPNVEVYVDDVYISHDSEKEHLEYLDILFNRLKEAGYIISLKKSNIANSIVDFLGFQITNEGRGLTDTFKEKLENITAPTTLKQLQSILGLLNFARNFIPDFTELIAPLYALIPKSTKNYVPWQIEHSTTLETLITKLNGAEYLQGRKGDKTLIMKVNASYTTGYIRYYNEGEKKPISYVSIVFSKTELKFTELEKLLTTVHKGLLKALDLSMGQNIHVYSPIVSMQNIQKTPQTAKKALASRWLSWLSYLEDPRIRFFYDPQMPALKDLPAVDTGKDNKKHPSNFQHIFYTDGSAITSPTKEGHLNAGMGIVYFINKDGNLQKQQEWSISLGNHTAQFAEIAAFEFALKKCLPLGGNILVVTDSNYVAKAYNEELDVWASNGFVNNRKKPLKHISKWKSVADLKRLRPDVVVTHEPGHQKLDSSPHAYGNNLADQLATQASFKVHAGKRTADGSEFEKRTADGSEFESPKKKAKVE

SEQ ID NO: 6081 - protein, 2180 aa, synthetic construct
MPAAKRVKLDGGDKKYSIGLDIGTNSVGWAVITDEYKVPSKKFKVLGNTDRHSIKKNLIGALLFDSGETAEATRLKRTARRRYTRRKNRICYLQEIFSNEMAKVDDSFFHRLEESFLVEEDKKHERHPIFGNIVDEVAYHEKYPTIYHLRKKLVDSTDKADLRLIYLALAHMIKFRGHFLIEGDLNPDNSDVDKLFIQLVQTYNQLFEENPINASGVDAKAILSARLSKSRRLENLIAQLPGEKKNGLFGNLIALSLGLTPNFKSNFDLAEDAKLQLSKDTYDDDLDNLLAQIGDQYADLFLAAKNLSDAILLSDILRVNTEITKAPLSASMIKRYDEHHQDLTLLKALVRQQLPEKYKEIFFDQSKNGYAGYIDGGASQEEFYKFIKPILEKMDGTEELLVKLNREDLLRKQRTFDNGSIPHQIHLGELHAILRRQEDFYPFLKDNREKIEKILTFRIPYYVGPLARGNSRFAWMTRKSEETITPWNFEEVVDKGASAQSFIERMTNFDKNLPNEKVLPKHSLLYEYFTVYNELTKVKYVTEGMRKPAFLSGEQKKAIVDLLFKTNRKVTVKQLKEDYFKKIECFDSVEISGVEDRFNASLGTYHDLLKIIKDKDFLDNEENEDILEDIVLTLTLFEDREMIEERLKTYAHLFDDKVMKQLKRRRYTGWGRLSRKLINGIRDKQSGKTILDFLKSDGFANRNFMQLIHDDSLTFKEDIQKAQVSGQGDSLHEHIANLAGSPAIKKGILQTVKVVDELVKVMGRHKPENIVIEMARENQTTQKGQKNSRERMKRIEEGIKELGSQILKEHPVENTQLQNEKLYLYYLQNGRDMYVDQELDINRLSDYDVDHIVPQSFLKDDSIDNKVLTRSDKARGKSDNVPSEEVVKKMKNYWRQLLNAKLITQRKFDNLTKAERGGLSELDKAGFIKRQLVETRQITKHVAQILDSRMNTKYDENDKLIREVKVITLKSKLVSDFRKDFQFYKVREINNYHHAHDAYLNAVVGTALIKKYPKLESEFVYGDYKVYDVRKMIAKSEQEIGKATAKYFFYSNIMNFFKTEITLANGEIRKRPLIETNGETGEIVWDKGRDFATVRKVLSMPQVNIVKKTEVQTGGFSKESILPKRNSDKLIARKKDWDPKKYGGFDSPTVAYSVLVVAKVEKGKSKKLKSVKELLGITIMERSSFEKNPIDFLEAKGYKEVKKDLIIKLPKYSLFELENGRKRMLASAGELQKGNELALPSKYVNFLYLASHYEKLKGSPEDNEQKQLFVEQHKHYLDEIIEQISEFSKRVILADANLDKVLSAYNKHRDKPIREQAENIIHLFTLTNLGAPAAFKYFDTTIDRKRYTSTKEVLDATLIHQSITGLYETRIDLSQLGGDGGGGSGGSGGSGGSGGSGGSGGMDLLKPLTVERKGVKIKGYWNSQADITCVPKDLLQGEEPVRQQNVTTIHGTQEGDVYYVNLKIDGRRINTEVIGTTLDYAIITPGDVPWILKKPLELTIKLDLEEQQGTLLNNSILSKKGKEELKQLFEKYSALWQSWENQVGHRRIRPHKIATGTVKPTPQKQYHINPKAKPDIQIVINDLLKQGVLIQKESTMNTPVYPVPKPNGRWRMVLDYRAVNKVTPLIAVQNQHSYGILGSLFKGRYKTTIDLSNGFWAHPIVPEDYWITAFTWQGKQYCWTVLPQGFLNSPGLFNGDVVDLLQGIPNVEVYVDDVYISHDSEKEHLEYLDILFNRLKEAGYIISLKKSNIANSIVDFLGFQITNEGRGLTDTFKEKLENITAPTTLKQLQSILGLLNFARNFIPDFTELIAPLYALIPKSPKNYVPWQIEHSTTLETLITKLNGAEYLQGRKGDKTLIMKVNASYTTGYIRYYNEGEKKPISYVSIVFSKTELKFTELEKLLTTVHKGLLKALDLSMGQNIHVYSPIVSMQNIQKTPQTAKKALASRWLSWLSYLEDPRIRFFYDPQMPALKDLPAVDTGKDNKKHPSNFQHIFYTDGSAITSPTKEGHLNAGMGIVYFINKDGNLQKQQEWSISLGNHTAQFAEIAAFEFALKKCLPLGGNILVVTDSNYVAKAYNEELDVWASNGFVNNRKKPLKHISKWKSVADLKRLRPDVVVTHEPGHQKLDSSPHAYGNNLADQLATQASFKVHAGKRTADGSEFEKRTADGSEFESPKKKAKVE

SEQ ID NO: 6082 - protein, 2102 aa, synthetic construct
MPAAKRVKLDGGDKKYSIGLDIGTNSVGWAVITDEYKVPSKKFKVLGNTDRHSIKKNLIGALLFDSGETAEATRLKRTARRRYTRRKNRICYLQEIFSNEMAKVDDSFFHRLEESFLVEEDKKHERHPIFGNIVDEVAYHEKYPTIYHLRKKLVDSTDKADLRLIYLALAHMIKFRGHFLIEGDLNPDNSDVDKLFIQLVQTYNQLFEENPINASGVDAKAILSARLSKSRRLENLIAQLPGEKKNGLFGNLIALSLGLTPNFKSNFDLAEDAKLQLSKDTYDDDLDNLLAQIGDQYADLFLAAKNLSDAILLSDILRVNTEITKAPLSASMIKRYDEHHQDLTLLKALVRQQLPEKYKEIFFDQSKNGYAGYIDGGASQEEFYKFIKPILEKMDGTEELLVKLNREDLLRKQRTFDNGSIPHQIHLGELHAILRRQEDFYPFLKDNREKIEKILTFRIPYYVGPLARGNSRFAWMTRKSEETITPWNFEEVVDKGASAQSFIERMTNFDKNLPNEKVLPKHSLLYEYFTVYNELTKVKYVTEGMRKPAFLSGEQKKAIVDLLFKTNRKVTVKQLKEDYFKKIECFDSVEISGVEDRFNASLGTYHDLLKIIKDKDFLDNEENEDILEDIVLTLTLFEDREMIEERLKTYAHLFDDKVMKQLKRRRYTGWGRLSRKLINGIRDKQSGKTILDFLKSDGFANRNFMQLIHDDSLTFKEDIQKAQVSGQGDSLHEHIANLAGSPAIKKGILQTVKVVDELVKVMGRHKPENIVIEMARENQTTQKGQKNSRERMKRIEEGIKELGSQILKEHPVENTQLQNEKLYLYYLQNGRDMYVDQELDINRLSDYDVDHIVPQSFLKDDSIDNKVLTRSDKARGKSDNVPSEEVVKKMKNYWRQLLNAKLITQRKFDNLTKAERGGLSELDKAGFIKRQLVETRQITKHVAQILDSRMNTKYDENDKLIREVKVITLKSKLVSDFRKDFQFYKVREINNYHHAHDAYLNAVVGTALIKKYPKLESEFVYGDYKVYDVRKMIAKSEQEIGKATAKYFFYSNIMNFFKTEITLANGEIRKRPLIETNGETGEIVWDKGRDFATVRKVLSMPQVNIVKKTEVQTGGFSKESILPKRNSDKLIARKKDWDPKKYGGFDSPTVAYSVLVVAKVEKGKSKKLKSVKELLGITIMERSSFEKNPIDFLEAKGYKEVKKDLIIKLPKYSLFELENGRKRMLASAGELQKGNELALPSKYVNFLYLASHYEKLKGSPEDNEQKQLFVEQHKHYLDEIIEQISEFSKRVILADANLDKVLSAYNKHRDKPIREQAENIIHLFTLTNLGAPAAFKYFDTTIDRKRYTSTKEVLDATLIHQSITGLYETRIDLSQLGGDGGGGSGGSGGSGGSGGSGGSGGTLQLEEEYRLFEPESTQKQEMDIWLKNFPQAWAETGGMGTAHCQAPVLIQLKATATPISIRQYPMPHEAYQGIKPHIRRMLDQGILKPCQSPWNTPLLPVKKPGTEDYRPVQDLREVNKRVEDIHPTVPNPYNLLSTLPPSHPWYTVLDLKDAFFCLRLHSESQLLFAFEWRDPEIGLSGQLTWTRLPQGFKNSPTLFNEALHSDLADFRVRYPALVLLQYVDDLLLAAATRTECLEGTKALLETLGNKGYRASAKKAQICLQEVTYLGYSLKDGQRWLTKARKEAILSIPVPKNSRQVREFLGKAGYCRLFIPGFAELAAPLYPLTRPGTLFQWGTEQQLAFEDIKKALLSSPALGLPDITKPFELFIDENSGFAKGVLVQKLGPWKRPVAYLSKKLDTVASGWPPCLRMVAAIAILVKDAGKLTLGQPLTILTSHPVEALVRQPPNKWLSNARMTHYQAMLLDAERVHFGPTVSLNPATLLPLPSGGNHHDCLQILAETHGTRPDLTDQPLPDADLTWYTDGSSFIRNGEREAGAAVTTESEVIWAAPLPPGTSAQRAELIALTQALKMAEGKKLTVYTDSRYAFATTHVHGEIYRRRGWLTSEGKEIKNKNEILALLEALFLPKRLSIIHCPGHQKGDSPQAKGNRLADDTAKKAATETHSSLTVLPAGKRTADGSEFEKRTADGSEFESPKKKAKVE

SEQ ID NO: 6083 - protein, 2094 aa, synthetic construct
MPAAKRVKLDGGDKKYSIGLDIGTNSVGWAVITDEYKVPSKKFKVLGNTDRHSIKKNLIGALLFDSGETAEATRLKRTARRRYTRRKNRICYLQEIFSNEMAKVDDSFFHRLEESFLVEEDKKHERHPIFGNIVDEVAYHEKYPTIYHLRKKLVDSTDKADLRLIYLALAHMIKFRGHFLIEGDLNPDNSDVDKLFIQLVQTYNQLFEENPINASGVDAKAILSARLSKSRRLENLIAQLPGEKKNGLFGNLIALSLGLTPNFKSNFDLAEDAKLQLSKDTYDDDLDNLLAQIGDQYADLFLAAKNLSDAILLSDILRVNTEITKAPLSASMIKRYDEHHQDLTLLKALVRQQLPEKYKEIFFDQSKNGYAGYIDGGASQEEFYKFIKPILEKMDGTEELLVKLNREDLLRKQRTFDNGSIPHQIHLGELHAILRRQEDFYPFLKDNREKIEKILTFRIPYYVGPLARGNSRFAWMTRKSEETITPWNFEEVVDKGASAQSFIERMTNFDKNLPNEKVLPKHSLLYEYFTVYNELTKVKYVTEGMRKPAFLSGEQKKAIVDLLFKTNRKVTVKQLKEDYFKKIECFDSVEISGVEDRFNASLGTYHDLLKIIKDKDFLDNEENEDILEDIVLTLTLFEDREMIEERLKTYAHLFDDKVMKQLKRRRYTGWGRLSRKLINGIRDKQSGKTILDFLKSDGFANRNFMQLIHDDSLTFKEDIQKAQVSGQGDSLHEHIANLAGSPAIKKGILQTVKVVDELVKVMGRHKPENIVIEMARENQTTQKGQKNSRERMKRIEEGIKELGSQILKEHPVENTQLQNEKLYLYYLQNGRDMYVDQELDINRLSDYDVDHIVPQSFLKDDSIDNKVLTRSDKARGKSDNVPSEEVVKKMKNYWRQLLNAKLITQRKFDNLTKAERGGLSELDKAGFIKRQLVETRQITKHVAQILDSRMNTKYDENDKLIREVKVITLKSKLVSDFRKDFQFYKVREINNYHHAHDAYLNAVVGTALIKKYPKLESEFVYGDYKVYDVRKMIAKSEQEIGKATAKYFFYSNIMNFFKTEITLANGEIRKRPLIETNGETGEIVWDKGRDFATVRKVLSMPQVNIVKKTEVQTGGFSKESILPKRNSDKLIARKKDWDPKKYGGFDSPTVAYSVLVVAKVEKGKSKKLKSVKELLGITIMERSSFEKNPIDFLEAKGYKEVKKDLIIKLPKYSLFELENGRKRMLASAGELQKGNELALPSKYVNFLYLASHYEKLKGSPEDNEQKQLFVEQHKHYLDEIIEQISEFSKRVILADANLDKVLSAYNKHRDKPIREQAENIIHLFTLTNLGAPAAFKYFDTTIDRKRYTSTKEVLDATLIHQSITGLYETRIDLSQLGGDGGGGSGGSGGSGGSGGSGGSGGVPWLTQQPLQLTILVPLQEYQEKILSKTALPEDQKQQLKTLFVKYDNLWQHWENQVGHRKIRPHNIATGDYPPRPQKQYPINPKAKPSIQIVIDDLLKQGVLTPQNSTMNTPVYPVPKPDGRWRMVLDYREVNKTIPLTAAQNQHSAGILATIVRQKYKTTLDLANGFWAHPITPESYWLTAFTWQGKQYCWTRLPQGFLNSPALFNADVVDLLKEIPNVQVYVDDIYLSHDDPKEHVQQLEKVFQILLQAGYVVSLKKSEIGQKTVEFLGFNITKEGRGLTDTFKTKLLNITPPKDLKQLQSILGLLNFARNFIPNFAELVQPLYNLIAPAKGKYIEWSEENTKQLNMVIEALNTASNLEERLPEQRLVIKVNTSPSAGYVRYYNETGKKPIMYLNYVFSKAELKFSMLEKLLTTMHKALIKAMDLAMGQEILVYSPIVSMTKIQKTPLPERKALPIRWITWMTYLEDPRIQFHYDKTLPELKHIPDVYTSSQSPVKHPSQYEGVFYTDGSAIKSPDPTKSNNAGMGIVHATYKPEYQVLNQWSIPLGNHTAQMAEIAAVEFACKKALKIPGPVLVITDSFYVAESANKELPYWKSNGFVNNKKKPLKHISKWKSIAECLSMKPDITIQHEKGISLQIPVFILKGNALADKLATQGSYVVNAGKRTADGSEFEKRTADGSEFESPKKKAKVE

SEQ ID NO: 6084 - protein, 2101 aa, synthetic construct
MPAAKRVKLDGGDKKYSIGLDIGTNSVGWAVITDEYKVPSKKFKVLGNTDRHSIKKNLIGALLFDSGETAEATRLKRTARRRYTRRKNRICYLQEIFSNEMAKVDDSFFHRLEESFLVEEDKKHERHPIFGNIVDEVAYHEKYPTIYHLRKKLVDSTDKADLRLIYLALAHMIKFRGHFLIEGDLNPDNSDVDKLFIQLVQTYNQLFEENPINASGVDAKAILSARLSKSRRLENLIAQLPGEKKNGLFGNLIALSLGLTPNFKSNFDLAEDAKLQLSKDTYDDDLDNLLAQIGDQYADLFLAAKNLSDAILLSDILRVNTEITKAPLSASMIKRYDEHHQDLTLLKALVRQQLPEKYKEIFFDQSKNGYAGYIDGGASQEEFYKFIKPILEKMDGTEELLVKLNREDLLRKQRTFDNGSIPHQIHLGELHAILRRQEDFYPFLKDNREKIEKILTFRIPYYVGPLARGNSRFAWMTRKSEETITPWNFEEVVDKGASAQSFIERMTNFDKNLPNEKVLPKHSLLYEYFTVYNELTKVKYVTEGMRKPAFLSGEQKKAIVDLLFKTNRKVTVKQLKEDYFKKIECFDSVEISGVEDRFNASLGTYHDLLKIIKDKDFLDNEENEDILEDIVLTLTLFEDREMIEERLKTYAHLFDDKVMKQLKRRRYTGWGRLSRKLINGIRDKQSGKTILDFLKSDGFANRNFMQLIHDDSLTFKEDIQKAQVSGQGDSLHEHIANLAGSPAIKKGILQTVKVVDELVKVMGRHKPENIVIEMARENQTTQKGQKNSRERMKRIEEGIKELGSQILKEHPVENTQLQNEKLYLYYLQNGRDMYVDQELDINRLSDYDVDHIVPQSFLKDDSIDNKVLTRSDKARGKSDNVPSEEVVKKMKNYWRQLLNAKLITQRKFDNLTKAERGGLSELDKAGFIKRQLVETRQITKHVAQILDSRMNTKYDENDKLIREVKVITLKSKLVSDFRKDFQFYKVREINNYHHAHDAYLNAVVGTALIKKYPKLESEFVYGDYKVYDVRKMIAKSEQEIGKATAKYFFYSNIMNFFKTEITLANGEIRKRPLIETNGETGEIVWDKGRDFATVRKVLSMPQVNIVKKTEVQTGGFSKESILPKRNSDKLIARKKDWDPKKYGGFDSPTVAYSVLVVAKVEKGKSKKLKSVKELLGITIMERSSFEKNPIDFLEAKGYKEVKKDLIIKLPKYSLFELENGRKRMLASAGELQKGNELALPSKYVNFLYLASHYEKLKGSPEDNEQKQLFVEQHKHYLDEIIEQISEFSKRVILADANLDKVLSAYNKHRDKPIREQAENIIHLFTLTNLGAPAAFKYFDTTIDRKRYTSTKEVLDATLIHQSITGLYETRIDLSQLGGDGGGGSGGSGGSGGSGGSGGSGGVLNLEEEYRLHEKPVPSSIDPSWLQLFPTVWAERAGMGLANQVPPVVVELRSGASPVAVRQYPMSKEAREGIRPHIQKFLDLGVLVPCRSPWNTPLLPVKKPGTNDYRPVQDLREINKRVQDIHPTVPNPYNLLSSLPPSYTWYSVLDLKDAFFCLRLHPNSQPLFAFEWKDPEKGNTGQLTWTRLPQGFKNSPTLFNEALHRDLAPFRALNPQVVLLQYVDDLLVAAPTYEDCKKGTQKLLQELSKLGYRVSAKKAQLCQREVTYLGYLLKEGKRWLTPARKATVMKIPVPTTPRQVREFLGKAGFCRLFIPGFASLAAPLYPLTKPSIPFIWTEEHQQAFDHIKKALLSAPALALPDLTKPFTLYIDERAGVARGVLTQTLGPWRRPVAYLSKKLDPVASGWPTCLKAVAAVALLLKDADKLTLGQNVTVIASHSLESIVRQPPDRWMTNARMTHYQSLLLNERVSFAPPAVLNPATLLPVESEATPVHRCSEILAEETGTRRDLEDQPLPGVPTWYTDGSSFITEGKRRAGAPIVDGKRTVWASSLPEGTSAQKAELVALTQALRLAEGKNINIYTDSRYAFATAHIHGAIYKQRGWLTSAGKDIKNKEEILALLEAIHLPRRVAIIHCPGHQRGSNPVATGNRRADEAAKQAALSTRVLAGTTKPAGKRTADGSEFEKRTADGSEFESPKKKAKVE

SEQ ID NO: 6085 - protein, 2020 aa, synthetic construct
MPAAKRVKLDGGDKKYSIGLDIGTNSVGWAVITDEYKVPSKKFKVLGNTDRHSIKKNLIGALLFDSGETAEATRLKRTARRRYTRRKNRICYLQEIFSNEMAKVDDSFFHRLEESFLVEEDKKHERHPIFGNIVDEVAYHEKYPTIYHLRKKLVDSTDKADLRLIYLALAHMIKFRGHFLIEGDLNPDNSDVDKLFIQLVQTYNQLFEENPINASGVDAKAILSARLSKSRRLENLIAQLPGEKKNGLFGNLIALSLGLTPNFKSNFDLAEDAKLQLSKDTYDDDLDNLLAQIGDQYADLFLAAKNLSDAILLSDILRVNTEITKAPLSASMIKRYDEHHQDLTLLKALVRQQLPEKYKEIFFDQSKNGYAGYIDGGASQEEFYKFIKPILEKMDGTEELLVKLNREDLLRKQRTFDNGSIPHQIHLGELHAILRRQEDFYPFLKDNREKIEKILTFRIPYYVGPLARGNSRFAWMTRKSEETITPWNFEEVVDKGASAQSFIERMTNFDKNLPNEKVLPKHSLLYEYFTVYNELTKVKYVTEGMRKPAFLSGEQKKAIVDLLFKTNRKVTVKQLKEDYFKKIECFDSVEISGVEDRFNASLGTYHDLLKIIKDKDFLDNEENEDILEDIVLTLTLFEDREMIEERLKTYAHLFDDKVMKQLKRRRYTGWGRLSRKLINGIRDKQSGKTILDFLKSDGFANRNFMQLIHDDSLTFKEDIQKAQVSGQGDSLHEHIANLAGSPAIKKGILQTVKVVDELVKVMGRHKPENIVIEMARENQTTQKGQKNSRERMKRIEEGIKELGSQILKEHPVENTQLQNEKLYLYYLQNGRDMYVDQELDINRLSDYDVDHIVPQSFLKDDSIDNKVLTRSDKARGKSDNVPSEEVVKKMKNYWRQLLNAKLITQRKFDNLTKAERGGLSELDKAGFIKRQLVETRQITKHVAQILDSRMNTKYDENDKLIREVKVITLKSKLVSDFRKDFQFYKVREINNYHHAHDAYLNAVVGTALIKKYPKLESEFVYGDYKVYDVRKMIAKSEQEIGKATAKYFFYSNIMNFFKTEITLANGEIRKRPLIETNGETGEIVWDKGRDFATVRKVLSMPQVNIVKKTEVQTGGFSKESILPKRNSDKLIARKKDWDPKKYGGFDSPTVAYSVLVVAKVEKGKSKKLKSVKELLGITIMERSSFEKNPIDFLEAKGYKEVKKDLIIKLPKYSLFELENGRKRMLASAGELQKGNELALPSKYVNFLYLASHYEKLKGSPEDNEQKQLFVEQHKHYLDEIIEQISEFSKRVILADANLDKVLSAYNKHRDKPIREQAENIIHLFTLTNLGAPAAFKYFDTTIDRKRYTSTKEVLDATLIHQSITGLYETRIDLSQLGGDGGGGSGGSGGSGGSGGSGGSGGAVLGLEHLPRPPQISQFPLNPERLQALQHLVRKALEAGHIEPYTGPGNNPVFPVKKANGTWRFIHDLRATNSLTIDLSSSSPGPPDLSSLPTTLAHLQTIDLRDAFFQIPLPKQFQPYFAFTVPQQCNYGPGTRYAWKVLPQGFKNSPTLFEMQLAHILQPIRQAFPQCTILQYMDDILLASPSHEDLLLLSEATMASLISHGLPVSENKTQQTPGTIKFLGQIISPNHLTYDAVPTVPIRSRWALPELQALLGEIQWVSKGTPTLRQPLHSLYCALQRHTDPRDQIYLNPSQVQSLVQLRQALSQNCRSRLVQTLPLLGAIMLTLTGTTTVVFQSKEQWPLVWLHAPLPHTSQCPWGQLLASAVLLLDKYTLQSYGLLCQTIHHNISTQTFNQFIQTSDHPSVPILLHHSHRFKNLGAQTGELWNTFLKTAAPLAPVKALMPVFTLSPVIINTAPCLFSDGSTSRAAYILWDKQILSQRSFPLPPPHKSAQRAELLGLLHGLSSARSWRCLNIFLDSKYLYHYLRTLALGTFQGRSSQAPFQALLPRLLSRKVVYLHHVRSHTNLPDPISRLNALTDALLITPVLQLAGKRTADGSEFEKRTADGSEFESPKKKAKVE

SEQ ID NO: 6086 - protein, 2016 aa, synthetic construct
MPAAKRVKLDGGDKKYSIGLDIGTNSVGWAVITDEYKVPSKKFKVLGNTDRHSIKKNLIGALLFDSGETAEATRLKRTARRRYTRRKNRICYLQEIFSNEMAKVDDSFFHRLEESFLVEEDKKHERHPIFGNIVDEVAYHEKYPTIYHLRKKLVDSTDKADLRLIYLALAHMIKFRGHFLIEGDLNPDNSDVDKLFIQLVQTYNQLFEENPINASGVDAKAILSARLSKSRRLENLIAQLPGEKKNGLFGNLIALSLGLTPNFKSNFDLAEDAKLQLSKDTYDDDLDNLLAQIGDQYADLFLAAKNLSDAILLSDILRVNTEITKAPLSASMIKRYDEHHQDLTLLKALVRQQLPEKYKEIFFDQSKNGYAGYIDGGASQEEFYKFIKPILEKMDGTEELLVKLNREDLLRKQRTFDNGSIPHQIHLGELHAILRRQEDFYPFLKDNREKIEKILTFRIPYYVGPLARGNSRFAWMTRKSEETITPWNFEEVVDKGASAQSFIERMTNFDKNLPNEKVLPKHSLLYEYFTVYNELTKVKYVTEGMRKPAFLSGEQKKAIVDLLFKTNRKVTVKQLKEDYFKKIECFDSVEISGVEDRFNASLGTYHDLLKIIKDKDFLDNEENEDILEDIVLTLTLFEDREMIEERLKTYAHLFDDKVMKQLKRRRYTGWGRLSRKLINGIRDKQSGKTILDFLKSDGFANRNFMQLIHDDSLTFKEDIQKAQVSGQGDSLHEHIANLAGSPAIKKGILQTVKVVDELVKVMGRHKPENIVIEMARENQTTQKGQKNSRERMKRIEEGIKELGSQILKEHPVENTQLQNEKLYLYYLQNGRDMYVDQELDINRLSDYDVDHIVPQSFLKDDSIDNKVLTRSDKARGKSDNVPSEEVVKKMKNYWRQLLNAKLITQRKFDNLTKAERGGLSELDKAGFIKRQLVETRQITKHVAQILDSRMNTKYDENDKLIREVKVITLKSKLVSDFRKDFQFYKVREINNYHHAHDAYLNAVVGTALIKKYPKLESEFVYGDYKVYDVRKMIAKSEQEIGKATAKYFFYSNIMNFFKTEITLANGEIRKRPLIETNGETGEIVWDKGRDFATVRKVLSMPQVNIVKKTEVQTGGFSKESILPKRNSDKLIARKKDWDPKKYGGFDSPTVAYSVLVVAKVEKGKSKKLKSVKELLGITIMERSSFEKNPIDFLEAKGYKEVKKDLIIKLPKYSLFELENGRKRMLASAGELQKGNELALPSKYVNFLYLASHYEKLKGSPEDNEQKQLFVEQHKHYLDEIIEQISEFSKRVILADANLDKVLSAYNKHRDKPIREQAENIIHLFTLTNLGAPAAFKYFDTTIDRKRYTSTKEVLDATLIHQSITGLYETRIDLSQLGGDGGGGSGGSGGSGGSGGSGGSGGGLEHLPPPPEVSQFPLNPERLQALTDLVSRALEAKHIEPYQGPGNNPIFPVKKPNGKWRFIHDLRATNSLTRDLASPSPGPPDLTSPPQDLPHLRTIDLTDAFFQIPLPAVFQPYFAFTLPQPNNHGPGTRYSWRVLPQGFKNSPTLFQQQLSHILAPVRKAFPNSLIIQYMDDILLASPALRELTALTDKVTNALTKEGLPMSLEKTQATPGSIHFLGQVISPDCITYETLPSIHVKSIWSLAELQSMLGELQWVSKGTPVLRSSLHQLYLALRGHRDPRDTIELTSTQVQALKTIQKALALNCRSRLVSQLPILALIILRPTGTTAVLFQTKQKWPLVWLHTPHPATSLRPWGQLLANAIITLDKYSLQHYGQICKSFHHNISNQALTYYLHTSDQSSVAILLQHSHRFHNLGAQPSGPWRSLLQVPQIFQNIDVLRPPFIISPVVIDHAPCLFSDGATSKAAFILWDKQVIHQQVLPLPSTCSAQAGELFGLLAGLQKSKPWPALNIFLDSKFLIGHLRRMAWGAFLGPSTQCDLHARLFPLLQGKTVYVHHVRSHTLLQDPISRLNEATDALMLAPLLPLAGKRTADGSEFEKRTADGSEFESPKKKAKVE

SEQ ID NO: 6087 - protein, 2013 aa, synthetic construct
MPAAKRVKLDGGDKKYSIGLDIGTNSVGWAVITDEYKVPSKKFKVLGNTDRHSIKKNLIGALLFDSGETAEATRLKRTARRRYTRRKNRICYLQEIFSNEMAKVDDSFFHRLEESFLVEEDKKHERHPIFGNIVDEVAYHEKYPTIYHLRKKLVDSTDKADLRLIYLALAHMIKFRGHFLIEGDLNPDNSDVDKLFIQLVQTYNQLFEENPINASGVDAKAILSARLSKSRRLENLIAQLPGEKKNGLFGNLIALSLGLTPNFKSNFDLAEDAKLQLSKDTYDDDLDNLLAQIGDQYADLFLAAKNLSDAILLSDILRVNTEITKAPLSASMIKRYDEHHQDLTLLKALVRQQLPEKYKEIFFDQSKNGYAGYIDGGASQEEFYKFIKPILEKMDGTEELLVKLNREDLLRKQRTFDNGSIPHQIHLGELHAILRRQEDFYPFLKDNREKIEKILTFRIPYYVGPLARGNSRFAWMTRKSEETITPWNFEEVVDKGASAQSFIERMTNFDKNLPNEKVLPKHSLLYEYFTVYNELTKVKYVTEGMRKPAFLSGEQKKAIVDLLFKTNRKVTVKQLKEDYFKKIECFDSVEISGVEDRFNASLGTYHDLLKIIKDKDFLDNEENEDILEDIVLTLTLFEDREMIEERLKTYAHLFDDKVMKQLKRRRYTGWGRLSRKLINGIRDKQSGKTILDFLKSDGFANRNFMQLIHDDSLTFKEDIQKAQVSGQGDSLHEHIANLAGSPAIKKGILQTVKVVDELVKVMGRHKPENIVIEMARENQTTQKGQKNSRERMKRIEEGIKELGSQILKEHPVENTQLQNEKLYLYYLQNGRDMYVDQELDINRLSDYDVDHIVPQSFLKDDSIDNKVLTRSDKARGKSDNVPSEEVVKKMKNYWRQLLNAKLITQRKFDNLTKAERGGLSELDKAGFIKRQLVETRQITKHVAQILDSRMNTKYDENDKLIREVKVITLKSKLVSDFRKDFQFYKVREINNYHHAHDAYLNAVVGTALIKKYPKLESEFVYGDYKVYDVRKMIAKSEQEIGKATAKYFFYSNIMNFFKTEITLANGEIRKRPLIETNGETGEIVWDKGRDFATVRKVLSMPQVNIVKKTEVQTGGFSKESILPKRNSDKLIARKKDWDPKKYGGFDSPTVAYSVLVVAKVEKGKSKKLKSVKELLGITIMERSSFEKNPIDFLEAKGYKEVKKDLIIKLPKYSLFELENGRKRMLASAGELQKGNELALPSKYVNFLYLASHYEKLKGSPEDNEQKQLFVEQHKHYLDEIIEQISEFSKRVILADANLDKVLSAYNKHRDKPIREQAENIIHLFTLTNLGAPAAFKYFDTTIDRKRYTSTKEVLDATLIHQSITGLYETRIDLSQLGGDGGGGSGGSGGSGGSGGSGGSGGPLGTSDSPVTHADPIDWKSEEPVWVDQWPLTQEKLSAAQQLVQEQLRLGHIEPSTSAWNSPIFVIKKKSGKWRLLQDLRKVNETMMHMGALQPGLPTPSPIPDKSYIIVIDLKDCFYTIPLAPQDCKRFAFSLPSVNFKEPMQRYQWRVLPQGMTNSPTLCQKFVATAIAPVRQRFPQLYLVHYMDDILLAHTDEHLLYQAFSILKQHLSLNGLVIADEKIQTHFPYNYLGFSLYPRVYNTQLVKLQTDHLKTLNDFQKLLGDINWIRPYLKLPTYTLQPLFDILKGDSDPASPRTLSLEGRTALQSIEEAIRQQQITYCDYQRSWGLYILPTPRAPTGVLYQDKPLRWIYLSATPTKHLLPYYELVAKIIAKGRHEAIQYFGMEPPFICVPYALEQQDWLFQFSDNWSIAFANYPGQITHHYPSDKLLQFASSHAFIFPKIVRRQPIPEATLIFTDGSSNGTAALIINHQTYYAQTSFSSAQVVELFAVHQALLTVPTSFNLFTDSSYVVGALQMIETVPIIGTTSPEVLNLFTLIQQVLHCRQHPCFFGHIRAHSTLPGALVQGNHTADVLTKQVFFQSAGKRTADGSEFEKRTADGSEFESPKKKAKVE

SEQ ID NO: 6088 - protein, 2134 aa, synthetic construct
MPAAKRVKLDGGDKKYSIGLDIGTNSVGWAVITDEYKVPSKKFKVLGNTDRHSIKKNLIGALLFDSGETAEATRLKRTARRRYTRRKNRICYLQEIFSNEMAKVDDSFFHRLEESFLVEEDKKHERHPIFGNIVDEVAYHEKYPTIYHLRKKLVDSTDKADLRLIYLALAHMIKFRGHFLIEGDLNPDNSDVDKLFIQLVQTYNQLFEENPINASGVDAKAILSARLSKSRRLENLIAQLPGEKKNGLFGNLIALSLGLTPNFKSNFDLAEDAKLQLSKDTYDDDLDNLLAQIGDQYADLFLAAKNLSDAILLSDILRVNTEITKAPLSASMIKRYDEHHQDLTLLKALVRQQLPEKYKEIFFDQSKNGYAGYIDGGASQEEFYKFIKPILEKMDGTEELLVKLNREDLLRKQRTFDNGSIPHQIHLGELHAILRRQEDFYPFLKDNREKIEKILTFRIPYYVGPLARGNSRFAWMTRKSEETITPWNFEEVVDKGASAQSFIERMTNFDKNLPNEKVLPKHSLLYEYFTVYNELTKVKYVTEGMRKPAFLSGEQKKAIVDLLFKTNRKVTVKQLKEDYFKKIECFDSVEISGVEDRFNASLGTYHDLLKIIKDKDFLDNEENEDILEDIVLTLTLFEDREMIEERLKTYAHLFDDKVMKQLKRRRYTGWGRLSRKLINGIRDKQSGKTILDFLKSDGFANRNFMQLIHDDSLTFKEDIQKAQVSGQGDSLHEHIANLAGSPAIKKGILQTVKVVDELVKVMGRHKPENIVIEMARENQTTQKGQKNSRERMKRIEEGIKELGSQILKEHPVENTQLQNEKLYLYYLQNGRDMYVDQELDINRLSDYDVDHIVPQSFLKDDSIDNKVLTRSDKARGKSDNVPSEEVVKKMKNYWRQLLNAKLITQRKFDNLTKAERGGLSELDKAGFIKRQLVETRQITKHVAQILDSRMNTKYDENDKLIREVKVITLKSKLVSDFRKDFQFYKVREINNYHHAHDAYLNAVVGTALIKKYPKLESEFVYGDYKVYDVRKMIAKSEQEIGKATAKYFFYSNIMNFFKTEITLANGEIRKRPLIETNGETGEIVWDKGRDFATVRKVLSMPQVNIVKKTEVQTGGFSKESILPKRNSDKLIARKKDWDPKKYGGFDSPTVAYSVLVVAKVEKGKSKKLKSVKELLGITIMERSSFEKNPIDFLEAKGYKEVKKDLIIKLPKYSLFELENGRKRMLASAGELQKGNELALPSKYVNFLYLASHYEKLKGSPEDNEQKQLFVEQHKHYLDEIIEQISEFSKRVILADANLDKVLSAYNKHRDKPIREQAENIIHLFTLTNLGAPAAFKYFDTTIDRKRYTSTKEVLDATLIHQSITGLYETRIDLSQLGGDGGGGSGGSGGSGGSGGSGGSGGLLGRDLLTKLKAQIQFSTEGPQVTWEDRPAMCLVLNLEEEYRLHEKPVPPSIDPSWLQLFPMVWAEKAGMGLANQVPPVVVELKSDASPVAVRQYPMSKEAREGIRPHIQRFLDLGILVPCQSPWNTPLLPVKKPGTNDYRPVQDLREVNKRVQDIHPTVPNPYNLLSSLPPSHTWYSVLDLKDAFFCLKLHPNSQPLFAFEWRDPEKGNTGQLTWTRLPQGFKNSPTLFNEALHRDLASFRALNPQVVMLQYVDDLLVAAPTYRDCKEGTRRLLQELSKLGYRVSAKKAQLCREEVTYLGYLLKGGKRWLTPARKATVMKIPTPTTPRQVREFLGKAGFCRLFIPGFASLAAPLYPLTRPKVPFTWTEAHQEAFGRIKEALLSAPALALPDLTKPFALYVDEKEGVARGVLTQTLGPWRRPVAYLSKKLDPVASGWPTCLKAIAAVALLLKDADKLTLGQNVLVIAPHNLESIVRQPPDRWMTNARMTHYQSLLLNERVSFAPPAILNPATLLPVESDDTPIHICSEILAEETGTRPDLRDQPLPGVPAWYTDGSSFIMDGRRQAGAAIVDNKRTVWASNLPEGTSAQKAELIALTQALRLAEGKSINIYTDSRYAFATAHVHGAIYKQRGWLTSAGKDIKNKEEILALLEAIHLPKRVAIIHCPGHQRGTDPVATGNRKADEAAKQAAQSTRILTETTKNAGKRTADGSEFEKRTADGSEFESPKKKAKVE

SEQ ID NO: 6089 - protein, 2225 aa, synthetic construct
MPAAKRVKLDGGDKKYSIGLDIGTNSVGWAVITDEYKVPSKKFKVLGNTDRHSIKKNLIGALLFDSGETAEATRLKRTARRRYTRRKNRICYLQEIFSNEMAKVDDSFFHRLEESFLVEEDKKHERHPIFGNIVDEVAYHEKYPTIYHLRKKLVDSTDKADLRLIYLALAHMIKFRGHFLIEGDLNPDNSDVDKLFIQLVQTYNQLFEENPINASGVDAKAILSARLSKSRRLENLIAQLPGEKKNGLFGNLIALSLGLTPNFKSNFDLAEDAKLQLSKDTYDDDLDNLLAQIGDQYADLFLAAKNLSDAILLSDILRVNTEITKAPLSASMIKRYDEHHQDLTLLKALVRQQLPEKYKEIFFDQSKNGYAGYIDGGASQEEFYKFIKPILEKMDGTEELLVKLNREDLLRKQRTFDNGSIPHQIHLGELHAILRRQEDFYPFLKDNREKIEKILTFRIPYYVGPLARGNSRFAWMTRKSEETITPWNFEEVVDKGASAQSFIERMTNFDKNLPNEKVLPKHSLLYEYFTVYNELTKVKYVTEGMRKPAFLSGEQKKAIVDLLFKTNRKVTVKQLKEDYFKKIECFDSVEISGVEDRFNASLGTYHDLLKIIKDKDFLDNEENEDILEDIVLTLTLFEDREMIEERLKTYAHLFDDKVMKQLKRRRYTGWGRLSRKLINGIRDKQSGKTILDFLKSDGFANRNFMQLIHDDSLTFKEDIQKAQVSGQGDSLHEHIANLAGSPAIKKGILQTVKVVDELVKVMGRHKPENIVIEMARENQTTQKGQKNSRERMKRIEEGIKELGSQILKEHPVENTQLQNEKLYLYYLQNGRDMYVDQELDINRLSDYDVDHIVPQSFLKDDSIDNKVLTRSDKARGKSDNVPSEEVVKKMKNYWRQLLNAKLITQRKFDNLTKAERGGLSELDKAGFIKRQLVETRQITKHVAQILDSRMNTKYDENDKLIREVKVITLKSKLVSDFRKDFQFYKVREINNYHHAHDAYLNAVVGTALIKKYPKLESEFVYGDYKVYDVRKMIAKSEQEIGKATAKYFFYSNIMNFFKTEITLANGEIRKRPLIETNGETGEIVWDKGRDFATVRKVLSMPQVNIVKKTEVQTGGFSKESILPKRNSDKLIARKKDWDPKKYGGFDSPTVAYSVLVVAKVEKGKSKKLKSVKELLGITIMERSSFEKNPIDFLEAKGYKEVKKDLIIKLPKYSLFELENGRKRMLASAGELQKGNELALPSKYVNFLYLASHYEKLKGSPEDNEQKQLFVEQHKHYLDEIIEQISEFSKRVILADANLDKVLSAYNKHRDKPIREQAENIIHLFTLTNLGAPAAFKYFDTTIDRKRYTSTKEVLDATLIHQSITGLYETRIDLSQLGGDGGGGSGGSGGSGGSGGSGGSGGTLGDQGSRGSDPLPEPRVTLTVEGIPTEFLVNTGAEHSVLTKPMGKMGSKRTVVAGATGSKVYPWTTKRLLKIGQKQVTHSFLVIPECPAPLLGRDLLTKLKAQIQFSTEGPQVTWEDRPAMCLVLNLEEEYRLHEKPVPPSIDPSWLQLFPMVWAEKAGMGLANQVPPVVVELKSDASPVAVRQYPMSKEAREGIRPHIQRFLDLGILVPCQSPWNTPLLPVKKPGTNDYRPVQDLREVNKRVQDIHPTVPNPYNLLSSLPPSHTWYSVLDLKDAFFCLKLHPNSQPLFAFEWRDPEKGNTGQLTWTRLPQGFKNSPTLFNEALHRDLASFRALNPQVVMLQYVDDLLVAAPTYRDCKEGTRRLLQELSKLGYRVSAKKAQLCREEVTYLGYLLKGGKRWLTPARKATVMKIPTPTTPRQVREFLGKAGFCRLFIPGFASLAAPLYPLTRPKVPFTWTEAHQEAFGRIKEALLSAPALALPDLTKPFALYVDEKEGVARGVLTQTLGPWRRPVAYLSKKLDPVASGWPTCLKAIAAVALLLKDADKLTLGQNVLVIAPHNLESIVRQPPDRWMTNARMTHYQSLLLNERVSFAPPAILNPATLLPVESDDTPIHICSEILAEETGTRPDLRDQPLPGVPAWYTDGSSFIMDGRRQAGAAIVDNKRTVWASNLPEGTSAQKAELIALTQALRLAEGKSINIYTDSRYAFATAHVHGAIYKQRGWLTSAGKDIKNKEEILALLEAIHLPKRVAIIHCPGHQRGTDPVATGNRKADEAAKQAAQSTRILTETTKNAGKRTADGSEFEKRTADGSEFESPKKKAKVE

SEQ ID NO: 6090 - protein, 2103 aa, synthetic construct; identical to SEQ ID NO: 4503

SEQ ID NO: 6091 - protein, 2103 aa, synthetic construct; identical to SEQ ID NO: 4503

SEQ ID NO: 6092 - protein, 2103 aa, synthetic construct
MPAAKRVKLDGGDKKYSIGLDIGTNSVGWAVITDEYKVPSKKFKVLGNTDRHSIKKNLIGALLFDSGETAEATRLKRTARRRYTRRKNRICYLQEIFSNEMAKVDDSFFHRLEESFLVEEDKKHERHPIFGNIVDEVAYHEKYPTIYHLRKKLVDSTDKADLRLIYLALAHMIKFRGHFLIEGDLNPDNSDVDKLFIQLVQTYNQLFEENPINASGVDAKAILSARLSKSRRLENLIAQLPGEKKNGLFGNLIALSLGLTPNFKSNFDLAEDAKLQLSKDTYDDDLDNLLAQIGDQYADLFLAAKNLSDAILLSDILRVNTEITKAPLSASMIKRYDEHHQDLTLLKALVRQQLPEKYKEIFFDQSKNGYAGYIDGGASQEEFYKFIKPILEKMDGTEELLVKLNREDLLRKQRTFDNGSIPHQIHLGELHAILRRQEDFYPFLKDNREKIEKILTFRIPYYVGPLARGNSRFAWMTRKSEETITPWNFEEVVDKGASAQSFIERMTNFDKNLPNEKVLPKHSLLYEYFTVYNELTKVKYVTEGMRKPAFLSGEQKKAIVDLLFKTNRKVTVKQLKEDYFKKIECFDSVEISGVEDRFNASLGTYHDLLKIIKDKDFLDNEENEDILEDIVLTLTLFEDREMIEERLKTYAHLFDDKVMKQLKRRRYTGWGRLSRKLINGIRDKQSGKTILDFLKSDGFANRNFMQLIHDDSLTFKEDIQKAQVSGQGDSLHEHIANLAGSPAIKKGILQTVKVVDELVKVMGRHKPENIVIEMARENQTTQKGQKNSRERMKRIEEGIKELGSQILKEHPVENTQLQNEKLYLYYLQNGRDMYVDQELDINRLSDYDVDHIVPQSFLKDDSIDNKVLTRSDKARGKSDNVPSEEVVKKMKNYWRQLLNAKLITQRKFDNLTKAERGGLSELDKAGFIKRQLVETRQITKHVAQILDSRMNTKYDENDKLIREVKVITLKSKLVSDFRKDFQFYKVREINNYHHAHDAYLNAVVGTALIKKYPKLESEFVYGDYKVYDVRKMIAKSEQEIGKATAKYFFYSNIMNFFKTEITLANGEIRKRPLIETNGETGEIVWDKGRDFATVRKVLSMPQVNIVKKTEVQTGGFSKESILPKRNSDKLIARKKDWDPKKYGGFDSPTVAYSVLVVAKVEKGKSKKLKSVKELLGITIMERSSFEKNPIDFLEAKGYKEVKKDLIIKLPKYSLFELENGRKRMLASAGELQKGNELALPSKYVNFLYLASHYEKLKGSPEDNEQKQLFVEQHKHYLDEIIEQISEFSKRVILADANLDKVLSAYNKHRDKPIREQAENIIHLFTLTNLGAPAAFKYFDTTIDRKRYTSTKEVLDATLIHQSITGLYETRIDLSQLGGDGGGGSGGSGGSGGSGGSGGSGGTLGIEDEYRLHETSTEPDVSLGSTWLSDFPQAWAETGGMGLAVRQAPLIIPLKATSTPVSIQQYPMSHEARLGIKPHIQRLLDQGILVPCQSPWNTPLLPVKKPGTNDYRPVQDLREVNKRVEDIHPTVPNPYNLLSGLPPSHQWYTVLDLKDAFFCLRLHPTSQPLFAFEWRDPGMGISGQLTWTRLPQGFKNSPTLFDEALHRDLADFRIQHPDLILLQYVDDILLAATSELDCQQGTRALLQTLGDLGYRASAKKAQICQKQVKYLGYLLREGQRWLTEARKETVMGQPVPKTPRQLREFLGTAGFCRLWIPGFAEMAAPLYPLTKTGTLFSWGPDQQKAYQEIKQALLTAPALGLPDLTKPFELFVDEKQGYAKGVLTQKLGPWRRPVAYLSKKLDPVAAGWPPCLRMVAAIAVLTKDAGKLTMGQPLVILAPHAVEALVKQPPDRWLSNARMTHYQAMLLDTDRVQFGPVVALNPATLLPLPEEGAPHDCLEILAETHGTRPDLTDQPIPDADHTWYTDGSSFLQEGQRKAGAAVTTETEVIWAGALPAGTSAQRAELIALTQALKMAEGKRLNVYTDSRYAFATAHIHGEIYRRRGLLTSEGREIKNKSEILALLKALFLPKRLSIIHCLGHQKGDSAEARGNRLADQAAREAAIKTPPDTSTLLAGKRTADGSEFEKRTADGSEFESPKKKAKVE

SEQ ID NO: 6093 - protein, 2103 aa, synthetic construct
MPAAKRVKLDGGDKKYSIGLDIGTNSVGWAVITDEYKVPSKKFKVLGNTDRHSIKKNLIGALLFDSGETAEATRLKRTARRRYTRRKNRICYLQEIFSNEMAKVDDSFFHRLEESFLVEEDKKHERHPIFGNIVDEVAYHEKYPTIYHLRKKLVDSTDKADLRLIYLALAHMIKFRGHFLIEGDLNPDNSDVDKLFIQLVQTYNQLFEENPINASGVDAKAILSARLSKSRRLENLIAQLPGEKKNGLFGNLIALSLGLTPNFKSNFDLAEDAKLQLSKDTYDDDLDNLLAQIGDQYADLFLAAKNLSDAILLSDILRVNTEITKAPLSASMIKRYDEHHQDLTLLKALVRQQLPEKYKEIFFDQSKNGYAGYIDGGASQEEFYKFIKPILEKMDGTEELLVKLNREDLLRKQRTFDNGSIPHQIHLGELHAILRRQEDFYPFLKDNREKIEKILTFRIPYYVGPLARGNSRFAWMTRKSEETITPWNFEEVVDKGASAQSFIERMTNFDKNLPNEKVLPKHSLLYEYFTVYNELTKVKYVTEGMRKPAFLSGEQKKAIVDLLFKTNRKVTVKQLKEDYFKKIECFDSVEISGVEDRFNASLGTYHDLLKIIKDKDFLDNEENEDILEDIVLTLTLFEDREMIEERLKTYAHLFDDKVMKQLKRRRYTGWGRLSRKLINGIRDKQSGKTILDFLKSDGFANRNFMQLIHDDSLTFKEDIQKAQVSGQGDSLHEHIANLAGSPAIKKGILQTVKVVDELVKVMGRHKPENIVIEMARENQTTQKGQKNSRERMKRIEEGIKELGSQILKEHPVENTQLQNEKLYLYYLQNGRDMYVDQELDINRLSDYDVDHIVPQSFLKDDSIDNKVLTRSDKARGKSDNVPSEEVVKKMKNYWRQLLNAKLITQRKFDNLTKAERGGLSELDKAGFIKRQLVETRQITKHVAQILDSRMNTKYDENDKLIREVKVITLKSKLVSDFRKDFQFYKVREINNYHHAHDAYLNAVVGTALIKKYPKLESEFVYGDYKVYDVRKMIAKSEQEIGKATAKYFFYSNIMNFFKTEITLANGEIRKRPLIETNGETGEIVWDKGRDFATVRKVLSMPQVNIVKKTEVQTGGFSKESILPKRNSDKLIARKKDWDPKKYGGFDSPTVAYSVLVVAKVEKGKSKKLKSVKELLGITIMERSSFEKNPIDFLEAKGYKEVKKDLIIKLPKYSLFELENGRKRMLASAGELQKGNELALPSKYVNFLYLASHYEKLKGSPEDNEQKQLFVEQHKHYLDEIIEQISEFSKRVILADANLDKVLSAYNKHRDKPIREQAENIIHLFTLTNLGAPAAFKYFDTTIDRKRYTSTKEVLDATLIHQSITGLYETRIDLSQLGGDGGGGSGGSGGSGGSGGSGGSGGTLGIEDEYRLHETSTEPDVSLGSTWLSDFPQAWAETGGMGLAVRQAPLIIPLKATSTPVSIQQYPMSHEARLGIKPHIQRLLDQGILVPCQSPWNTPLLPVKKPGTNDYRPVQDLREVNKRVEDIHPTVPNPYNLLSGLPPSHQWYTVLDLKDAFFCLRLHPTSQPLFAFEWRDPGMGISGQLTWTRLPQGFKNSPTLFNEALHRDLADFRIQHPDLILLQYVDDILLAATSELDCQQGTRALLQTLGDLGYRASAKKAQICQKQVKYLGYLLREGQRWLTEARKETVMGQPVPKTPRQLREFLGTAGFCRLWIPGFAEMAAPLYPLTKPGTLFSWGPDQQKAYQEIKQALLTAPALGLPDLTKPFELFVDEKQGYAKGVLTQKLGPWRRPVAYLSKKLDPVAAGWPPCLRMVAAIAVLTKDAGKLTMGQPLVILAPHAVEALVKQPPDRWLSNARMTHYQAMLLDTDRVQFGPVVALNPATLLPLPEEGAPHDCLEILAETHGTRPDLTDQPIPDADHTWYTDGSSFLQEGQRKAGAAVTTETEVIWAGALPAGTSAQRAELIALTQALKMAEGKRLNVYTDSRYAFATAHIHGEIYRRRGWLTSEGREIKNKSEILALLKALFLPKRLSIIHCLGHQKGDSAEARGNRLADQAAREAAIKTPPDTSTLLAGKRTADGSEFEKRTADGSEFESPKKKAKVE

SEQ ID NO: 6094 - protein, 2103 aa, synthetic construct
MPAAKRVKLDGGDKKYSIGLDIGTNSVGWAVITDEYKVPSKKFKVLGNTDRHSIKKNLIGALLFDSGETAEATRLKRTARRRYTRRKNRICYLQEIFSNEMAKVDDSFFHRLEESFLVEEDKKHERHPIFGNIVDEVAYHEKYPTIYHLRKKLVDSTDKADLRLIYLALAHMIKFRGHFLIEGDLNPDNSDVDKLFIQLVQTYNQLFEENPINASGVDAKAILSARLSKSRRLENLIAQLPGEKKNGLFGNLIALSLGLTPNFKSNFDLAEDAKLQLSKDTYDDDLDNLLAQIGDQYADLFLAAKNLSDAILLSDILRVNTEITKAPLSASMIKRYDEHHQDLTLLKALVRQQLPEKYKEIFFDQSKNGYAGYIDGGASQEEFYKFIKPILEKMDGTEELLVKLNREDLLRKQRTFDNGSIPHQIHLGELHAILRRQEDFYPFLKDNREKIEKILTFRIPYYVGPLARGNSRFAWMTRKSEETITPWNFEEVVDKGASAQSFIERMTNFDKNLPNEKVLPKHSLLYEYFTVYNELTKVKYVTEGMRKPAFLSGEQKKAIVDLLFKTNRKVTVKQLKEDYFKKIECFDSVEISGVEDRFNASLGTYHDLLKIIKDKDFLDNEENEDILEDIVLTLTLFEDREMIEERLKTYAHLFDDKVMKQLKRRRYTGWGRLSRKLINGIRDKQSGKTILDFLKSDGFANRNFMQLIHDDSLTFKEDIQKAQVSGQGDSLHEHIANLAGSPAIKKGILQTVKVVDELVKVMGRHKPENIVIEMARENQTTQKGQKNSRERMKRIEEGIKELGSQILKEHPVENTQLQNEKLYLYYLQNGRDMYVDQELDINRLSDYDVDHIVPQSFLKDDSIDNKVLTRSDKARGKSDNVPSEEVVKKMKNYWRQLLNAKLITQRKFDNLTKAERGGLSELDKAGFIKRQLVETRQITKHVAQILDSRMNTKYDENDKLIREVKVITLKSKLVSDFRKDFQFYKVREINNYHHAHDAYLNAVVGTALIKKYPKLESEFVYGDYKVYDVRKMIAKSEQEIGKATAKYFFYSNIMNFFKTEITLANGEIRKRPLIETNGETGEIVWDKGRDFATVRKVLSMPQVNIVKKTEVQTGGFSKESILPKRNSDKLIARKKDWDPKKYGGFDSPTVAYSVLVVAKVEKGKSKKLKSVKELLGITIMERSSFEKNPIDFLEAKGYKEVKKDLIIKLPKYSLFELENGRKRMLASAGELQKGNELALPSKYVNFLYLASHYEKLKGSPEDNEQKQLFVEQHKHYLDEIIEQISEFSKRVILADANLDKVLSAYNKHRDKPIREQAENIIHLFTLTNLGAPAAFKYFDTTIDRKRYTSTKEVLDATLIHQSITGLYETRIDLSQLGGDGGGGSGGSGGSGGSGGSGGSGGTLNIEDEYRLHETSKEPDVSLGSTWLSDFPQAWAETGGMGLAVRQAPLIIPLKATSTPVSIKQYPMSQEARLGIKPHIQRLLDQGILVPCQSPWNTPLLPVKKPGTNDYRPVQDLREVNKRVEDIHPTVPNPYNLLSGLPPSHQWYTVLDLKDAFFCLRLHPTSQPLFAFEWRDPEMGISGQLTWTRLPQGFKNSPTLFNEALHRDLAGFRIQHPDLILLQYVDDLLLAATSELDCQQGTRALLQTLGDLGYRASAKKAQICQKQVKYLGYLLKEGQRWLTEARKETVMGQPIPKTPRQLREFLGTAGFCRLWIPGFAEMAAPLYPLTKPGTLFNWGPDQQKAFQEIKQALLTAPALGLPDLTKPFELFVDEKQGYAKGVLTQKLGPWRRPVAYLSKKLDPVAAGWPPCLRMVAAIAVLTKDAGKLTMGQPLVILAPHAVEALVKQPPDRWLSNARMTHYQALLLDTDRVQFGPVVALNPATLLPLPEEGLQHDCLDILAEAHGTRSDLMDQPLPDADHTWYTDGSSFLQEGQRKAGAAVTTETEVIWARALPAGTSAQRAELIALTQALKMAEGKKLNVYTDSRYAFATAHIHGEIYRRRGWLTSEGKEIKNKDEILALLKALFLPKRLSIIHCPGHQKGNSAEARGNRMADQAAREVATRETPETSTLLAGKRTADGSEFEKRTADGSEFESPKKKAKVE

SEQ ID NO: 6095 - protein, 2103 aa, synthetic construct
MPAAKRVKLDGGDKKYSIGLDIGTNSVGWAVITDEYKVPSKKFKVLGNTDRHSIKKNLIGALLFDSGETAEATRLKRTARRRYTRRKNRICYLQEIFSNEMAKVDDSFFHRLEESFLVEEDKKHERHPIFGNIVDEVAYHEKYPTIYHLRKKLVDSTDKADLRLIYLALAHMIKFRGHFLIEGDLNPDNSDVDKLFIQLVQTYNQLFEENPINASGVDAKAILSARLSKSRRLENLIAQLPGEKKNGLFGNLIALSLGLTPNFKSNFDLAEDAKLQLSKDTYDDDLDNLLAQIGDQYADLFLAAKNLSDAILLSDILRVNTEITKAPLSASMIKRYDEHHQDLTLLKALVRQQLPEKYKEIFFDQSKNGYAGYIDGGASQEEFYKFIKPILEKMDGTEELLVKLNREDLLRKQRTFDNGSIPHQIHLGELHAILRRQEDFYPFLKDNREKIEKILTFRIPYYVGPLARGNSRFAWMTRKSEETITPWNFEEVVDKGASAQSFIERMTNFDKNLPNEKVLPKHSLLYEYFTVYNELTKVKYVTEGMRKPAFLSGEQKKAIVDLLFKTNRKVTVKQLKEDYFKKIECFDSVEISGVEDRFNASLGTYHDLLKIIKDKDFLDNEENEDILEDIVLTLTLFEDREMIEERLKTYAHLFDDKVMKQLKRRRYTGWGRLSRKLINGIRDKQSGKTILDFLKSDGFANRNFMQLIHDDSLTFKEDIQKAQVSGQGDSLHEHIANLAGSPAIKKGILQTVKVVDELVKVMGRHKPENIVIEMARENQTTQKGQKNSRERMKRIEEGIKELGSQILKEHPVENTQLQNEKLYLYYLQNGRDMYVDQELDINRLSDYDVDHIVPQSFLKDDSIDNKVLTRSDKARGKSDNVPSEEVVKKMKNYWRQLLNAKLITQRKFDNLTKAERGGLSELDKAGFIKRQLVETRQITKHVAQILDSRMNTKYDENDKLIREVKVITLKSKLVSDFRKDFQFYKVREINNYHHAHDAYLNAVVGTALIKKYPKLESEFVYGDYKVYDVRKMIAKSEQEIGKATAKYFFYSNIMNFFKTEITLANGEIRKRPLIETNGETGEIVWDKGRDFATVRKVLSMPQVNIVKKTEVQTGGFSKESILPKRNSDKLIARKKDWDPKKYGGFDSPTVAYSVLVVAKVEKGKSKKLKSVKELLGITIMERSSFEKNPIDFLEAKGYKEVKKDLIIKLPKYSLFELENGRKRMLASAGELQKGNELALPSKYVNFLYLASHYEKLKGSPEDNEQKQLFVEQHKHYLDEIIEQISEFSKRVILADANLDKVLSAYNKHRDKPIREQAENIIHLFTLTNLGAPAAFKYFDTTIDRKRYTSTKEVLDATLIHQSITGLYETRIDLSQLGGDGGGGSGGSGGSGGSGGSGGSGGTLNIEDEYRLHETSKGPDVPLGSTWLSDFPQAWAETGGMGLAFRQAPLIISLKATSTPVSIKQYPMSQEARLGIKPHIQRLLDQGILVPCQSPWNTPLLPVKKPGTNDYRPVQDLREVNKRVEDIHPTVPNPYNLLSGLPPSHQWYTVLDLKDAFFCLRLHPTSQSLFAFEWKDPEMGISGQLTWTRLPQGFKNSPTLFNEALHRDLADFRIQHPDLILLQYVDDLLLAATSELDCQQGTRALLQTLGDLGYRASAKKAQICQKQVKYLGYLLKEGQRWLTEARKETVMGQPTPKTPRQLREFLGKAGLCRLFIPGFAEMAAPLYPLTKPGTLFKWGPDQQKAYQEIKQALLTAPALGLPDLTKPFELFVDEKQGYAKGVLTQKLGPWRRPVAYLSKKLDPVAAGWPPCLRMVAAIAVLTKDVGKLTMGQPLVILAPHAVEALVKQPPDRWLSNARMTHYQALLLDTDRVQFGPIVALNPATLLPLPEEGLQHDCLDILAEAHGTRPDLTDQPLPDADHTWYTDGSSFLQEGQRRAGAAVTTETEVIWAKALPAGTSAQRAELIALTQALKMAAGKKLNVYTDSRYAFATAHIHGEIYRRRGWLTSEGKEIKNKDEILALLKALFLPKRLSIIHCPGHQKGNHAEARGNRMADQAAREVATRETPETSTLLAGKRTADGSEFEKRTADGSEFESPKKKAKVE

SEQ ID NO: 6096 - protein, 2103 aa, synthetic construct
MPAAKRVKLDGGDKKYSIGLDIGTNSVGWAVITDEYKVPSKKFKVLGNTDRHSIKKNLIGALLFDSGETAEATRLKRTARRRYTRRKNRICYLQEIFSNEMAKVDDSFFHRLEESFLVEEDKKHERHPIFGNIVDEVAYHEKYPTIYHLRKKLVDSTDKADLRLIYLALAHMIKFRGHFLIEGDLNPDNSDVDKLFIQLVQTYNQLFEENPINASGVDAKAILSARLSKSRRLENLIAQLPGEKKNGLFGNLIALSLGLTPNFKSNFDLAEDAKLQLSKDTYDDDLDNLLAQIGDQYADLFLAAKNLSDAILLSDILRVNTEITKAPLSASMIKRYDEHHQDLTLLKALVRQQLPEKYKEIFFDQSKNGYAGYIDGGASQEEFYKFIKPILEKMDGTEELLVKLNREDLLRKQRTFDNGSIPHQIHLGELHAILRRQEDFYPFLKDNREKIEKILTFRIPYYVGPLARGNSRFAWMTRKSEETITPWNFEEVVDKGASAQSFIERMTNFDKNLPNEKVLPKHSLLYEYFTVYNELTKVKYVTEGMRKPAFLSGEQKKAIVDLLFKTNRKVTVKQLKEDYFKKIECFDSVEISGVEDRFNASLGTYHDLLKIIKDKDFLDNEENEDILEDIVLTLTLFEDREMIEERLKTYAHLFDDKVMKQLKRRRYTGWGRLSRKLINGIRDKQSGKTILDFLKSDGFANRNFMQLIHDDSLTFKEDIQKAQVSGQGDSLHEHIANLAGSPAIKKGILQTVKVVDELVKVMGRHKPENIVIEMARENQTTQKGQKNSRERMKRIEEGIKELGSQILKEHPVENTQLQNEKLYLYYLQNGRDMYVDQELDINRLSDYDVDHIVPQSFLKDDSIDNKVLTRSDKARGKSDNVPSEEVVKKMKNYWRQLLNAKLITQRKFDNLTKAERGGLSELDKAGFIKRQLVETRQITKHVAQILDSRMNTKYDENDKLIREVKVITLKSKLVSDFRKDFQFYKVREINNYHHAHDAYLNAVVGTALIKKYPKLESEFVYGDYKVYDVRKMIAKSEQEIGKATAKYFFYSNIMNFFKTEITLANGEIRKRPLIETNGETGEIVWDKGRDFATVRKVLSMPQVNIVKKTEVQTGGFSKESILPKRNSDKLIARKKDWDPKKYGGFDSPTVAYSVLVVAKVEKGKSKKLKSVKELLGITIMERSSFEKNPIDFLEAKGYKEVKKDLIIKLPKYSLFELENGRKRMLASAGELQKGNELALPSKYVNFLYLASHYEKLKGSPEDNEQKQLFVEQHKHYLDEIIEQISEFSKRVILADANLDKVLSAYNKHRDKPIREQAENIIHLFTLTNLGAPAAFKYFDTTIDRKRYTSTKEVLDATLIHQSITGLYETRIDLSQLGGDGGGGSGGSGGSGGSGGSGGSGGTLNIEDEYRLHETSKGPDVPLGSTWLSDFPQAWAETGGMGLAVRQAPLIIPLKATSTPVSIKQYPMSQEARLGIKPHIQRLLDQGILVPCQSPWNTPLLPVKKPGTNDYRPVQDLREVNKRVEDIHPTVPNPYNLLSGLPPSHQWYTVLDLKDAFFCLRLHPTSQSLFAFEWRDPEMGISGQLTWTRLPQGFKNSPTLFNEALHRDLADFRIQHPDLILLQYVDDLLLAATSELDCQQGTRALLQTLGDLGYRASAKKAQICQKQVKYLGYLLKEGQRWLTEARKETVMGQPTPKTPRQLREFLGTAGFCRLWIPGFAEMAAPLYPLTKPGTLFEWGPDQQKAYQEIKQALLTAPALGLPDLTKPFELFVDEKQGYAKGVLTQKLGPWRRPVAYLSKKLDPVAAGWPPCLRMVAAIAVLTKDAGKLTMGQPLVILAPHAVEALVKQPPDRWLSNARMTHYQALLLDTDRVQFGPIVALNPATLLPLPEEGLQHDCLDILAEAHGTRPDLTDQPLPDADHTWYTDGSSFLQEGQRKAGAAVTTETEVVWAKALPAGTSAQRAELIALTQALKMAEGKKLNVYTDSRYAFATAHIHGEIYRRRGWLTSEGKEIKNKDEILALLKALFLPKRLSIIHCPGHQKGNRAEARGNRMADQAAREVATRETPETSTLLAGKRTADGSEFEKRTADGSEFESPKKKAKVE

SEQ ID NO: 6097 - protein, 2103 aa, synthetic construct
MPAAKRVKLDGGDKKYSIGLDIGTNSVGWAVITDEYKVPSKKFKVLGNTDRHSIKKNLIGALLFDSGETAEATRLKRTARRRYTRRKNRICYLQEIFSNEMAKVDDSFFHRLEESFLVEEDKKHERHPIFGNIVDEVAYHEKYPTIYHLRKKLVDSTDKADLRLIYLALAHMIKFRGHFLIEGDLNPDNSDVDKLFIQLVQTYNQLFEENPINASGVDAKAILSARLSKSRRLENLIAQLPGEKKNGLFGNLIALSLGLTPNFKSNFDLAEDAKLQLSKDTYDDDLDNLLAQIGDQYADLFLAAKNLSDAILLSDILRVNTEITKAPLSASMIKRYDEHHQDLTLLKALVRQQLPEKYKEIFFDQSKNGYAGYIDGGASQEEFYKFIKPILEKMDGTEELLVKLNREDLLRKQRTFDNGSIPHQIHLGELHAILRRQEDFYPFLKDNREKIEKILTFRIPYYVGPLARGNSRFAWMTRKSEETITPWNFEEVVDKGASAQSFIERMTNFDKNLPNEKVLPKHSLLYEYFTVYNELTKVKYVTEGMRKPAFLSGEQKKAIVDLLFKTNRKVTVKQLKEDYFKKIECFDSVEISGVEDRFNASLGTYHDLLKIIKDKDFLDNEENEDILEDIVLTLTLFEDREMIEERLKTYAHLFDDKVMKQLKRRRYTGWGRLSRKLINGIRDKQSGKTILDFLKSDGFANRNFMQLIHDDSLTFKEDIQKAQVSGQGDSLHEHIANLAGSPAIKKGILQTVKVVDELVKVMGRHKPENIVIEMARENQTTQKGQKNSRERMKRIEEGIKELGSQILKEHPVENTQLQNEKLYLYYLQNGRDMYVDQELDINRLSDYDVDHIVPQSFLKDDSIDNKVLTRSDKARGKSDNVPSEEVVKKMKNYWRQLLNAKLITQRKFDNLTKAERGGLSELDKAGFIKRQLVETRQITKHVAQILDSRMNTKYDENDKLIREVKVITLKSKLVSDFRKDFQFYKVREINNYHHAHDAYLNAVVGTALIKKYPKLESEFVYGDYKVYDVRKMIAKSEQEIGKATAKYFFYSNIMNFFKTEITLANGEIRKRPLIETNGETGEIVWDKGRDFATVRKVLSMPQVNIVKKTEVQTGGFSKESILPKRNSDKLIARKKDWDPKKYGGFDSPTVAYSVLVVAKVEKGKSKKLKSVKELLGITIMERSSFEKNPIDFLEAKGYKEVKKDLIIKLPKYSLFELENGRKRMLASAGELQKGNELALPSKYVNFLYLASHYEKLKGSPEDNEQKQLFVEQHKHYLDEIIEQISEFSKRVILADANLDKVLSAYNKHRDKPIREQAENIIHLFTLTNLGAPAAFKYFDTTIDRKRYTSTKEVLDATLIHQSITGLYETRIDLSQLGGDGGGGSGGSGGSGGSGGSGGSGGTLNIEDEHRLHETSKEPDVSLGSTWLSDFPQAWAETGGMGLAVRQAPLIIPLKATSTPVSIKQYPMSQEARLGIKPHIQRLLDQGILVPCQSPWNTPLLPVKKPGTNDYRPVQDLREVNKRVEDIHPTVPNPYNLLSGLPPSHQWYTVLDLKDAFFCLRLHPTSQPLFAFEWRDPEMGISGQLTWTRLPQGFKNSPTLFDEALHRDLADFRIQHPDLILLQYVDDLLLAATSELDCQQGTRALLQTLGNLGYRASAKKAQICQKQVKYLGYLLKEGQRWLTEARKETVMGQPTPKTPRQLREFLGTAGFCRLWIPGFAEMAAPLYPLTKTGTLFNWGPDQQKAYQEIKQALLTAPALGLPDLTKPFELFVDEKQGYAKGVLTQKLGPWRRPVAYLSKKLDPVAAGWPPCLRMVAAIAVLTKDAGKLTMGQPLVILAPHAVEALVKQPPDRWLSNARMTHYQALLLDTDRVQFGPVVALNPATLLPLPEEGLQHNCLDILAEAHGTRPDLTDQPLPDADHTWYTDGSSLLQEGQRKAGAAVTTETEVIWAKALPAGTSAQRAELIALTQALKMAEGKKLNVYTDSRYAFATAHIHGEIYRRRGLLTSEGKEIKNKDEILALLKALFLPKRLSIIHCPGHQKGHSAEARGNRMADQAARKAAITETPDTSTLLAGKRTADGSEFEKRTADGSEFESPKKKAKVE

SEQ ID NO: 6098 - protein, 2103 aa, synthetic construct
MPAAKRVKLDGGDKKYSIGLDIGTNSVGWAVITDEYKVPSKKFKVLGNTDRHSIKKNLIGALLFDSGETAEATRLKRTARRRYTRRKNRICYLQEIFSNEMAKVDDSFFHRLEESFLVEEDKKHERHPIFGNIVDEVAYHEKYPTIYHLRKKLVDSTDKADLRLIYLALAHMIKFRGHFLIEGDLNPDNSDVDKLFIQLVQTYNQLFEENPINASGVDAKAILSARLSKSRRLENLIAQLPGEKKNGLFGNLIALSLGLTPNFKSNFDLAEDAKLQLSKDTYDDDLDNLLAQIGDQYADLFLAAKNLSDAILLSDILRVNTEITKAPLSASMIKRYDEHHQDLTLLKALVRQQLPEKYKEIFFDQSKNGYAGYIDGGASQEEFYKFIKPILEKMDGTEELLVKLNREDLLRKQRTFDNGSIPHQIHLGELHAILRRQEDFYPFLKDNREKIEKILTFRIPYYVGPLARGNSRFAWMTRKSEETITPWNFEEVVDKGASAQSFIERMTNFDKNLPNEKVLPKHSLLYEYFTVYNELTKVKYVTEGMRKPAFLSGEQKKAIVDLLFKTNRKVTVKQLKEDYFKKIECFDSVEISGVEDRFNASLGTYHDLLKIIKDKDFLDNEENEDILEDIVLTLTLFEDREMIEERLKTYAHLFDDKVMKQLKRRRYTGWGRLSRKLINGIRDKQSGKTILDFLKSDGFANRNFMQLIHDDSLTFKEDIQKAQVSGQGDSLHEHIANLAGSPAIKKGILQTVKVVDELVKVMGRHKPENIVIEMARENQTTQKGQKNSRERMKRIEEGIKELGSQILKEHPVENTQLQNEKLYLYYLQNGRDMYVDQELDINRLSDYDVDHIVPQSFLKDDSIDNKVLTRSDKARGKSDNVPSEEVVKKMKNYWRQLLNAKLITQRKFDNLTKAERGGLSELDKAGFIKRQLVETRQITKHVAQILDSRMNTKYDENDKLIREVKVITLKSKLVSDFRKDFQFYKVREINNYHHAHDAYLNAVVGTALIKKYPKLESEFVYGDYKVYDVRKMIAKSEQEIGKATAKYFFYSNIMNFFKTEITLANGEIRKRPLIETNGETGEIVWDKGRDFATVRKVLSMPQVNIVKKTEVQTGGFSKESILPKRNSDKLIARKKDWDPKKYGGFDSPTVAYSVLVVAKVEKGKSKKLKSVKELLGITIMERSSFEKNPIDFLEAKGYKEVKKDLIIKLPKYSLFELENGRKRMLASAGELQKGNELALPSKYVNFLYLASHYEKLKGSPEDNEQKQLFVEQHKHYLDEIIEQISEFSKRVILADANLDKVLSAYNKHRDKPIREQAENIIHLFTLTNLGAPAAFKYFDTTIDRKRYTSTKEVLDATLIHQSITGLYETRIDLSQLGGDGGGGSGGSGGSGGSGGSGGSGGTLNIEDEHRLHETSKEPDVSLGSTWLSDFPQAWAETGGMGLAVRQAPLIIPLKATSTPVSIKQYPMSQEARLGIKPHIQRLLDQGILVPCQSPWNTPLLPVKKPGTNDYRPVQDLREVNKRVEDIHPTVPNPYNLLSGLPPSHQWYTVLDLKDAFFCLRLHPTSQPLFAFEWRDPEMGISGQLTWTRLPQGFKNSPTLFNEALHRDLADFRIQHPDLILLQYVDDLLLAATSELDCQQGTRALLQTLGNLGYRASAKKAQICQKQVKYLGYLLKEGQRWLTEARKETVMGQPTPKTPRQLREFLGTAGFCRLWIPGFAEMAAPLYPLTKPGTLFNWGPDQQKAYQEIKQALLTAPALGLPDLTKPFELFVDEKQGYAKGVLTQKLGPWRRPVAYLSKKLDPVAAGWPPCLRMVAAIAVLTKDAGKLTMGQPLVILAPHAVEALVKQPPDRWLSNARMTHYQALLLDTDRVQFGPVVALNPATLLPLPEEGLQHNCLDILAEAHGTRPDLTDQPLPDADHTWYTDGSSLLQEGQRKAGAAVTTETEVIWAKALPAGTSAQRAELIALTQALKMAEGKKLNVYTDSRYAFATAHIHGEIYRRRGWLTSEGKEIKNKDEILALLKALFLPKRLSIIHCPGHQKGHSAEARGNRMADQAARKAAITETPDTSTLLAGKRTADGSEFEKRTADGSEFESPKKKAKVE

SEQ ID NO: 6099 - protein, 2103 aa, synthetic construct; identical to SEQ ID NO: 6098

SEQ ID NO: 6100 - protein, 2017 aa, synthetic construct
MPAAKRVKLDGGDKKYSIGLDIGTNSVGWAVITDEYKVPSKKFKVLGNTDRHSIKKNLIGALLFDSGETAEATRLKRTARRRYTRRKNRICYLQEIFSNEMAKVDDSFFHRLEESFLVEEDKKHERHPIFGNIVDEVAYHEKYPTIYHLRKKLVDSTDKADLRLIYLALAHMIKFRGHFLIEGDLNPDNSDVDKLFIQLVQTYNQLFEENPINASGVDAKAILSARLSKSRRLENLIAQLPGEKKNGLFGNLIALSLGLTPNFKSNFDLAEDAKLQLSKDTYDDDLDNLLAQIGDQYADLFLAAKNLSDAILLSDILRVNTEITKAPLSASMIKRYDEHHQDLTLLKALVRQQLPEKYKEIFFDQSKNGYAGYIDGGASQEEFYKFIKPILEKMDGTEELLVKLNREDLLRKQRTFDNGSIPHQIHLGELHAILRRQEDFYPFLKDNREKIEKILTFRIPYYVGPLARGNSRFAWMTRKSEETITPWNFEEVVDKGASAQSFIERMTNFDKNLPNEKVLPKHSLLYEYFTVYNELTKVKYVTEGMRKPAFLSGEQKKAIVDLLFKTNRKVTVKQLKEDYFKKIECFDSVEISGVEDRFNASLGTYHDLLKIIKDKDFLDNEENEDILEDIVLTLTLFEDREMIEERLKTYAHLFDDKVMKQLKRRRYTGWGRLSRKLINGIRDKQSGKTILDFLKSDGFANRNFMQLIHDDSLTFKEDIQKAQVSGQGDSLHEHIANLAGSPAIKKGILQTVKVVDELVKVMGRHKPENIVIEMARENQTTQKGQKNSRERMKRIEEGIKELGSQILKEHPVENTQLQNEKLYLYYLQNGRDMYVDQELDINRLSDYDVDHIVPQSFLKDDSIDNKVLTRSDKARGKSDNVPSEEVVKKMKNYWRQLLNAKLITQRKFDNLTKAERGGLSELDKAGFIKRQLVETRQITKHVAQILDSRMNTKYDENDKLIREVKVITLKSKLVSDFRKDFQFYKVREINNYHHAHDAYLNAVVGTALIKKYPKLESEFVYGDYKVYDVRKMIAKSEQEIGKATAKYFFYSNIMNFFKTEITLANGEIRKRPLIETNGETGEIVWDKGRDFATVRKVLSMPQVNIVKKTEVQTGGFSKESILPKRNSDKLIARKKDWDPKKYGGFDSPTVAYSVLVVAKVEKGKSKKLKSVKELLGITIMERSSFEKNPIDFLEAKGYKEVKKDLIIKLPKYSLFELENGRKRMLASAGELQKGNELALPSKYVNFLYLASHYEKLKGSPEDNEQKQLFVEQHKHYLDEIIEQISEFSKRVILADANLDKVLSAYNKHRDKPIREQAENIIHLFTLTNLGAPAAFKYFDTTIDRKRYTSTKEVLDATLIHQSITGLYETRIDLSQLGGDGGGGSGGSGGSGGSGGSGGSGGLTAAIDILAPQQCAEPITWKSDEPVWVDQWPLTNDKLAAAQQLVQEQLEAGHITESSSPWNTPIFVIKKKSGKWRLLQDLRAVNATMVLMGALQPGLPSPVAPPQGYLKIIIDLKDCFFSIPLHPSDQKRFAFSLPSTNFKEPMQRFQWKVLPQGMANSPTLCQKYVATAIHKVRHAWKQMYIIHYMDDILIAGKDGQQVLQCFDQLKQELTAAGLHIAPEKVQLQDPYTYLGFELNGPKITNQKAVIRKDKLQTLNDFQKLLGDINWLRPYLKLTTGDLKPLFDTLKPDSDPNSHRSLSKEALASLEKVETAIAEQFVTHINYSLPLIFLIFNTALTPTGLFWQDNPIMWIHLPASPKKVLLPYYDAIADLIILGRDHSKKYFGIEPSTIIQPYSKSQIDWLMQNTEMWPIACASFVGILDNHYPPNKLIQFCKLHTFVFPQIISKTPLNNALLVFTDGSSTGMAAYTLTDTTIKFQTNLNSAQLVELQALIAVLSAFPNQPLNIYTDSAYLAHSIPLLETVAQIKHISETAKLFLQCQQLIYNRSIPFYIGHVRAHSGLPGPIAQGNQRADLATKIVASNINTAGKRTADGSEFEKRTADGSEFESPKKKAKVE

SEQ ID NO: 6101 - protein, 2183 aa, synthetic construct
MPAAKRVKLDGGDKKYSIGLDIGTNSVGWAVITDEYKVPSKKFKVLGNTDRHSIKKNLIGALLFDSGETAEATRLKRTARRRYTRRKNRICYLQEIFSNEMAKVDDSFFHRLEESFLVEEDKKHERHPIFGNIVDEVAYHEKYPTIYHLRKKLVDSTDKADLRLIYLALAHMIKFRGHFLIEGDLNPDNSDVDKLFIQLVQTYNQLFEENPINASGVDAKAILSARLSKSRRLENLIAQLPGEKKNGLFGNLIALSLGLTPNFKSNFDLAEDAKLQLSKDTYDDDLDNLLAQIGDQYADLFLAAKNLSDAILLSDILRVNTEITKAPLSASMIKRYDEHHQDLTLLKALVRQQLPEKYKEIFFDQSKNGYAGYIDGGASQEEFYKFIKPILEKMDGTEELLVKLNREDLLRKQRTFDNGSIPHQIHLGELHAILRRQEDFYPFLKDNREKIEKILTFRIPYYVGPLARGNSRFAWMTRKSEETITPWNFEEVVDKGASAQSFIERMTNFDKNLPNEKVLPKHSLLYEYFTVYNELTKVKYVTEGMRKPAFLSGEQKKAIVDLLFKTNRKVTVKQLKEDYFKKIECFDSVEISGVEDRFNASLGTYHDLLKIIKDKDFLDNEENEDILEDIVLTLTLFEDREMIEERLKTYAHLFDDKVMKQLKRRRYTGWGRLSRKLINGIRDKQSGKTILDFLKSDGFANRNFMQLIHDDSLTFKEDIQKAQVSGQGDSLHEHIANLAGSPAIKKGILQTVKVVDELVKVMGRHKPENIVIEMARENQTTQKGQKNSRERMKRIEEGIKELGSQILKEHPVENTQLQNEKLYLYYLQNGRDMYVDQELDINRLSDYDVDHIVPQSFLKDDSIDNKVLTRSDKARGKSDNVPSEEVVKKMKNYWRQLLNAKLITQRKFDNLTKAERGGLSELDKAGFIKRQLVETRQITKHVAQILDSRMNTKYDENDKLIREVKVITLKSKLVSDFRKDFQFYKVREINNYHHAHDAYLNAVVGTALIKKYPKLESEFVYGDYKVYDVRKMIAKSEQEIGKATAKYFFYSNIMNFFKTEITLANGEIRKRPLIETNGETGEIVWDKGRDFATVRKVLSMPQVNIVKKTEVQTGGFSKESILPKRNSDKLIARKKDWDPKKYGGFDSPTVAYSVLVVAKVEKGKSKKLKSVKELLGITIMERSSFEKNPIDFLEAKGYKEVKKDLIIKLPKYSLFELENGRKRMLASAGELQKGNELALPSKYVNFLYLASHYEKLKGSPEDNEQKQLFVEQHKHYLDEIIEQISEFSKRVILADANLDKVLSAYNKHRDKPIREQAENIIHLFTLTNLGAPAAFKYFDTTIDRKRYTSTKEVLDATLIHQSITGLYETRIDLSQLGGDGGGGSGGSGGSGGSGGSGGSGGMDPLQLLQPLEAEIKGTKLKAHWNSGATITCVPQAFLEEEVPIKNIWIKTIHGEKEQPVYYLTFKIQGRKVEAEVISSPYDYILVSPSDIPWLMKKPLQLTTLVPLQEYEERLLKQTMLTGSYKEKLQSLFLKYDALWQHWENQVGHRRIKPHHIATGTVNPRPQKQYPINPKAKASIQTVINDLLKQGVLIQQNSIMNTPVYPVPKPDGKWRMVLDYREVNKTIPLIAAQNQHSAGILSSIFRGKYKTTLDLSNGFWAHSITPESYWLTAFTWLGQQYCWTRLPQGFLNSPALFTADVVDLLKEVPNVQVYVDDIYISHDDPREHLEQLEKVFSLLLNAGYVVSLKKSEIAQHEVEFLGFNITKEGRGLTETFKQKLLNITPPRDLKQLQSILGLLNFARNFIPNFSELVKPLYNIIATANGKYITWTTDNSQQLQNIISMLNSAENLEERNPEVRLIMKVNTSPSAGYIRFYNEFAKRPIMYLNYVYTKAEVKFTNTEKLLTTIHKGLIKALDLGMGQEILVYSPIVSMTKIQKTPLPERKALPIRWITWMSYLEDPRIQFHYDKTLPELQQVPTVTDDIIAKIKHPSEFSMVFYTDGSAIKHPNVNKSHNAGMGIAQVQFKPEFTVINTWSIPLGDHTAQLAEVAAVEFACKKALKIDGPVLIVTDSFYVAESVNKELPYWQSNGFFNNKKKPLKHVSKWKSIADCIQLKPDIIIIHEKGHQPTASTFHTEGNNLADKLATQGSYVVNAGKRTADGSEFEKRTADGSEFESPKKKAKVE

SEQ ID NO: 6102 - protein, 2094 aa, synthetic construct
MPAAKRVKLDGGDKKYSIGLDIGTNSVGWAVITDEYKVPSKKFKVLGNTDRHSIKKNLIGALLFDSGETAEATRLKRTARRRYTRRKNRICYLQEIFSNEMAKVDDSFFHRLEESFLVEEDKKHERHPIFGNIVDEVAYHEKYPTIYHLRKKLVDSTDKADLRLIYLALAHMIKFRGHFLIEGDLNPDNSDVDKLFIQLVQTYNQLFEENPINASGVDAKAILSARLSKSRRLENLIAQLPGEKKNGLFGNLIALSLGLTPNFKSNFDLAEDAKLQLSKDTYDDDLDNLLAQIGDQYADLFLAAKNLSDAILLSDILRVNTEITKAPLSASMIKRYDEHHQDLTLLKALVRQQLPEKYKEIFFDQSKNGYAGYIDGGASQEEFYKFIKPILEKMDGTEELLVKLNREDLLRKQRTFDNGSIPHQIHLGELHAILRRQEDFYPFLKDNREKIEKILTFRIPYYVGPLARGNSRFAWMTRKSEETITPWNFEEVVDKGASAQSFIERMTNFDKNLPNEKVLPKHSLLYEYFTVYNELTKVKYVTEGMRKPAFLSGEQKKAIVDLLFKTNRKVTVKQLKEDYFKKIECFDSVEISGVEDRFNASLGTYHDLLKIIKDKDFLDNEENEDILEDIVLTLTLFEDREMIEERLKTYAHLFDDKVMKQLKRRRYTGWGRLSRKLINGIRDKQSGKTILDFLKSDGFANRNFMQLIHDDSLTFKEDIQKAQVSGQGDSLHEHIANLAGSPAIKKGILQTVKVVDELVKVMGRHKPENIVIEMARENQTTQKGQKNSRERMKRIEEGIKELGSQILKEHPVENTQLQNEKLYLYYLQNGRDMYVDQELDINRLSDYDVDHIVPQSFLKDDSIDNKVLTRSDKARGKSDNVPSEEVVKKMKNYWRQLLNAKLITQRKFDNLTKAERGGLSELDKAGFIKRQLVETRQITKHVAQILDSRMNTKYDENDKLIREVKVITLKSKLVSDFRKDFQFYKVREINNYHHAHDAYLNAVVGTALIKKYPKLESEFVYGDYKVYDVRKMIAKSEQEIGKATAKYFFYSNIMNFFKTEITLANGEIRKRPLIETNGETGEIVWDKGRDFATVRKVLSMPQVNIVKKTEVQTGGFSKESILPKRNSDKLIARKKDWDPKKYGGFDSPTVAYSVLVVAKVEKGKSKKLKSVKELLGITIMERSSFEKNPIDFLEAKGYKEVKKDLIIKLPKYSLFELENGRKRMLASAGELQKGNELALPSKYVNFLYLASHYEKLKGSPEDNEQKQLFVEQHKHYLDEIIEQISEFSKRVILADANLDKVLSAYNKHRDKPIREQAENIIHLFTLTNLGAPAAFKYFDTTIDRKRYTSTKEVLDATLIHQSITGLYETRIDLSQLGGDGGGGSGGSGGSGGSGGSGGSGGIPWLMKKPLQLTTLVPLQEYEERLLKQTMLTGSYKEKLQSLFLKYDALWQHWENQVGHRRIKPHHIATGTVNPRPQKQYPINPKAKASIQTVINDLLKQGVLIQQNSIMNTPVYPVPKPDGKWRMVLDYREVNKTIPLIAAQNQHSAGILSSIFRGKYKTTLDLSNGFWAHSITPESYWLTAFTWLGQQYCWTRLPQGFLNSPALFNADVVDLLKEVPNVQVYVDDIYISHDDPREHLEQLEKVFSLLLNAGYVVSLKKSEIAQHEVEFLGFNITKEGRGLTETFKQKLLNITPPRDLKQLQSILGLLNFARNFIPNFSELVKPLYNIIATAPGKYITWTTDNSQQLQNIISMLNSAENLEERNPEVRLIMKVNTSPSAGYIRFYNEFAKRPIMYLNYVYTKAEVKFTNTEKLLTTIHKGLIKALDLGMGQEILVYSPIVSMTKIQKTPLPERKALPIRWITWMSYLEDPRIQFHYDKTLPELQQVPTVTDDIIAKIKHPSEFSMVFYTDGSAIKHPNVNKSHNAGMGIAQVQFKPEFTVINTWSIPLGDHTAQLAEVAAVEFACKKALKIDGPVLIVTDSFYVAESVNKELPYWQSNGFFNNKKKPLKHVSKWKSIADCIQLKPDIIIIHEKGHQPTASTFHTEGNNLADKLATQGSYVVNAGKRTADGSEFEKRTADGSEFESPKKKAKVE

SEQ ID NO: 6103 - protein, 2094 aa, synthetic construct
MPAAKRVKLDGGDKKYSIGLDIGTNSVGWAVITDEYKVPSKKFKVLGNTDRHSIKKNLIGALLFDSGETAEATRLKRTARRRYTRRKNRICYLQEIFSNEMAKVDDSFFHRLEESFLVEEDKKHERHPIFGNIVDEVAYHEKYPTIYHLRKKLVDSTDKADLRLIYLALAHMIKFRGHFLIEGDLNPDNSDVDKLFIQLVQTYNQLFEENPINASGVDAKAILSARLSKSRRLENLIAQLPGEKKNGLFGNLIALSLGLTPNFKSNFDLAEDAKLQLSKDTYDDDLDNLLAQIGDQYADLFLAAKNLSDAILLSDILRVNTEITKAPLSASMIKRYDEHHQDLTLLKALVRQQLPEKYKEIFFDQSKNGYAGYIDGGASQEEFYKFIKPILEKMDGTEELLVKLNREDLLRKQRTFDNGSIPHQIHLGELHAILRRQEDFYPFLKDNREKIEKILTFRIPYYVGPLARGNSRFAWMTRKSEETITPWNFEEVVDKGASAQSFIERMTNFDKNLPNEKVLPKHSLLYEYFTVYNELTKVKYVTEGMRKPAFLSGEQKKAIVDLLFKTNRKVTVKQLKEDYFKKIECFDSVEISGVEDRFNASLGTYHDLLKIIKDKDFLDNEENEDILEDIVLTLTLFEDREMIEERLKTYAHLFDDKVMKQLKRRRYTGWGRLSRKLINGIRDKQSGKTILDFLKSDGFANRNFMQLIHDDSLTFKEDIQKAQVSGQGDSLHEHIANLAGSPAIKKGILQTVKVVDELVKVMGRHKPENIVIEMARENQTTQKGQKNSRERMKRIEEGIKELGSQILKEHPVENTQLQNEKLYLYYLQNGRDMYVDQELDINRLSDYDVDHIVPQSFLKDDSIDNKVLTRSDKARGKSDNVPSEEVVKKMKNYWRQLLNAKLITQRKFDNLTKAERGGLSELDKAGFIKRQLVETRQITKHVAQILDSRMNTKYDENDKLIREVKVITLKSKLVSDFRKDFQFYKVREINNYHHAHDAYLNAVVGTALIKKYPKLESEFVYGDYKVYDVRKMIAKSEQEIGKATAKYFFYSNIMNFFKTEITLANGEIRKRPLIETNGETGEIVWDKGRDFATVRKVLSMPQVNIVKKTEVQTGGFSKESILPKRNSDKLIARKKDWDPKKYGGFDSPTVAYSVLVVAKVEKGKSKKLKSVKELLGITIMERSSFEKNPIDFLEAKGYKEVKKDLIIKLPKYSLFELENGRKRMLASAGELQKGNELALPSKYVNFLYLASHYEKLKGSPEDNEQKQLFVEQHKHYLDEIIEQISEFSKRVILADANLDKVLSAYNKHRDKPIREQAENIIHLFTLTNLGAPAAFKYFDTTIDRKRYTSTKEVLDATLIHQSITGLYETRIDLSQLGGDGGGGSGGSGGSGGSGGSGGSGGIPWLMKKPLQLTTLVPLQEYEERLLKQTMLTGSYKEKLQSLFLKYDALWQHWENQVGHRRIKPHHIATGTVNPRPQKQYPINPKAKASIQTVINDLLKQGVLIQQNSIMNTPVYPVPKPDGKWRMVLDYREVNKTIPLIAAQNQHSAGILSSIFRGKYKTTLDLSNGFWAHSITPESYWLTAFTWLGQQYCWTRLPQGFLNSPALFNADVVDLLKEVPNVQVYVDDIYISHDDPREHLEQLEKVFSLLLNAGYVVSLKKSEIAQHEVEFLGFNITKEGRGLTETFKQKLLNITPPRDLKQLQSILGKLNFARNFIPNFSELVKPLYNIIATAPGKYITWTTDNSQQLQNIISMLNSAENLEERNPEVRLIMKVNTSPSAGYIRFYNEFAKRPIMYLNYVYTKAEVKFTNTEKLLTTIHKGLIKALDLGMGQEILVYSPIVSMTKIQKTPLPERKALPIRWITWMSYLEDPRIQFHYDKTLPELQQVPTVTDDIIAKIKHPSEFSMVFYTDGSAIKHPNVNKSHNAGMGIAQVQFKPEFTVINTWSIPLGDHTAQLAEVAAVEFACKKALKIDGPVLIVTDSFYVAESVNKELPYWQSNGFFNNKKKPLKHVSKWKSIADCIQLKPDIIIIHEKGHQPTASTFHTEGNNLADKLATQGSYVVNAGKRTADGSEFEKRTADGSEFESPKKKAKVE

SEQ ID NO: 6104 - protein, 2024 aa, synthetic construct
MPAAKRVKLDGGDKKYSIGLDIGTNSVGWAVITDEYKVPSKKFKVLGNTDRHSIKKNLIGALLFDSGETAEATRLKRTARRRYTRRKNRICYLQEIFSNEMAKVDDSFFHRLEESFLVEEDKKHERHPIFGNIVDEVAYHEKYPTIYHLRKKLVDSTDKADLRLIYLALAHMIKFRGHFLIEGDLNPDNSDVDKLFIQLVQTYNQLFEENPINASGVDAKAILSARLSKSRRLENLIAQLPGEKKNGLFGNLIALSLGLTPNFKSNFDLAEDAKLQLSKDTYDDDLDNLLAQIGDQYADLFLAAKNLSDAILLSDILRVNTEITKAPLSASMIKRYDEHHQDLTLLKALVRQQLPEKYKEIFFDQSKNGYAGYIDGGASQEEFYKFIKPILEKMDGTEELLVKLNREDLLRKQRTFDNGSIPHQIHLGELHAILRRQEDFYPFLKDNREKIEKILTFRIPYYVGPLARGNSRFAWMTRKSEETITPWNFEEVVDKGASAQSFIERMTNFDKNLPNEKVLPKHSLLYEYFTVYNELTKVKYVTEGMRKPAFLSGEQKKAIVDLLFKTNRKVTVKQLKEDYFKKIECFDSVEISGVEDRFNASLGTYHDLLKIIKDKDFLDNEENEDILEDIVLTLTLFEDREMIEERLKTYAHLFDDKVMKQLKRRRYTGWGRLSRKLINGIRDKQSGKTILDFLKSDGFANRNFMQLIHDDSLTFKEDIQKAQVSGQGDSLHEHIANLAGSPAIKKGILQTVKVVDELVKVMGRHKPENIVIEMARENQTTQKGQKNSRERMKRIEEGIKELGSQILKEHPVENTQLQNEKLYLYYLQNGRDMYVDQELDINRLSDYDVDHIVPQSFLKDDSIDNKVLTRSDKARGKSDNVPSEEVVKKMKNYWRQLLNAKLITQRKFDNLTKAERGGLSELDKAGFIKRQLVETRQITKHVAQILDSRMNTKYDENDKLIREVKVITLKSKLVSDFRKDFQFYKVREINNYHHAHDAYLNAVVGTALIKKYPKLESEFVYGDYKVYDVRKMIAKSEQEIGKATAKYFFYSNIMNFFKTEITLANGEIRKRPLIETNGETGEIVWDKGRDFATVRKVLSMPQVNIVKKTEVQTGGFSKESILPKRNSDKLIARKKDWDPKKYGGFDSPTVAYSVLVVAKVEKGKSKKLKSVKELLGITIMERSSFEKNPIDFLEAKGYKEVKKDLIIKLPKYSLFELENGRKRMLASAGELQKGNELALPSKYVNFLYLASHYEKLKGSPEDNEQKQLFVEQHKHYLDEIIEQISEFSKRVILADANLDKVLSAYNKHRDKPIREQAENIIHLFTLTNLGAPAAFKYFDTTIDRKRYTSTKEVLDATLIHQSITGLYETRIDLSQLGGDGGGGSGGSGGSGGSGGSGGSGGPRSRAIDIPVPHADKISWKITDPVWVDQWPLTYEKTLAAIALVQEQLAAGHIEPTNSPWNTPIFIIKKKSGSWRLLQDLRAVNKVMVPMGALQPGLPSPVAIPLNYHKIVIDLKDCFFTIPLHPEDRPYFAFSVPQINFQSPMPRYQWKVLPQGMANSPTLCQKFVAAAIAPVRSQWPEAYILHYMDDILLACDSAEAAKACYAHIISCLTSYGLKIAPDKVQVSEPFSYLGFELHHQQVFTPRVCLKTDHLKTLNDFQKLLGDIQWLRPYLKLPTSALVPLNNILKGDPNPLSVRALTPEAKQSLALINKAIQNQSVQQISYNLPLVLLLLPTPHTPTAVFWQPNGTDPTKNGSPLLWLHLPASPSKVLLTYPSLLAMLIIKGRYTGRQLFGRDPHSIIIPYTQDQLTWLLQTSDEWAIALSSFTGDIDNHYPSDPVIQFAKLHQFIFPKITKCAPIPQATLVFTDGSSNGIAAYVIDNQPISIKSPYLSAQLVELYAILQVFTVLAHQPFNLYTDSAYIAQSVPLLETVPFIKSSTNATPLFSKLQQLILNRQHPFFIGHLRAHLNLPGPLAEGNALADAATQIFPIISDAGKRTADGSEFEKRTADGSEFESPKKKAKVE

SEQ ID NO: 6105 - protein, 2101 aa, synthetic construct
MPAAKRVKLDGGDKKYSIGLDIGTNSVGWAVITDEYKVPSKKFKVLGNTDRHSIKKNLIGALLFDSGETAEATRLKRTARRRYTRRKNRICYLQEIFSNEMAKVDDSFFHRLEESFLVEEDKKHERHPIFGNIVDEVAYHEKYPTIYHLRKKLVDSTDKADLRLIYLALAHMIKFRGHFLIEGDLNPDNSDVDKLFIQLVQTYNQLFEENPINASGVDAKAILSARLSKSRRLENLIAQLPGEKKNGLFGNLIALSLGLTPNFKSNFDLAEDAKLQLSKDTYDDDLDNLLAQIGDQYADLFLAAKNLSDAILLSDILRVNTEITKAPLSASMIKRYDEHHQDLTLLKALVRQQLPEKYKEIFFDQSKNGYAGYIDGGASQEEFYKFIKPILEKMDGTEELLVKLNREDLLRKQRTFDNGSIPHQIHLGELHAILRRQEDFYPFLKDNREKIEKILTFRIPYYVGPLARGNSRFAWMTRKSEETITPWNFEEVVDKGASAQSFIERMTNFDKNLPNEKVLPKHSLLYEYFTVYNELTKVKYVTEGMRKPAFLSGEQKKAIVDLLFKTNRKVTVKQLKEDYFKKIECFDSVEISGVEDRFNASLGTYHDLLKIIKDKDFLDNEENEDILEDIVLTLTLFEDREMIEERLKTYAHLFDDKVMKQLKRRRYTGWGRLSRKLINGIRDKQSGKTILDFLKSDGFANRNFMQLIHDDSLTFKEDIQKAQVSGQGDSLHEHIANLAGSPAIKKGILQTVKVVDELVKVMGRHKPENIVIEMARENQTTQKGQKNSRERMKRIEEGIKELGSQILKEHPVENTQLQNEKLYLYYLQNGRDMYVDQELDINRLSDYDVDHIVPQSFLKDDSIDNKVLTRSDKARGKSDNVPSEEVVKKMKNYWRQLLNAKLITQRKFDNLTKAERGGLSELDKAGFIKRQLVETRQITKHVAQILDSRMNTKYDENDKLIREVKVITLKSKLVSDFRKDFQFYKVREINNYHHAHDAYLNAVVGTALIKKYPKLESEFVYGDYKVYDVRKMIAKSEQEIGKATAKYFFYSNIMNFFKTEITLANGEIRKRPLIETNGETGEIVWDKGRDFATVRKVLSMPQVNIVKKTEVQTGGFSKESILPKRNSDKLIARKKDWDPKKYGGFDSPTVAYSVLVVAKVEKGKSKKLKSVKELLGITIMERSSFEKNPIDFLEAKGYKEVKKDLIIKLPKYSLFELENGRKRMLASAGELQKGNELALPSKYVNFLYLASHYEKLKGSPEDNEQKQLFVEQHKHYLDEIIEQISEFSKRVILADANLDKVLSAYNKHRDKPIREQAENIIHLFTLTNLGAPAAFKYFDTTIDRKRYTSTKEVLDATLIHQSITGLYETRIDLSQLGGDGGGGSGGSGGSGGSGGSGGSGGVLNLEEEYRLHEKPVPSSIDPSWLQLFPTVWAERAGMGLANQVPPVVVELRSGASPVAVRQYPMSKEAREGIRPHIQRFLDLGVLVPCQSPWNTPLLPVKKPGTNDYRPVQDLREINKRVQDIHPTVPNPYNLLSSLPPSHTWYSVLDLKDAFFCLKLHPNSQPLFAFEWRDPEKGNTGQLTWTRLPQGFKNSPTLFDEALHRDLAPFRALNPQVVLLQYVDDLLVAAPTYRDCKEGTQKLLQELSKLGYRVSAKKAQLCQKEVTYLGYLLKEGKRWLTPARKATVMKIPPPTTPRQVREFLGTAGFCRLWIPGFASLAAPLYPLTKESIPFIWTEEHQKAFDRIKEALLSAPALALPDLTKPFTLYVDERAGVARGVLTQTLGPWRRPVAYLSKKLDPVASGWPTCLKAVAAVALLLKDADKLTLGQNVTVIASHSLESIVRQPPDRWMTNARMTHYQSLLLNERVSFAPPAVLNPATLLPVESEATPVHRCSEILAEETGTRRDLKDQPLPGVPAWYTDGSSFIAEGKRRAGAAIVDGKRTVWASSLPEGTSAQKAELVALTQALRLAEGKDINIYTDSRYAFATAHIHGAIYKQRGLLTSAGKDIKNKEEILALLEAIHLPKRVAIIHCPGHQKGNDPVATGNRRADEAAKQAALSTRVLAETTKPAGKRTADGSEFEKRTADGSEFESPKKKAKVE

SEQ ID NO: 6106 - protein, 2101 aa, synthetic construct
MPAAKRVKLDGGDKKYSIGLDIGTNSVGWAVITDEYKVPSKKFKVLGNTDRHSIKKNLIGALLFDSGETAEATRLKRTARRRYTRRKNRICYLQEIFSNEMAKVDDSFFHRLEESFLVEEDKKHERHPIFGNIVDEVAYHEKYPTIYHLRKKLVDSTDKADLRLIYLALAHMIKFRGHFLIEGDLNPDNSDVDKLFIQLVQTYNQLFEENPINASGVDAKAILSARLSKSRRLENLIAQLPGEKKNGLFGNLIALSLGLTPNFKSNFDLAEDAKLQLSKDTYDDDLDNLLAQIGDQYADLFLAAKNLSDAILLSDILRVNTEITKAPLSASMIKRYDEHHQDLTLLKALVRQQLPEKYKEIFFDQSKNGYAGYIDGGASQEEFYKFIKPILEKMDGTEELLVKLNREDLLRKQRTFDNGSIPHQIHLGELHAILRRQEDFYPFLKDNREKIEKILTFRIPYYVGPLARGNSRFAWMTRKSEETITPWNFEEVVDKGASAQSFIERMTNFDKNLPNEKVLPKHSLLYEYFTVYNELTKVKYVTEGMRKPAFLSGEQKKAIVDLLFKTNRKVTVKQLKEDYFKKIECFDSVEISGVEDRFNASLGTYHDLLKIIKDKDFLDNEENEDILEDIVLTLTLFEDREMIEERLKTYAHLFDDKVMKQLKRRRYTGWGRLSRKLINGIRDKQSGKTILDFLKSDGFANRNFMQLIHDDSLTFKEDIQKAQVSGQGDSLHEHIANLAGSPAIKKGILQTVKVVDELVKVMGRHKPENIVIEMARENQTTQKGQKNSRERMKRIEEGIKELGSQILKEHPVENTQLQNEKLYLYYLQNGRDMYVDQELDINRLSDYDVDHIVPQSFLKDDSIDNKVLTRSDKARGKSDNVPSEEVVKKMKNYWRQLLNAKLITQRKFDNLTKAERGGLSELDKAGFIKRQLVETRQITKHVAQILDSRMNTKYDENDKLIREVKVITLKSKLVSDFRKDFQFYKVREINNYHHAHDAYLNAVVGTALIKKYPKLESEFVYGDYKVYDVRKMIAKSEQEIGKATAKYFFYSNIMNFFKTEITLANGEIRKRPLIETNGETGEIVWDKGRDFATVRKVLSMPQVNIVKKTEVQTGGFSKESILPKRNSDKLIARKKDWDPKKYGGFDSPTVAYSVLVVAKVEKGKSKKLKSVKELLGITIMERSSFEKNPIDFLEAKGYKEVKKDLIIKLPKYSLFELENGRKRMLASAGELQKGNELALPSKYVNFLYLASHYEKLKGSPEDNEQKQLFVEQHKHYLDEIIEQISEFSKRVILADANLDKVLSAYNKHRDKPIREQAENIIHLFTLTNLGAPAAFKYFDTTIDRKRYTSTKEVLDATLIHQSITGLYETRIDLSQLGGDGGGGSGGSGGSGGSGGSGGSGGVLNLEEEYRLHEKPVPSSIDPSWLQLFPTVWAERAGMGLANQVPPVVVELRSGASPVAVRQYPMSKEAREGIRPHIQRFLDLGVLVPCQSPWNTPLLPVKKPGTNDYRPVQDLREINKRVQDIHPTVPNPYNLLSSLPPSHTWYSVLDLKDAFFCLKLHPNSQPLFAFEWRDPEKGNTGQLTWTRLPQGFKNSPTLFNEALHRDLAPFRALNPQVVLLQYVDDLLVAAPTYRDCKEGTQKLLQELSKLGYRVSAKKAQLCQKEVTYLGYLLKEGKRWLTPARKATVMKIPPPTTPRQVREFLGTAGFCRLWIPGFASLAAPLYPLTKPSIPFIWTEEHQKAFDRIKEALLSAPALALPDLTKPFTLYVDERAGVARGVLTQTLGPWRRPVAYLSKKLDPVASGWPTCLKAVAAVALLLKDADKLTLGQNVTVIASHSLESIVRQPPDRWMTNARMTHYQSLLLNERVSFAPPAVLNPATLLPVESEATPVHRCSEILAEETGTRRDLKDQPLPGVPAWYTDGSSFIAEGKRRAGAAIVDGKRTVWASSLPEGTSAQKAELVALTQALRLAEGKDINIYTDSRYAFATAHIHGAIYKQRGWLTSAGKDIKNKEEILALLEAIHLPKRVAIIHCPGHQKGNDPVATGNRRADEAAKQAALSTRVLAETTKPAGKRTADGSEFEKRTADGSEFESPKKKAKVE

SEQ ID NO: 6107 - protein, 2103 aa, synthetic construct
MPAAKRVKLDGGDKKYSIGLDIGTNSVGWAVITDEYKVPSKKFKVLGNTDRHSIKKNLIGALLFDSGETAEATRLKRTARRRYTRRKNRICYLQEIFSNEMAKVDDSFFHRLEESFLVEEDKKHERHPIFGNIVDEVAYHEKYPTIYHLRKKLVDSTDKADLRLIYLALAHMIKFRGHFLIEGDLNPDNSDVDKLFIQLVQTYNQLFEENPINASGVDAKAILSARLSKSRRLENLIAQLPGEKKNGLFGNLIALSLGLTPNFKSNFDLAEDAKLQLSKDTYDDDLDNLLAQIGDQYADLFLAAKNLSDAILLSDILRVNTEITKAPLSASMIKRYDEHHQDLTLLKALVRQQLPEKYKEIFFDQSKNGYAGYIDGGASQEEFYKFIKPILEKMDGTEELLVKLNREDLLRKQRTFDNGSIPHQIHLGELHAILRRQEDFYPFLKDNREKIEKILTFRIPYYVGPLARGNSRFAWMTRKSEETITPWNFEEVVDKGASAQSFIERMTNFDKNLPNEKVLPKHSLLYEYFTVYNELTKVKYVTEGMRKPAFLSGEQKKAIVDLLFKTNRKVTVKQLKEDYFKKIECFDSVEISGVEDRFNASLGTYHDLLKIIKDKDFLDNEENEDILEDIVLTLTLFEDREMIEERLKTYAHLFDDKVMKQLKRRRYTGWGRLSRKLINGIRDKQSGKTILDFLKSDGFANRNFMQLIHDDSLTFKEDIQKAQVSGQGDSLHEHIANLAGSPAIKKGILQTVKVVDELVKVMGRHKPENIVIEMARENQTTQKGQKNSRERMKRIEEGIKELGSQILKEHPVENTQLQNEKLYLYYLQNGRDMYVDQELDINRLSDYDVDHIVPQSFLKDDSIDNKVLTRSDKARGKSDNVPSEEVVKKMKNYWRQLLNAKLITQRKFDNLTKAERGGLSELDKAGFIKRQLVETRQITKHVAQILDSRMNTKYDENDKLIREVKVITLKSKLVSDFRKDFQFYKVREINNYHHAHDAYLNAVVGTALIKKYPKLESEFVYGDYKVYDVRKMIAKSEQEIGKATAKYFFYSNIMNFFKTEITLANGEIRKRPLIETNGETGEIVWDKGRDFATVRKVLSMPQVNIVKKTEVQTGGFSKESILPKRNSDKLIARKKDWDPKKYGGFDSPTVAYSVLVVAKVEKGKSKKLKSVKELLGITIMERSSFEKNPIDFLEAKGYKEVKKDLIIKLPKYSLFELENGRKRMLASAGELQKGNELALPSKYVNFLYLASHYEKLKGSPEDNEQKQLFVEQHKHYLDEIIEQISEFSKRVILADANLDKVLSAYNKHRDKPIREQAENIIHLFTLTNLGAPAAFKYFDTTIDRKRYTSTKEVLDATLIHQSITGLYETRIDLSQLGGDGGGGSGGSGGSGGSGGSGGSGGTLNIEDEYRLHETSKEPDVPLGSTWLSDFPQAWAETGGMGLAVRQAPLIIPLKATSTPVSIKQYPMSQEARLGIKPHIQRLLDQGILVPCQSPWNTPLLPVKKPGTNDYRPVQDLREVNKRVEDIHPTVPNPYNLLSGLPPSHQWYTVLDLKDAFFCLRLHPTSQPLFAFEWRDPEMGISGQLTWTRLPQGFKNSPTLFNEALHRDLADFRIQHPDLILLQYVDDLLLAATSEQDCQRGTRALLQTLGNLGYRASAKKAQICQKQVKYLGYLLKEGQRWLTEARKETVMGQPTPKTPRQLREFLGKAGFCRLFIPGFAEMAAPLYPLTKPGTLFNWGPDQQKAYQEIKQALLTAPALGLPDLTKPFELFVDEKQGYAKGVLTQKLGPWRRPVAYLSKKLDPVAAGWPPCLRMVAAIAVLTKDAGKLTMGQPLVILAPHAVEALVKQPPDRWLSNARMTHYQAMLLDTDRVQFGPVVALNPATLLPLPEKEAPHDCLEILAETHGTRPDLTDQPIPDADYTWYTDGSSFLQEGQRRAGAAVTTETEVIWARALPAGTSAQRAELIALTQALKMAEGKKLNVYTDSRYAFATAHVHGEIYRRRGWLTSEGREIKNKNEILALLKALFLPKRLSIIHCPGHQKGNSAEARGNRMADQAAREAAMKAVLETSTLLAGKRTADGSEFEKRTADGSEFESPKKKAKVE

SEQ ID NO: 6108 - protein, 2092 aa, synthetic construct
MPAAKRVKLDGGDKKYSIGLDIGTNSVGWAVITDEYKVPSKKFKVLGNTDRHSIKKNLIGALLFDSGETAEATRLKRTARRRYTRRKNRICYLQEIFSNEMAKVDDSFFHRLEESFLVEEDKKHERHPIFGNIVDEVAYHEKYPTIYHLRKKLVDSTDKADLRLIYLALAHMIKFRGHFLIEGDLNPDNSDVDKLFIQLVQTYNQLFEENPINASGVDAKAILSARLSKSRRLENLIAQLPGEKKNGLFGNLIALSLGLTPNFKSNFDLAEDAKLQLSKDTYDDDLDNLLAQIGDQYADLFLAAKNLSDAILLSDILRVNTEITKAPLSASMIKRYDEHHQDLTLLKALVRQQLPEKYKEIFFDQSKNGYAGYIDGGASQEEFYKFIKPILEKMDGTEELLVKLNREDLLRKQRTFDNGSIPHQIHLGELHAILRRQEDFYPFLKDNREKIEKILTFRIPYYVGPLARGNSRFAWMTRKSEETITPWNFEEVVDKGASAQSFIERMTNFDKNLPNEKVLPKHSLLYEYFTVYNELTKVKYVTEGMRKPAFLSGEQKKAIVDLLFKTNRKVTVKQLKEDYFKKIECFDSVEISGVEDRFNASLGTYHDLLKIIKDKDFLDNEENEDILEDIVLTLTLFEDREMIEERLKTYAHLFDDKVMKQLKRRRYTGWGRLSRKLINGIRDKQSGKTILDFLKSDGFANRNFMQLIHDDSLTFKEDIQKAQVSGQGDSLHEHIANLAGSPAIKKGILQTVKVVDELVKVMGRHKPENIVIEMARENQTTQKGQKNSRERMKRIEEGIKELGSQILKEHPVENTQLQNEKLYLYYLQNGRDMYVDQELDINRLSDYDVDHIVPQSFLKDDSIDNKVLTRSDKARGKSDNVPSEEVVKKMKNYWRQLLNAKLITQRKFDNLTKAERGGLSELDKAGFIKRQLVETRQITKHVAQILDSRMNTKYDENDKLIREVKVITLKSKLVSDFRKDFQFYKVREINNYHHAHDAYLNAVVGTALIKKYPKLESEFVYGDYKVYDVRKMIAKSEQEIGKATAKYFFYSNIMNFFKTEITLANGEIRKRPLIETNGETGEIVWDKGRDFATVRKVLSMPQVNIVKKTEVQTGGFSKESILPKRNSDKLIARKKDWDPKKYGGFDSPTVAYSVLVVAKVEKGKSKKLKSVKELLGITIMERSSFEKNPIDFLEAKGYKEVKKDLIIKLPKYSLFELENGRKRMLASAGELQKGNELALPSKYVNFLYLASHYEKLKGSPEDNEQKQLFVEQHKHYLDEIIEQISEFSKRVILADANLDKVLSAYNKHRDKPIREQAENIIHLFTLTNLGAPAAFKYFDTTIDRKRYTSTKEVLDATLIHQSITGLYETRIDLSQLGGDGGGGGGSGGTAPLEEEYRLFLEAPIQNVTLLEQWKREIPKVWAEINPPGLASTQAPIHVQLLSTALPVRVRQYPITLEAKRSLRETIRKFRAAGILRPVHSPWNTPLLPVRKSGTSEYRMVQDLREVNKRVETIHPTVPNPYTLLSLLPPDRIWYSVLDLKDAFFCIPLAPESQLIFAFEWADAEEGESGQLTWTRLPQGFKNSPTLFNEALNRDLQGFRLDHPSVSLLQYVDDLLIAADTQAACLSATRDLLMTLAELGYRVSGKKAQLCQEEVTYLGFKIHKGSRSLSNSRTQAILQIPVPKTKRQVREFLGKIGYCRLFIPGFAELAQPLYAATRPGNDPLVWGEKEEEAFQSLKLALTQPPALALPSLDKPFQLFVEETSGAAKGVLTQALGPWKRPVAYLSKRLDPVAAGWPRCLRAIAAAALLTREASKLTFGQDIEITSSHNLESLLRSPPDKWLTNARITQYQVLLLDPPRVRFKQTAALNPATLLPETDDTLPIHHCLDTLDSLTSTRPDLTDQPLAQAEATLFTDGSSYIRDGKRYAGAAVVTLDSVIWAEPLPIGTSAQKAELIALTKALEWSKDKSVNIYTDSRYAFATLHVHGMIYRERGWLTAGGKAIKNAPEILALLTAVWLPKRVAVMHCKGHQKDDAPTSTGNRRADEVAREVAIRPLSTQATISAGKRTADGSEFEKRTADGSEFESPKKKAKVE

SEQ ID NO: 6109 - protein, 2081 aa, synthetic construct
MPAAKRVKLDGGDKKYSIGLDIGTNSVGWAVITDEYKVPSKKFKVLGNTDRHSIKKNLIGALLFDSGETAEATRLKRTARRRYTRRKNRICYLQEIFSNEMAKVDDSFFHRLEESFLVEEDKKHERHPIFGNIVDEVAYHEKYPTIYHLRKKLVDSTDKADLRLIYLALAHMIKFRGHFLIEGDLNPDNSDVDKLFIQLVQTYNQLFEENPINASGVDAKAILSARLSKSRRLENLIAQLPGEKKNGLFGNLIALSLGLTPNFKSNFDLAEDAKLQLSKDTYDDDLDNLLAQIGDQYADLFLAAKNLSDAILLSDILRVNTEITKAPLSASMIKRYDEHHQDLTLLKALVRQQLPEKYKEIFFDQSKNGYAGYIDGGASQEEFYKFIKPILEKMDGTEELLVKLNREDLLRKQRTFDNGSIPHQIHLGELHAILRRQEDFYPFLKDNREKIEKILTFRIPYYVGPLARGNSRFAWMTRKSEETITPWNFEEVVDKGASAQSFIERMTNFDKNLPNEKVLPKHSLLYEYFTVYNELTKVKYVTEGMRKPAFLSGEQKKAIVDLLFKTNRKVTVKQLKEDYFKKIECFDSVEISGVEDRFNASLGTYHDLLKIIKDKDFLDNEENEDILEDIVLTLTLFEDREMIEERLKTYAHLFDDKVMKQLKRRRYTGWGRLSRKLINGIRDKQSGKTILDFLKSDGFANRNFMQLIHDDSLTFKEDIQKAQVSGQGDSLHEHIANLAGSPAIKKGILQTVKVVDELVKVMGRHKPENIVIEMARENQTTQKGQKNSRERMKRIEEGIKELGSQILKEHPVENTQLQNEKLYLYYLQNGRDMYVDQELDINRLSDYDVDHIVPQSFLKDDSIDNKVLTRSDKARGKSDNVPSEEVVKKMKNYWRQLLNAKLITQRKFDNLTKAERGGLSELDKAGFIKRQLVETRQITKHVAQILDSRMNTKYDENDKLIREVKVITLKSKLVSDFRKDFQFYKVREINNYHHAHDAYLNAVVGTALIKKYPKLESEFVYGDYKVYDVRKMIAKSEQEIGKATAKYFFYSNIMNFFKTEITLANGEIRKRPLIETNGETGEIVWDKGRDFATVRKVLSMPQVNIVKKTEVQTGGFSKESILPKRNSDKLIARKKDWDPKKYGGFDSPTVAYSVLVVAKVEKGKSKKLKSVKELLGITIMERSSFEKNPIDFLEAKGYKEVKKDLIIKLPKYSLFELENGRKRMLASAGELQKGNELALPSKYVNFLYLASHYEKLKGSPEDNEQKQLFVEQHKHYLDEIIEQISEFSKRVILADANLDKVLSAYNKHRDKPIREQAENIIHLFTLTNLGAPAAFKYFDTTIDRKRYTSTKEVLDATLIHQSITGLYETRIDLSQLGGDGGGGGGSGGVPWILKKPLELTIKLDLEEQQGTLLNNSILSKKGKEELKQLFEKYSALWQSWENQVGHRRIRPHKIATGTVKPTPQKQYHINPKAKPDIQIVINDLLKQGVLIQKESTMNTPVYPVPKPNGRWRMVLDYRAVNKVTPLIAVQNQHSYGILGSLFKGRYKTTIDLSNGFWAHPIVPEDYWITAFTWQGKQYCWTVLPQGFLNSPGLFTGDVVDLLQGIPNVEVYVDDVYISHDSEKEHLEYLDILFNRLKEAGYIISLKKSNIANSIVDFLGFQITNEGRGLTDTFKEKLENITAPTTLKQLQSILGLLNFARNFIPDFTELIAPLYALIPKSTKNYVPWQIEHSTTLETLITKLNGAEYLQGRKGDKTLIMKVNASYTTGYIRYYNEGEKKPISYVSIVFSKTELKFTELEKLLTTVHKGLLKALDLSMGQNIHVYSPIVSMQNIQKTPQTAKKALASRWLSWLSYLEDPRIRFFYDPQMPALKDLPAVDTGKDNKKHPSNFQHIFYTDGSAITSPTKEGHLNAGMGIVYFINKDGNLQKQQEWSISLGNHTAQFAEIAAFEFALKKCLPLGGNILVVTDSNYVAKAYNEELDVWASNGFVNNRKKPLKHISKWKSVADLKRLRPDVVVTHEPGHQKLDSSPHAYGNNLADQLATQASFKVHAGKRTADGSEFEKRTADGSEFESPKKKAKVE

SEQ ID NO: 6110 - protein, 2088 aa, synthetic construct
MPAAKRVKLDGGDKKYSIGLDIGTNSVGWAVITDEYKVPSKKFKVLGNTDRHSIKKNLIGALLFDSGETAEATRLKRTARRRYTRRKNRICYLQEIFSNEMAKVDDSFFHRLEESFLVEEDKKHERHPIFGNIVDEVAYHEKYPTIYHLRKKLVDSTDKADLRLIYLALAHMIKFRGHFLIEGDLNPDNSDVDKLFIQLVQTYNQLFEENPINASGVDAKAILSARLSKSRRLENLIAQLPGEKKNGLFGNLIALSLGLTPNFKSNFDLAEDAKLQLSKDTYDDDLDNLLAQIGDQYADLFLAAKNLSDAILLSDILRVNTEITKAPLSASMIKRYDEHHQDLTLLKALVRQQLPEKYKEIFFDQSKNGYAGYIDGGASQEEFYKFIKPILEKMDGTEELLVKLNREDLLRKQRTFDNGSIPHQIHLGELHAILRRQEDFYPFLKDNREKIEKILTFRIPYYVGPLARGNSRFAWMTRKSEETITPWNFEEVVDKGASAQSFIERMTNFDKNLPNEKVLPKHSLLYEYFTVYNELTKVKYVTEGMRKPAFLSGEQKKAIVDLLFKTNRKVTVKQLKEDYFKKIECFDSVEISGVEDRFNASLGTYHDLLKIIKDKDFLDNEENEDILEDIVLTLTLFEDREMIEERLKTYAHLFDDKVMKQLKRRRYTGWGRLSRKLINGIRDKQSGKTILDFLKSDGFANRNFMQLIHDDSLTFKEDIQKAQVSGQGDSLHEHIANLAGSPAIKKGILQTVKVVDELVKVMGRHKPENIVIEMARENQTTQKGQKNSRERMKRIEEGIKELGSQILKEHPVENTQLQNEKLYLYYLQNGRDMYVDQELDINRLSDYDVDHIVPQSFLKDDSIDNKVLTRSDKARGKSDNVPSEEVVKKMKNYWRQLLNAKLITQRKFDNLTKAERGGLSELDKAGFIKRQLVETRQITKHVAQILDSRMNTKYDENDKLIREVKVITLKSKLVSDFRKDFQFYKVREINNYHHAHDAYLNAVVGTALIKKYPKLESEFVYGDYKVYDVRKMIAKSEQEIGKATAKYFFYSNIMNFFKTEITLANGEIRKRPLIETNGETGEIVWDKGRDFATVRKVLSMPQVNIVKKTEVQTGGFSKESILPKRNSDKLIARKKDWDPKKYGGFDSPTVAYSVLVVAKVEKGKSKKLKSVKELLGITIMERSSFEKNPIDFLEAKGYKEVKKDLIIKLPKYSLFELENGRKRMLASAGELQKGNELALPSKYVNFLYLASHYEKLKGSPEDNEQKQLFVEQHKHYLDEIIEQISEFSKRVILADANLDKVLSAYNKHRDKPIREQAENIIHLFTLTNLGAPAAFKYFDTTIDRKRYTSTKEVLDATLIHQSITGLYETRIDLSQLGGDGGGGGGSGGVLNLEEEYRLHEKPVPSSIDPSWLQLFPTVWAERAGMGLANQVPPVVVELRSGASPVAVRQYPMSKEAREGIRPHIQKFLDLGVLVPCRSPWNTPLLPVKKPGTNDYRPVQDLREINKRVQDIHPTVPNPYNLLSSLPPSYTWYSVLDLKDAFFCLRLHPNSQPLFAFEWKDPEKGNTGQLTWTRLPQGFKNSPTLFNEALHRDLAPFRALNPQVVLLQYVDDLLVAAPTYEDCKKGTQKLLQELSKLGYRVSAKKAQLCQREVTYLGYLLKEGKRWLTPARKATVMKIPVPTTPRQVREFLGTAGFCRLWIPGFASLAAPLYPLTKPSIPFIWTEEHQQAFDHIKKALLSAPALALPDLTKPFTLYIDERAGVARGVLTQTLGPWRRPVAYLSKKLDPVASGWPTCLKAVAAVALLLKDADKLTLGQNVTVIASHSLESIVRQPPDRWMTNARMTHYQSLLLNERVSFAPPAVLNPATLLPVESEATPVHRCSEILAEETGTRRDLEDQPLPGVPTWYTDGSSFITEGKRRAGAPIVDGKRTVWASSLPEGTSAQKAELVALTQALRLAEGKNINIYTDSRYAFATAHIHGAIYKQRGWLTSAGKDIKNKEEILALLEAIHLPRRVAIIHCPGHQRGSNPVATGNRRADEAAKQAALSTRVLAGTTKPAGKRTADGSEFEKRTADGSEFESPKKKAKVE

SEQ ID NO: 6111 - protein, 2090 aa, synthetic construct
MPAAKRVKLDGGDKKYSIGLDIGTNSVGWAVITDEYKVPSKKFKVLGNTDRHSIKKNLIGALLFDSGETAEATRLKRTARRRYTRRKNRICYLQEIFSNEMAKVDDSFFHRLEESFLVEEDKKHERHPIFGNIVDEVAYHEKYPTIYHLRKKLVDSTDKADLRLIYLALAHMIKFRGHFLIEGDLNPDNSDVDKLFIQLVQTYNQLFEENPINASGVDAKAILSARLSKSRRLENLIAQLPGEKKNGLFGNLIALSLGLTPNFKSNFDLAEDAKLQLSKDTYDDDLDNLLAQIGDQYADLFLAAKNLSDAILLSDILRVNTEITKAPLSASMIKRYDEHHQDLTLLKALVRQQLPEKYKEIFFDQSKNGYAGYIDGGASQEEFYKFIKPILEKMDGTEELLVKLNREDLLRKQRTFDNGSIPHQIHLGELHAILRRQEDFYPFLKDNREKIEKILTFRIPYYVGPLARGNSRFAWMTRKSEETITPWNFEEVVDKGASAQSFIERMTNFDKNLPNEKVLPKHSLLYEYFTVYNELTKVKYVTEGMRKPAFLSGEQKKAIVDLLFKTNRKVTVKQLKEDYFKKIECFDSVEISGVEDRFNASLGTYHDLLKIIKDKDFLDNEENEDILEDIVLTLTLFEDREMIEERLKTYAHLFDDKVMKQLKRRRYTGWGRLSRKLINGIRDKQSGKTILDFLKSDGFANRNFMQLIHDDSLTFKEDIQKAQVSGQGDSLHEHIANLAGSPAIKKGILQTVKVVDELVKVMGRHKPENIVIEMARENQTTQKGQKNSRERMKRIEEGIKELGSQILKEHPVENTQLQNEKLYLYYLQNGRDMYVDQELDINRLSDYDVDHIVPQSFLKDDSIDNKVLTRSDKARGKSDNVPSEEVVKKMKNYWRQLLNAKLITQRKFDNLTKAERGGLSELDKAGFIKRQLVETRQITKHVAQILDSRMNTKYDENDKLIREVKVITLKSKLVSDFRKDFQFYKVREINNYHHAHDAYLNAVVGTALIKKYPKLESEFVYGDYKVYDVRKMIAKSEQEIGKATAKYFFYSNIMNFFKTEITLANGEIRKRPLIETNGETGEIVWDKGRDFATVRKVLSMPQVNIVKKTEVQTGGFSKESILPKRNSDKLIARKKDWDPKKYGGFDSPTVAYSVLVVAKVEKGKSKKLKSVKELLGITIMERSSFEKNPIDFLEAKGYKEVKKDLIIKLPKYSLFELENGRKRMLASAGELQKGNELALPSKYVNFLYLASHYEKLKGSPEDNEQKQLFVEQHKHYLDEIIEQISEFSKRVILADANLDKVLSAYNKHRDKPIREQAENIIHLFTLTNLGAPAAFKYFDTTIDRKRYTSTKEVLDATLIHQSITGLYETRIDLSQLGGDGGGGGGSGGTLNIEDEYRLHETSKEPDVSLGSTWLSDFPQAWAETGGMGLAVRQAPLIIPLKATSTPVSIKQYPMSQEARLGIKPHIQRLLDQGILVPCQSPWNTPLLPVKKPGTNDYRPVQDLREVNKRVEDIHPTVPNPYNLLSGLPPSHQWYTVLDLKDAFFCLRLHPTSQPLFAFEWRDPEMGISGQLTWTRLPQGFKNSPTLFDEALHRDLAGFRIQHPDLILLQYVDDLLLAATSELDCQQGTRALLQTLGDLGYRASAKKAQICQKQVKYLGYLLKEGQRWLTEARKETVMGQPIPKTPRQLREFLGTAGFCRLWIPGFAEMAAPLYPLTKTGTLFNWGPDQQKAFQEIKQALLTAPALGLPDLTKPFELFVDEKQGYAKGVLTQKLGPWRRPVAYLSKKLDPVAAGWPPCLRMVAAIAVLTKDAGKLTMGQPLVILAPHAVEALVKQPPDRWLSNARMTHYQALLLDTDRVQFGPVVALNPATLLPLPEEGLQHDCLDILAEAHGTRSDLMDQPLPDADHTWYTDGSSFLQEGQRKAGAAVTTETEVIWARALPAGTSAQRAELIALTQALKMAEGKKLNVYTDSRYAFATAHIHGEIYRRRGLLTSEGKEIKNKDEILALLKALFLPKRLSIIHCPGHQKGNSAEARGNRMADQAAREVATRETPETSTLLAGKRTADGSEFEKRTADGSEFESPKKKAKVE

SEQ ID NO: 6112 - protein, 2090 aa, synthetic construct
MPAAKRVKLDGGDKKYSIGLDIGTNSVGWAVITDEYKVPSKKFKVLGNTDRHSIKKNLIGALLFDSGETAEATRLKRTARRRYTRRKNRICYLQEIFSNEMAKVDDSFFHRLEESFLVEEDKKHERHPIFGNIVDEVAYHEKYPTIYHLRKKLVDSTDKADLRLIYLALAHMIKFRGHFLIEGDLNPDNSDVDKLFIQLVQTYNQLFEENPINASGVDAKAILSARLSKSRRLENLIAQLPGEKKNGLFGNLIALSLGLTPNFKSNFDLAEDAKLQLSKDTYDDDLDNLLAQIGDQYADLFLAAKNLSDAILLSDILRVNTEITKAPLSASMIKRYDEHHQDLTLLKALVRQQLPEKYKEIFFDQSKNGYAGYIDGGASQEEFYKFIKPILEKMDGTEELLVKLNREDLLRKQRTFDNGSIPHQIHLGELHAILRRQEDFYPFLKDNREKIEKILTFRIPYYVGPLARGNSRFAWMTRKSEETITPWNFEEVVDKGASAQSFIERMTNFDKNLPNEKVLPKHSLLYEYFTVYNELTKVKYVTEGMRKPAFLSGEQKKAIVDLLFKTNRKVTVKQLKEDYFKKIECFDSVEISGVEDRFNASLGTYHDLLKIIKDKDFLDNEENEDILEDIVLTLTLFEDREMIEERLKTYAHLFDDKVMKQLKRRRYTGWGRLSRKLINGIRDKQSGKTILDFLKSDGFANRNFMQLIHDDSLTFKEDIQKAQVSGQGDSLHEHIANLAGSPAIKKGILQTVKVVDELVKVMGRHKPENIVIEMARENQTTQKGQKNSRERMKRIEEGIKELGSQILKEHPVENTQLQNEKLYLYYLQNGRDMYVDQELDINRLSDYDVDHIVPQSFLKDDSIDNKVLTRSDKARGKSDNVPSEEVVKKMKNYWRQLLNAKLITQRKFDNLTKAERGGLSELDKAGFIKRQLVETRQITKHVAQILDSRMNTKYDENDKLIREVKVITLKSKLVSDFRKDFQFYKVREINNYHHAHDAYLNAVVGTALIKKYPKLESEFVYGDYKVYDVRKMIAKSEQEIGKATAKYFFYSNIMNFFKTEITLANGEIRKRPLIETNGETGEIVWDKGRDFATVRKVLSMPQVNIVKKTEVQTGGFSKESILPKRNSDKLIARKKDWDPKKYGGFDSPTVAYSVLVVAKVEKGKSKKLKSVKELLGITIMERSSFEKNPIDFLEAKGYKEVKKDLIIKLPKYSLFELENGRKRMLASAGELQKGNELALPSKYVNFLYLASHYEKLKGSPEDNEQKQLFVEQHKHYLDEIIEQISEFSKRVILADANLDKVLSAYNKHRDKPIREQAENIIHLFTLTNLGAPAAFKYFDTTIDRKRYTSTKEVLDATLIHQSITGLYETRIDLSQLGGDGGGGGGSGGTLNIEDEYRLHETSKEPDVSLGSTWLSDFPQAWAETGGMGLAVRQAPLIIPLKATSTPVSIKQYPMSQEARLGIKPHIQRLLDQGILVPCQSPWNTPLLPVKKPGTNDYRPVQDLREVNKRVEDIHPTVPNPYNLLSGLPPSHQWYTVLDLKDAFFCLRLHPTSQPLFAFEWRDPEMGISGQLTWTRLPQGFKNSPTLFNEALHRDLAGFRIQHPDLILLQYVDDLLLAATSELDCQQGTRALLQTLGDLGYRASAKKAQICQKQVKYLGYLLKEGQRWLTEARKETVMGQPIPKTPRQLREFLGTAGFCRLWIPGFAEMAAPLYPLTKPGTLFNWGPDQQKAFQEIKQALLTAPALGLPDLTKPFELFVDEKQGYAKGVLTQKLGPWRRPVAYLSKKLDPVAAGWPPCLRMVAAIAVLTKDAGKLTMGQPLVILAPHAVEALVKQPPDRWLSNARMTHYQALLLDTDRVQFGPVVALNPATLLPLPEEGLQHDCLDILAEAHGTRSDLMDQPLPDADHTWYTDGSSFLQEGQRKAGAAVTTETEVIWARALPAGTSAQRAELIALTQALKMAEGKKLNVYTDSRYAFATAHIHGEIYRRRGWLTSEGKEIKNKDEILALLKALFLPKRLSIIHCPGHQKGNSAEARGNRMADQAAREVATRETPETSTLLAGKRTADGSEFEKRTADGSEFESPKKKAKVE

SEQ ID NO: 6113 - protein, 2110 aa, synthetic construct
MPAAKRVKLDGGDKKYSIGLDIGTNSVGWAVITDEYKVPSKKFKVLGNTDRHSIKKNLIGALLFDSGETAEATRLKRTARRRYTRRKNRICYLQEIFSNEMAKVDDSFFHRLEESFLVEEDKKHERHPIFGNIVDEVAYHEKYPTIYHLRKKLVDSTDKADLRLIYLALAHMIKFRGHFLIEGDLNPDNSDVDKLFIQLVQTYNQLFEENPINASGVDAKAILSARLSKSRRLENLIAQLPGEKKNGLFGNLIALSLGLTPNFKSNFDLAEDAKLQLSKDTYDDDLDNLLAQIGDQYADLFLAAKNLSDAILLSDILRVNTEITKAPLSASMIKRYDEHHQDLTLLKALVRQQLPEKYKEIFFDQSKNGYAGYIDGGASQEEFYKFIKPILEKMDGTEELLVKLNREDLLRKQRTFDNGSIPHQIHLGELHAILRRQEDFYPFLKDNREKIEKILTFRIPYYVGPLARGNSRFAWMTRKSEETITPWNFEEVVDKGASAQSFIERMTNFDKNLPNEKVLPKHSLLYEYFTVYNELTKVKYVTEGMRKPAFLSGEQKKAIVDLLFKTNRKVTVKQLKEDYFKKIECFDSVEISGVEDRFNASLGTYHDLLKIIKDKDFLDNEENEDILEDIVLTLTLFEDREMIEERLKTYAHLFDDKVMKQLKRRRYTGWGRLSRKLINGIRDKQSGKTILDFLKSDGFANRNFMQLIHDDSLTFKEDIQKAQVSGQGDSLHEHIANLAGSPAIKKGILQTVKVVDELVKVMGRHKPENIVIEMARENQTTQKGQKNSRERMKRIEEGIKELGSQILKEHPVENTQLQNEKLYLYYLQNGRDMYVDQELDINRLSDYDVDHIVPQSFLKDDSIDNKVLTRSDKARGKSDNVPSEEVVKKMKNYWRQLLNAKLITQRKFDNLTKAERGGLSELDKAGFIKRQLVETRQITKHVAQILDSRMNTKYDENDKLIREVKVITLKSKLVSDFRKDFQFYKVREINNYHHAHDAYLNAVVGTALIKKYPKLESEFVYGDYKVYDVRKMIAKSEQEIGKATAKYFFYSNIMNFFKTEITLANGEIRKRPLIETNGETGEIVWDKGRDFATVRKVLSMPQVNIVKKTEVQTGGFSKESILPKRNSDKLIARKKDWDPKKYGGFDSPTVAYSVLVVAKVEKGKSKKLKSVKELLGITIMERSSFEKNPIDFLEAKGYKEVKKDLIIKLPKYSLFELENGRKRMLASAGELQKGNELALPSKYVNFLYLASHYEKLKGSPEDNEQKQLFVEQHKHYLDEIIEQISEFSKRVILADANLDKVLSAYNKHRDKPIREQAENIIHLFTLTNLGAPAAFKYFDTTIDRKRYTSTKEVLDATLIHQSITGLYETRIDLSQLGGDGGGGGGSGGVQEISDSRPMLHIYLNGRRFLGLLDTGADKTCIAGRDWPANWPIHQTESSLQGLGMACGVARSSQPLRWQHEDKSGIIHPFVIPTLPFTLWGRDIMKDIKVRLMTDSPDDSQDLMIGAIESNLFADQISWKSDQPVWLNQWPLKQEKLQALQQLVTEQLQLGHLEESNSPWNTPVFVIKKKSGKWRLLQDLRAVNATMHDMGALQPGLPSPVAVPKGWEIIIIDLQDCFFNIKLHPEDCKRFAFSVPSPNFKRPYQRFQWKVLPQGMKNSPTLCQKFVDKAILTVRDKYQDSYIVHYMDDILLAHPSRSIVDEILTSMIQALNKHGLVVSTEKIQKYDNLKYLGTHIQGDSVSYQKLQIRTDKLRTLNDFQKLLGNINWIRPFLKLTTGELKPLFEILNGDSNPISTRKLTPEACKALQLMNERLSTARVKRLDLSQPWSLCILKTEYTPTACLWQDGVVEWIHLPHISPKVITPYDIFCTQLIIKGRHRSKELFSKDPDYIVVPYTKVQFDLLLQEKEDWPISLLGFLGEVHFHLPKDPLLTFTLQTAIIFPHMTSTTPLEKGIVIFTDGSANGRSVTYIQGREPIIKENTQNTAQQAEIVAVITAFEEVSQPFNLYTDSKYVTGLFPEIETATLSPRTKIYTELKHLQRLIHKRQEKFYIGHIRGHTGLPGPLAQGNAYADSLTRILTAAGKRTADGSEFEKRTADGSEFESPKKKAKVE

SEQ ID NO: 6114 - protein, 2170 aa, synthetic construct
MPAAKRVKLDGGDKKYSIGLDIGTNSVGWAVITDEYKVPSKKFKVLGNTDRHSIKKNLIGALLFDSGETAEATRLKRTARRRYTRRKNRICYLQEIFSNEMAKVDDSFFHRLEESFLVEEDKKHERHPIFGNIVDEVAYHEKYPTIYHLRKKLVDSTDKADLRLIYLALAHMIKFRGHFLIEGDLNPDNSDVDKLFIQLVQTYNQLFEENPINASGVDAKAILSARLSKSRRLENLIAQLPGEKKNGLFGNLIALSLGLTPNFKSNFDLAEDAKLQLSKDTYDDDLDNLLAQIGDQYADLFLAAKNLSDAILLSDILRVNTEITKAPLSASMIKRYDEHHQDLTLLKALVRQQLPEKYKEIFFDQSKNGYAGYIDGGASQEEFYKFIKPILEKMDGTEELLVKLNREDLLRKQRTFDNGSIPHQIHLGELHAILRRQEDFYPFLKDNREKIEKILTFRIPYYVGPLARGNSRFAWMTRKSEETITPWNFEEVVDKGASAQSFIERMTNFDKNLPNEKVLPKHSLLYEYFTVYNELTKVKYVTEGMRKPAFLSGEQKKAIVDLLFKTNRKVTVKQLKEDYFKKIECFDSVEISGVEDRFNASLGTYHDLLKIIKDKDFLDNEENEDILEDIVLTLTLFEDREMIEERLKTYAHLFDDKVMKQLKRRRYTGWGRLSRKLINGIRDKQSGKTILDFLKSDGFANRNFMQLIHDDSLTFKEDIQKAQVSGQGDSLHEHIANLAGSPAIKKGILQTVKVVDELVKVMGRHKPENIVIEMARENQTTQKGQKNSRERMKRIEEGIKELGSQILKEHPVENTQLQNEKLYLYYLQNGRDMYVDQELDINRLSDYDVDHIVPQSFLKDDSIDNKVLTRSDKARGKSDNVPSEEVVKKMKNYWRQLLNAKLITQRKFDNLTKAERGGLSELDKAGFIKRQLVETRQITKHVAQILDSRMNTKYDENDKLIREVKVITLKSKLVSDFRKDFQFYKVREINNYHHAHDAYLNAVVGTALIKKYPKLESEFVYGDYKVYDVRKMIAKSEQEIGKATAKYFFYSNIMNFFKTEITLANGEIRKRPLIETNGETGEIVWDKGRDFATVRKVLSMPQVNIVKKTEVQTGGFSKESILPKRNSDKLIARKKDWDPKKYGGFDSPTVAYSVLVVAKVEKGKSKKLKSVKELLGITIMERSSFEKNPIDFLEAKGYKEVKKDLIIKLPKYSLFELENGRKRMLASAGELQKGNELALPSKYVNFLYLASHYEKLKGSPEDNEQKQLFVEQHKHYLDEIIEQISEFSKRVILADANLDKVLSAYNKHRDKPIREQAENIIHLFTLTNLGAPAAFKYFDTTIDRKRYTSTKEVLDATLIHQSITGLYETRIDLSQLGGDGGGGGGSGGMDPLQLLQPLEAEIKGTKLKAHWNSGATITCVPEAFLEDERPIQTMLIKTIHGEKQQDVYYLTFKVQGRKVEAEVLASPYDYILLNPSDVPWLMKKPLQLTVLVPLHEYQERLLQQTALPKEQKELLQKLFLKYDALWQHWENQVGHRRIKPHNIATGTLAPRPQKQYPINPKAKPSIQIVIDDLLKQGVLIQQNSTMNTPVYPVPKPDGKWRMVLDYREVNKTIPLIAAQNQHSAGILSSIYRGKYKTTLDLTNGFWAHPITPESYWLTAFTWQGKQYCWTRLPQGFLNSPALFNADVVDLLKEIPNVQAYVDDIYISHDDPQEHLEQLEKIFSILLNAGYVVSLKKSEIAQREVEFLGFNITKEGRGLTDTFKQKLLNITPPKDLKQLQSILGKLNFARNFIPNYSELVKPLYTIVAPANGKFISWTEDNSNQLQHIISVLNQADNLEERNPETRLIIKVNSSPSAGYIRYYNEGSKRPIMYVNYIFSKAEAKFTQTEKLLTTMHKGLIKAMDLAMGQEILVYSPIVSMTKIQRTPLPERKALPVRWITWMTYLEDPRIQFHYDKSLPELQQIPNVTEDVIAKTKHPSEFAMVFYTDGSAIKHPDVNKSHSAGMGIAQVQFIPEYKIVHQWSIPLGDHTAQLAEIAAVEFACKKALKISGPVLIVTDSFYVAESANKELPYWKSNGFLNNKKKPLRHVSKWKSIAECLQLKPDIIIMHEKGHQQPMTTLHTEGNNLADKLATQGSYVVHAGKRTADGSEFEKRTADGSEFESPKKKAKVE

SEQ ID NO: 6115 - protein, 2088 aa, synthetic construct
MPAAKRVKLDGGDKKYSIGLDIGTNSVGWAVITDEYKVPSKKFKVLGNTDRHSIKKNLIGALLFDSGETAEATRLKRTARRRYTRRKNRICYLQEIFSNEMAKVDDSFFHRLEESFLVEEDKKHERHPIFGNIVDEVAYHEKYPTIYHLRKKLVDSTDKADLRLIYLALAHMIKFRGHFLIEGDLNPDNSDVDKLFIQLVQTYNQLFEENPINASGVDAKAILSARLSKSRRLENLIAQLPGEKKNGLFGNLIALSLGLTPNFKSNFDLAEDAKLQLSKDTYDDDLDNLLAQIGDQYADLFLAAKNLSDAILLSDILRVNTEITKAPLSASMIKRYDEHHQDLTLLKALVRQQLPEKYKEIFFDQSKNGYAGYIDGGASQEEFYKFIKPILEKMDGTEELLVKLNREDLLRKQRTFDNGSIPHQIHLGELHAILRRQEDFYPFLKDNREKIEKILTFRIPYYVGPLARGNSRFAWMTRKSEETITPWNFEEVVDKGASAQSFIERMTNFDKNLPNEKVLPKHSLLYEYFTVYNELTKVKYVTEGMRKPAFLSGEQKKAIVDLLFKTNRKVTVKQLKEDYFKKIECFDSVEISGVEDRFNASLGTYHDLLKIIKDKDFLDNEENEDILEDIVLTLTLFEDREMIEERLKTYAHLFDDKVMKQLKRRRYTGWGRLSRKLINGIRDKQSGKTILDFLKSDGFANRNFMQLIHDDSLTFKEDIQKAQVSGQGDSLHEHIANLAGSPAIKKGILQTVKVVDELVKVMGRHKPENIVIEMARENQTTQKGQKNSRERMKRIEEGIKELGSQILKEHPVENTQLQNEKLYLYYLQNGRDMYVDQELDINRLSDYDVDHIVPQSFLKDDSIDNKVLTRSDKARGKSDNVPSEEVVKKMKNYWRQLLNAKLITQRKFDNLTKAERGGLSELDKAGFIKRQLVETRQITKHVAQILDSRMNTKYDENDKLIREVKVITLKSKLVSDFRKDFQFYKVREINNYHHAHDAYLNAVVGTALIKKYPKLESEFVYGDYKVYDVRKMIAKSEQEIGKATAKYFFYSNIMNFFKTEITLANGEIRKRPLIETNGETGEIVWDKGRDFATVRKVLSMPQVNIVKKTEVQTGGFSKESILPKRNSDKLIARKKDWDPKKYGGFDSPTVAYSVLVVAKVEKGKSKKLKSVKELLGITIMERSSFEKNPIDFLEAKGYKEVKKDLIIKLPKYSLFELENGRKRMLASAGELQKGNELALPSKYVNFLYLASHYEKLKGSPEDNEQKQLFVEQHKHYLDEIIEQISEFSKRVILADANLDKVLSAYNKHRDKPIREQAENIIHLFTLTNLGAPAAFKYFDTTIDRKRYTSTKEVLDATLIHQSITGLYETRIDLSQLGGDGGGGGGSGGVLNLEEEYRLHEKPVPSSIDPSWLQLFPTVWAERAGMGLANQVPPVVVELRSGASPVAVRQYPMSKEAREGIRPHIQRFLDLGVLVPCQSPWNTPLLPVKKPGTNDYRPVQDLREINKRVQDIHPTVPNPYNLLSSLPPSHTWYSVLDLKDAFFCLKLHPNSQPLFAFEWRDPEKGNTGQLTWTRLPQGFKNSPTLFNEALHRDLAPFRALNPQVVLLQYVDDLLVAAPTYRDCKEGTQKLLQELSKLGYRVSAKKAQLCQKEVTYLGYLLKEGKRWLTPARKATVMKIPPPTTPRQVREFLGTAGFCRLWIPGFASLAAPLYPLTKPSIPFIWTEEHQKAFDRIKEALLSAPALALPDLTKPFTLYVDERAGVARGVLTQTLGPWRRPVAYLSKKLDPVASGWPTCLKAVAAVALLLKDADKLTLGQNVTVIASHSLESIVRQPPDRWMTNARMTHYQSLLLNERVSFAPPAVLNPATLLPVESEATPVHRCSEILAEETGTRRDLKDQPLPGVPAWYTDGSSFIAEGKRRAGAAIVDGKRTVWASSLPEGTSAQKAELVALTQALRLAEGKDINIYTDSRYAFATAHIHGAIYKQRGWLTSAGKDIKNKEEILALLEAIHLPKRVAIIHCPGHQKGNDPVATGNRRADEAAKQAALSTRVLAETTKPAGKRTADGSEFEKRTADGSEFESPKKKAKVE

SEQ ID NO: 6116 - protein, 2088 aa, synthetic construct
MPAAKRVKLDGGDKKYSIGLDIGTNSVGWAVITDEYKVPSKKFKVLGNTDRHSIKKNLIGALLFDSGETAEATRLKRTARRRYTRRKNRICYLQEIFSNEMAKVDDSFFHRLEESFLVEEDKKHERHPIFGNIVDEVAYHEKYPTIYHLRKKLVDSTDKADLRLIYLALAHMIKFRGHFLIEGDLNPDNSDVDKLFIQLVQTYNQLFEENPINASGVDAKAILSARLSKSRRLENLIAQLPGEKKNGLFGNLIALSLGLTPNFKSNFDLAEDAKLQLSKDTYDDDLDNLLAQIGDQYADLFLAAKNLSDAILLSDILRVNTEITKAPLSASMIKRYDEHHQDLTLLKALVRQQLPEKYKEIFFDQSKNGYAGYIDGGASQEEFYKFIKPILEKMDGTEELLVKLNREDLLRKQRTFDNGSIPHQIHLGELHAILRRQEDFYPFLKDNREKIEKILTFRIPYYVGPLARGNSRFAWMTRKSEETITPWNFEEVVDKGASAQSFIERMTNFDKNLPNEKVLPKHSLLYEYFTVYNELTKVKYVTEGMRKPAFLSGEQKKAIVDLLFKTNRKVTVKQLKEDYFKKIECFDSVEISGVEDRFNASLGTYHDLLKIIKDKDFLDNEENEDILEDIVLTLTLFEDREMIEERLKTYAHLFDDKVMKQLKRRRYTGWGRLSRKLINGIRDKQSGKTILDFLKSDGFANRNFMQLIHDDSLTFKEDIQKAQVSGQGDSLHEHIANLAGSPAIKKGILQTVKVVDELVKVMGRHKPENIVIEMARENQTTQKGQKNSRERMKRIEEGIKELGSQILKEHPVENTQLQNEKLYLYYLQNGRDMYVDQELDINRLSDYDVDHIVPQSFLKDDSIDNKVLTRSDKARGKSDNVPSEEVVKKMKNYWRQLLNAKLITQRKFDNLTKAERGGLSELDKAGFIKRQLVETRQITKHVAQILDSRMNTKYDENDKLIREVKVITLKSKLVSDFRKDFQFYKVREINNYHHAHDAYLNAVVGTALIKKYPKLESEFVYGDYKVYDVRKMIAKSEQEIGKATAKYFFYSNIMNFFKTEITLANGEIRKRPLIETNGETGEIVWDKGRDFATVRKVLSMPQVNIVKKTEVQTGGFSKESILPKRNSDKLIARKKDWDPKKYGGFDSPTVAYSVLVVAKVEKGKSKKLKSVKELLGITIMERSSFEKNPIDFLEAKGYKEVKKDLIIKLPKYSLFELENGRKRMLASAGELQKGNELALPSKYVNFLYLASHYEKLKGSPEDNEQKQLFVEQHKHYLDEIIEQISEFSKRVILADANLDKVLSAYNKHRDKPIREQAENIIHLFTLTNLGAPAAFKYFDTTIDRKRYTSTKEVLDATLIHQSITGLYETRIDLSQLGGDGGGGGGSGGVLNLEEEYRLHEKPVPSSIDPSWLQLFPTVWAERAGMGLANQVPPVVVELRSGASPVAVRQYPMSKEAREGIRPHIQRFLDLGVLVPCQSPWNTPLLPVKKPGTNDYRPVQDLREINKRVQDIHPTVPNPYNLLSSLPPSHTWYSVLDLKDAFFCLKLHPNSQPLFAFEWRDPEKGNTGQLTWTRLPQGFKNSPTLFNEALHRDLAPFRALNPQVVLLQYVDDLLVAAPTYRDCKEGTQKLLQELSKLGYRVSAKKAQLCQKEVTYLGYLLKEGKRWLTPARKATVMKIPPPTTPRQVREFLGKAGFCRLFIPGFASLAAPLYPLTKPSIPFIWTEEHQKAFDRIKEALLSAPALALPDLTKPFTLYVDERAGVARGVLTQTLGPWRRPVAYLSKKLDPVASGWPTCLKAVAAVALLLKDADKLTLGQNVTVIASHSLESIVRQPPDRWMTNARMTHYQSLLLNERVSFAPPAVLNPATLLPVESEATPVHRCSEILAEETGTRRDLKDQPLPGVPAWYTDGSSFIAEGKRRAGAAIVDGKRTVWASSLPEGTSAQKAELVALTQALRLAEGKDINIYTDSRYAFATAHIHGAIYKQRGWLTSAGKDIKNKEEILALLEAIHLPKRVAIIHCPGHQKGNDPVATGNRRADEAAKQAALSTRVLAETTKPAGKRTADGSEFEKRTADGSEFESPKKKAKVE

SEQ ID NO: 6117 - protein, 2090 aa, synthetic construct
MPAAKRVKLDGGDKKYSIGLDIGTNSVGWAVITDEYKVPSKKFKVLGNTDRHSIKKNLIGALLFDSGETAEATRLKRTARRRYTRRKNRICYLQEIFSNEMAKVDDSFFHRLEESFLVEEDKKHERHPIFGNIVDEVAYHEKYPTIYHLRKKLVDSTDKADLRLIYLALAHMIKFRGHFLIEGDLNPDNSDVDKLFIQLVQTYNQLFEENPINASGVDAKAILSARLSKSRRLENLIAQLPGEKKNGLFGNLIALSLGLTPNFKSNFDLAEDAKLQLSKDTYDDDLDNLLAQIGDQYADLFLAAKNLSDAILLSDILRVNTEITKAPLSASMIKRYDEHHQDLTLLKALVRQQLPEKYKEIFFDQSKNGYAGYIDGGASQEEFYKFIKPILEKMDGTEELLVKLNREDLLRKQRTFDNGSIPHQIHLGELHAILRRQEDFYPFLKDNREKIEKILTFRIPYYVGPLARGNSRFAWMTRKSEETITPWNFEEVVDKGASAQSFIERMTNFDKNLPNEKVLPKHSLLYEYFTVYNELTKVKYVTEGMRKPAFLSGEQKKAIVDLLFKTNRKVTVKQLKEDYFKKIECFDSVEISGVEDRFNASLGTYHDLLKIIKDKDFLDNEENEDILEDIVLTLTLFEDREMIEERLKTYAHLFDDKVMKQLKRRRYTGWGRLSRKLINGIRDKQSGKTILDFLKSDGFANRNFMQLIHDDSLTFKEDIQKAQVSGQGDSLHEHIANLAGSPAIKKGILQTVKVVDELVKVMGRHKPENIVIEMARENQTTQKGQKNSRERMKRIEEGIKELGSQILKEHPVENTQLQNEKLYLYYLQNGRDMYVDQELDINRLSDYDVDHIVPQSFLKDDSIDNKVLTRSDKARGKSDNVPSEEVVKKMKNYWRQLLNAKLITQRKFDNLTKAERGGLSELDKAGFIKRQLVETRQITKHVAQILDSRMNTKYDENDKLIREVKVITLKSKLVSDFRKDFQFYKVREINNYHHAHDAYLNAVVGTALIKKYPKLESEFVYGDYKVYDVRKMIAKSEQEIGKATAKYFFYSNIMNFFKTEITLANGEIRKRPLIETNGETGEIVWDKGRDFATVRKVLSMPQVNIVKKTEVQTGGFSKESILPKRNSDKLIARKKDWDPKKYGGFDSPTVAYSVLVVAKVEKGKSKKLKSVKELLGITIMERSSFEKNPIDFLEAKGYKEVKKDLIIKLPKYSLFELENGRKRMLASAGELQKGNELALPSKYVNFLYLASHYEKLKGSPEDNEQKQLFVEQHKHYLDEIIEQISEFSKRVILADANLDKVLSAYNKHRDKPIREQAENIIHLFTLTNLGAPAAFKYFDTTIDRKRYTSTKEVLDATLIHQSITGLYETRIDLSQLGGDGGGGGGSGGTLNIEDEYRLHETSKEPDVPLGSTWLSDFPQAWAETGGMGLAVRQAPLIIPLKATSTPVSIKQYPMSQEARLGIKPHIQRLLDQGILVPCQSPWNTPLLPVKKPGTNDYRPVQDLREVNKRVEDIHPTVPNPYNLLSGLPPSHQWYTVLDLKDAFFCLRLHPTSQPLFAFEWRDPEMGISGQLTWTRLPQGFKNSPTLFNEALHRDLADFRIQHPDLILLQYVDDLLLAATSEQDCQRGTRALLQTLGNLGYRASAKKAQICQKQVKYLGYLLKEGQRWLTEARKETVMGQPTPKTPRQLREFLGKAGFCRLFIPGFAEMAAPLYPLTKPGTLFNWGPDQQKAYQEIKQALLTAPALGLPDLTKPFELFVDEKQGYAKGVLTQKLGPWRRPVAYLSKKLDPVAAGWPPCLRMVAAIAVLTKDAGKLTMGQPLVILAPHAVEALVKQPPDRWLSNARMTHYQAMLLDTDRVQFGPVVALNPATLLPLPEKEAPHDCLEILAETHGTRPDLTDQPIPDADYTWYTDGSSFLQEGQRRAGAAVTTETEVIWARALPAGTSAQRAELIALTQALKMAEGKKLNVYTDSRYAFATAHVHGEIYRRRGWLTSEGREIKNKNEILALLKALFLPKRLSIIHCPGHQKGNSAEARGNRMADQAAREAAMKAVLETSTLLAGKRTADGSEFEKRTADGSEFESPKKKAKVE

SEQ ID NO: 6118 - protein, 2101 aa, synthetic construct
MPAAKRVKLDGGDKKYSIGLDIGTNSVGWAVITDEYKVPSKKFKVLGNTDRHSIKKNLIGALLFDSGETAEATRLKRTARRRYTRRKNRICYLQEIFSNEMAKVDDSFFHRLEESFLVEEDKKHERHPIFGNIVDEVAYHEKYPTIYHLRKKLVDSTDKADLRLIYLALAHMIKFRGHFLIEGDLNPDNSDVDKLFIQLVQTYNQLFEENPINASGVDAKAILSARLSKSRRLENLIAQLPGEKKNGLFGNLIALSLGLTPNFKSNFDLAEDAKLQLSKDTYDDDLDNLLAQIGDQYADLFLAAKNLSDAILLSDILRVNTEITKAPLSASMIKRYDEHHQDLTLLKALVRQQLPEKYKEIFFDQSKNGYAGYIDGGASQEEFYKFIKPILEKMDGTEELLVKLNREDLLRKQRTFDNGSIPHQIHLGELHAILRRQEDFYPFLKDNREKIEKILTFRIPYYVGPLARGNSRFAWMTRKSEETITPWNFEEVVDKGASAQSFIERMTNFDKNLPNEKVLPKHSLLYEYFTVYNELTKVKYVTEGMRKPAFLSGEQKKAIVDLLFKTNRKVTVKQLKEDYFKKIECFDSVEISGVEDRFNASLGTYHDLLKIIKDKDFLDNEENEDILEDIVLTLTLFEDREMIEERLKTYAHLFDDKVMKQLKRRRYTGWGRLSRKLINGIRDKQSGKTILDFLKSDGFANRNFMQLIHDDSLTFKEDIQKAQVSGQGDSLHEHIANLAGSPAIKKGILQTVKVVDELVKVMGRHKPENIVIEMARENQTTQKGQKNSRERMKRIEEGIKELGSQILKEHPVENTQLQNEKLYLYYLQNGRDMYVDQELDINRLSDYDVDHIVPQSFLKDDSIDNKVLTRSDKARGKSDNVPSEEVVKKMKNYWRQLLNAKLITQRKFDNLTKAERGGLSELDKAGFIKRQLVETRQITKHVAQILDSRMNTKYDENDKLIREVKVITLKSKLVSDFRKDFQFYKVREINNYHHAHDAYLNAVVGTALIKKYPKLESEFVYGDYKVYDVRKMIAKSEQEIGKATAKYFFYSNIMNFFKTEITLANGEIRKRPLIETNGETGEIVWDKGRDFATVRKVLSMPQVNIVKKTEVQTGGFSKESILPKRNSDKLIARKKDWDPKKYGGFDSPTVAYSVLVVAKVEKGKSKKLKSVKELLGITIMERSSFEKNPIDFLEAKGYKEVKKDLIIKLPKYSLFELENGRKRMLASAGELQKGNELALPSKYVNFLYLASHYEKLKGSPEDNEQKQLFVEQHKHYLDEIIEQISEFSKRVILADANLDKVLSAYNKHRDKPIREQAENIIHLFTLTNLGAPAAFKYFDTTIDRKRYTSTKEVLDATLIHQSITGLYETRIDLSQLGGDGGGGGGSGGGGSGGTVSLQDEHRLFDIPVTTSLPDVWLQDFPQAWAETGGLGRAKCQAPIIIDLKPTAVPVSIKQYPMSLEAHMGIRQHIIKFLELGVLRPCRSPWNTPLLPVKKPGTQDYRPVQDLREINKRTVDIHPTVPNPYNLLSTLKPDYSWYTVLDLKDAFFCLPLAPQSQELFAFEWKDPERGISGQLTWTRLPQGFKNSPTLFNEALHRDLTDFRTQHPEVTLLQYVDDLLLAAPTKKACTQGTRHLLQELGEKGYRASAKKAQICQTKVTYLGYILSEGKRWLTPGRIETVARIPPPRNPREVREFLGKAGFCRLFIPGFAELAAPLYALTKPSTPFTWQTEHQLAFEALKKALLSAPALGLPDTSKPFTLFLDERQGIAKGVLTQKLGPWKRPVAYLSKKLDPVAAGWPPCLRIMAATAMLVKDSAKLTLGQPLTVITPHTLEAIVRQPPDRWITNARLTHYQALLLDTDRVQFGPPVTLNPATLLPVPENQPSPHDCRQVLAETHGTREDLKDQELPDADHTWYTDGSSYLDSGTRRAGAAVVDGHNTIWAQSLPPGTSAQKAELIALTKALELSKGKKANIYTDSRYAFATAHTHGSIYERRGWLTSEGKEIKNKAEIIALLKALFLPQEVAIIHCPGHQKGQDPVAVGNRQADRVARQAAMAEVLTLATEPDNTSHITAGKRTADGSEFEKRTADGSEFESPKKKAKVE

SEQ ID NO: 6119 - protein, 2175 aa, synthetic construct
MPAAKRVKLDGGDKKYSIGLDIGTNSVGWAVITDEYKVPSKKFKVLGNTDRHSIKKNLIGALLFDSGETAEATRLKRTARRRYTRRKNRICYLQEIFSNEMAKVDDSFFHRLEESFLVEEDKKHERHPIFGNIVDEVAYHEKYPTIYHLRKKLVDSTDKADLRLIYLALAHMIKFRGHFLIEGDLNPDNSDVDKLFIQLVQTYNQLFEENPINASGVDAKAILSARLSKSRRLENLIAQLPGEKKNGLFGNLIALSLGLTPNFKSNFDLAEDAKLQLSKDTYDDDLDNLLAQIGDQYADLFLAAKNLSDAILLSDILRVNTEITKAPLSASMIKRYDEHHQDLTLLKALVRQQLPEKYKEIFFDQSKNGYAGYIDGGASQEEFYKFIKPILEKMDGTEELLVKLNREDLLRKQRTFDNGSIPHQIHLGELHAILRRQEDFYPFLKDNREKIEKILTFRIPYYVGPLARGNSRFAWMTRKSEETITPWNFEEVVDKGASAQSFIERMTNFDKNLPNEKVLPKHSLLYEYFTVYNELTKVKYVTEGMRKPAFLSGEQKKAIVDLLFKTNRKVTVKQLKEDYFKKIECFDSVEISGVEDRFNASLGTYHDLLKIIKDKDFLDNEENEDILEDIVLTLTLFEDREMIEERLKTYAHLFDDKVMKQLKRRRYTGWGRLSRKLINGIRDKQSGKTILDFLKSDGFANRNFMQLIHDDSLTFKEDIQKAQVSGQGDSLHEHIANLAGSPAIKKGILQTVKVVDELVKVMGRHKPENIVIEMARENQTTQKGQKNSRERMKRIEEGIKELGSQILKEHPVENTQLQNEKLYLYYLQNGRDMYVDQELDINRLSDYDVDHIVPQSFLKDDSIDNKVLTRSDKARGKSDNVPSEEVVKKMKNYWRQLLNAKLITQRKFDNLTKAERGGLSELDKAGFIKRQLVETRQITKHVAQILDSRMNTKYDENDKLIREVKVITLKSKLVSDFRKDFQFYKVREINNYHHAHDAYLNAVVGTALIKKYPKLESEFVYGDYKVYDVRKMIAKSEQEIGKATAKYFFYSNIMNFFKTEITLANGEIRKRPLIETNGETGEIVWDKGRDFATVRKVLSMPQVNIVKKTEVQTGGFSKESILPKRNSDKLIARKKDWDPKKYGGFDSPTVAYSVLVVAKVEKGKSKKLKSVKELLGITIMERSSFEKNPIDFLEAKGYKEVKKDLIIKLPKYSLFELENGRKRMLASAGELQKGNELALPSKYVNFLYLASHYEKLKGSPEDNEQKQLFVEQHKHYLDEIIEQISEFSKRVILADANLDKVLSAYNKHRDKPIREQAENIIHLFTLTNLGAPAAFKYFDTTIDRKRYTSTKEVLDATLIHQSITGLYETRIDLSQLGGDGGGGGGSGGGGSGGMNPLQLLQPLPAEIKGTKLLAHWNSGATITCIPESFLEDEQPIKKTLIKTIHGEKQQNVYYVTFKVKGRKVEAEVIASPYEYILLSPTDVPWLTQQPLQLTILVPLQEYQEKILSKTALPEDQKQQLKTLFVKYDNLWQHWENQVGHRKIRPHNIATGDYPPRPQKQYPINPKAKPSIQIVIDDLLKQGVLTPQNSTMNTPVYPVPKPDGRWRMVLDYREVNKTIPLTAAQNQHSAGILATIVRQKYKTTLDLANGFWAHPITPESYWLTAFTWQGKQYCWTRLPQGFLNSPALFNADVVDLLKEIPNVQVYVDDIYLSHDDPKEHVQQLEKVFQILLQAGYVVSLKKSEIGQKTVEFLGFNITKEGRGLTDTFKTKLLNITPPKDLKQLQSILGKLNFARNFIPNFAELVQPLYNLIAPAKGKYIEWSEENTKQLNMVIEALNTASNLEERLPEQRLVIKVNTSPSAGYVRYYNETGKKPIMYLNYVFSKAELKFSMLEKLLTTMHKALIKAMDLAMGQEILVYSPIVSMTKIQKTPLPERKALPIRWITWMTYLEDPRIQFHYDKTLPELKHIPDVYTSSQSPVKHPSQYEGVFYTDGSAIKSPDPTKSNNAGMGIVHATYKPEYQVLNQWSIPLGNHTAQMAEIAAVEFACKKALKIPGPVLVITDSFYVAESANKELPYWKSNGFVNNKKKPLKHISKWKSIAECLSMKPDITIQHEKGISLQIPVFILKGNALADKLATQGSYVVNAGKRTADGSEFEKRTADGSEFESPKKKAKVE

SEQ ID NO: 6120 - protein, 2217 aa, synthetic construct
MPAAKRVKLDGGDKKYSIGLDIGTNSVGWAVITDEYKVPSKKFKVLGNTDRHSIKKNLIGALLFDSGETAEATRLKRTARRRYTRRKNRICYLQEIFSNEMAKVDDSFFHRLEESFLVEEDKKHERHPIFGNIVDEVAYHEKYPTIYHLRKKLVDSTDKADLRLIYLALAHMIKFRGHFLIEGDLNPDNSDVDKLFIQLVQTYNQLFEENPINASGVDAKAILSARLSKSRRLENLIAQLPGEKKNGLFGNLIALSLGLTPNFKSNFDLAEDAKLQLSKDTYDDDLDNLLAQIGDQYADLFLAAKNLSDAILLSDILRVNTEITKAPLSASMIKRYDEHHQDLTLLKALVRQQLPEKYKEIFFDQSKNGYAGYIDGGASQEEFYKFIKPILEKMDGTEELLVKLNREDLLRKQRTFDNGSIPHQIHLGELHAILRRQEDFYPFLKDNREKIEKILTFRIPYYVGPLARGNSRFAWMTRKSEETITPWNFEEVVDKGASAQSFIERMTNFDKNLPNEKVLPKHSLLYEYFTVYNELTKVKYVTEGMRKPAFLSGEQKKAIVDLLFKTNRKVTVKQLKEDYFKKIECFDSVEISGVEDRFNASLGTYHDLLKIIKDKDFLDNEENEDILEDIVLTLTLFEDREMIEERLKTYAHLFDDKVMKQLKRRRYTGWGRLSRKLINGIRDKQSGKTILDFLKSDGFANRNFMQLIHDDSLTFKEDIQKAQVSGQGDSLHEHIANLAGSPAIKKGILQTVKVVDELVKVMGRHKPENIVIEMARENQTTQKGQKNSRERMKRIEEGIKELGSQILKEHPVENTQLQNEKLYLYYLQNGRDMYVDQELDINRLSDYDVDHIVPQSFLKDDSIDNKVLTRSDKARGKSDNVPSEEVVKKMKNYWRQLLNAKLITQRKFDNLTKAERGGLSELDKAGFIKRQLVETRQITKHVAQILDSRMNTKYDENDKLIREVKVITLKSKLVSDFRKDFQFYKVREINNYHHAHDAYLNAVVGTALIKKYPKLESEFVYGDYKVYDVRKMIAKSEQEIGKATAKYFFYSNIMNFFKTEITLANGEIRKRPLIETNGETGEIVWDKGRDFATVRKVLSMPQVNIVKKTEVQTGGFSKESILPKRNSDKLIARKKDWDPKKYGGFDSPTVAYSVLVVAKVEKGKSKKLKSVKELLGITIMERSSFEKNPIDFLEAKGYKEVKKDLIIKLPKYSLFELENGRKRMLASAGELQKGNELALPSKYVNFLYLASHYEKLKGSPEDNEQKQLFVEQHKHYLDEIIEQISEFSKRVILADANLDKVLSAYNKHRDKPIREQAENIIHLFTLTNLGAPAAFKYFDTTIDRKRYTSTKEVLDATLIHQSITGLYETRIDLSQLGGDGGGGGGSGGGGSGGTLGDQGSRGSDPLPEPRVTLTVEGIPTEFLVNTGAEHSVLTKPMGKMGSKRTVVAGATGSKVYPWTTKRLLKIGQKQVTHSFLVIPECPAPLLGRDLLTKLKAQIQFSTEGPQVTWEDRPAMCLVLNLEEEYRLHEKPVPPSIDPSWLQLFPMVWAEKAGMGLANQVPPVVVELKSDASPVAVRQYPMSKEAREGIRPHIQRFLDLGILVPCQSPWNTPLLPVKKPGTNDYRPVQDLREVNKRVQDIHPTVPNPYNLLSSLPPSHTWYSVLDLKDAFFCLKLHPNSQPLFAFEWRDPEKGNTGQLTWTRLPQGFKNSPTLFDEALHRDLASFRALNPQVVMLQYVDDLLVAAPTYRDCKEGTRRLLQELSKLGYRVSAKKAQLCREEVTYLGYLLKGGKRWLTPARKATVMKIPTPTTPRQVREFLGTAGFCRLWIPGFASLAAPLYPLTREKVPFTWTEAHQEAFGRIKEALLSAPALALPDLTKPFALYVDEKEGVARGVLTQTLGPWRRPVAYLSKKLDPVASGWPTCLKAIAAVALLLKDADKLTLGQNVLVIAPHNLESIVRQPPDRWMTNARMTHYQSLLLNERVSFAPPAILNPATLLPVESDDTPIHICSEILAEETGTRPDLRDQPLPGVPAWYTDGSSFIMDGRRQAGAAIVDNKRTVWASNLPEGTSAQKAELIALTQALRLAEGKSINIYTDSRYAFATAHVHGAIYKQRGLLTSAGKDIKNKEEILALLEAIHLPKRVAIIHCPGHQRGTDPVATGNRKADEAAKQAAQSTRILTETTKNAGKRTADGSEFEKRTADGSEFESPKKKAKVE

SEQ ID NO: 6121 - protein, 2126 aa, synthetic construct
MPAAKRVKLDGGDKKYSIGLDIGTNSVGWAVITDEYKVPSKKFKVLGNTDRHSIKKNLIGALLFDSGETAEATRLKRTARRRYTRRKNRICYLQEIFSNEMAKVDDSFFHRLEESFLVEEDKKHERHPIFGNIVDEVAYHEKYPTIYHLRKKLVDSTDKADLRLIYLALAHMIKFRGHFLIEGDLNPDNSDVDKLFIQLVQTYNQLFEENPINASGVDAKAILSARLSKSRRLENLIAQLPGEKKNGLFGNLIALSLGLTPNFKSNFDLAEDAKLQLSKDTYDDDLDNLLAQIGDQYADLFLAAKNLSDAILLSDILRVNTEITKAPLSASMIKRYDEHHQDLTLLKALVRQQLPEKYKEIFFDQSKNGYAGYIDGGASQEEFYKFIKPILEKMDGTEELLVKLNREDLLRKQRTFDNGSIPHQIHLGELHAILRRQEDFYPFLKDNREKIEKILTFRIPYYVGPLARGNSRFAWMTRKSEETITPWNFEEVVDKGASAQSFIERMTNFDKNLPNEKVLPKHSLLYEYFTVYNELTKVKYVTEGMRKPAFLSGEQKKAIVDLLFKTNRKVTVKQLKEDYFKKIECFDSVEISGVEDRFNASLGTYHDLLKIIKDKDFLDNEENEDILEDIVLTLTLFEDREMIEERLKTYAHLFDDKVMKQLKRRRYTGWGRLSRKLINGIRDKQSGKTILDFLKSDGFANRNFMQLIHDDSLTFKEDIQKAQVSGQGDSLHEHIANLAGSPAIKKGILQTVKVVDELVKVMGRHKPENIVIEMARENQTTQKGQKNSRERMKRIEEGIKELGSQILKEHPVENTQLQNEKLYLYYLQNGRDMYVDQELDINRLSDYDVDHIVPQSFLKDDSIDNKVLTRSDKARGKSDNVPSEEVVKKMKNYWRQLLNAKLITQRKFDNLTKAERGGLSELDKAGFIKRQLVETRQITKHVAQILDSRMNTKYDENDKLIREVKVITLKSKLVSDFRKDFQFYKVREINNYHHAHDAYLNAVVGTALIKKYPKLESEFVYGDYKVYDVRKMIAKSEQEIGKATAKYFFYSNIMNFFKTEITLANGEIRKRPLIETNGETGEIVWDKGRDFATVRKVLSMPQVNIVKKTEVQTGGFSKESILPKRNSDKLIARKKDWDPKKYGGFDSPTVAYSVLVVAKVEKGKSKKLKSVKELLGITIMERSSFEKNPIDFLEAKGYKEVKKDLIIKLPKYSLFELENGRKRMLASAGELQKGNELALPSKYVNFLYLASHYEKLKGSPEDNEQKQLFVEQHKHYLDEIIEQISEFSKRVILADANLDKVLSAYNKHRDKPIREQAENIIHLFTLTNLGAPAAFKYFDTTIDRKRYTSTKEVLDATLIHQSITGLYETRIDLSQLGGDGGGGGGSGGGGSGGLLGRDLLTKLKAQIQFSTEGPQVTWEDRPAMCLVLNLEEEYRLHEKPVPPSIDPSWLQLFPMVWAEKAGMGLANQVPPVVVELKSDASPVAVRQYPMSKEAREGIRPHIQRFLDLGILVPCQSPWNTPLLPVKKPGTNDYRPVQDLREVNKRVQDIHPTVPNPYNLLSSLPPSHTWYSVLDLKDAFFCLKLHPNSQPLFAFEWRDPEKGNTGQLTWTRLPQGFKNSPTLFNEALHRDLASFRALNPQVVMLQYVDDLLVAAPTYRDCKEGTRRLLQELSKLGYRVSAKKAQLCREEVTYLGYLLKGGKRWLTPARKATVMKIPTPTTPRQVREFLGTAGFCRLWIPGFASLAAPLYPLTRPKVPFTWTEAHQEAFGRIKEALLSAPALALPDLTKPFALYVDEKEGVARGVLTQTLGPWRRPVAYLSKKLDPVASGWPTCLKAIAAVALLLKDADKLTLGQNVLVIAPHNLESIVRQPPDRWMTNARMTHYQSLLLNERVSFAPPAILNPATLLPVESDDTPIHICSEILAEETGTRPDLRDQPLPGVPAWYTDGSSFIMDGRRQAGAAIVDNKRTVWASNLPEGTSAQKAELIALTQALRLAEGKSINIYTDSRYAFATAHVHGAIYKQRGWLTSAGKDIKNKEEILALLEAIHLPKRVAIIHCPGHQRGTDPVATGNRKADEAAKQAAQSTRILTETTKNAGKRTADGSEFEKRTADGSEFESPKKKAKVE

SEQ ID NO: 6122 - protein, 2217 aa, synthetic construct
MPAAKRVKLDGGDKKYSIGLDIGTNSVGWAVITDEYKVPSKKFKVLGNTDRHSIKKNLIGALLFDSGETAEATRLKRTARRRYTRRKNRICYLQEIFSNEMAKVDDSFFHRLEESFLVEEDKKHERHPIFGNIVDEVAYHEKYPTIYHLRKKLVDSTDKADLRLIYLALAHMIKFRGHFLIEGDLNPDNSDVDKLFIQLVQTYNQLFEENPINASGVDAKAILSARLSKSRRLENLIAQLPGEKKNGLFGNLIALSLGLTPNFKSNFDLAEDAKLQLSKDTYDDDLDNLLAQIGDQYADLFLAAKNLSDAILLSDILRVNTEITKAPLSASMIKRYDEHHQDLTLLKALVRQQLPEKYKEIFFDQSKNGYAGYIDGGASQEEFYKFIKPILEKMDGTEELLVKLNREDLLRKQRTFDNGSIPHQIHLGELHAILRRQEDFYPFLKDNREKIEKILTFRIPYYVGPLARGNSRFAWMTRKSEETITPWNFEEVVDKGASAQSFIERMTNFDKNLPNEKVLPKHSLLYEYFTVYNELTKVKYVTEGMRKPAFLSGEQKKAIVDLLFKTNRKVTVKQLKEDYFKKIECFDSVEISGVEDRFNASLGTYHDLLKIIKDKDFLDNEENEDILEDIVLTLTLFEDREMIEERLKTYAHLFDDKVMKQLKRRRYTGWGRLSRKLINGIRDKQSGKTILDFLKSDGFANRNFMQLIHDDSLTFKEDIQKAQVSGQGDSLHEHIANLAGSPAIKKGILQTVKVVDELVKVMGRHKPENIVIEMARENQTTQKGQKNSRERMKRIEEGIKELGSQILKEHPVENTQLQNEKLYLYYLQNGRDMYVDQELDINRLSDYDVDHIVPQSFLKDDSIDNKVLTRSDKARGKSDNVPSEEVVKKMKNYWRQLLNAKLITQRKFDNLTKAERGGLSELDKAGFIKRQLVETRQITKHVAQILDSRMNTKYDENDKLIREVKVITLKSKLVSDFRKDFQFYKVREINNYHHAHDAYLNAVVGTALIKKYPKLESEFVYGDYKVYDVRKMIAKSEQEIGKATAKYFFYSNIMNFFKTEITLANGEIRKRPLIETNGETGEIVWDKGRDFATVRKVLSMPQVNIVKKTEVQTGGFSKESILPKRNSDKLIARKKDWDPKKYGGFDSPTVAYSVLVVAKVEKGKSKKLKSVKELLGITIMERSSFEKNPIDFLEAKGYKEVKKDLIIKLPKYSLFELENGRKRMLASAGELQKGNELALPSKYVNFLYLASHYEKLKGSPEDNEQKQLFVEQHKHYLDEIIEQISEFSKRVILADANLDKVLSAYNKHRDKPIREQAENIIHLFTLTNLGAPAAFKYFDTTIDRKRYTSTKEVLDATLIHQSITGLYETRIDLSQLGGDGGGGGGSGGGGSGGTLGDQGSRGSDPLPEPRVTLTVEGIPTEFLVNTGAEHSVLTKPMGKMGSKRTVVAGATGSKVYPWTTKRLLKIGQKQVTHSFLVIPECPAPLLGRDLLTKLKAQIQFSTEGPQVTWEDRPAMCLVLNLEEEYRLHEKPVPPSIDPSWLQLFPMVWAEKAGMGLANQVPPVVVELKSDASPVAVRQYPMSKEAREGIRPHIQRFLDLGILVPCQSPWNTPLLPVKKPGTNDYRPVQDLREVNKRVQDIHPTVPNPYNLLSSLPPSHTWYSVLDLKDAFFCLKLHPNSQPLFAFEWRDPEKGNTGQLTWTRLPQGFKNSPTLFNEALHRDLASFRALNPQVVMLQYVDDLLVAAPTYRDCKEGTRRLLQELSKLGYRVSAKKAQLCREEVTYLGYLLKGGKRWLTPARKATVMKIPTPTTPRQVREFLGTAGFCRLWIPGFASLAAPLYPLTRPKVPFTWTEAHQEAFGRIKEALLSAPALALPDLTKPFALYVDEKEGVARGVLTQTLGPWRRPVAYLSKKLDPVASGWPTCLKAIAAVALLLKDADKLTLGQNVLVIAPHNLESIVRQPPDRWMTNARMTHYQSLLLNERVSFAPPAILNPATLLPVESDDTPIHICSEILAEETGTRPDLRDQPLPGVPAWYTDGSSFIMDGRRQAGAAIVDNKRTVWASNLPEGTSAQKAELIALTQALRLAEGKSINIYTDSRYAFATAHVHGAIYKQRGWLTSAGKDIKNKEEILALLEAIHLPKRVAIIHCPGHQRGTDPVATGNRKADEAAKQAAQSTRILTETTKNAGKRTADGSEFEKRTADGSEFESPKKKAKVE

SEQ ID NO: 6123 - protein, 2217 aa, synthetic construct
MPAAKRVKLDGGDKKYSIGLDIGTNSVGWAVITDEYKVPSKKFKVLGNTDRHSIKKNLIGALLFDSGETAEATRLKRTARRRYTRRKNRICYLQEIFSNEMAKVDDSFFHRLEESFLVEEDKKHERHPIFGNIVDEVAYHEKYPTIYHLRKKLVDSTDKADLRLIYLALAHMIKFRGHFLIEGDLNPDNSDVDKLFIQLVQTYNQLFEENPINASGVDAKAILSARLSKSRRLENLIAQLPGEKKNGLFGNLIALSLGLTPNFKSNFDLAEDAKLQLSKDTYDDDLDNLLAQIGDQYADLFLAAKNLSDAILLSDILRVNTEITKAPLSASMIKRYDEHHQDLTLLKALVRQQLPEKYKEIFFDQSKNGYAGYIDGGASQEEFYKFIKPILEKMDGTEELLVKLNREDLLRKQRTFDNGSIPHQIHLGELHAILRRQEDFYPFLKDNREKIEKILTFRIPYYVGPLARGNSRFAWMTRKSEETITPWNFEEVVDKGASAQSFIERMTNFDKNLPNEKVLPKHSLLYEYFTVYNELTKVKYVTEGMRKPAFLSGEQKKAIVDLLFKTNRKVTVKQLKEDYFKKIECFDSVEISGVEDRFNASLGTYHDLLKIIKDKDFLDNEENEDILEDIVLTLTLFEDREMIEERLKTYAHLFDDKVMKQLKRRRYTGWGRLSRKLINGIRDKQSGKTILDFLKSDGFANRNFMQLIHDDSLTFKEDIQKAQVSGQGDSLHEHIANLAGSPAIKKGILQTVKVVDELVKVMGRHKPENIVIEMARENQTTQKGQKNSRERMKRIEEGIKELGSQILKEHPVENTQLQNEKLYLYYLQNGRDMYVDQELDINRLSDYDVDHIVPQSFLKDDSIDNKVLTRSDKARGKSDNVPSEEVVKKMKNYWRQLLNAKLITQRKFDNLTKAERGGLSELDKAGFIKRQLVETRQITKHVAQILDSRMNTKYDENDKLIREVKVITLKSKLVSDFRKDFQFYKVREINNYHHAHDAYLNAVVGTALIKKYPKLESEFVYGDYKVYDVRKMIAKSEQEIGKATAKYFFYSNIMNFFKTEITLANGEIRKRPLIETNGETGEIVWDKGRDFATVRKVLSMPQVNIVKKTEVQTGGFSKESILPKRNSDKLIARKKDWDPKKYGGFDSPTVAYSVLVVAKVEKGKSKKLKSVKELLGITIMERSSFEKNPIDFLEAKGYKEVKKDLIIKLPKYSLFELENGRKRMLASAGELQKGNELALPSKYVNFLYLASHYEKLKGSPEDNEQKQLFVEQHKHYLDEIIEQISEFSKRVILADANLDKVLSAYNKHRDKPIREQAENIIHLFTLTNLGAPAAFKYFDTTIDRKRYTSTKEVLDATLIHQSITGLYETRIDLSQLGGDGGGGGGSGGGGSGGTLGDQGSRGSDPLPEPRVTLTVEGIPTEFLVNTGAEHSVLTKPMGKMGSKRTVVAGATGSKVYPWTTKRLLKIGQKQVTHSFLVIPECPAPLLGRDLLTKLKAQIQFSTEGPQVTWEDRPAMCLVLNLEEEYRLHEKPVPPSIDPSWLQLFPMVWAEKAGMGLANQVPPVVVELKSDASPVAVRQYPMSKEAREGIRPHIQRFLDLGILVPCQSPWNTPLLPVKKPGTNDYRPVQDLREVNKRVQDIHPTVPNPYNLLSSLPPSHTWYSVLDLKDAFFCLKLHPNSQPLFAFEWRDPEKGNTGQLTWTRLPQGFKNSPTLFNEALHRDLASFRALNPQVVMLQYVDDLLVAAPTYRDCKEGTRRLLQELSKLGYRVSAKKAQLCREEVTYLGYLLKGGKRWLTPARKATVMKIPTPTTPRQVREFLGKAGFCRLFIPGFASLAAPLYPLTRPKVPFTWTEAHQEAFGRIKEALLSAPALALPDLTKPFALYVDEKEGVARGVLTQTLGPWRRPVAYLSKKLDPVASGWPTCLKAIAAVALLLKDADKLTLGQNVLVIAPHNLESIVRQPPDRWMTNARMTHYQSLLLNERVSFAPPAILNPATLLPVESDDTPIHICSEILAEETGTRPDLRDQPLPGVPAWYTDGSSFIMDGRRQAGAAIVDNKRTVWASNLPEGTSAQKAELIALTQALRLAEGKSINIYTDSRYAFATAHVHGAIYKQRGWLTSAGKDIKNKEEILALLEAIHLPKRVAIIHCPGHQRGTDPVATGNRKADEAAKQAAQSTRILTETTKNAGKRTADGSEFEKRTADGSEFESPKKKAKVE

SEQ ID NO: 6124 - protein, 2095 aa, synthetic construct
MPAAKRVKLDGGDKKYSIGLDIGTNSVGWAVITDEYKVPSKKFKVLGNTDRHSIKKNLIGALLFDSGETAEATRLKRTARRRYTRRKNRICYLQEIFSNEMAKVDDSFFHRLEESFLVEEDKKHERHPIFGNIVDEVAYHEKYPTIYHLRKKLVDSTDKADLRLIYLALAHMIKFRGHFLIEGDLNPDNSDVDKLFIQLVQTYNQLFEENPINASGVDAKAILSARLSKSRRLENLIAQLPGEKKNGLFGNLIALSLGLTPNFKSNFDLAEDAKLQLSKDTYDDDLDNLLAQIGDQYADLFLAAKNLSDAILLSDILRVNTEITKAPLSASMIKRYDEHHQDLTLLKALVRQQLPEKYKEIFFDQSKNGYAGYIDGGASQEEFYKFIKPILEKMDGTEELLVKLNREDLLRKQRTFDNGSIPHQIHLGELHAILRRQEDFYPFLKDNREKIEKILTFRIPYYVGPLARGNSRFAWMTRKSEETITPWNFEEVVDKGASAQSFIERMTNFDKNLPNEKVLPKHSLLYEYFTVYNELTKVKYVTEGMRKPAFLSGEQKKAIVDLLFKTNRKVTVKQLKEDYFKKIECFDSVEISGVEDRFNASLGTYHDLLKIIKDKDFLDNEENEDILEDIVLTLTLFEDREMIEERLKTYAHLFDDKVMKQLKRRRYTGWGRLSRKLINGIRDKQSGKTILDFLKSDGFANRNFMQLIHDDSLTFKEDIQKAQVSGQGDSLHEHIANLAGSPAIKKGILQTVKVVDELVKVMGRHKPENIVIEMARENQTTQKGQKNSRERMKRIEEGIKELGSQILKEHPVENTQLQNEKLYLYYLQNGRDMYVDQELDINRLSDYDVDHIVPQSFLKDDSIDNKVLTRSDKARGKSDNVPSEEVVKKMKNYWRQLLNAKLITQRKFDNLTKAERGGLSELDKAGFIKRQLVETRQITKHVAQILDSRMNTKYDENDKLIREVKVITLKSKLVSDFRKDFQFYKVREINNYHHAHDAYLNAVVGTALIKKYPKLESEFVYGDYKVYDVRKMIAKSEQEIGKATAKYFFYSNIMNFFKTEITLANGEIRKRPLIETNGETGEIVWDKGRDFATVRKVLSMPQVNIVKKTEVQTGGFSKESILPKRNSDKLIARKKDWDPKKYGGFDSPTVAYSVLVVAKVEKGKSKKLKSVKELLGITIMERSSFEKNPIDFLEAKGYKEVKKDLIIKLPKYSLFELENGRKRMLASAGELQKGNELALPSKYVNFLYLASHYEKLKGSPEDNEQKQLFVEQHKHYLDEIIEQISEFSKRVILADANLDKVLSAYNKHRDKPIREQAENIIHLFTLTNLGAPAAFKYFDTTIDRKRYTSTKEVLDATLIHQSITGLYETRIDLSQLGGDGGGGGGSGGGGSGGTLNLEDEYRLYETSAEPEVSPGSTWLSDFPQAWAETGGMGLAVRQAPLIIPLKATSTPVSIKQYPMSQEAKLGIKPHIQRLLDQGILVPCQSPWNTPLLPVKKPGTNDYRPVQDLREVNKRVEDIHPTVPNPYNLLSGLPPSHRWYTVLDLKDAFFCLRLHPTSQPLFAFEWRDPGMGISGQLTWTRLPQGFKNSPTLFNEALHRDLADFRIQHPDLILLQYVDDILLAATSELDCQQGTRALLLTLGNLGYRASAKKAQLCQKQVKYLGYLLKEGQRWLTEARKETVMGQPTPKTPRQLREFLGTAGFCRLWIPGFAEMAAPLYPLTKPGTLFNWGPDQQKAYQEIKQALLTAPALGLPDLTKPFELFVDEKQGYAKGVLTQKLGPWRRPVAYLSKKLDPVAAGWPPCLRMVAAIAVLRKDAGKLTMGQPLVILAPHAVEALVKQPPDRWLSNARMTHYQAMLLDTDRVQFGPVVALNPATLLPLPEEGAPHDCLEILAETHGTRPDLTDQPIPDADHTWYTDGSSFLQEGQRKAGAAVTTETEVIWARALPAGTSAQRAELIALTQALKMAEGKRLNVYTDSRYAFATAHIHGEIYRRRGWLTSEGREIKNKSEILALLKALFLPKRLSIIHCLGHQKGDSAEARGNRLADQAAREAAIKTPPDTSTLLAGKRTADGSEFEKRTADGSEFESPKKKAKVE

SEQ ID NO: 6125 - protein, 2095 aa, synthetic construct
MPAAKRVKLDGGDKKYSIGLDIGTNSVGWAVITDEYKVPSKKFKVLGNTDRHSIKKNLIGALLFDSGETAEATRLKRTARRRYTRRKNRICYLQEIFSNEMAKVDDSFFHRLEESFLVEEDKKHERHPIFGNIVDEVAYHEKYPTIYHLRKKLVDSTDKADLRLIYLALAHMIKFRGHFLIEGDLNPDNSDVDKLFIQLVQTYNQLFEENPINASGVDAKAILSARLSKSRRLENLIAQLPGEKKNGLFGNLIALSLGLTPNFKSNFDLAEDAKLQLSKDTYDDDLDNLLAQIGDQYADLFLAAKNLSDAILLSDILRVNTEITKAPLSASMIKRYDEHHQDLTLLKALVRQQLPEKYKEIFFDQSKNGYAGYIDGGASQEEFYKFIKPILEKMDGTEELLVKLNREDLLRKQRTFDNGSIPHQIHLGELHAILRRQEDFYPFLKDNREKIEKILTFRIPYYVGPLARGNSRFAWMTRKSEETITPWNFEEVVDKGASAQSFIERMTNFDKNLPNEKVLPKHSLLYEYFTVYNELTKVKYVTEGMRKPAFLSGEQKKAIVDLLFKTNRKVTVKQLKEDYFKKIECFDSVEISGVEDRFNASLGTYHDLLKIIKDKDFLDNEENEDILEDIVLTLTLFEDREMIEERLKTYAHLFDDKVMKQLKRRRYTGWGRLSRKLINGIRDKQSGKTILDFLKSDGFANRNFMQLIHDDSLTFKEDIQKAQVSGQGDSLHEHIANLAGSPAIKKGILQTVKVVDELVKVMGRHKPENIVIEMARENQTTQKGQKNSRERMKRIEEGIKELGSQILKEHPVENTQLQNEKLYLYYLQNGRDMYVDQELDINRLSDYDVDHIVPQSFLKDDSIDNKVLTRSDKARGKSDNVPSEEVVKKMKNYWRQLLNAKLITQRKFDNLTKAERGGLSELDKAGFIKRQLVETRQITKHVAQILDSRMNTKYDENDKLIREVKVITLKSKLVSDFRKDFQFYKVREINNYHHAHDAYLNAVVGTALIKKYPKLESEFVYGDYKVYDVRKMIAKSEQEIGKATAKYFFYSNIMNFFKTEITLANGEIRKRPLIETNGETGEIVWDKGRDFATVRKVLSMPQVNIVKKTEVQTGGFSKESILPKRNSDKLIARKKDWDPKKYGGFDSPTVAYSVLVVAKVEKGKSKKLKSVKELLGITIMERSSFEKNPIDFLEAKGYKEVKKDLIIKLPKYSLFELENGRKRMLASAGELQKGNELALPSKYVNFLYLASHYEKLKGSPEDNEQKQLFVEQHKHYLDEIIEQISEFSKRVILADANLDKVLSAYNKHRDKPIREQAENIIHLFTLTNLGAPAAFKYFDTTIDRKRYTSTKEVLDATLIHQSITGLYETRIDLSQLGGDGGGGGGSGGGGSGGTLNLEDEYRLYETSAEPEVSPGSTWLSDFPQAWAETGGMGLAVRQAPLIIPLKATSTPVSIKQYPMSQEAKLGIKPHIQRLLDQGILVPCQSPWNTPLLPVKKPGTNDYRPVQDLREVNKRVEDIHPTVPNPYNLLSGLPPSHRWYTVLDLKDAFFCLRLHPTSQPLFAFEWRDPGMGISGQLTWTRLPQGFKNSPTLFNEALHRDLADFRIQHPDLILLQYVDDILLAATSELDCQQGTRALLLTLGNLGYRASAKKAQLCQKQVKYLGYLLKEGQRWLTEARKETVMGQPTPKTPRQLREFLGKAGFCRLFIPGFAEMAAPLYPLTKPGTLFNWGPDQQKAYQEIKQALLTAPALGLPDLTKPFELFVDEKQGYAKGVLTQKLGPWRRPVAYLSKKLDPVAAGWPPCLRMVAAIAVLRKDAGKLTMGQPLVILAPHAVEALVKQPPDRWLSNARMTHYQAMLLDTDRVQFGPVVALNPATLLPLPEEGAPHDCLEILAETHGTRPDLTDQPIPDADHTWYTDGSSFLQEGQRKAGAAVTTETEVIWARALPAGTSAQRAELIALTQALKMAEGKRLNVYTDSRYAFATAHIHGEIYRRRGWLTSEGREIKNKSEILALLKALFLPKRLSIIHCLGHQKGDSAEARGNRLADQAAREAAIKTPPDTSTLLAGKRTADGSEFEKRTADGSEFESPKKKAKVE

SEQ ID NO: 6126 - protein, 2095 aa, synthetic construct
MPAAKRVKLDGGDKKYSIGLDIGTNSVGWAVITDEYKVPSKKFKVLGNTDRHSIKKNLIGALLFDSGETAEATRLKRTARRRYTRRKNRICYLQEIFSNEMAKVDDSFFHRLEESFLVEEDKKHERHPIFGNIVDEVAYHEKYPTIYHLRKKLVDSTDKADLRLIYLALAHMIKFRGHFLIEGDLNPDNSDVDKLFIQLVQTYNQLFEENPINASGVDAKAILSARLSKSRRLENLIAQLPGEKKNGLFGNLIALSLGLTPNFKSNFDLAEDAKLQLSKDTYDDDLDNLLAQIGDQYADLFLAAKNLSDAILLSDILRVNTEITKAPLSASMIKRYDEHHQDLTLLKALVRQQLPEKYKEIFFDQSKNGYAGYIDGGASQEEFYKFIKPILEKMDGTEELLVKLNREDLLRKQRTFDNGSIPHQIHLGELHAILRRQEDFYPFLKDNREKIEKILTFRIPYYVGPLARGNSRFAWMTRKSEETITPWNFEEVVDKGASAQSFIERMTNFDKNLPNEKVLPKHSLLYEYFTVYNELTKVKYVTEGMRKPAFLSGEQKKAIVDLLFKTNRKVTVKQLKEDYFKKIECFDSVEISGVEDRFNASLGTYHDLLKIIKDKDFLDNEENEDILEDIVLTLTLFEDREMIEERLKTYAHLFDDKVMKQLKRRRYTGWGRLSRKLINGIRDKQSGKTILDFLKSDGFANRNFMQLIHDDSLTFKEDIQKAQVSGQGDSLHEHIANLAGSPAIKKGILQTVKVVDELVKVMGRHKPENIVIEMARENQTTQKGQKNSRERMKRIEEGIKELGSQILKEHPVENTQLQNEKLYLYYLQNGRDMYVDQELDINRLSDYDVDHIVPQSFLKDDSIDNKVLTRSDKARGKSDNVPSEEVVKKMKNYWRQLLNAKLITQRKFDNLTKAERGGLSELDKAGFIKRQLVETRQITKHVAQILDSRMNTKYDENDKLIREVKVITLKSKLVSDFRKDFQFYKVREINNYHHAHDAYLNAVVGTALIKKYPKLESEFVYGDYKVYDVRKMIAKSEQEIGKATAKYFFYSNIMNFFKTEITLANGEIRKRPLIETNGETGEIVWDKGRDFATVRKVLSMPQVNIVKKTEVQTGGFSKESILPKRNSDKLIARKKDWDPKKYGGFDSPTVAYSVLVVAKVEKGKSKKLKSVKELLGITIMERSSFEKNPIDFLEAKGYKEVKKDLIIKLPKYSLFELENGRKRMLASAGELQKGNELALPSKYVNFLYLASHYEKLKGSPEDNEQKQLFVEQHKHYLDEIIEQISEFSKRVILADANLDKVLSAYNKHRDKPIREQAENIIHLFTLTNLGAPAAFKYFDTTIDRKRYTSTKEVLDATLIHQSITGLYETRIDLSQLGGDGGGGGGSGGGGSGGTLGIEDEYRLHETSTEPDVSLGSTWLSDFPQAWAETGGMGLAVRQAPLIIPLKATSTPVSIQQYPMSHEARLGIKPHIQRLLDQGILVPCQSPWNTPLLPVKKPGTNDYRPVQDLREVNKRVEDIHPTVPNPYNLLSGLPPSHQWYTVLDLKDAFFCLRLHPTSQPLFAFEWRDPGMGISGQLTWTRLPQGFKNSPTLFNEALHRDLADFRIQHPDLILLQYVDDILLAATSELDCQQGTRALLQTLGDLGYRASAKKAQICQKQVKYLGYLLREGQRWLTEARKETVMGQPVPKTPRQLREFLGTAGFCRLWIPGFAEMAAPLYPLTKPGTLFSWGPDQQKAYQEIKQALLTAPALGLPDLTKPFELFVDEKQGYAKGVLTQKLGPWRRPVAYLSKKLDPVAAGWPPCLRMVAAIAVLTKDAGKLTMGQPLVILAPHAVEALVKQPPDRWLSNARMTHYQAMLLDTDRVQFGPVVALNPATLLPLPEEGAPHDCLEILAETHGTRPDLTDQPIPDADHTWYTDGSSFLQEGQRKAGAAVTTETEVIWAGALPAGTSAQRAELIALTQALKMAEGKRLNVYTDSRYAFATAHIHGEIYRRRGWLTSEGREIKNKSEILALLKALFLPKRLSIIHCLGHQKGDSAEARGNRLADQAAREAAIKTPPDTSTLLAGKRTADGSEFEKRTADGSEFESPKKKAKVE

SEQ ID NO: 6127 - protein, 2095 aa, synthetic construct
MPAAKRVKLDGGDKKYSIGLDIGTNSVGWAVITDEYKVPSKKFKVLGNTDRHSIKKNLIGALLFDSGETAEATRLKRTARRRYTRRKNRICYLQEIFSNEMAKVDDSFFHRLEESFLVEEDKKHERHPIFGNIVDEVAYHEKYPTIYHLRKKLVDSTDKADLRLIYLALAHMIKFRGHFLIEGDLNPDNSDVDKLFIQLVQTYNQLFEENPINASGVDAKAILSARLSKSRRLENLIAQLPGEKKNGLFGNLIALSLGLTPNFKSNFDLAEDAKLQLSKDTYDDDLDNLLAQIGDQYADLFLAAKNLSDAILLSDILRVNTEITKAPLSASMIKRYDEHHQDLTLLKALVRQQLPEKYKEIFFDQSKNGYAGYIDGGASQEEFYKFIKPILEKMDGTEELLVKLNREDLLRKQRTFDNGSIPHQIHLGELHAILRRQEDFYPFLKDNREKIEKILTFRIPYYVGPLARGNSRFAWMTRKSEETITPWNFEEVVDKGASAQSFIERMTNFDKNLPNEKVLPKHSLLYEYFTVYNELTKVKYVTEGMRKPAFLSGEQKKAIVDLLFKTNRKVTVKQLKEDYFKKIECFDSVEISGVEDRFNASLGTYHDLLKIIKDKDFLDNEENEDILEDIVLTLTLFEDREMIEERLKTYAHLFDDKVMKQLKRRRYTGWGRLSRKLINGIRDKQSGKTILDFLKSDGFANRNFMQLIHDDSLTFKEDIQKAQVSGQGDSLHEHIANLAGSPAIKKGILQTVKVVDELVKVMGRHKPENIVIEMARENQTTQKGQKNSRERMKRIEEGIKELGSQILKEHPVENTQLQNEKLYLYYLQNGRDMYVDQELDINRLSDYDVDHIVPQSFLKDDSIDNKVLTRSDKARGKSDNVPSEEVVKKMKNYWRQLLNAKLITQRKFDNLTKAERGGLSELDKAGFIKRQLVETRQITKHVAQILDSRMNTKYDENDKLIREVKVITLKSKLVSDFRKDFQFYKVREINNYHHAHDAYLNAVVGTALIKKYPKLESEFVYGDYKVYDVRKMIAKSEQEIGKATAKYFFYSNIMNFFKTEITLANGEIRKRPLIETNGETGEIVWDKGRDFATVRKVLSMPQVNIVKKTEVQTGGFSKESILPKRNSDKLIARKKDWDPKKYGGFDSPTVAYSVLVVAKVEKGKSKKLKSVKELLGITIMERSSFEKNPIDFLEAKGYKEVKKDLIIKLPKYSLFELENGRKRMLASAGELQKGNELALPSKYVNFLYLASHYEKLKGSPEDNEQKQLFVEQHKHYLDEIIEQISEFSKRVILADANLDKVLSAYNKHRDKPIREQAENIIHLFTLTNLGAPAAFKYFDTTIDRKRYTSTKEVLDATLIHQSITGLYETRIDLSQLGGDGGGGGGSGGGGSGGTLNIEDEYRLHETSKGPDVPLGSTWLSDFPQAWAETGGMGLAFRQAPLIISLKATSTPVSIKQYPMSQEARLGIKPHIQRLLDQGILVPCQSPWNTPLLPVKKPGTNDYRPVQDLREVNKRVEDIHPTVPNPYNLLSGLPPSHQWYTVLDLKDAFFCLRLHPTSQSLFAFEWKDPEMGISGQLTWTRLPQGFKNSPTLFNEALHRDLADFRIQHPDLILLQYVDDLLLAATSELDCQQGTRALLQTLGDLGYRASAKKAQICQKQVKYLGYLLKEGQRWLTEARKETVMGQPTPKTPRQLREFLGTAGLCRLWIPGFAEMAAPLYPLTKPGTLFKWGPDQQKAYQEIKQALLTAPALGLPDLTKPFELFVDEKQGYAKGVLTQKLGPWRRPVAYLSKKLDPVAAGWPPCLRMVAAIAVLTKDVGKLTMGQPLVILAPHAVEALVKQPPDRWLSNARMTHYQALLLDTDRVQFGPIVALNPATLLPLPEEGLQHDCLDILAEAHGTRPDLTDQPLPDADHTWYTDGSSFLQEGQRRAGAAVTTETEVIWAKALPAGTSAQRAELIALTQALKMAAGKKLNVYTDSRYAFATAHIHGEIYRRRGWLTSEGKEIKNKDEILALLKALFLPKRLSIIHCPGHQKGNHAEARGNRMADQAAREVATRETPETSTLLAGKRTADGSEFEKRTADGSEFESPKKKAKVE

SEQ ID NO: 6128 - protein, 2086 aa, synthetic construct
MPAAKRVKLDGGDKKYSIGLDIGTNSVGWAVITDEYKVPSKKFKVLGNTDRHSIKKNLIGALLFDSGETAEATRLKRTARRRYTRRKNRICYLQEIFSNEMAKVDDSFFHRLEESFLVEEDKKHERHPIFGNIVDEVAYHEKYPTIYHLRKKLVDSTDKADLRLIYLALAHMIKFRGHFLIEGDLNPDNSDVDKLFIQLVQTYNQLFEENPINASGVDAKAILSARLSKSRRLENLIAQLPGEKKNGLFGNLIALSLGLTPNFKSNFDLAEDAKLQLSKDTYDDDLDNLLAQIGDQYADLFLAAKNLSDAILLSDILRVNTEITKAPLSASMIKRYDEHHQDLTLLKALVRQQLPEKYKEIFFDQSKNGYAGYIDGGASQEEFYKFIKPILEKMDGTEELLVKLNREDLLRKQRTFDNGSIPHQIHLGELHAILRRQEDFYPFLKDNREKIEKILTFRIPYYVGPLARGNSRFAWMTRKSEETITPWNFEEVVDKGASAQSFIERMTNFDKNLPNEKVLPKHSLLYEYFTVYNELTKVKYVTEGMRKPAFLSGEQKKAIVDLLFKTNRKVTVKQLKEDYFKKIECFDSVEISGVEDRFNASLGTYHDLLKIIKDKDFLDNEENEDILEDIVLTLTLFEDREMIEERLKTYAHLFDDKVMKQLKRRRYTGWGRLSRKLINGIRDKQSGKTILDFLKSDGFANRNFMQLIHDDSLTFKEDIQKAQVSGQGDSLHEHIANLAGSPAIKKGILQTVKVVDELVKVMGRHKPENIVIEMARENQTTQKGQKNSRERMKRIEEGIKELGSQILKEHPVENTQLQNEKLYLYYLQNGRDMYVDQELDINRLSDYDVDHIVPQSFLKDDSIDNKVLTRSDKARGKSDNVPSEEVVKKMKNYWRQLLNAKLITQRKFDNLTKAERGGLSELDKAGFIKRQLVETRQITKHVAQILDSRMNTKYDENDKLIREVKVITLKSKLVSDFRKDFQFYKVREINNYHHAHDAYLNAVVGTALIKKYPKLESEFVYGDYKVYDVRKMIAKSEQEIGKATAKYFFYSNIMNFFKTEITLANGEIRKRPLIETNGETGEIVWDKGRDFATVRKVLSMPQVNIVKKTEVQTGGFSKESILPKRNSDKLIARKKDWDPKKYGGFDSPTVAYSVLVVAKVEKGKSKKLKSVKELLGITIMERSSFEKNPIDFLEAKGYKEVKKDLIIKLPKYSLFELENGRKRMLASAGELQKGNELALPSKYVNFLYLASHYEKLKGSPEDNEQKQLFVEQHKHYLDEIIEQISEFSKRVILADANLDKVLSAYNKHRDKPIREQAENIIHLFTLTNLGAPAAFKYFDTTIDRKRYTSTKEVLDATLIHQSITGLYETRIDLSQLGGDGGGGGGSGGGGSGGVPWLMKKPLQLTVLVPLHEYQERLLQQTALPKEQKELLQKLFLKYDALWQHWENQVGHRRIKPHNIATGTLAPRPQKQYPINPKAKPSIQIVIDDLLKQGVLIQQNSTMNTPVYPVPKPDGKWRMVLDYREVNKTIPLIAAQNQHSAGILSSIYRGKYKTTLDLTNGFWAHPITPESYWLTAFTWQGKQYCWTRLPQGFLNSPALFTADVVDLLKEIPNVQAYVDDIYISHDDPQEHLEQLEKIFSILLNAGYVVSLKKSEIAQREVEFLGFNITKEGRGLTDTFKQKLLNITPPKDLKQLQSILGLLNFARNFIPNYSELVKPLYTIVANANGKFISWTEDNSNQLQHIISVLNQADNLEERNPETRLIIKVNSSPSAGYIRYYNEGSKRPIMYVNYIFSKAEAKFTQTEKLLTTMHKGLIKAMDLAMGQEILVYSPIVSMTKIQRTPLPERKALPVRWITWMTYLEDPRIQFHYDKSLPELQQIPNVTEDVIAKTKHPSEFAMVFYTDGSAIKHPDVNKSHSAGMGIAQVQFIPEYKIVHQWSIPLGDHTAQLAEIAAVEFACKKALKISGPVLIVTDSFYVAESANKELPYWKSNGFLNNKKKPLRHVSKWKSIAECLQLKPDIIIMHEKGHQQPMTTLHTEGNNLADKLATQGSYVVHAGKRTADGSEFEKRTADGSEFESPKKKAKVE

SEQ ID NO: 6129 - protein, 2102 aa, synthetic construct
MPAAKRVKLDGGDKKYSIGLDIGTNSVGWAVITDEYKVPSKKFKVLGNTDRHSIKKNLIGALLFDSGETAEATRLKRTARRRYTRRKNRICYLQEIFSNEMAKVDDSFFHRLEESFLVEEDKKHERHPIFGNIVDEVAYHEKYPTIYHLRKKLVDSTDKADLRLIYLALAHMIKFRGHFLIEGDLNPDNSDVDKLFIQLVQTYNQLFEENPINASGVDAKAILSARLSKSRRLENLIAQLPGEKKNGLFGNLIALSLGLTPNFKSNFDLAEDAKLQLSKDTYDDDLDNLLAQIGDQYADLFLAAKNLSDAILLSDILRVNTEITKAPLSASMIKRYDEHHQDLTLLKALVRQQLPEKYKEIFFDQSKNGYAGYIDGGASQEEFYKFIKPILEKMDGTEELLVKLNREDLLRKQRTFDNGSIPHQIHLGELHAILRRQEDFYPFLKDNREKIEKILTFRIPYYVGPLARGNSRFAWMTRKSEETITPWNFEEVVDKGASAQSFIERMTNFDKNLPNEKVLPKHSLLYEYFTVYNELTKVKYVTEGMRKPAFLSGEQKKAIVDLLFKTNRKVTVKQLKEDYFKKIECFDSVEISGVEDRFNASLGTYHDLLKIIKDKDFLDNEENEDILEDIVLTLTLFEDREMIEERLKTYAHLFDDKVMKQLKRRRYTGWGRLSRKLINGIRDKQSGKTILDFLKSDGFANRNFMQLIHDDSLTFKEDIQKAQVSGQGDSLHEHIANLAGSPAIKKGILQTVKVVDELVKVMGRHKPENIVIEMARENQTTQKGQKNSRERMKRIEEGIKELGSQILKEHPVENTQLQNEKLYLYYLQNGRDMYVDQELDINRLSDYDVDHIVPQSFLKDDSIDNKVLTRSDKARGKSDNVPSEEVVKKMKNYWRQLLNAKLITQRKFDNLTKAERGGLSELDKAGFIKRQLVETRQITKHVAQILDSRMNTKYDENDKLIREVKVITLKSKLVSDFRKDFQFYKVREINNYHHAHDAYLNAVVGTALIKKYPKLESEFVYGDYKVYDVRKMIAKSEQEIGKATAKYFFYSNIMNFFKTEITLANGEIRKRPLIETNGETGEIVWDKGRDFATVRKVLSMPQVNIVKKTEVQTGGFSKESILPKRNSDKLIARKKDWDPKKYGGFDSPTVAYSVLVVAKVEKGKSKKLKSVKELLGITIMERSSFEKNPIDFLEAKGYKEVKKDLIIKLPKYSLFELENGRKRMLASAGELQKGNELALPSKYVNFLYLASHYEKLKGSPEDNEQKQLFVEQHKHYLDEIIEQISEFSKRVILADANLDKVLSAYNKHRDKPIREQAENIIHLFTLTNLGAPAAFKYFDTTIDRKRYTSTKEVLDATLIHQSITGLYETRIDLSQLGGDGGGGGGSGGGGSGGGGSGGTAPLEEEYRLFLEAPIQNVTLLEQWKREIPKVWAEINPPGLASTQAPIHVQLLSTALPVRVRQYPITLEAKRSLRETIRKFRAAGILRPVHSPWNTPLLPVRKSGTSEYRMVQDLREVNKRVETIHPTVPNPYTLLSLLPPDRIWYSVLDLKDAFFCIPLAPESQLIFAFEWADAEEGESGQLTWTRLPQGFKNSPTLFNEALNRDLQGFRLDHPSVSLLQYVDDLLIAADTQAACLSATRDLLMTLAELGYRVSGKKAQLCQEEVTYLGFKIHKGSRSLSNSRTQAILQIPVPKTKRQVREFLGTIGYCRLWIPGFAELAQPLYAATRPGNDPLVWGEKEEEAFQSLKLALTQPPALALPSLDKPFQLFVEETSGAAKGVLTQALGPWKRPVAYLSKRLDPVAAGWPRCLRAIAAAALLTREASKLTFGQDIEITSSHNLESLLRSPPDKWLTNARITQYQVLLLDPPRVRFKQTAALNPATLLPETDDTLPIHHCLDTLDSLTSTRPDLTDQPLAQAEATLFTDGSSYIRDGKRYAGAAVVTLDSVIWAEPLPIGTSAQKAELIALTKALEWSKDKSVNIYTDSRYAFATLHVHGMIYRERGWLTAGGKAIKNAPEILALLTAVWLPKRVAVMHCKGHQKDDAPTSTGNRRADEVAREVAIRPLSTQATISAGKRTADGSEFEKRTADGSEFESPKKKAKVE

SEQ ID NO: 6130 - protein, 2102 aa, synthetic construct
MPAAKRVKLDGGDKKYSIGLDIGTNSVGWAVITDEYKVPSKKFKVLGNTDRHSIKKNLIGALLFDSGETAEATRLKRTARRRYTRRKNRICYLQEIFSNEMAKVDDSFFHRLEESFLVEEDKKHERHPIFGNIVDEVAYHEKYPTIYHLRKKLVDSTDKADLRLIYLALAHMIKFRGHFLIEGDLNPDNSDVDKLFIQLVQTYNQLFEENPINASGVDAKAILSARLSKSRRLENLIAQLPGEKKNGLFGNLIALSLGLTPNFKSNFDLAEDAKLQLSKDTYDDDLDNLLAQIGDQYADLFLAAKNLSDAILLSDILRVNTEITKAPLSASMIKRYDEHHQDLTLLKALVRQQLPEKYKEIFFDQSKNGYAGYIDGGASQEEFYKFIKPILEKMDGTEELLVKLNREDLLRKQRTFDNGSIPHQIHLGELHAILRRQEDFYPFLKDNREKIEKILTFRIPYYVGPLARGNSRFAWMTRKSEETITPWNFEEVVDKGASAQSFIERMTNFDKNLPNEKVLPKHSLLYEYFTVYNELTKVKYVTEGMRKPAFLSGEQKKAIVDLLFKTNRKVTVKQLKEDYFKKIECFDSVEISGVEDRFNASLGTYHDLLKIIKDKDFLDNEENEDILEDIVLTLTLFEDREMIEERLKTYAHLFDDKVMKQLKRRRYTGWGRLSRKLINGIRDKQSGKTILDFLKSDGFANRNFMQLIHDDSLTFKEDIQKAQVSGQGDSLHEHIANLAGSPAIKKGILQTVKVVDELVKVMGRHKPENIVIEMARENQTTQKGQKNSRERMKRIEEGIKELGSQILKEHPVENTQLQNEKLYLYYLQNGRDMYVDQELDINRLSDYDVDHIVPQSFLKDDSIDNKVLTRSDKARGKSDNVPSEEVVKKMKNYWRQLLNAKLITQRKFDNLTKAERGGLSELDKAGFIKRQLVETRQITKHVAQILDSRMNTKYDENDKLIREVKVITLKSKLVSDFRKDFQFYKVREINNYHHAHDAYLNAVVGTALIKKYPKLESEFVYGDYKVYDVRKMIAKSEQEIGKATAKYFFYSNIMNFFKTEITLANGEIRKRPLIETNGETGEIVWDKGRDFATVRKVLSMPQVNIVKKTEVQTGGFSKESILPKRNSDKLIARKKDWDPKKYGGFDSPTVAYSVLVVAKVEKGKSKKLKSVKELLGITIMERSSFEKNPIDFLEAKGYKEVKKDLIIKLPKYSLFELENGRKRMLASAGELQKGNELALPSKYVNFLYLASHYEKLKGSPEDNEQKQLFVEQHKHYLDEIIEQISEFSKRVILADANLDKVLSAYNKHRDKPIREQAENIIHLFTLTNLGAPAAFKYFDTTIDRKRYTSTKEVLDATLIHQSITGLYETRIDLSQLGGDGGGGGGSGGGGSGGGGSGGTAPLEEEYRLFLEAPIQNVTLLEQWKREIPKVWAEINPPGLASTQAPIHVQLLSTALPVRVRQYPITLEAKRSLRETIRKFRAAGILRPVHSPWNTPLLPVRKSGTSEYRMVQDLREVNKRVETIHPTVPNPYTLLSLLPPDRIWYSVLDLKDAFFCIPLAPESQLIFAFEWADAEEGESGQLTWTRLPQGFKNSPTLFNEALNRDLQGFRLDHPSVSLLQYVDDLLIAADTQAACLSATRDLLMTLAELGYRVSGKKAQLCQEEVTYLGFKIHKGSRSLSNSRTQAILQIPVPKTKRQVREFLGKIGYCRLFIPGFAELAQPLYAATRPGNDPLVWGEKEEEAFQSLKLALTQPPALALPSLDKPFQLFVEETSGAAKGVLTQALGPWKRPVAYLSKRLDPVAAGWPRCLRAIAAAALLTREASKLTFGQDIEITSSHNLESLLRSPPDKWLTNARITQYQVLLLDPPRVRFKQTAALNPATLLPETDDTLPIHHCLDTLDSLTSTRPDLTDQPLAQAEATLFTDGSSYIRDGKRYAGAAVVTLDSVIWAEPLPIGTSAQKAELIALTKALEWSKDKSVNIYTDSRYAFATLHVHGMIYRERGWLTAGGKAIKNAPEILALLTAVWLPKRVAVMHCKGHQKDDAPTSTGNRRADEVAREVAIRPLSTQATISAGKRTADGSEFEKRTADGSEFESPKKKAKVE

SEQ ID NO: 6131 - protein, 2106 aa, synthetic construct
MPAAKRVKLDGGDKKYSIGLDIGTNSVGWAVITDEYKVPSKKFKVLGNTDRHSIKKNLIGALLFDSGETAEATRLKRTARRRYTRRKNRICYLQEIFSNEMAKVDDSFFHRLEESFLVEEDKKHERHPIFGNIVDEVAYHEKYPTIYHLRKKLVDSTDKADLRLIYLALAHMIKFRGHFLIEGDLNPDNSDVDKLFIQLVQTYNQLFEENPINASGVDAKAILSARLSKSRRLENLIAQLPGEKKNGLFGNLIALSLGLTPNFKSNFDLAEDAKLQLSKDTYDDDLDNLLAQIGDQYADLFLAAKNLSDAILLSDILRVNTEITKAPLSASMIKRYDEHHQDLTLLKALVRQQLPEKYKEIFFDQSKNGYAGYIDGGASQEEFYKFIKPILEKMDGTEELLVKLNREDLLRKQRTFDNGSIPHQIHLGELHAILRRQEDFYPFLKDNREKIEKILTFRIPYYVGPLARGNSRFAWMTRKSEETITPWNFEEVVDKGASAQSFIERMTNFDKNLPNEKVLPKHSLLYEYFTVYNELTKVKYVTEGMRKPAFLSGEQKKAIVDLLFKTNRKVTVKQLKEDYFKKIECFDSVEISGVEDRFNASLGTYHDLLKIIKDKDFLDNEENEDILEDIVLTLTLFEDREMIEERLKTYAHLFDDKVMKQLKRRRYTGWGRLSRKLINGIRDKQSGKTILDFLKSDGFANRNFMQLIHDDSLTFKEDIQKAQVSGQGDSLHEHIANLAGSPAIKKGILQTVKVVDELVKVMGRHKPENIVIEMARENQTTQKGQKNSRERMKRIEEGIKELGSQILKEHPVENTQLQNEKLYLYYLQNGRDMYVDQELDINRLSDYDVDHIVPQSFLKDDSIDNKVLTRSDKARGKSDNVPSEEVVKKMKNYWRQLLNAKLITQRKFDNLTKAERGGLSELDKAGFIKRQLVETRQITKHVAQILDSRMNTKYDENDKLIREVKVITLKSKLVSDFRKDFQFYKVREINNYHHAHDAYLNAVVGTALIKKYPKLESEFVYGDYKVYDVRKMIAKSEQEIGKATAKYFFYSNIMNFFKTEITLANGEIRKRPLIETNGETGEIVWDKGRDFATVRKVLSMPQVNIVKKTEVQTGGFSKESILPKRNSDKLIARKKDWDPKKYGGFDSPTVAYSVLVVAKVEKGKSKKLKSVKELLGITIMERSSFEKNPIDFLEAKGYKEVKKDLIIKLPKYSLFELENGRKRMLASAGELQKGNELALPSKYVNFLYLASHYEKLKGSPEDNEQKQLFVEQHKHYLDEIIEQISEFSKRVILADANLDKVLSAYNKHRDKPIREQAENIIHLFTLTNLGAPAAFKYFDTTIDRKRYTSTKEVLDATLIHQSITGLYETRIDLSQLGGDGGGGGGSGGGGSGGGGSGGTVSLQDEHRLFDIPVTTSLPDVWLQDFPQAWAETGGLGRAKCQAPIIIDLKPTAVPVSIKQYPMSLEAHMGIRQHIIKFLELGVLRPCRSPWNTPLLPVKKPGTQDYRPVQDLREINKRTVDIHPTVPNPYNLLSTLKPDYSWYTVLDLKDAFFCLPLAPQSQELFAFEWKDPERGISGQLTWTRLPQGFKNSPTLFNEALHRDLTDFRTQHPEVTLLQYVDDLLLAAPTKKACTQGTRHLLQELGEKGYRASAKKAQICQTKVTYLGYILSEGKRWLTPGRIETVARIPPPRNPREVREFLGTAGFCRLWIPGFAELAAPLYALTKPSTPFTWQTEHQLAFEALKKALLSAPALGLPDTSKPFTLFLDERQGIAKGVLTQKLGPWKRPVAYLSKKLDPVAAGWPPCLRIMAATAMLVKDSAKLTLGQPLTVITPHTLEAIVRQPPDRWITNARLTHYQALLLDTDRVQFGPPVTLNPATLLPVPENQPSPHDCRQVLAETHGTREDLKDQELPDADHTWYTDGSSYLDSGTRRAGAAVVDGHNTIWAQSLPPGTSAQKAELIALTKALELSKGKKANIYTDSRYAFATAHTHGSIYERRGWLTSEGKEIKNKAEIIALLKALFLPQEVAIIHCPGHQKGQDPVAVGNRQADRVARQAAMAEVLTLATEPDNTSHITAGKRTADGSEFEKRTADGSEFESPKKKAKVE

SEQ ID NO: 6132 - protein, 2091 aa, synthetic construct
MPAAKRVKLDGGDKKYSIGLDIGTNSVGWAVITDEYKVPSKKFKVLGNTDRHSIKKNLIGALLFDSGETAEATRLKRTARRRYTRRKNRICYLQEIFSNEMAKVDDSFFHRLEESFLVEEDKKHERHPIFGNIVDEVAYHEKYPTIYHLRKKLVDSTDKADLRLIYLALAHMIKFRGHFLIEGDLNPDNSDVDKLFIQLVQTYNQLFEENPINASGVDAKAILSARLSKSRRLENLIAQLPGEKKNGLFGNLIALSLGLTPNFKSNFDLAEDAKLQLSKDTYDDDLDNLLAQIGDQYADLFLAAKNLSDAILLSDILRVNTEITKAPLSASMIKRYDEHHQDLTLLKALVRQQLPEKYKEIFFDQSKNGYAGYIDGGASQEEFYKFIKPILEKMDGTEELLVKLNREDLLRKQRTFDNGSIPHQIHLGELHAILRRQEDFYPFLKDNREKIEKILTFRIPYYVGPLARGNSRFAWMTRKSEETITPWNFEEVVDKGASAQSFIERMTNFDKNLPNEKVLPKHSLLYEYFTVYNELTKVKYVTEGMRKPAFLSGEQKKAIVDLLFKTNRKVTVKQLKEDYFKKIECFDSVEISGVEDRFNASLGTYHDLLKIIKDKDFLDNEENEDILEDIVLTLTLFEDREMIEERLKTYAHLFDDKVMKQLKRRRYTGWGRLSRKLINGIRDKQSGKTILDFLKSDGFANRNFMQLIHDDSLTFKEDIQKAQVSGQGDSLHEHIANLAGSPAIKKGILQTVKVVDELVKVMGRHKPENIVIEMARENQTTQKGQKNSRERMKRIEEGIKELGSQILKEHPVENTQLQNEKLYLYYLQNGRDMYVDQELDINRLSDYDVDHIVPQSFLKDDSIDNKVLTRSDKARGKSDNVPSEEVVKKMKNYWRQLLNAKLITQRKFDNLTKAERGGLSELDKAGFIKRQLVETRQITKHVAQILDSRMNTKYDENDKLIREVKVITLKSKLVSDFRKDFQFYKVREINNYHHAHDAYLNAVVGTALIKKYPKLESEFVYGDYKVYDVRKMIAKSEQEIGKATAKYFFYSNIMNFFKTEITLANGEIRKRPLIETNGETGEIVWDKGRDFATVRKVLSMPQVNIVKKTEVQTGGFSKESILPKRNSDKLIARKKDWDPKKYGGFDSPTVAYSVLVVAKVEKGKSKKLKSVKELLGITIMERSSFEKNPIDFLEAKGYKEVKKDLIIKLPKYSLFELENGRKRMLASAGELQKGNELALPSKYVNFLYLASHYEKLKGSPEDNEQKQLFVEQHKHYLDEIIEQISEFSKRVILADANLDKVLSAYNKHRDKPIREQAENIIHLFTLTNLGAPAAFKYFDTTIDRKRYTSTKEVLDATLIHQSITGLYETRIDLSQLGGDGGGGGGSGGGGSGGGGSGGVPWLTQQPLQLTILVPLQEYQEKILSKTALPEDQKQQLKTLFVKYDNLWQHWENQVGHRKIRPHNIATGDYPPRPQKQYPINPKAKPSIQIVIDDLLKQGVLTPQNSTMNTPVYPVPKPDGRWRMVLDYREVNKTIPLTAAQNQHSAGILATIVRQKYKTTLDLANGFWAHPITPESYWLTAFTWQGKQYCWTRLPQGFLNSPALFNADVVDLLKEIPNVQVYVDDIYLSHDDPKEHVQQLEKVFQILLQAGYVVSLKKSEIGQKTVEFLGFNITKEGRGLTDTFKTKLLNITPPKDLKQLQSILGLLNFARNFIPNFAELVQPLYNLIAPAKGKYIEWSEENTKQLNMVIEALNTASNLEERLPEQRLVIKVNTSPSAGYVRYYNETGKKPIMYLNYVFSKAELKFSMLEKLLTTMHKALIKAMDLAMGQEILVYSPIVSMTKIQKTPLPERKALPIRWITWMTYLEDPRIQFHYDKTLPELKHIPDVYTSSQSPVKHPSQYEGVFYTDGSAIKSPDPTKSNNAGMGIVHATYKPEYQVLNQWSIPLGNHTAQMAEIAAVEFACKKALKIPGPVLVITDSFYVAESANKELPYWKSNGFVNNKKKPLKHISKWKSIAECLSMKPDITIQHEKGISLQIPVFILKGNALADKLATQGSYVVNAGKRTADGSEFEKRTADGSEFESPKKKAKVE

SEQ ID NO: 6133 - protein, 2222 aa, synthetic construct
MPAAKRVKLDGGDKKYSIGLDIGTNSVGWAVITDEYKVPSKKFKVLGNTDRHSIKKNLIGALLFDSGETAEATRLKRTARRRYTRRKNRICYLQEIFSNEMAKVDDSFFHRLEESFLVEEDKKHERHPIFGNIVDEVAYHEKYPTIYHLRKKLVDSTDKADLRLIYLALAHMIKFRGHFLIEGDLNPDNSDVDKLFIQLVQTYNQLFEENPINASGVDAKAILSARLSKSRRLENLIAQLPGEKKNGLFGNLIALSLGLTPNFKSNFDLAEDAKLQLSKDTYDDDLDNLLAQIGDQYADLFLAAKNLSDAILLSDILRVNTEITKAPLSASMIKRYDEHHQDLTLLKALVRQQLPEKYKEIFFDQSKNGYAGYIDGGASQEEFYKFIKPILEKMDGTEELLVKLNREDLLRKQRTFDNGSIPHQIHLGELHAILRRQEDFYPFLKDNREKIEKILTFRIPYYVGPLARGNSRFAWMTRKSEETITPWNFEEVVDKGASAQSFIERMTNFDKNLPNEKVLPKHSLLYEYFTVYNELTKVKYVTEGMRKPAFLSGEQKKAIVDLLFKTNRKVTVKQLKEDYFKKIECFDSVEISGVEDRFNASLGTYHDLLKIIKDKDFLDNEENEDILEDIVLTLTLFEDREMIEERLKTYAHLFDDKVMKQLKRRRYTGWGRLSRKLINGIRDKQSGKTILDFLKSDGFANRNFMQLIHDDSLTFKEDIQKAQVSGQGDSLHEHIANLAGSPAIKKGILQTVKVVDELVKVMGRHKPENIVIEMARENQTTQKGQKNSRERMKRIEEGIKELGSQILKEHPVENTQLQNEKLYLYYLQNGRDMYVDQELDINRLSDYDVDHIVPQSFLKDDSIDNKVLTRSDKARGKSDNVPSEEVVKKMKNYWRQLLNAKLITQRKFDNLTKAERGGLSELDKAGFIKRQLVETRQITKHVAQILDSRMNTKYDENDKLIREVKVITLKSKLVSDFRKDFQFYKVREINNYHHAHDAYLNAVVGTALIKKYPKLESEFVYGDYKVYDVRKMIAKSEQEIGKATAKYFFYSNIMNFFKTEITLANGEIRKRPLIETNGETGEIVWDKGRDFATVRKVLSMPQVNIVKKTEVQTGGFSKESILPKRNSDKLIARKKDWDPKKYGGFDSPTVAYSVLVVAKVEKGKSKKLKSVKELLGITIMERSSFEKNPIDFLEAKGYKEVKKDLIIKLPKYSLFELENGRKRMLASAGELQKGNELALPSKYVNFLYLASHYEKLKGSPEDNEQKQLFVEQHKHYLDEIIEQISEFSKRVILADANLDKVLSAYNKHRDKPIREQAENIIHLFTLTNLGAPAAFKYFDTTIDRKRYTSTKEVLDATLIHQSITGLYETRIDLSQLGGDGGGGGGSGGGGSGGGGSGGTLGDQGSRGSDPLPEPRVTLTVEGIPTEFLVNTGAEHSVLTKPMGKMGSKRTVVAGATGSKVYPWTTKRLLKIGQKQVTHSFLVIPECPAPLLGRDLLTKLKAQIQFSTEGPQVTWEDRPAMCLVLNLEEEYRLHEKPVPPSIDPSWLQLFPMVWAEKAGMGLANQVPPVVVELKSDASPVAVRQYPMSKEAREGIRPHIQRFLDLGILVPCQSPWNTPLLPVKKPGTNDYRPVQDLREVNKRVQDIHPTVPNPYNLLSSLPPSHTWYSVLDLKDAFFCLKLHPNSQPLFAFEWRDPEKGNTGQLTWTRLPQGFKNSPTLFNEALHRDLASFRALNPQVVMLQYVDDLLVAAPTYRDCKEGTRRLLQELSKLGYRVSAKKAQLCREEVTYLGYLLKGGKRWLTPARKATVMKIPTPTTPRQVREFLGKAGFCRLFIPGFASLAAPLYPLTRPKVPFTWTEAHQEAFGRIKEALLSAPALALPDLTKPFALYVDEKEGVARGVLTQTLGPWRRPVAYLSKKLDPVASGWPTCLKAIAAVALLLKDADKLTLGQNVLVIAPHNLESIVRQPPDRWMTNARMTHYQSLLLNERVSFAPPAILNPATLLPVESDDTPIHICSEILAEETGTRPDLRDQPLPGVPAWYTDGSSFIMDGRRQAGAAIVDNKRTVWASNLPEGTSAQKAELIALTQALRLAEGKSINIYTDSRYAFATAHVHGAIYKQRGWLTSAGKDIKNKEEILALLEAIHLPKRVAIIHCPGHQRGTDPVATGNRKADEAAKQAAQSTRILTETTKNAGKRTADGSEFEKRTADGSEFESPKKKAKVE

SEQ ID NO: 6134 - protein, 2100 aa, synthetic construct
MPAAKRVKLDGGDKKYSIGLDIGTNSVGWAVITDEYKVPSKKFKVLGNTDRHSIKKNLIGALLFDSGETAEATRLKRTARRRYTRRKNRICYLQEIFSNEMAKVDDSFFHRLEESFLVEEDKKHERHPIFGNIVDEVAYHEKYPTIYHLRKKLVDSTDKADLRLIYLALAHMIKFRGHFLIEGDLNPDNSDVDKLFIQLVQTYNQLFEENPINASGVDAKAILSARLSKSRRLENLIAQLPGEKKNGLFGNLIALSLGLTPNFKSNFDLAEDAKLQLSKDTYDDDLDNLLAQIGDQYADLFLAAKNLSDAILLSDILRVNTEITKAPLSASMIKRYDEHHQDLTLLKALVRQQLPEKYKEIFFDQSKNGYAGYIDGGASQEEFYKFIKPILEKMDGTEELLVKLNREDLLRKQRTFDNGSIPHQIHLGELHAILRRQEDFYPFLKDNREKIEKILTFRIPYYVGPLARGNSRFAWMTRKSEETITPWNFEEVVDKGASAQSFIERMTNFDKNLPNEKVLPKHSLLYEYFTVYNELTKVKYVTEGMRKPAFLSGEQKKAIVDLLFKTNRKVTVKQLKEDYFKKIECFDSVEISGVEDRFNASLGTYHDLLKIIKDKDFLDNEENEDILEDIVLTLTLFEDREMIEERLKTYAHLFDDKVMKQLKRRRYTGWGRLSRKLINGIRDKQSGKTILDFLKSDGFANRNFMQLIHDDSLTFKEDIQKAQVSGQGDSLHEHIANLAGSPAIKKGILQTVKVVDELVKVMGRHKPENIVIEMARENQTTQKGQKNSRERMKRIEEGIKELGSQILKEHPVENTQLQNEKLYLYYLQNGRDMYVDQELDINRLSDYDVDHIVPQSFLKDDSIDNKVLTRSDKARGKSDNVPSEEVVKKMKNYWRQLLNAKLITQRKFDNLTKAERGGLSELDKAGFIKRQLVETRQITKHVAQILDSRMNTKYDENDKLIREVKVITLKSKLVSDFRKDFQFYKVREINNYHHAHDAYLNAVVGTALIKKYPKLESEFVYGDYKVYDVRKMIAKSEQEIGKATAKYFFYSNIMNFFKTEITLANGEIRKRPLIETNGETGEIVWDKGRDFATVRKVLSMPQVNIVKKTEVQTGGFSKESILPKRNSDKLIARKKDWDPKKYGGFDSPTVAYSVLVVAKVEKGKSKKLKSVKELLGITIMERSSFEKNPIDFLEAKGYKEVKKDLIIKLPKYSLFELENGRKRMLASAGELQKGNELALPSKYVNFLYLASHYEKLKGSPEDNEQKQLFVEQHKHYLDEIIEQISEFSKRVILADANLDKVLSAYNKHRDKPIREQAENIIHLFTLTNLGAPAAFKYFDTTIDRKRYTSTKEVLDATLIHQSITGLYETRIDLSQLGGDGGGGGGSGGGGSGGGGSGGTLNLEDEYRLYETSAEPEVSPGSTWLSDFPQAWAETGGMGLAVRQAPLIIPLKATSTPVSIKQYPMSQEAKLGIKPHIQRLLDQGILVPCQSPWNTPLLPVKKPGTNDYRPVQDLREVNKRVEDIHPTVPNPYNLLSGLPPSHRWYTVLDLKDAFFCLRLHPTSQPLFAFEWRDPGMGISGQLTWTRLPQGFKNSPTLFNEALHRDLADFRIQHPDLILLQYVDDILLAATSELDCQQGTRALLLTLGNLGYRASAKKAQLCQKQVKYLGYLLKEGQRWLTEARKETVMGQPTPKTPRQLREFLGTAGFCRLWIPGFAEMAAPLYPLTKPGTLFNWGPDQQKAYQEIKQALLTAPALGLPDLTKPFELFVDEKQGYAKGVLTQKLGPWRRPVAYLSKKLDPVAAGWPPCLRMVAAIAVLRKDAGKLTMGQPLVILAPHAVEALVKQPPDRWLSNARMTHYQAMLLDTDRVQFGPVVALNPATLLPLPEEGAPHDCLEILAETHGTRPDLTDQPIPDADHTWYTDGSSFLQEGQRKAGAAVTTETEVIWARALPAGTSAQRAELIALTQALKMAEGKRLNVYTDSRYAFATAHIHGEIYRRRGWLTSEGREIKNKSEILALLKALFLPKRLSIIHCLGHQKGDSAEARGNRLADQAAREAAIKTPPDTSTLLAGKRTADGSEFEKRTADGSEFESPKKKAKVE

SEQ ID NO: 6135 - protein, 2100 aa, synthetic construct
MPAAKRVKLDGGDKKYSIGLDIGTNSVGWAVITDEYKVPSKKFKVLGNTDRHSIKKNLIGALLFDSGETAEATRLKRTARRRYTRRKNRICYLQEIFSNEMAKVDDSFFHRLEESFLVEEDKKHERHPIFGNIVDEVAYHEKYPTIYHLRKKLVDSTDKADLRLIYLALAHMIKFRGHFLIEGDLNPDNSDVDKLFIQLVQTYNQLFEENPINASGVDAKAILSARLSKSRRLENLIAQLPGEKKNGLFGNLIALSLGLTPNFKSNFDLAEDAKLQLSKDTYDDDLDNLLAQIGDQYADLFLAAKNLSDAILLSDILRVNTEITKAPLSASMIKRYDEHHQDLTLLKALVRQQLPEKYKEIFFDQSKNGYAGYIDGGASQEEFYKFIKPILEKMDGTEELLVKLNREDLLRKQRTFDNGSIPHQIHLGELHAILRRQEDFYPFLKDNREKIEKILTFRIPYYVGPLARGNSRFAWMTRKSEETITPWNFEEVVDKGASAQSFIERMTNFDKNLPNEKVLPKHSLLYEYFTVYNELTKVKYVTEGMRKPAFLSGEQKKAIVDLLFKTNRKVTVKQLKEDYFKKIECFDSVEISGVEDRFNASLGTYHDLLKIIKDKDFLDNEENEDILEDIVLTLTLFEDREMIEERLKTYAHLFDDKVMKQLKRRRYTGWGRLSRKLINGIRDKQSGKTILDFLKSDGFANRNFMQLIHDDSLTFKEDIQKAQVSGQGDSLHEHIANLAGSPAIKKGILQTVKVVDELVKVMGRHKPENIVIEMARENQTTQKGQKNSRERMKRIEEGIKELGSQILKEHPVENTQLQNEKLYLYYLQNGRDMYVDQELDINRLSDYDVDHIVPQSFLKDDSIDNKVLTRSDKARGKSDNVPSEEVVKKMKNYWRQLLNAKLITQRKFDNLTKAERGGLSELDKAGFIKRQLVETRQITKHVAQILDSRMNTKYDENDKLIREVKVITLKSKLVSDFRKDFQFYKVREINNYHHAHDAYLNAVVGTALIKKYPKLESEFVYGDYKVYDVRKMIAKSEQEIGKATAKYFFYSNIMNFFKTEITLANGEIRKRPLIETNGETGEIVWDKGRDFATVRKVLSMPQVNIVKKTEVQTGGFSKESILPKRNSDKLIARKKDWDPKKYGGFDSPTVAYSVLVVAKVEKGKSKKLKSVKELLGITIMERSSFEKNPIDFLEAKGYKEVKKDLIIKLPKYSLFELENGRKRMLASAGELQKGNELALPSKYVNFLYLASHYEKLKGSPEDNEQKQLFVEQHKHYLDEIIEQISEFSKRVILADANLDKVLSAYNKHRDKPIREQAENIIHLFTLTNLGAPAAFKYFDTTIDRKRYTSTKEVLDATLIHQSITGLYETRIDLSQLGGDGGGGGGSGGGGSGGGGSGGTLNIEDEYRLHETSKEPDVSLGSTWLSDFPQAWAETGGMGLAVRQAPLIIPLKATSTPVSIKQYPMSQEARLGIKPHIQRLLDQGILVPCQSPWNTPLLPVKKPGTNDYRPVQDLREVNKRVEDIHPTVPNPYNLLSGLPPSHQWYTVLDLKDAFFCLRLHPTSQPLFAFEWRDPEMGISGQLTWTRLPQGFKNSPTLFDEALHRDLAGFRIQHPDLILLQYVDDLLLAATSELDCQQGTRALLQTLGDLGYRASAKKAQICQKQVKYLGYLLKEGQRWLTEARKETVMGQPIPKTPRQLREFLGTAGFCRLWIPGFAEMAAPLYPLTKTGTLFNWGPDQQKAFQEIKQALLTAPALGLPDLTKPFELFVDEKQGYAKGVLTQKLGPWRRPVAYLSKKLDPVAAGWPPCLRMVAAIAVLTKDAGKLTMGQPLVILAPHAVEALVKQPPDRWLSNARMTHYQALLLDTDRVQFGPVVALNPATLLPLPEEGLQHDCLDILAEAHGTRSDLMDQPLPDADHTWYTDGSSFLQEGQRKAGAAVTTETEVIWARALPAGTSAQRAELIALTQALKMAEGKKLNVYTDSRYAFATAHIHGEIYRRRGLLTSEGKEIKNKDEILALLKALFLPKRLSIIHCPGHQKGNSAEARGNRMADQAAREVATRETPETSTLLAGKRTADGSEFEKRTADGSEFESPKKKAKVE

SEQ ID NO: 6136 - protein, 2100 aa, synthetic construct
MPAAKRVKLDGGDKKYSIGLDIGTNSVGWAVITDEYKVPSKKFKVLGNTDRHSIKKNLIGALLFDSGETAEATRLKRTARRRYTRRKNRICYLQEIFSNEMAKVDDSFFHRLEESFLVEEDKKHERHPIFGNIVDEVAYHEKYPTIYHLRKKLVDSTDKADLRLIYLALAHMIKFRGHFLIEGDLNPDNSDVDKLFIQLVQTYNQLFEENPINASGVDAKAILSARLSKSRRLENLIAQLPGEKKNGLFGNLIALSLGLTPNFKSNFDLAEDAKLQLSKDTYDDDLDNLLAQIGDQYADLFLAAKNLSDAILLSDILRVNTEITKAPLSASMIKRYDEHHQDLTLLKALVRQQLPEKYKEIFFDQSKNGYAGYIDGGASQEEFYKFIKPILEKMDGTEELLVKLNREDLLRKQRTFDNGSIPHQIHLGELHAILRRQEDFYPFLKDNREKIEKILTFRIPYYVGPLARGNSRFAWMTRKSEETITPWNFEEVVDKGASAQSFIERMTNFDKNLPNEKVLPKHSLLYEYFTVYNELTKVKYVTEGMRKPAFLSGEQKKAIVDLLFKTNRKVTVKQLKEDYFKKIECFDSVEISGVEDRFNASLGTYHDLLKIIKDKDFLDNEENEDILEDIVLTLTLFEDREMIEERLKTYAHLFDDKVMKQLKRRRYTGWGRLSRKLINGIRDKQSGKTILDFLKSDGFANRNFMQLIHDDSLTFKEDIQKAQVSGQGDSLHEHIANLAGSPAIKKGILQTVKVVDELVKVMGRHKPENIVIEMARENQTTQKGQKNSRERMKRIEEGIKELGSQILKEHPVENTQLQNEKLYLYYLQNGRDMYVDQELDINRLSDYDVDHIVPQSFLKDDSIDNKVLTRSDKARGKSDNVPSEEVVKKMKNYWRQLLNAKLITQRKFDNLTKAERGGLSELDKAGFIKRQLVETRQITKHVAQILDSRMNTKYDENDKLIREVKVITLKSKLVSDFRKDFQFYKVREINNYHHAHDAYLNAVVGTALIKKYPKLESEFVYGDYKVYDVRKMIAKSEQEIGKATAKYFFYSNIMNFFKTEITLANGEIRKRPLIETNGETGEIVWDKGRDFATVRKVLSMPQVNIVKKTEVQTGGFSKESILPKRNSDKLIARKKDWDPKKYGGFDSPTVAYSVLVVAKVEKGKSKKLKSVKELLGITIMERSSFEKNPIDFLEAKGYKEVKKDLIIKLPKYSLFELENGRKRMLASAGELQKGNELALPSKYVNFLYLASHYEKLKGSPEDNEQKQLFVEQHKHYLDEIIEQISEFSKRVILADANLDKVLSAYNKHRDKPIREQAENIIHLFTLTNLGAPAAFKYFDTTIDRKRYTSTKEVLDATLIHQSITGLYETRIDLSQLGGDGGGGGGSGGGGSGGGGSGGTLNIEDEHRLHETSKEPDVSLGSTWLSDFPQAWAETGGMGLAVRQAPLIIPLKATSTPVSIKQYPMSQEARLGIKPHIQRLLDQGILVPCQSPWNTPLLPVKKPGTNDYRPVQDLREVNKRVEDIHPTVPNPYNLLSGLPPSHQWYTVLDLKDAFFCLRLHPTSQPLFAFEWRDPEMGISGQLTWTRLPQGFKNSPTLFDEALHRDLADFRIQHPDLILLQYVDDLLLAATSELDCQQGTRALLQTLGNLGYRASAKKAQICQKQVKYLGYLLKEGQRWLTEARKETVMGQPTPKTPRQLREFLGTAGFCRLWIPGFAEMAAPLYPLTKTGTLFNWGPDQQKAYQEIKQALLTAPALGLPDLTKPFELFVDEKQGYAKGVLTQKLGPWRRPVAYLSKKLDPVAAGWPPCLRMVAAIAVLTKDAGKLTMGQPLVILAPHAVEALVKQPPDRWLSNARMTHYQALLLDTDRVQFGPVVALNPATLLPLPEEGLQHNCLDILAEAHGTRPDLTDQPLPDADHTWYTDGSSLLQEGQRKAGAAVTTETEVIWAKALPAGTSAQRAELIALTQALKMAEGKKLNVYTDSRYAFATAHIHGEIYRRRGLLTSEGKEIKNKDEILALLKALFLPKRLSIIHCPGHQKGHSAEARGNRMADQAARKAAITETPDTSTLLAGKRTADGSEFEKRTADGSEFESPKKKAKVE

SEQ ID NO: 6137 - protein, 2180 aa, synthetic construct
MPAAKRVKLDGGDKKYSIGLDIGTNSVGWAVITDEYKVPSKKFKVLGNTDRHSIKKNLIGALLFDSGETAEATRLKRTARRRYTRRKNRICYLQEIFSNEMAKVDDSFFHRLEESFLVEEDKKHERHPIFGNIVDEVAYHEKYPTIYHLRKKLVDSTDKADLRLIYLALAHMIKFRGHFLIEGDLNPDNSDVDKLFIQLVQTYNQLFEENPINASGVDAKAILSARLSKSRRLENLIAQLPGEKKNGLFGNLIALSLGLTPNFKSNFDLAEDAKLQLSKDTYDDDLDNLLAQIGDQYADLFLAAKNLSDAILLSDILRVNTEITKAPLSASMIKRYDEHHQDLTLLKALVRQQLPEKYKEIFFDQSKNGYAGYIDGGASQEEFYKFIKPILEKMDGTEELLVKLNREDLLRKQRTFDNGSIPHQIHLGELHAILRRQEDFYPFLKDNREKIEKILTFRIPYYVGPLARGNSRFAWMTRKSEETITPWNFEEVVDKGASAQSFIERMTNFDKNLPNEKVLPKHSLLYEYFTVYNELTKVKYVTEGMRKPAFLSGEQKKAIVDLLFKTNRKVTVKQLKEDYFKKIECFDSVEISGVEDRFNASLGTYHDLLKIIKDKDFLDNEENEDILEDIVLTLTLFEDREMIEERLKTYAHLFDDKVMKQLKRRRYTGWGRLSRKLINGIRDKQSGKTILDFLKSDGFANRNFMQLIHDDSLTFKEDIQKAQVSGQGDSLHEHIANLAGSPAIKKGILQTVKVVDELVKVMGRHKPENIVIEMARENQTTQKGQKNSRERMKRIEEGIKELGSQILKEHPVENTQLQNEKLYLYYLQNGRDMYVDQELDINRLSDYDVDHIVPQSFLKDDSIDNKVLTRSDKARGKSDNVPSEEVVKKMKNYWRQLLNAKLITQRKFDNLTKAERGGLSELDKAGFIKRQLVETRQITKHVAQILDSRMNTKYDENDKLIREVKVITLKSKLVSDFRKDFQFYKVREINNYHHAHDAYLNAVVGTALIKKYPKLESEFVYGDYKVYDVRKMIAKSEQEIGKATAKYFFYSNIMNFFKTEITLANGEIRKRPLIETNGETGEIVWDKGRDFATVRKVLSMPQVNIVKKTEVQTGGFSKESILPKRNSDKLIARKKDWDPKKYGGFDSPTVAYSVLVVAKVEKGKSKKLKSVKELLGITIMERSSFEKNPIDFLEAKGYKEVKKDLIIKLPKYSLFELENGRKRMLASAGELQKGNELALPSKYVNFLYLASHYEKLKGSPEDNEQKQLFVEQHKHYLDEIIEQISEFSKRVILADANLDKVLSAYNKHRDKPIREQAENIIHLFTLTNLGAPAAFKYFDTTIDRKRYTSTKEVLDATLIHQSITGLYETRIDLSQLGGDGGGGGGSGGGGSGGGGSGGMDPLQLLQPLEAEIKGTKLKAHWNSGATITCVPEAFLEDERPIQTMLIKTIHGEKQQDVYYLTFKVQGRKVEAEVLASPYDYILLNPSDVPWLMKKPLQLTVLVPLHEYQERLLQQTALPKEQKELLQKLFLKYDALWQHWENQVGHRRIKPHNIATGTLAPRPQKQYPINPKAKPSIQIVIDDLLKQGVLIQQNSTMNTPVYPVPKPDGKWRMVLDYREVNKTIPLIAAQNQHSAGILSSIYRGKYKTTLDLTNGFWAHPITPESYWLTAFTWQGKQYCWTRLPQGFLNSPALFNADVVDLLKEIPNVQAYVDDIYISHDDPQEHLEQLEKIFSILLNAGYVVSLKKSEIAQREVEFLGFNITKEGRGLTDTFKQKLLNITPPKDLKQLQSILGLLNFARNFIPNYSELVKPLYTIVAPANGKFISWTEDNSNQLQHIISVLNQADNLEERNPETRLIIKVNSSPSAGYIRYYNEGSKRPIMYVNYIFSKAEAKFTQTEKLLTTMHKGLIKAMDLAMGQEILVYSPIVSMTKIQRTPLPERKALPVRWITWMTYLEDPRIQFHYDKSLPELQQIPNVTEDVIAKTKHPSEFAMVFYTDGSAIKHPDVNKSHSAGMGIAQVQFIPEYKIVHQWSIPLGDHTAQLAEIAAVEFACKKALKISGPVLIVTDSFYVAESANKELPYWKSNGFLNNKKKPLRHVSKWKSIAECLQLKPDIIIMHEKGHQQPMTTLHTEGNNLADKLATQGSYVVHAGKRTADGSEFEKRTADGSEFESPKKKAKVE

SEQ ID NO: 6138 - protein, 2091 aa, synthetic construct
MPAAKRVKLDGGDKKYSIGLDIGTNSVGWAVITDEYKVPSKKFKVLGNTDRHSIKKNLIGALLFDSGETAEATRLKRTARRRYTRRKNRICYLQEIFSNEMAKVDDSFFHRLEESFLVEEDKKHERHPIFGNIVDEVAYHEKYPTIYHLRKKLVDSTDKADLRLIYLALAHMIKFRGHFLIEGDLNPDNSDVDKLFIQLVQTYNQLFEENPINASGVDAKAILSARLSKSRRLENLIAQLPGEKKNGLFGNLIALSLGLTPNFKSNFDLAEDAKLQLSKDTYDDDLDNLLAQIGDQYADLFLAAKNLSDAILLSDILRVNTEITKAPLSASMIKRYDEHHQDLTLLKALVRQQLPEKYKEIFFDQSKNGYAGYIDGGASQEEFYKFIKPILEKMDGTEELLVKLNREDLLRKQRTFDNGSIPHQIHLGELHAILRRQEDFYPFLKDNREKIEKILTFRIPYYVGPLARGNSRFAWMTRKSEETITPWNFEEVVDKGASAQSFIERMTNFDKNLPNEKVLPKHSLLYEYFTVYNELTKVKYVTEGMRKPAFLSGEQKKAIVDLLFKTNRKVTVKQLKEDYFKKIECFDSVEISGVEDRFNASLGTYHDLLKIIKDKDFLDNEENEDILEDIVLTLTLFEDREMIEERLKTYAHLFDDKVMKQLKRRRYTGWGRLSRKLINGIRDKQSGKTILDFLKSDGFANRNFMQLIHDDSLTFKEDIQKAQVSGQGDSLHEHIANLAGSPAIKKGILQTVKVVDELVKVMGRHKPENIVIEMARENQTTQKGQKNSRERMKRIEEGIKELGSQILKEHPVENTQLQNEKLYLYYLQNGRDMYVDQELDINRLSDYDVDHIVPQSFLKDDSIDNKVLTRSDKARGKSDNVPSEEVVKKMKNYWRQLLNAKLITQRKFDNLTKAERGGLSELDKAGFIKRQLVETRQITKHVAQILDSRMNTKYDENDKLIREVKVITLKSKLVSDFRKDFQFYKVREINNYHHAHDAYLNAVVGTALIKKYPKLESEFVYGDYKVYDVRKMIAKSEQEIGKATAKYFFYSNIMNFFKTEITLANGEIRKRPLIETNGETGEIVWDKGRDFATVRKVLSMPQVNIVKKTEVQTGGFSKESILPKRNSDKLIARKKDWDPKKYGGFDSPTVAYSVLVVAKVEKGKSKKLKSVKELLGITIMERSSFEKNPIDFLEAKGYKEVKKDLIIKLPKYSLFELENGRKRMLASAGELQKGNELALPSKYVNFLYLASHYEKLKGSPEDNEQKQLFVEQHKHYLDEIIEQISEFSKRVILADANLDKVLSAYNKHRDKPIREQAENIIHLFTLTNLGAPAAFKYFDTTIDRKRYTSTKEVLDATLIHQSITGLYETRIDLSQLGGDGGGGGGSGGGGSGGGGSGGIPWLMKKPLQLTTLVPLQEYEERLLKQTMLTGSYKEKLQSLFLKYDALWQHWENQVGHRRIKPHHIATGTVNPRPQKQYPINPKAKASIQTVINDLLKQGVLIQQNSIMNTPVYPVPKPDGKWRMVLDYREVNKTIPLIAAQNQHSAGILSSIFRGKYKTTLDLSNGFWAHSITPESYWLTAFTWLGQQYCWTRLPQGFLNSPALFNADVVDLLKEVPNVQVYVDDIYISHDDPREHLEQLEKVFSLLLNAGYVVSLKKSEIAQHEVEFLGFNITKEGRGLTETFKQKLLNITPPRDLKQLQSILGLLNFARNFIPNFSELVKPLYNIIATAPGKYITWTTDNSQQLQNIISMLNSAENLEERNPEVRLIMKVNTSPSAGYIRFYNEFAKRPIMYLNYVYTKAEVKFTNTEKLLTTIHKGLIKALDLGMGQEILVYSPIVSMTKIQKTPLPERKALPIRWITWMSYLEDPRIQFHYDKTLPELQQVPTVTDDIIAKIKHPSEFSMVFYTDGSAIKHPNVNKSHNAGMGIAQVQFKPEFTVINTWSIPLGDHTAQLAEVAAVEFACKKALKIDGPVLIVTDSFYVAESVNKELPYWQSNGFFNNKKKPLKHVSKWKSIADCIQLKPDIIIIHEKGHQPTASTFHTEGNNLADKLATQGSYVVNAGKRTADGSEFEKRTADGSEFESPKKKAKVE

SEQ ID NO: 6139 - protein, 2091 aa, synthetic construct
MPAAKRVKLDGGDKKYSIGLDIGTNSVGWAVITDEYKVPSKKFKVLGNTDRHSIKKNLIGALLFDSGETAEATRLKRTARRRYTRRKNRICYLQEIFSNEMAKVDDSFFHRLEESFLVEEDKKHERHPIFGNIVDEVAYHEKYPTIYHLRKKLVDSTDKADLRLIYLALAHMIKFRGHFLIEGDLNPDNSDVDKLFIQLVQTYNQLFEENPINASGVDAKAILSARLSKSRRLENLIAQLPGEKKNGLFGNLIALSLGLTPNFKSNFDLAEDAKLQLSKDTYDDDLDNLLAQIGDQYADLFLAAKNLSDAILLSDILRVNTEITKAPLSASMIKRYDEHHQDLTLLKALVRQQLPEKYKEIFFDQSKNGYAGYIDGGASQEEFYKFIKPILEKMDGTEELLVKLNREDLLRKQRTFDNGSIPHQIHLGELHAILRRQEDFYPFLKDNREKIEKILTFRIPYYVGPLARGNSRFAWMTRKSEETITPWNFEEVVDKGASAQSFIERMTNFDKNLPNEKVLPKHSLLYEYFTVYNELTKVKYVTEGMRKPAFLSGEQKKAIVDLLFKTNRKVTVKQLKEDYFKKIECFDSVEISGVEDRFNASLGTYHDLLKIIKDKDFLDNEENEDILEDIVLTLTLFEDREMIEERLKTYAHLFDDKVMKQLKRRRYTGWGRLSRKLINGIRDKQSGKTILDFLKSDGFANRNFMQLIHDDSLTFKEDIQKAQVSGQGDSLHEHIANLAGSPAIKKGILQTVKVVDELVKVMGRHKPENIVIEMARENQTTQKGQKNSRERMKRIEEGIKELGSQILKEHPVENTQLQNEKLYLYYLQNGRDMYVDQELDINRLSDYDVDHIVPQSFLKDDSIDNKVLTRSDKARGKSDNVPSEEVVKKMKNYWRQLLNAKLITQRKFDNLTKAERGGLSELDKAGFIKRQLVETRQITKHVAQILDSRMNTKYDENDKLIREVKVITLKSKLVSDFRKDFQFYKVREINNYHHAHDAYLNAVVGTALIKKYPKLESEFVYGDYKVYDVRKMIAKSEQEIGKATAKYFFYSNIMNFFKTEITLANGEIRKRPLIETNGETGEIVWDKGRDFATVRKVLSMPQVNIVKKTEVQTGGFSKESILPKRNSDKLIARKKDWDPKKYGGFDSPTVAYSVLVVAKVEKGKSKKLKSVKELLGITIMERSSFEKNPIDFLEAKGYKEVKKDLIIKLPKYSLFELENGRKRMLASAGELQKGNELALPSKYVNFLYLASHYEKLKGSPEDNEQKQLFVEQHKHYLDEIIEQISEFSKRVILADANLDKVLSAYNKHRDKPIREQAENIIHLFTLTNLGAPAAFKYFDTTIDRKRYTSTKEVLDATLIHQSITGLYETRIDLSQLGGDGGGGGGSGGGGSGGGGSGGIPWLMKKPLQLTTLVPLQEYEERLLKQTMLTGSYKEKLQSLFLKYDALWQHWENQVGHRRIKPHHIATGTVNPRPQKQYPINPKAKASIQTVINDLLKQGVLIQQNSIMNTPVYPVPKPDGKWRMVLDYREVNKTIPLIAAQNQHSAGILSSIFRGKYKTTLDLSNGFWAHSITPESYWLTAFTWLGQQYCWTRLPQGFLNSPALFNADVVDLLKEVPNVQVYVDDIYISHDDPREHLEQLEKVFSLLLNAGYVVSLKKSEIAQHEVEFLGFNITKEGRGLTETFKQKLLNITPPRDLKQLQSILGKLNFARNFIPNFSELVKPLYNIIATAPGKYITWTTDNSQQLQNIISMLNSAENLEERNPEVRLIMKVNTSPSAGYIRFYNEFAKRPIMYLNYVYTKAEVKFTNTEKLLTTIHKGLIKALDLGMGQEILVYSPIVSMTKIQKTPLPERKALPIRWITWMSYLEDPRIQFHYDKTLPELQQVPTVTDDIIAKIKHPSEFSMVFYTDGSAIKHPNVNKSHNAGMGIAQVQFKPEFTVINTWSIPLGDHTAQLAEVAAVEFACKKALKIDGPVLIVTDSFYVAESVNKELPYWQSNGFFNNKKKPLKHVSKWKSIADCIQLKPDIIIIHEKGHQPTASTFHTEGNNLADKLATQGSYVVNAGKRTADGSEFEKRTADGSEFESPKKKAKVE

SEQ ID NO: 6140 - protein, 2098 aa, synthetic construct
MPAAKRVKLDGGDKKYSIGLDIGTNSVGWAVITDEYKVPSKKFKVLGNTDRHSIKKNLIGALLFDSGETAEATRLKRTARRRYTRRKNRICYLQEIFSNEMAKVDDSFFHRLEESFLVEEDKKHERHPIFGNIVDEVAYHEKYPTIYHLRKKLVDSTDKADLRLIYLALAHMIKFRGHFLIEGDLNPDNSDVDKLFIQLVQTYNQLFEENPINASGVDAKAILSARLSKSRRLENLIAQLPGEKKNGLFGNLIALSLGLTPNFKSNFDLAEDAKLQLSKDTYDDDLDNLLAQIGDQYADLFLAAKNLSDAILLSDILRVNTEITKAPLSASMIKRYDEHHQDLTLLKALVRQQLPEKYKEIFFDQSKNGYAGYIDGGASQEEFYKFIKPILEKMDGTEELLVKLNREDLLRKQRTFDNGSIPHQIHLGELHAILRRQEDFYPFLKDNREKIEKILTFRIPYYVGPLARGNSRFAWMTRKSEETITPWNFEEVVDKGASAQSFIERMTNFDKNLPNEKVLPKHSLLYEYFTVYNELTKVKYVTEGMRKPAFLSGEQKKAIVDLLFKTNRKVTVKQLKEDYFKKIECFDSVEISGVEDRFNASLGTYHDLLKIIKDKDFLDNEENEDILEDIVLTLTLFEDREMIEERLKTYAHLFDDKVMKQLKRRRYTGWGRLSRKLINGIRDKQSGKTILDFLKSDGFANRNFMQLIHDDSLTFKEDIQKAQVSGQGDSLHEHIANLAGSPAIKKGILQTVKVVDELVKVMGRHKPENIVIEMARENQTTQKGQKNSRERMKRIEEGIKELGSQILKEHPVENTQLQNEKLYLYYLQNGRDMYVDQELDINRLSDYDVDHIVPQSFLKDDSIDNKVLTRSDKARGKSDNVPSEEVVKKMKNYWRQLLNAKLITQRKFDNLTKAERGGLSELDKAGFIKRQLVETRQITKHVAQILDSRMNTKYDENDKLIREVKVITLKSKLVSDFRKDFQFYKVREINNYHHAHDAYLNAVVGTALIKKYPKLESEFVYGDYKVYDVRKMIAKSEQEIGKATAKYFFYSNIMNFFKTEITLANGEIRKRPLIETNGETGEIVWDKGRDFATVRKVLSMPQVNIVKKTEVQTGGFSKESILPKRNSDKLIARKKDWDPKKYGGFDSPTVAYSVLVVAKVEKGKSKKLKSVKELLGITIMERSSFEKNPIDFLEAKGYKEVKKDLIIKLPKYSLFELENGRKRMLASAGELQKGNELALPSKYVNFLYLASHYEKLKGSPEDNEQKQLFVEQHKHYLDEIIEQISEFSKRVILADANLDKVLSAYNKHRDKPIREQAENIIHLFTLTNLGAPAAFKYFDTTIDRKRYTSTKEVLDATLIHQSITGLYETRIDLSQLGGDGGGGGGSGGGGSGGGGSGGVLNLEEEYRLHEKPVPSSIDPSWLQLFPTVWAERAGMGLANQVPPVVVELRSGASPVAVRQYPMSKEAREGIRPHIQRFLDLGVLVPCQSPWNTPLLPVKKPGTNDYRPVQDLREINKRVQDIHPTVPNPYNLLSSLPPSHTWYSVLDLKDAFFCLKLHPNSQPLFAFEWRDPEKGNTGQLTWTRLPQGFKNSPTLFNEALHRDLAPFRALNPQVVLLQYVDDLLVAAPTYRDCKEGTQKLLQELSKLGYRVSAKKAQLCQKEVTYLGYLLKEGKRWLTPARKATVMKIPPPTTPRQVREFLGTAGFCRLWIPGFASLAAPLYPLTKPSIPFIWTEEHQKAFDRIKEALLSAPALALPDLTKPFTLYVDERAGVARGVLTQTLGPWRRPVAYLSKKLDPVASGWPTCLKAVAAVALLLKDADKLTLGQNVTVIASHSLESIVRQPPDRWMTNARMTHYQSLLLNERVSFAPPAVLNPATLLPVESEATPVHRCSEILAEETGTRRDLKDQPLPGVPAWYTDGSSFIAEGKRRAGAAIVDGKRTVWASSLPEGTSAQKAELVALTQALRLAEGKDINIYTDSRYAFATAHIHGAIYKQRGWLTSAGKDIKNKEEILALLEAIHLPKRVAIIHCPGHQKGNDPVATGNRRADEAAKQAALSTRVLAETTKPAGKRTADGSEFEKRTADGSEFESPKKKAKVE

SEQ ID NO: 6141 - protein, 2098 aa, synthetic construct
MPAAKRVKLDGGDKKYSIGLDIGTNSVGWAVITDEYKVPSKKFKVLGNTDRHSIKKNLIGALLFDSGETAEATRLKRTARRRYTRRKNRICYLQEIFSNEMAKVDDSFFHRLEESFLVEEDKKHERHPIFGNIVDEVAYHEKYPTIYHLRKKLVDSTDKADLRLIYLALAHMIKFRGHFLIEGDLNPDNSDVDKLFIQLVQTYNQLFEENPINASGVDAKAILSARLSKSRRLENLIAQLPGEKKNGLFGNLIALSLGLTPNFKSNFDLAEDAKLQLSKDTYDDDLDNLLAQIGDQYADLFLAAKNLSDAILLSDILRVNTEITKAPLSASMIKRYDEHHQDLTLLKALVRQQLPEKYKEIFFDQSKNGYAGYIDGGASQEEFYKFIKPILEKMDGTEELLVKLNREDLLRKQRTFDNGSIPHQIHLGELHAILRRQEDFYPFLKDNREKIEKILTFRIPYYVGPLARGNSRFAWMTRKSEETITPWNFEEVVDKGASAQSFIERMTNFDKNLPNEKVLPKHSLLYEYFTVYNELTKVKYVTEGMRKPAFLSGEQKKAIVDLLFKTNRKVTVKQLKEDYFKKIECFDSVEISGVEDRFNASLGTYHDLLKIIKDKDFLDNEENEDILEDIVLTLTLFEDREMIEERLKTYAHLFDDKVMKQLKRRRYTGWGRLSRKLINGIRDKQSGKTILDFLKSDGFANRNFMQLIHDDSLTFKEDIQKAQVSGQGDSLHEHIANLAGSPAIKKGILQTVKVVDELVKVMGRHKPENIVIEMARENQTTQKGQKNSRERMKRIEEGIKELGSQILKEHPVENTQLQNEKLYLYYLQNGRDMYVDQELDINRLSDYDVDHIVPQSFLKDDSIDNKVLTRSDKARGKSDNVPSEEVVKKMKNYWRQLLNAKLITQRKFDNLTKAERGGLSELDKAGFIKRQLVETRQITKHVAQILDSRMNTKYDENDKLIREVKVITLKSKLVSDFRKDFQFYKVREINNYHHAHDAYLNAVVGTALIKKYPKLESEFVYGDYKVYDVRKMIAKSEQEIGKATAKYFFYSNIMNFFKTEITLANGEIRKRPLIETNGETGEIVWDKGRDFATVRKVLSMPQVNIVKKTEVQTGGFSKESILPKRNSDKLIARKKDWDPKKYGGFDSPTVAYSVLVVAKVEKGKSKKLKSVKELLGITIMERSSFEKNPIDFLEAKGYKEVKKDLIIKLPKYSLFELENGRKRMLASAGELQKGNELALPSKYVNFLYLASHYEKLKGSPEDNEQKQLFVEQHKHYLDEIIEQISEFSKRVILADANLDKVLSAYNKHRDKPIREQAENIIHLFTLTNLGAPAAFKYFDTTIDRKRYTSTKEVLDATLIHQSITGLYETRIDLSQLGGDGGGGGGSGGGGSGGGGSGGVLNLEEEYRLHEKPVPSSIDPSWLQLFPTVWAERAGMGLANQVPPVVVELRSGASPVAVRQYPMSKEAREGIRPHIQRFLDLGVLVPCQSPWNTPLLPVKKPGTNDYRPVQDLREINKRVQDIHPTVPNPYNLLSSLPPSHTWYSVLDLKDAFFCLKLHPNSQPLFAFEWRDPEKGNTGQLTWTRLPQGFKNSPTLFNEALHRDLAPFRALNPQVVLLQYVDDLLVAAPTYRDCKEGTQKLLQELSKLGYRVSAKKAQLCQKEVTYLGYLLKEGKRWLTPARKATVMKIPPPTTPRQVREFLGKAGFCRLFIPGFASLAAPLYPLTKPSIPFIWTEEHQKAFDRIKEALLSAPALALPDLTKPFTLYVDERAGVARGVLTQTLGPWRRPVAYLSKKLDPVASGWPTCLKAVAAVALLLKDADKLTLGQNVTVIASHSLESIVRQPPDRWMTNARMTHYQSLLLNERVSFAPPAVLNPATLLPVESEATPVHRCSEILAEETGTRRDLKDQPLPGVPAWYTDGSSFIAEGKRRAGAAIVDGKRTVWASSLPEGTSAQKAELVALTQALRLAEGKDINIYTDSRYAFATAHIHGAIYKQRGWLTSAGKDIKNKEEILALLEAIHLPKRVAIIHCPGHQKGNDPVATGNRRADEAAKQAALSTRVLAETTKPAGKRTADGSEFEKRTADGSEFESPKKKAKVE

SEQ ID NO: 6142 - protein, 2100 aa, synthetic construct
MPAAKRVKLDGGDKKYSIGLDIGTNSVGWAVITDEYKVPSKKFKVLGNTDRHSIKKNLIGALLFDSGETAEATRLKRTARRRYTRRKNRICYLQEIFSNEMAKVDDSFFHRLEESFLVEEDKKHERHPIFGNIVDEVAYHEKYPTIYHLRKKLVDSTDKADLRLIYLALAHMIKFRGHFLIEGDLNPDNSDVDKLFIQLVQTYNQLFEENPINASGVDAKAILSARLSKSRRLENLIAQLPGEKKNGLFGNLIALSLGLTPNFKSNFDLAEDAKLQLSKDTYDDDLDNLLAQIGDQYADLFLAAKNLSDAILLSDILRVNTEITKAPLSASMIKRYDEHHQDLTLLKALVRQQLPEKYKEIFFDQSKNGYAGYIDGGASQEEFYKFIKPILEKMDGTEELLVKLNREDLLRKQRTFDNGSIPHQIHLGELHAILRRQEDFYPFLKDNREKIEKILTFRIPYYVGPLARGNSRFAWMTRKSEETITPWNFEEVVDKGASAQSFIERMTNFDKNLPNEKVLPKHSLLYEYFTVYNELTKVKYVTEGMRKPAFLSGEQKKAIVDLLFKTNRKVTVKQLKEDYFKKIECFDSVEISGVEDRFNASLGTYHDLLKIIKDKDFLDNEENEDILEDIVLTLTLFEDREMIEERLKTYAHLFDDKVMKQLKRRRYTGWGRLSRKLINGIRDKQSGKTILDFLKSDGFANRNFMQLIHDDSLTFKEDIQKAQVSGQGDSLHEHIANLAGSPAIKKGILQTVKVVDELVKVMGRHKPENIVIEMARENQTTQKGQKNSRERMKRIEEGIKELGSQILKEHPVENTQLQNEKLYLYYLQNGRDMYVDQELDINRLSDYDVDHIVPQSFLKDDSIDNKVLTRSDKARGKSDNVPSEEVVKKMKNYWRQLLNAKLITQRKFDNLTKAERGGLSELDKAGFIKRQLVETRQITKHVAQILDSRMNTKYDENDKLIREVKVITLKSKLVSDFRKDFQFYKVREINNYHHAHDAYLNAVVGTALIKKYPKLESEFVYGDYKVYDVRKMIAKSEQEIGKATAKYFFYSNIMNFFKTEITLANGEIRKRPLIETNGETGEIVWDKGRDFATVRKVLSMPQVNIVKKTEVQTGGFSKESILPKRNSDKLIARKKDWDPKKYGGFDSPTVAYSVLVVAKVEKGKSKKLKSVKELLGITIMERSSFEKNPIDFLEAKGYKEVKKDLIIKLPKYSLFELENGRKRMLASAGELQKGNELALPSKYVNFLYLASHYEKLKGSPEDNEQKQLFVEQHKHYLDEIIEQISEFSKRVILADANLDKVLSAYNKHRDKPIREQAENIIHLFTLTNLGAPAAFKYFDTTIDRKRYTSTKEVLDATLIHQSITGLYETRIDLSQLGGDGGGGGGSGGGGSGGGGSGGTLNIEDEYRLHETSKEPDVPLGSTWLSDFPQAWAETGGMGLAVRQAPLIIPLKATSTPVSIKQYPMSQEARLGIKPHIQRLLDQGILVPCQSPWNTPLLPVKKPGTNDYRPVQDLREVNKRVEDIHPTVPNPYNLLSGLPPSHQWYTVLDLKDAFFCLRLHPTSQPLFAFEWRDPEMGISGQLTWTRLPQGFKNSPTLFNEALHRDLADFRIQHPDLILLQYVDDLLLAATSEQDCQRGTRALLQTLGNLGYRASAKKAQICQKQVKYLGYLLKEGQRWLTEARKETVMGQPTPKTPRQLREFLGTAGFCRLWIPGFAEMAAPLYPLTKPGTLFNWGPDQQKAYQEIKQALLTAPALGLPDLTKPFELFVDEKQGYAKGVLTQKLGPWRRPVAYLSKKLDPVAAGWPPCLRMVAAIAVLTKDAGKLTMGQPLVILAPHAVEALVKQPPDRWLSNARMTHYQAMLLDTDRVQFGPVVALNPATLLPLPEKEAPHDCLEILAETHGTRPDLTDQPIPDADYTWYTDGSSFLQEGQRRAGAAVTTETEVIWARALPAGTSAQRAELIALTQALKMAEGKKLNVYTDSRYAFATAHVHGEIYRRRGWLTSEGREIKNKNEILALLKALFLPKRLSIIHCPGHQKGNSAEARGNRMADQAAREAAMKAVLETSTLLAGKRTADGSEFEKRTADGSEFESPKKKAKVE

SEQ ID NO: 6143 - protein, 2107 aa, synthetic construct
MPAAKRVKLDGGDKKYSIGLDIGTNSVGWAVITDEYKVPSKKFKVLGNTDRHSIKKNLIGALLFDSGETAEATRLKRTARRRYTRRKNRICYLQEIFSNEMAKVDDSFFHRLEESFLVEEDKKHERHPIFGNIVDEVAYHEKYPTIYHLRKKLVDSTDKADLRLIYLALAHMIKFRGHFLIEGDLNPDNSDVDKLFIQLVQTYNQLFEENPINASGVDAKAILSARLSKSRRLENLIAQLPGEKKNGLFGNLIALSLGLTPNFKSNFDLAEDAKLQLSKDTYDDDLDNLLAQIGDQYADLFLAAKNLSDAILLSDILRVNTEITKAPLSASMIKRYDEHHQDLTLLKALVRQQLPEKYKEIFFDQSKNGYAGYIDGGASQEEFYKFIKPILEKMDGTEELLVKLNREDLLRKQRTFDNGSIPHQIHLGELHAILRRQEDFYPFLKDNREKIEKILTFRIPYYVGPLARGNSRFAWMTRKSEETITPWNFEEVVDKGASAQSFIERMTNFDKNLPNEKVLPKHSLLYEYFTVYNELTKVKYVTEGMRKPAFLSGEQKKAIVDLLFKTNRKVTVKQLKEDYFKKIECFDSVEISGVEDRFNASLGTYHDLLKIIKDKDFLDNEENEDILEDIVLTLTLFEDREMIEERLKTYAHLFDDKVMKQLKRRRYTGWGRLSRKLINGIRDKQSGKTILDFLKSDGFANRNFMQLIHDDSLTFKEDIQKAQVSGQGDSLHEHIANLAGSPAIKKGILQTVKVVDELVKVMGRHKPENIVIEMARENQTTQKGQKNSRERMKRIEEGIKELGSQILKEHPVENTQLQNEKLYLYYLQNGRDMYVDQELDINRLSDYDVDHIVPQSFLKDDSIDNKVLTRSDKARGKSDNVPSEEVVKKMKNYWRQLLNAKLITQRKFDNLTKAERGGLSELDKAGFIKRQLVETRQITKHVAQILDSRMNTKYDENDKLIREVKVITLKSKLVSDFRKDFQFYKVREINNYHHAHDAYLNAVVGTALIKKYPKLESEFVYGDYKVYDVRKMIAKSEQEIGKATAKYFFYSNIMNFFKTEITLANGEIRKRPLIETNGETGEIVWDKGRDFATVRKVLSMPQVNIVKKTEVQTGGFSKESILPKRNSDKLIARKKDWDPKKYGGFDSPTVAYSVLVVAKVEKGKSKKLKSVKELLGITIMERSSFEKNPIDFLEAKGYKEVKKDLIIKLPKYSLFELENGRKRMLASAGELQKGNELALPSKYVNFLYLASHYEKLKGSPEDNEQKQLFVEQHKHYLDEIIEQISEFSKRVILADANLDKVLSAYNKHRDKPIREQAENIIHLFTLTNLGAPAAFKYFDTTIDRKRYTSTKEVLDATLIHQSITGLYETRIDLSQLGGDGGGGGGSGGGGSGGGGSGGGGSGGTAPLEEEYRLFLEAPIQNVTLLEQWKREIPKVWAEINPPGLASTQAPIHVQLLSTALPVRVRQYPITLEAKRSLRETIRKFRAAGILRPVHSPWNTPLLPVRKSGTSEYRMVQDLREVNKRVETIHPTVPNPYTLLSLLPPDRIWYSVLDLKDAFFCIPLAPESQLIFAFEWADAEEGESGQLTWTRLPQGFKNSPTLFDEALNRDLQGFRLDHPSVSLLQYVDDLLIAADTQAACLSATRDLLMTLAELGYRVSGKKAQLCQEEVTYLGFKIHKGSRSLSNSRTQAILQIPVPKTKRQVREFLGTIGYCRLWIPGFAELAQPLYAATRGGNDPLVWGEKEEEAFQSLKLALTQPPALALPSLDKPFQLFVEETSGAAKGVLTQALGPWKRPVAYLSKRLDPVAAGWPRCLRAIAAAALLTREASKLTFGQDIEITSSHNLESLLRSPPDKWLTNARITQYQVLLLDPPRVRFKQTAALNPATLLPETDDTLPIHHCLDTLDSLTSTRPDLTDQPLAQAEATLFTDGSSYIRDGKRYAGAAVVTLDSVIWAEPLPIGTSAQKAELIALTKALEWSKDKSVNIYTDSRYAFATLHVHGMIYRERGLLTAGGKAIKNAPEILALLTAVWLPKRVAVMHCKGHQKDDAPTSTGNRRADEVAREVAIRPLSTQATISAGKRTADGSEFEKRTADGSEFESPKKKAKVE

SEQ ID NO: 6144 - protein, 2107 aa, synthetic construct
MPAAKRVKLDGGDKKYSIGLDIGTNSVGWAVITDEYKVPSKKFKVLGNTDRHSIKKNLIGALLFDSGETAEATRLKRTARRRYTRRKNRICYLQEIFSNEMAKVDDSFFHRLEESFLVEEDKKHERHPIFGNIVDEVAYHEKYPTIYHLRKKLVDSTDKADLRLIYLALAHMIKFRGHFLIEGDLNPDNSDVDKLFIQLVQTYNQLFEENPINASGVDAKAILSARLSKSRRLENLIAQLPGEKKNGLFGNLIALSLGLTPNFKSNFDLAEDAKLQLSKDTYDDDLDNLLAQIGDQYADLFLAAKNLSDAILLSDILRVNTEITKAPLSASMIKRYDEHHQDLTLLKALVRQQLPEKYKEIFFDQSKNGYAGYIDGGASQEEFYKFIKPILEKMDGTEELLVKLNREDLLRKQRTFDNGSIPHQIHLGELHAILRRQEDFYPFLKDNREKIEKILTFRIPYYVGPLARGNSRFAWMTRKSEETITPWNFEEVVDKGASAQSFIERMTNFDKNLPNEKVLPKHSLLYEYFTVYNELTKVKYVTEGMRKPAFLSGEQKKAIVDLLFKTNRKVTVKQLKEDYFKKIECFDSVEISGVEDRFNASLGTYHDLLKIIKDKDFLDNEENEDILEDIVLTLTLFEDREMIEERLKTYAHLFDDKVMKQLKRRRYTGWGRLSRKLINGIRDKQSGKTILDFLKSDGFANRNFMQLIHDDSLTFKEDIQKAQVSGQGDSLHEHIANLAGSPAIKKGILQTVKVVDELVKVMGRHKPENIVIEMARENQTTQKGQKNSRERMKRIEEGIKELGSQILKEHPVENTQLQNEKLYLYYLQNGRDMYVDQELDINRLSDYDVDHIVPQSFLKDDSIDNKVLTRSDKARGKSDNVPSEEVVKKMKNYWRQLLNAKLITQRKFDNLTKAERGGLSELDKAGFIKRQLVETRQITKHVAQILDSRMNTKYDENDKLIREVKVITLKSKLVSDFRKDFQFYKVREINNYHHAHDAYLNAVVGTALIKKYPKLESEFVYGDYKVYDVRKMIAKSEQEIGKATAKYFFYSNIMNFFKTEITLANGEIRKRPLIETNGETGEIVWDKGRDFATVRKVLSMPQVNIVKKTEVQTGGFSKESILPKRNSDKLIARKKDWDPKKYGGFDSPTVAYSVLVVAKVEKGKSKKLKSVKELLGITIMERSSFEKNPIDFLEAKGYKEVKKDLIIKLPKYSLFELENGRKRMLASAGELQKGNELALPSKYVNFLYLASHYEKLKGSPEDNEQKQLFVEQHKHYLDEIIEQISEFSKRVILADANLDKVLSAYNKHRDKPIREQAENIIHLFTLTNLGAPAAFKYFDTTIDRKRYTSTKEVLDATLIHQSITGLYETRIDLSQLGGDGGGGGGSGGGGSGGGGSGGGGSGGTAPLEEEYRLFLEAPIQNVTLLEQWKREIPKVWAEINPPGLASTQAPIHVQLLSTALPVRVRQYPITLEAKRSLRETIRKFRAAGILRPVHSPWNTPLLPVRKSGTSEYRMVQDLREVNKRVETIHPTVPNPYTLLSLLPPDRIWYSVLDLKDAFFCIPLAPESQLIFAFEWADAEEGESGQLTWTRLPQGFKNSPTLFNEALNRDLQGFRLDHPSVSLLQYVDDLLIAADTQAACLSATRDLLMTLAELGYRVSGKKAQLCQEEVTYLGFKIHKGSRSLSNSRTQAILQIPVPKTKRQVREFLGTIGYCRLWIPGFAELAQPLYAATRPGNDPLVWGEKEEEAFQSLKLALTQPPALALPSLDKPFQLFVEETSGAAKGVLTQALGPWKRPVAYLSKRLDPVAAGWPRCLRAIAAAALLTREASKLTFGQDIEITSSHNLESLLRSPPDKWLTNARITQYQVLLLDPPRVRFKQTAALNPATLLPETDDTLPIHHCLDTLDSLTSTRPDLTDQPLAQAEATLFTDGSSYIRDGKRYAGAAVVTLDSVIWAEPLPIGTSAQKAELIALTKALEWSKDKSVNIYTDSRYAFATLHVHGMIYRERGWLTAGGKAIKNAPEILALLTAVWLPKRVAVMHCKGHQKDDAPTSTGNRRADEVAREVAIRPLSTQATISAGKRTADGSEFEKRTADGSEFESPKKKAKVE

SEQ ID NO: 6145 - protein, 2096 aa, synthetic construct
MPAAKRVKLDGGDKKYSIGLDIGTNSVGWAVITDEYKVPSKKFKVLGNTDRHSIKKNLIGALLFDSGETAEATRLKRTARRRYTRRKNRICYLQEIFSNEMAKVDDSFFHRLEESFLVEEDKKHERHPIFGNIVDEVAYHEKYPTIYHLRKKLVDSTDKADLRLIYLALAHMIKFRGHFLIEGDLNPDNSDVDKLFIQLVQTYNQLFEENPINASGVDAKAILSARLSKSRRLENLIAQLPGEKKNGLFGNLIALSLGLTPNFKSNFDLAEDAKLQLSKDTYDDDLDNLLAQIGDQYADLFLAAKNLSDAILLSDILRVNTEITKAPLSASMIKRYDEHHQDLTLLKALVRQQLPEKYKEIFFDQSKNGYAGYIDGGASQEEFYKFIKPILEKMDGTEELLVKLNREDLLRKQRTFDNGSIPHQIHLGELHAILRRQEDFYPFLKDNREKIEKILTFRIPYYVGPLARGNSRFAWMTRKSEETITPWNFEEVVDKGASAQSFIERMTNFDKNLPNEKVLPKHSLLYEYFTVYNELTKVKYVTEGMRKPAFLSGEQKKAIVDLLFKTNRKVTVKQLKEDYFKKIECFDSVEISGVEDRFNASLGTYHDLLKIIKDKDFLDNEENEDILEDIVLTLTLFEDREMIEERLKTYAHLFDDKVMKQLKRRRYTGWGRLSRKLINGIRDKQSGKTILDFLKSDGFANRNFMQLIHDDSLTFKEDIQKAQVSGQGDSLHEHIANLAGSPAIKKGILQTVKVVDELVKVMGRHKPENIVIEMARENQTTQKGQKNSRERMKRIEEGIKELGSQILKEHPVENTQLQNEKLYLYYLQNGRDMYVDQELDINRLSDYDVDHIVPQSFLKDDSIDNKVLTRSDKARGKSDNVPSEEVVKKMKNYWRQLLNAKLITQRKFDNLTKAERGGLSELDKAGFIKRQLVETRQITKHVAQILDSRMNTKYDENDKLIREVKVITLKSKLVSDFRKDFQFYKVREINNYHHAHDAYLNAVVGTALIKKYPKLESEFVYGDYKVYDVRKMIAKSEQEIGKATAKYFFYSNIMNFFKTEITLANGEIRKRPLIETNGETGEIVWDKGRDFATVRKVLSMPQVNIVKKTEVQTGGFSKESILPKRNSDKLIARKKDWDPKKYGGFDSPTVAYSVLVVAKVEKGKSKKLKSVKELLGITIMERSSFEKNPIDFLEAKGYKEVKKDLIIKLPKYSLFELENGRKRMLASAGELQKGNELALPSKYVNFLYLASHYEKLKGSPEDNEQKQLFVEQHKHYLDEIIEQISEFSKRVILADANLDKVLSAYNKHRDKPIREQAENIIHLFTLTNLGAPAAFKYFDTTIDRKRYTSTKEVLDATLIHQSITGLYETRIDLSQLGGDGGGGGGSGGGGSGGGGSGGGGSGGVPWILKKPLELTIKLDLEEQQGTLLNNSILSKKGKEELKQLFEKYSALWQSWENQVGHRRIRPHKIATGTVKPTPQKQYHINPKAKPDIQIVINDLLKQGVLIQKESTMNTPVYPVPKPNGRWRMVLDYRAVNKVTPLIAVQNQHSYGILGSLFKGRYKTTIDLSNGFWAHPIVPEDYWITAFTWQGKQYCWTVLPQGFLNSPGLFNGDVVDLLQGIPNVEVYVDDVYISHDSEKEHLEYLDILFNRLKEAGYIISLKKSNIANSIVDFLGFQITNEGRGLTDTFKEKLENITAPTTLKQLQSILGLLNFARNFIPDFTELIAPLYALIPKSPKNYVPWQIEHSTTLETLITKLNGAEYLQGRKGDKTLIMKVNASYTTGYIRYYNEGEKKPISYVSIVFSKTELKFTELEKLLTTVHKGLLKALDLSMGQNIHVYSPIVSMQNIQKTPQTAKKALASRWLSWLSYLEDPRIRFFYDPQMPALKDLPAVDTGKDNKKHPSNFQHIFYTDGSAITSPTKEGHLNAGMGIVYFINKDGNLQKQQEWSISLGNHTAQFAEIAAFEFALKKCLPLGGNILVVTDSNYVAKAYNEELDVWASNGFVNNRKKPLKHISKWKSVADLKRLRPDVVVTHEPGHQKLDSSPHAYGNNLADQLATQASFKVHAGKRTADGSEFEKRTADGSEFESPKKKAKVE

SEQ ID NO: 6146 - protein, 2104 aa, synthetic construct
MPAAKRVKLDGGDKKYSIGLDIGTNSVGWAVITDEYKVPSKKFKVLGNTDRHSIKKNLIGALLFDSGETAEATRLKRTARRRYTRRKNRICYLQEIFSNEMAKVDDSFFHRLEESFLVEEDKKHERHPIFGNIVDEVAYHEKYPTIYHLRKKLVDSTDKADLRLIYLALAHMIKFRGHFLIEGDLNPDNSDVDKLFIQLVQTYNQLFEENPINASGVDAKAILSARLSKSRRLENLIAQLPGEKKNGLFGNLIALSLGLTPNFKSNFDLAEDAKLQLSKDTYDDDLDNLLAQIGDQYADLFLAAKNLSDAILLSDILRVNTEITKAPLSASMIKRYDEHHQDLTLLKALVRQQLPEKYKEIFFDQSKNGYAGYIDGGASQEEFYKFIKPILEKMDGTEELLVKLNREDLLRKQRTFDNGSIPHQIHLGELHAILRRQEDFYPFLKDNREKIEKILTFRIPYYVGPLARGNSRFAWMTRKSEETITPWNFEEVVDKGASAQSFIERMTNFDKNLPNEKVLPKHSLLYEYFTVYNELTKVKYVTEGMRKPAFLSGEQKKAIVDLLFKTNRKVTVKQLKEDYFKKIECFDSVEISGVEDRFNASLGTYHDLLKIIKDKDFLDNEENEDILEDIVLTLTLFEDREMIEERLKTYAHLFDDKVMKQLKRRRYTGWGRLSRKLINGIRDKQSGKTILDFLKSDGFANRNFMQLIHDDSLTFKEDIQKAQVSGQGDSLHEHIANLAGSPAIKKGILQTVKVVDELVKVMGRHKPENIVIEMARENQTTQKGQKNSRERMKRIEEGIKELGSQILKEHPVENTQLQNEKLYLYYLQNGRDMYVDQELDINRLSDYDVDHIVPQSFLKDDSIDNKVLTRSDKARGKSDNVPSEEVVKKMKNYWRQLLNAKLITQRKFDNLTKAERGGLSELDKAGFIKRQLVETRQITKHVAQILDSRMNTKYDENDKLIREVKVITLKSKLVSDFRKDFQFYKVREINNYHHAHDAYLNAVVGTALIKKYPKLESEFVYGDYKVYDVRKMIAKSEQEIGKATAKYFFYSNIMNFFKTEITLANGEIRKRPLIETNGETGEIVWDKGRDFATVRKVLSMPQVNIVKKTEVQTGGFSKESILPKRNSDKLIARKKDWDPKKYGGFDSPTVAYSVLVVAKVEKGKSKKLKSVKELLGITIMERSSFEKNPIDFLEAKGYKEVKKDLIIKLPKYSLFELENGRKRMLASAGELQKGNELALPSKYVNFLYLASHYEKLKGSPEDNEQKQLFVEQHKHYLDEIIEQISEFSKRVILADANLDKVLSAYNKHRDKPIREQAENIIHLFTLTNLGAPAAFKYFDTTIDRKRYTSTKEVLDATLIHQSITGLYETRIDLSQLGGDGGGGGGSGGGGSGGGGSGGGGSGGTLQLEEEYRLFEPESTQKQEMDIWLKNFPQAWAETGGMGTAHCQAPVLIQLKATATPISIRQYPMPHEAYQGIKPHIRRMLDQGILKPCQSPWNTPLLPVKKPGTEDYRPVQDLREVNKRVEDIHPTVPNPYNLLSTLPPSHPWYTVLDLKDAFFCLRLHSESQLLFAFEWRDPEIGLSGQLTWTRLPQGFKNSPTLFDEALHSDLADFRVRYPALVLLQYVDDLLLAAATRTECLEGTKALLETLGNKGYRASAKKAQICLQEVTYLGYSLKDGQRWLTKARKEAILSIPVPKNSRQVREFLGTAGYCRLWIPGFAELAAPLYPLTRPGTLFQWGTEQQLAFEDIKKALLSSPALGLPDITKPFELFIDENSGFAKGVLVQKLGPWKRPVAYLSKKLDTVASGWPPCLRMVAAIAILVKDAGKLTLGQPLTILTSHPVEALVRQPPNKWLSNARMTHYQAMLLDAERVHFGPTVSLNPATLLPLPSGGNHHDCLQILAETHGTRPDLTDQPLPDADLTWYTDGSSFIRNGEREAGAAVTTESEVIWAAPLPPGTSAQRAELIALTQALKMAEGKKLTVYTDSRYAFATTHVHGEIYRRRGLLTSEGKEIKNKNEILALLEALFLPKRLSIIHCPGHQKGDSPQAKGNRLADDTAKKAATETHSSLTVLPAGKRTADGSEFEKRTADGSEFESPKKKAKVE

SEQ ID NO: 6147 - protein, 2104 aa, synthetic construct
MPAAKRVKLDGGDKKYSIGLDIGTNSVGWAVITDEYKVPSKKFKVLGNTDRHSIKKNLIGALLFDSGETAEATRLKRTARRRYTRRKNRICYLQEIFSNEMAKVDDSFFHRLEESFLVEEDKKHERHPIFGNIVDEVAYHEKYPTIYHLRKKLVDSTDKADLRLIYLALAHMIKFRGHFLIEGDLNPDNSDVDKLFIQLVQTYNQLFEENPINASGVDAKAILSARLSKSRRLENLIAQLPGEKKNGLFGNLIALSLGLTPNFKSNFDLAEDAKLQLSKDTYDDDLDNLLAQIGDQYADLFLAAKNLSDAILLSDILRVNTEITKAPLSASMIKRYDEHHQDLTLLKALVRQQLPEKYKEIFFDQSKNGYAGYIDGGASQEEFYKFIKPILEKMDGTEELLVKLNREDLLRKQRTFDNGSIPHQIHLGELHAILRRQEDFYPFLKDNREKIEKILTFRIPYYVGPLARGNSRFAWMTRKSEETITPWNFEEVVDKGASAQSFIERMTNFDKNLPNEKVLPKHSLLYEYFTVYNELTKVKYVTEGMRKPAFLSGEQKKAIVDLLFKTNRKVTVKQLKEDYFKKIECFDSVEISGVEDRFNASLGTYHDLLKIIKDKDFLDNEENEDILEDIVLTLTLFEDREMIEERLKTYAHLFDDKVMKQLKRRRYTGWGRLSRKLINGIRDKQSGKTILDFLKSDGFANRNFMQLIHDDSLTFKEDIQKAQVSGQGDSLHEHIANLAGSPAIKKGILQTVKVVDELVKVMGRHKPENIVIEMARENQTTQKGQKNSRERMKRIEEGIKELGSQILKEHPVENTQLQNEKLYLYYLQNGRDMYVDQELDINRLSDYDVDHIVPQSFLKDDSIDNKVLTRSDKARGKSDNVPSEEVVKKMKNYWRQLLNAKLITQRKFDNLTKAERGGLSELDKAGFIKRQLVETRQITKHVAQILDSRMNTKYDENDKLIREVKVITLKSKLVSDFRKDFQFYKVREINNYHHAHDAYLNAVVGTALIKKYPKLESEFVYGDYKVYDVRKMIAKSEQEIGKATAKYFFYSNIMNFFKTEITLANGEIRKRPLIETNGETGEIVWDKGRDFATVRKVLSMPQVNIVKKTEVQTGGFSKESILPKRNSDKLIARKKDWDPKKYGGFDSPTVAYSVLVVAKVEKGKSKKLKSVKELLGITIMERSSFEKNPIDFLEAKGYKEVKKDLIIKLPKYSLFELENGRKRMLASAGELQKGNELALPSKYVNFLYLASHYEKLKGSPEDNEQKQLFVEQHKHYLDEIIEQISEFSKRVILADANLDKVLSAYNKHRDKPIREQAENIIHLFTLTNLGAPAAFKYFDTTIDRKRYTSTKEVLDATLIHQSITGLYETRIDLSQLGGDGGGGGGSGGGGSGGGGSGGGGSGGTLQLEEEYRLFEPESTQKQEMDIWLKNFPQAWAETGGMGTAHCQAPVLIQLKATATPISIRQYPMPHEAYQGIKPHIRRMLDQGILKPCQSPWNTPLLPVKKPGTEDYRPVQDLREVNKRVEDIHPTVPNPYNLLSTLPPSHPWYTVLDLKDAFFCLRLHSESQLLFAFEWRDPEIGLSGQLTWTRLPQGFKNSPTLFNEALHSDLADFRVRYPALVLLQYVDDLLLAAATRTECLEGTKALLETLGNKGYRASAKKAQICLQEVTYLGYSLKDGQRWLTKARKEAILSIPVPKNSRQVREFLGTAGYCRLWIPGFAELAAPLYPLTRPGTLFQWGTEQQLAFEDIKKALLSSPALGLPDITKPFELFIDENSGFAKGVLVQKLGPWKRPVAYLSKKLDTVASGWPPCLRMVAAIAILVKDAGKLTLGQPLTILTSHPVEALVRQPPNKWLSNARMTHYQAMLLDAERVHFGPTVSLNPATLLPLPSGGNHHDCLQILAETHGTRPDLTDQPLPDADLTWYTDGSSFIRNGEREAGAAVTTESEVIWAAPLPPGTSAQRAELIALTQALKMAEGKKLTVYTDSRYAFATTHVHGEIYRRRGWLTSEGKEIKNKNEILALLEALFLPKRLSIIHCPGHQKGDSPQAKGNRLADDTAKKAATETHSSLTVLPAGKRTADGSEFEKRTADGSEFESPKKKAKVE

SEQ ID NO: 6148 - protein, 2104 aa, synthetic construct
MPAAKRVKLDGGDKKYSIGLDIGTNSVGWAVITDEYKVPSKKFKVLGNTDRHSIKKNLIGALLFDSGETAEATRLKRTARRRYTRRKNRICYLQEIFSNEMAKVDDSFFHRLEESFLVEEDKKHERHPIFGNIVDEVAYHEKYPTIYHLRKKLVDSTDKADLRLIYLALAHMIKFRGHFLIEGDLNPDNSDVDKLFIQLVQTYNQLFEENPINASGVDAKAILSARLSKSRRLENLIAQLPGEKKNGLFGNLIALSLGLTPNFKSNFDLAEDAKLQLSKDTYDDDLDNLLAQIGDQYADLFLAAKNLSDAILLSDILRVNTEITKAPLSASMIKRYDEHHQDLTLLKALVRQQLPEKYKEIFFDQSKNGYAGYIDGGASQEEFYKFIKPILEKMDGTEELLVKLNREDLLRKQRTFDNGSIPHQIHLGELHAILRRQEDFYPFLKDNREKIEKILTFRIPYYVGPLARGNSRFAWMTRKSEETITPWNFEEVVDKGASAQSFIERMTNFDKNLPNEKVLPKHSLLYEYFTVYNELTKVKYVTEGMRKPAFLSGEQKKAIVDLLFKTNRKVTVKQLKEDYFKKIECFDSVEISGVEDRFNASLGTYHDLLKIIKDKDFLDNEENEDILEDIVLTLTLFEDREMIEERLKTYAHLFDDKVMKQLKRRRYTGWGRLSRKLINGIRDKQSGKTILDFLKSDGFANRNFMQLIHDDSLTFKEDIQKAQVSGQGDSLHEHIANLAGSPAIKKGILQTVKVVDELVKVMGRHKPENIVIEMARENQTTQKGQKNSRERMKRIEEGIKELGSQILKEHPVENTQLQNEKLYLYYLQNGRDMYVDQELDINRLSDYDVDHIVPQSFLKDDSIDNKVLTRSDKARGKSDNVPSEEVVKKMKNYWRQLLNAKLITQRKFDNLTKAERGGLSELDKAGFIKRQLVETRQITKHVAQILDSRMNTKYDENDKLIREVKVITLKSKLVSDFRKDFQFYKVREINNYHHAHDAYLNAVVGTALIKKYPKLESEFVYGDYKVYDVRKMIAKSEQEIGKATAKYFFYSNIMNFFKTEITLANGEIRKRPLIETNGETGEIVWDKGRDFATVRKVLSMPQVNIVKKTEVQTGGFSKESILPKRNSDKLIARKKDWDPKKYGGFDSPTVAYSVLVVAKVEKGKSKKLKSVKELLGITIMERSSFEKNPIDFLEAKGYKEVKKDLIIKLPKYSLFELENGRKRMLASAGELQKGNELALPSKYVNFLYLASHYEKLKGSPEDNEQKQLFVEQHKHYLDEIIEQISEFSKRVILADANLDKVLSAYNKHRDKPIREQAENIIHLFTLTNLGAPAAFKYFDTTIDRKRYTSTKEVLDATLIHQSITGLYETRIDLSQLGGDGGGGGGSGGGGSGGGGSGGGGSGGTLQLEEEYRLFEPESTQKQEMDIWLKNFPQAWAETGGMGTAHCQAPVLIQLKATATPISIRQYPMPHEAYQGIKPHIRRMLDQGILKPCQSPWNTPLLPVKKPGTEDYRPVQDLREVNKRVEDIHPTVPNPYNLLSTLPPSHPWYTVLDLKDAFFCLRLHSESQLLFAFEWRDPEIGLSGQLTWTRLPQGFKNSPTLFNEALHSDLADFRVRYPALVLLQYVDDLLLAAATRTECLEGTKALLETLGNKGYRASAKKAQICLQEVTYLGYSLKDGQRWLTKARKEAILSIPVPKNSRQVREFLGKAGYCRLFIPGFAELAAPLYPLTRPGTLFQWGTEQQLAFEDIKKALLSSPALGLPDITKPFELFIDENSGFAKGVLVQKLGPWKRPVAYLSKKLDTVASGWPPCLRMVAAIAILVKDAGKLTLGQPLTILTSHPVEALVRQPPNKWLSNARMTHYQAMLLDAERVHFGPTVSLNPATLLPLPSGGNHHDCLQILAETHGTRPDLTDQPLPDADLTWYTDGSSFIRNGEREAGAAVTTESEVIWAAPLPPGTSAQRAELIALTQALKMAEGKKLTVYTDSRYAFATTHVHGEIYRRRGWLTSEGKEIKNKNEILALLEALFLPKRLSIIHCPGHQKGDSPQAKGNRLADDTAKKAATETHSSLTVLPAGKRTADGSEFEKRTADGSEFESPKKKAKVE

SEQ ID NO: 6149 - protein, 2185 aa, synthetic construct
MPAAKRVKLDGGDKKYSIGLDIGTNSVGWAVITDEYKVPSKKFKVLGNTDRHSIKKNLIGALLFDSGETAEATRLKRTARRRYTRRKNRICYLQEIFSNEMAKVDDSFFHRLEESFLVEEDKKHERHPIFGNIVDEVAYHEKYPTIYHLRKKLVDSTDKADLRLIYLALAHMIKFRGHFLIEGDLNPDNSDVDKLFIQLVQTYNQLFEENPINASGVDAKAILSARLSKSRRLENLIAQLPGEKKNGLFGNLIALSLGLTPNFKSNFDLAEDAKLQLSKDTYDDDLDNLLAQIGDQYADLFLAAKNLSDAILLSDILRVNTEITKAPLSASMIKRYDEHHQDLTLLKALVRQQLPEKYKEIFFDQSKNGYAGYIDGGASQEEFYKFIKPILEKMDGTEELLVKLNREDLLRKQRTFDNGSIPHQIHLGELHAILRRQEDFYPFLKDNREKIEKILTFRIPYYVGPLARGNSRFAWMTRKSEETITPWNFEEVVDKGASAQSFIERMTNFDKNLPNEKVLPKHSLLYEYFTVYNELTKVKYVTEGMRKPAFLSGEQKKAIVDLLFKTNRKVTVKQLKEDYFKKIECFDSVEISGVEDRFNASLGTYHDLLKIIKDKDFLDNEENEDILEDIVLTLTLFEDREMIEERLKTYAHLFDDKVMKQLKRRRYTGWGRLSRKLINGIRDKQSGKTILDFLKSDGFANRNFMQLIHDDSLTFKEDIQKAQVSGQGDSLHEHIANLAGSPAIKKGILQTVKVVDELVKVMGRHKPENIVIEMARENQTTQKGQKNSRERMKRIEEGIKELGSQILKEHPVENTQLQNEKLYLYYLQNGRDMYVDQELDINRLSDYDVDHIVPQSFLKDDSIDNKVLTRSDKARGKSDNVPSEEVVKKMKNYWRQLLNAKLITQRKFDNLTKAERGGLSELDKAGFIKRQLVETRQITKHVAQILDSRMNTKYDENDKLIREVKVITLKSKLVSDFRKDFQFYKVREINNYHHAHDAYLNAVVGTALIKKYPKLESEFVYGDYKVYDVRKMIAKSEQEIGKATAKYFFYSNIMNFFKTEITLANGEIRKRPLIETNGETGEIVWDKGRDFATVRKVLSMPQVNIVKKTEVQTGGFSKESILPKRNSDKLIARKKDWDPKKYGGFDSPTVAYSVLVVAKVEKGKSKKLKSVKELLGITIMERSSFEKNPIDFLEAKGYKEVKKDLIIKLPKYSLFELENGRKRMLASAGELQKGNELALPSKYVNFLYLASHYEKLKGSPEDNEQKQLFVEQHKHYLDEIIEQISEFSKRVILADANLDKVLSAYNKHRDKPIREQAENIIHLFTLTNLGAPAAFKYFDTTIDRKRYTSTKEVLDATLIHQSITGLYETRIDLSQLGGDGGGGGGSGGGGSGGGGSGGGGSGGMNPLQLLQPLPAEIKGTKLLAHWNSGATITCIPESFLEDEQPIKKTLIKTIHGEKQQNVYYVTFKVKGRKVEAEVIASPYEYILLSPTDVPWLTQQPLQLTILVPLQEYQEKILSKTALPEDQKQQLKTLFVKYDNLWQHWENQVGHRKIRPHNIATGDYPPRPQKQYPINPKAKPSIQIVIDDLLKQGVLTPQNSTMNTPVYPVPKPDGRWRMVLDYREVNKTIPLTAAQNQHSAGILATIVRQKYKTTLDLANGFWAHPITPESYWLTAFTWQGKQYCWTRLPQGFLNSPALFNADVVDLLKEIPNVQVYVDDIYLSHDDPKEHVQQLEKVFQILLQAGYVVSLKKSEIGQKTVEFLGFNITKEGRGLTDTFKTKLLNITPPKDLKQLQSILGLLNFARNFIPNFAELVQPLYNLIAPAKGKYIEWSEENTKQLNMVIEALNTASNLEERLPEQRLVIKVNTSPSAGYVRYYNETGKKPIMYLNYVFSKAELKFSMLEKLLTTMHKALIKAMDLAMGQEILVYSPIVSMTKIQKTPLPERKALPIRWITWMTYLEDPRIQFHYDKTLPELKHIPDVYTSSQSPVKHPSQYEGVFYTDGSAIKSPDPTKSNNAGMGIVHATYKPEYQVLNQWSIPLGNHTAQMAEIAAVEFACKKALKIPGPVLVITDSFYVAESANKELPYWKSNGFVNNKKKPLKHISKWKSIAECLSMKPDITIQHEKGISLQIPVFILKGNALADKLATQGSYVVNAGKRTADGSEFEKRTADGSEFESPKKKAKVE

SEQ ID NO: 6150 - protein, 2185 aa, synthetic construct
MPAAKRVKLDGGDKKYSIGLDIGTNSVGWAVITDEYKVPSKKFKVLGNTDRHSIKKNLIGALLFDSGETAEATRLKRTARRRYTRRKNRICYLQEIFSNEMAKVDDSFFHRLEESFLVEEDKKHERHPIFGNIVDEVAYHEKYPTIYHLRKKLVDSTDKADLRLIYLALAHMIKFRGHFLIEGDLNPDNSDVDKLFIQLVQTYNQLFEENPINASGVDAKAILSARLSKSRRLENLIAQLPGEKKNGLFGNLIALSLGLTPNFKSNFDLAEDAKLQLSKDTYDDDLDNLLAQIGDQYADLFLAAKNLSDAILLSDILRVNTEITKAPLSASMIKRYDEHHQDLTLLKALVRQQLPEKYKEIFFDQSKNGYAGYIDGGASQEEFYKFIKPILEKMDGTEELLVKLNREDLLRKQRTFDNGSIPHQIHLGELHAILRRQEDFYPFLKDNREKIEKILTFRIPYYVGPLARGNSRFAWMTRKSEETITPWNFEEVVDKGASAQSFIERMTNFDKNLPNEKVLPKHSLLYEYFTVYNELTKVKYVTEGMRKPAFLSGEQKKAIVDLLFKTNRKVTVKQLKEDYFKKIECFDSVEISGVEDRFNASLGTYHDLLKIIKDKDFLDNEENEDILEDIVLTLTLFEDREMIEERLKTYAHLFDDKVMKQLKRRRYTGWGRLSRKLINGIRDKQSGKTILDFLKSDGFANRNFMQLIHDDSLTFKEDIQKAQVSGQGDSLHEHIANLAGSPAIKKGILQTVKVVDELVKVMGRHKPENIVIEMARENQTTQKGQKNSRERMKRIEEGIKELGSQILKEHPVENTQLQNEKLYLYYLQNGRDMYVDQELDINRLSDYDVDHIVPQSFLKDDSIDNKVLTRSDKARGKSDNVPSEEVVKKMKNYWRQLLNAKLITQRKFDNLTKAERGGLSELDKAGFIKRQLVETRQITKHVAQILDSRMNTKYDENDKLIREVKVITLKSKLVSDFRKDFQFYKVREINNYHHAHDAYLNAVVGTALIKKYPKLESEFVYGDYKVYDVRKMIAKSEQEIGKATAKYFFYSNIMNFFKTEITLANGEIRKRPLIETNGETGEIVWDKGRDFATVRKVLSMPQVNIVKKTEVQTGGFSKESILPKRNSDKLIARKKDWDPKKYGGFDSPTVAYSVLVVAKVEKGKSKKLKSVKELLGITIMERSSFEKNPIDFLEAKGYKEVKKDLIIKLPKYSLFELENGRKRMLASAGELQKGNELALPSKYVNFLYLASHYEKLKGSPEDNEQKQLFVEQHKHYLDEIIEQISEFSKRVILADANLDKVLSAYNKHRDKPIREQAENIIHLFTLTNLGAPAAFKYFDTTIDRKRYTSTKEVLDATLIHQSITGLYETRIDLSQLGGDGGGGGGSGGGGSGGGGSGGGGSGGMNPLQLLQPLPAEIKGTKLLAHWNSGATITCIPESFLEDEQPIKKTLIKTIHGEKQQNVYYVTFKVKGRKVEAEVIASPYEYILLSPTDVPWLTQQPLQLTILVPLQEYQEKILSKTALPEDQKQQLKTLFVKYDNLWQHWENQVGHRKIRPHNIATGDYPPRPQKQYPINPKAKPSIQIVIDDLLKQGVLTPQNSTMNTPVYPVPKPDGRWRMVLDYREVNKTIPLTAAQNQHSAGILATIVRQKYKTTLDLANGFWAHPITPESYWLTAFTWQGKQYCWTRLPQGFLNSPALFNADVVDLLKEIPNVQVYVDDIYLSHDDPKEHVQQLEKVFQILLQAGYVVSLKKSEIGQKTVEFLGFNITKEGRGLTDTFKTKLLNITPPKDLKQLQSILGKLNFARNFIPNFAELVQPLYNLIAPAKGKYIEWSEENTKQLNMVIEALNTASNLEERLPEQRLVIKVNTSPSAGYVRYYNETGKKPIMYLNYVFSKAELKFSMLEKLLTTMHKALIKAMDLAMGQEILVYSPIVSMTKIQKTPLPERKALPIRWITWMTYLEDPRIQFHYDKTLPELKHIPDVYTSSQSPVKHPSQYEGVFYTDGSAIKSPDPTKSNNAGMGIVHATYKPEYQVLNQWSIPLGNHTAQMAEIAAVEFACKKALKIPGPVLVITDSFYVAESANKELPYWKSNGFVNNKKKPLKHISKWKSIAECLSMKPDITIQHEKGISLQIPVFILKGNALADKLATQGSYVVNAGKRTADGSEFEKRTADGSEFESPKKKAKVE

SEQ ID NO: 6151 - protein, 2136 aa, synthetic construct
MPAAKRVKLDGGDKKYSIGLDIGTNSVGWAVITDEYKVPSKKFKVLGNTDRHSIKKNLIGALLFDSGETAEATRLKRTARRRYTRRKNRICYLQEIFSNEMAKVDDSFFHRLEESFLVEEDKKHERHPIFGNIVDEVAYHEKYPTIYHLRKKLVDSTDKADLRLIYLALAHMIKFRGHFLIEGDLNPDNSDVDKLFIQLVQTYNQLFEENPINASGVDAKAILSARLSKSRRLENLIAQLPGEKKNGLFGNLIALSLGLTPNFKSNFDLAEDAKLQLSKDTYDDDLDNLLAQIGDQYADLFLAAKNLSDAILLSDILRVNTEITKAPLSASMIKRYDEHHQDLTLLKALVRQQLPEKYKEIFFDQSKNGYAGYIDGGASQEEFYKFIKPILEKMDGTEELLVKLNREDLLRKQRTFDNGSIPHQIHLGELHAILRRQEDFYPFLKDNREKIEKILTFRIPYYVGPLARGNSRFAWMTRKSEETITPWNFEEVVDKGASAQSFIERMTNFDKNLPNEKVLPKHSLLYEYFTVYNELTKVKYVTEGMRKPAFLSGEQKKAIVDLLFKTNRKVTVKQLKEDYFKKIECFDSVEISGVEDRFNASLGTYHDLLKIIKDKDFLDNEENEDILEDIVLTLTLFEDREMIEERLKTYAHLFDDKVMKQLKRRRYTGWGRLSRKLINGIRDKQSGKTILDFLKSDGFANRNFMQLIHDDSLTFKEDIQKAQVSGQGDSLHEHIANLAGSPAIKKGILQTVKVVDELVKVMGRHKPENIVIEMARENQTTQKGQKNSRERMKRIEEGIKELGSQILKEHPVENTQLQNEKLYLYYLQNGRDMYVDQELDINRLSDYDVDHIVPQSFLKDDSIDNKVLTRSDKARGKSDNVPSEEVVKKMKNYWRQLLNAKLITQRKFDNLTKAERGGLSELDKAGFIKRQLVETRQITKHVAQILDSRMNTKYDENDKLIREVKVITLKSKLVSDFRKDFQFYKVREINNYHHAHDAYLNAVVGTALIKKYPKLESEFVYGDYKVYDVRKMIAKSEQEIGKATAKYFFYSNIMNFFKTEITLANGEIRKRPLIETNGETGEIVWDKGRDFATVRKVLSMPQVNIVKKTEVQTGGFSKESILPKRNSDKLIARKKDWDPKKYGGFDSPTVAYSVLVVAKVEKGKSKKLKSVKELLGITIMERSSFEKNPIDFLEAKGYKEVKKDLIIKLPKYSLFELENGRKRMLASAGELQKGNELALPSKYVNFLYLASHYEKLKGSPEDNEQKQLFVEQHKHYLDEIIEQISEFSKRVILADANLDKVLSAYNKHRDKPIREQAENIIHLFTLTNLGAPAAFKYFDTTIDRKRYTSTKEVLDATLIHQSITGLYETRIDLSQLGGDGGGGGGSGGGGSGGGGSGGGGSGGLLGRDLLTKLKAQIQFSTEGPQVTWEDRPAMCLVLNLEEEYRLHEKPVPPSIDPSWLQLFPMVWAEKAGMGLANQVPPVVVELKSDASPVAVRQYPMSKEAREGIRPHIQRFLDLGILVPCQSPWNTPLLPVKKPGTNDYRPVQDLREVNKRVQDIHPTVPNPYNLLSSLPPSHTWYSVLDLKDAFFCLKLHPNSQPLFAFEWRDPEKGNTGQLTWTRLPQGFKNSPTLFNEALHRDLASFRALNPQVVMLQYVDDLLVAAPTYRDCKEGTRRLLQELSKLGYRVSAKKAQLCREEVTYLGYLLKGGKRWLTPARKATVMKIPTPTTPRQVREFLGTAGFCRLWIPGFASLAAPLYPLTRPKVPFTWTEAHQEAFGRIKEALLSAPALALPDLTKPFALYVDEKEGVARGVLTQTLGPWRRPVAYLSKKLDPVASGWPTCLKAIAAVALLLKDADKLTLGQNVLVIAPHNLESIVRQPPDRWMTNARMTHYQSLLLNERVSFAPPAILNPATLLPVESDDTPIHICSEILAEETGTRPDLRDQPLPGVPAWYTDGSSFIMDGRRQAGAAIVDNKRTVWASNLPEGTSAQKAELIALTQALRLAEGKSINIYTDSRYAFATAHVHGAIYKQRGWLTSAGKDIKNKEEILALLEAIHLPKRVAIIHCPGHQRGTDPVATGNRKADEAAKQAAQSTRILTETTKNAGKRTADGSEFEKRTADGSEFESPKKKAKVE

SEQ ID NO: 6152 - protein, 2136 aa, synthetic construct
MPAAKRVKLDGGDKKYSIGLDIGTNSVGWAVITDEYKVPSKKFKVLGNTDRHSIKKNLIGALLFDSGETAEATRLKRTARRRYTRRKNRICYLQEIFSNEMAKVDDSFFHRLEESFLVEEDKKHERHPIFGNIVDEVAYHEKYPTIYHLRKKLVDSTDKADLRLIYLALAHMIKFRGHFLIEGDLNPDNSDVDKLFIQLVQTYNQLFEENPINASGVDAKAILSARLSKSRRLENLIAQLPGEKKNGLFGNLIALSLGLTPNFKSNFDLAEDAKLQLSKDTYDDDLDNLLAQIGDQYADLFLAAKNLSDAILLSDILRVNTEITKAPLSASMIKRYDEHHQDLTLLKALVRQQLPEKYKEIFFDQSKNGYAGYIDGGASQEEFYKFIKPILEKMDGTEELLVKLNREDLLRKQRTFDNGSIPHQIHLGELHAILRRQEDFYPFLKDNREKIEKILTFRIPYYVGPLARGNSRFAWMTRKSEETITPWNFEEVVDKGASAQSFIERMTNFDKNLPNEKVLPKHSLLYEYFTVYNELTKVKYVTEGMRKPAFLSGEQKKAIVDLLFKTNRKVTVKQLKEDYFKKIECFDSVEISGVEDRFNASLGTYHDLLKIIKDKDFLDNEENEDILEDIVLTLTLFEDREMIEERLKTYAHLFDDKVMKQLKRRRYTGWGRLSRKLINGIRDKQSGKTILDFLKSDGFANRNFMQLIHDDSLTFKEDIQKAQVSGQGDSLHEHIANLAGSPAIKKGILQTVKVVDELVKVMGRHKPENIVIEMARENQTTQKGQKNSRERMKRIEEGIKELGSQILKEHPVENTQLQNEKLYLYYLQNGRDMYVDQELDINRLSDYDVDHIVPQSFLKDDSIDNKVLTRSDKARGKSDNVPSEEVVKKMKNYWRQLLNAKLITQRKFDNLTKAERGGLSELDKAGFIKRQLVETRQITKHVAQILDSRMNTKYDENDKLIREVKVITLKSKLVSDFRKDFQFYKVREINNYHHAHDAYLNAVVGTALIKKYPKLESEFVYGDYKVYDVRKMIAKSEQEIGKATAKYFFYSNIMNFFKTEITLANGEIRKRPLIETNGETGEIVWDKGRDFATVRKVLSMPQVNIVKKTEVQTGGFSKESILPKRNSDKLIARKKDWDPKKYGGFDSPTVAYSVLVVAKVEKGKSKKLKSVKELLGITIMERSSFEKNPIDFLEAKGYKEVKKDLIIKLPKYSLFELENGRKRMLASAGELQKGNELALPSKYVNFLYLASHYEKLKGSPEDNEQKQLFVEQHKHYLDEIIEQISEFSKRVILADANLDKVLSAYNKHRDKPIREQAENIIHLFTLTNLGAPAAFKYFDTTIDRKRYTSTKEVLDATLIHQSITGLYETRIDLSQLGGDGGGGGGSGGGGSGGGGSGGGGSGGLLGRDLLTKLKAQIQFSTEGPQVTWEDRPAMCLVLNLEEEYRLHEKPVPPSIDPSWLQLFPMVWAEKAGMGLANQVPPVVVELKSDASPVAVRQYPMSKEAREGIRPHIQRFLDLGILVPCQSPWNTPLLPVKKPGTNDYRPVQDLREVNKRVQDIHPTVPNPYNLLSSLPPSHTWYSVLDLKDAFFCLKLHPNSQPLFAFEWRDPEKGNTGQLTWTRLPQGFKNSPTLFNEALHRDLASFRALNPQVVMLQYVDDLLVAAPTYRDCKEGTRRLLQELSKLGYRVSAKKAQLCREEVTYLGYLLKGGKRWLTPARKATVMKIPTPTTPRQVREFLGKAGFCRLFIPGFASLAAPLYPLTRPKVPFTWTEAHQEAFGRIKEALLSAPALALPDLTKPFALYVDEKEGVARGVLTQTLGPWRRPVAYLSKKLDPVASGWPTCLKAIAAVALLLKDADKLTLGQNVLVIAPHNLESIVRQPPDRWMTNARMTHYQSLLLNERVSFAPPAILNPATLLPVESDDTPIHICSEILAEETGTRPDLRDQPLPGVPAWYTDGSSFIMDGRRQAGAAIVDNKRTVWASNLPEGTSAQKAELIALTQALRLAEGKSINIYTDSRYAFATAHVHGAIYKQRGWLTSAGKDIKNKEEILALLEAIHLPKRVAIIHCPGHQRGTDPVATGNRKADEAAKQAAQSTRILTETTKNAGKRTADGSEFEKRTADGSEFESPKKKAKVE

SEQ ID NO: 6153 - protein, 2227 aa, synthetic construct
MPAAKRVKLDGGDKKYSIGLDIGTNSVGWAVITDEYKVPSKKFKVLGNTDRHSIKKNLIGALLFDSGETAEATRLKRTARRRYTRRKNRICYLQEIFSNEMAKVDDSFFHRLEESFLVEEDKKHERHPIFGNIVDEVAYHEKYPTIYHLRKKLVDSTDKADLRLIYLALAHMIKFRGHFLIEGDLNPDNSDVDKLFIQLVQTYNQLFEENPINASGVDAKAILSARLSKSRRLENLIAQLPGEKKNGLFGNLIALSLGLTPNFKSNFDLAEDAKLQLSKDTYDDDLDNLLAQIGDQYADLFLAAKNLSDAILLSDILRVNTEITKAPLSASMIKRYDEHHQDLTLLKALVRQQLPEKYKEIFFDQSKNGYAGYIDGGASQEEFYKFIKPILEKMDGTEELLVKLNREDLLRKQRTFDNGSIPHQIHLGELHAILRRQEDFYPFLKDNREKIEKILTFRIPYYVGPLARGNSRFAWMTRKSEETITPWNFEEVVDKGASAQSFIERMTNFDKNLPNEKVLPKHSLLYEYFTVYNELTKVKYVTEGMRKPAFLSGEQKKAIVDLLFKTNRKVTVKQLKEDYFKKIECFDSVEISGVEDRFNASLGTYHDLLKIIKDKDFLDNEENEDILEDIVLTLTLFEDREMIEERLKTYAHLFDDKVMKQLKRRRYTGWGRLSRKLINGIRDKQSGKTILDFLKSDGFANRNFMQLIHDDSLTFKEDIQKAQVSGQGDSLHEHIANLAGSPAIKKGILQTVKVVDELVKVMGRHKPENIVIEMARENQTTQKGQKNSRERMKRIEEGIKELGSQILKEHPVENTQLQNEKLYLYYLQNGRDMYVDQELDINRLSDYDVDHIVPQSFLKDDSIDNKVLTRSDKARGKSDNVPSEEVVKKMKNYWRQLLNAKLITQRKFDNLTKAERGGLSELDKAGFIKRQLVETRQITKHVAQILDSRMNTKYDENDKLIREVKVITLKSKLVSDFRKDFQFYKVREINNYHHAHDAYLNAVVGTALIKKYPKLESEFVYGDYKVYDVRKMIAKSEQEIGKATAKYFFYSNIMNFFKTEITLANGEIRKRPLIETNGETGEIVWDKGRDFATVRKVLSMPQVNIVKKTEVQTGGFSKESILPKRNSDKLIARKKDWDPKKYGGFDSPTVAYSVLVVAKVEKGKSKKLKSVKELLGITIMERSSFEKNPIDFLEAKGYKEVKKDLIIKLPKYSLFELENGRKRMLASAGELQKGNELALPSKYVNFLYLASHYEKLKGSPEDNEQKQLFVEQHKHYLDEIIEQISEFSKRVILADANLDKVLSAYNKHRDKPIREQAENIIHLFTLTNLGAPAAFKYFDTTIDRKRYTSTKEVLDATLIHQSITGLYETRIDLSQLGGDGGGGGGSGGGGSGGGGSGGGGSGGTLGDQGSRGSDPLPEPRVTLTVEGIPTEFLVNTGAEHSVLTKPMGKMGSKRTVVAGATGSKVYPWTTKRLLKIGQKQVTHSFLVIPECPAPLLGRDLLTKLKAQIQFSTEGPQVTWEDRPAMCLVLNLEEEYRLHEKPVPPSIDPSWLQLFPMVWAEKAGMGLANQVPPVVVELKSDASPVAVRQYPMSKEAREGIRPHIQRFLDLGILVPCQSPWNTPLLPVKKPGTNDYRPVQDLREVNKRVQDIHPTVPNPYNLLSSLPPSHTWYSVLDLKDAFFCLKLHPNSQPLFAFEWRDPEKGNTGQLTWTRLPQGFKNSPTLFNEALHRDLASFRALNPQVVMLQYVDDLLVAAPTYRDCKEGTRRLLQELSKLGYRVSAKKAQLCREEVTYLGYLLKGGKRWLTPARKATVMKIPTPTTPRQVREFLGTAGFCRLWIPGFASLAAPLYPLTRPKVPFTWTEAHQEAFGRIKEALLSAPALALPDLTKPFALYVDEKEGVARGVLTQTLGPWRRPVAYLSKKLDPVASGWPTCLKAIAAVALLLKDADKLTLGQNVLVIAPHNLESIVRQPPDRWMTNARMTHYQSLLLNERVSFAPPAILNPATLLPVESDDTPIHICSEILAEETGTRPDLRDQPLPGVPAWYTDGSSFIMDGRRQAGAAIVDNKRTVWASNLPEGTSAQKAELIALTQALRLAEGKSINIYTDSRYAFATAHVHGAIYKQRGWLTSAGKDIKNKEEILALLEAIHLPKRVAIIHCPGHQRGTDPVATGNRKADEAAKQAAQSTRILTETTKNAGKRTADGSEFEKRTADGSEFESPKKKAKVE

SEQ ID NO: 6154 - protein, 2105 aa, synthetic construct
MPAAKRVKLDGGDKKYSIGLDIGTNSVGWAVITDEYKVPSKKFKVLGNTDRHSIKKNLIGALLFDSGETAEATRLKRTARRRYTRRKNRICYLQEIFSNEMAKVDDSFFHRLEESFLVEEDKKHERHPIFGNIVDEVAYHEKYPTIYHLRKKLVDSTDKADLRLIYLALAHMIKFRGHFLIEGDLNPDNSDVDKLFIQLVQTYNQLFEENPINASGVDAKAILSARLSKSRRLENLIAQLPGEKKNGLFGNLIALSLGLTPNFKSNFDLAEDAKLQLSKDTYDDDLDNLLAQIGDQYADLFLAAKNLSDAILLSDILRVNTEITKAPLSASMIKRYDEHHQDLTLLKALVRQQLPEKYKEIFFDQSKNGYAGYIDGGASQEEFYKFIKPILEKMDGTEELLVKLNREDLLRKQRTFDNGSIPHQIHLGELHAILRRQEDFYPFLKDNREKIEKILTFRIPYYVGPLARGNSRFAWMTRKSEETITPWNFEEVVDKGASAQSFIERMTNFDKNLPNEKVLPKHSLLYEYFTVYNELTKVKYVTEGMRKPAFLSGEQKKAIVDLLFKTNRKVTVKQLKEDYFKKIECFDSVEISGVEDRFNASLGTYHDLLKIIKDKDFLDNEENEDILEDIVLTLTLFEDREMIEERLKTYAHLFDDKVMKQLKRRRYTGWGRLSRKLINGIRDKQSGKTILDFLKSDGFANRNFMQLIHDDSLTFKEDIQKAQVSGQGDSLHEHIANLAGSPAIKKGILQTVKVVDELVKVMGRHKPENIVIEMARENQTTQKGQKNSRERMKRIEEGIKELGSQILKEHPVENTQLQNEKLYLYYLQNGRDMYVDQELDINRLSDYDVDHIVPQSFLKDDSIDNKVLTRSDKARGKSDNVPSEEVVKKMKNYWRQLLNAKLITQRKFDNLTKAERGGLSELDKAGFIKRQLVETRQITKHVAQILDSRMNTKYDENDKLIREVKVITLKSKLVSDFRKDFQFYKVREINNYHHAHDAYLNAVVGTALIKKYPKLESEFVYGDYKVYDVRKMIAKSEQEIGKATAKYFFYSNIMNFFKTEITLANGEIRKRPLIETNGETGEIVWDKGRDFATVRKVLSMPQVNIVKKTEVQTGGFSKESILPKRNSDKLIARKKDWDPKKYGGFDSPTVAYSVLVVAKVEKGKSKKLKSVKELLGITIMERSSFEKNPIDFLEAKGYKEVKKDLIIKLPKYSLFELENGRKRMLASAGELQKGNELALPSKYVNFLYLASHYEKLKGSPEDNEQKQLFVEQHKHYLDEIIEQISEFSKRVILADANLDKVLSAYNKHRDKPIREQAENIIHLFTLTNLGAPAAFKYFDTTIDRKRYTSTKEVLDATLIHQSITGLYETRIDLSQLGGDGGGGGGSGGGGSGGGGSGGGGSGGTLNIEDEYRLHETSKEPDVSLGSTWLSDFPQAWAETGGMGLAVRQAPLIIPLKATSTPVSIKQYPMSQEARLGIKPHIQRLLDQGILVPCQSPWNTPLLPVKKPGTNDYRPVQDLREVNKRVEDIHPTVPNPYNLLSGLPPSHQWYTVLDLKDAFFCLRLHPTSQPLFAFEWRDPEMGISGQLTWTRLPQGFKNSPTLFNEALHRDLAGFRIQHPDLILLQYVDDLLLAATSELDCQQGTRALLQTLGDLGYRASAKKAQICQKQVKYLGYLLKEGQRWLTEARKETVMGQPIPKTPRQLREFLGTAGFCRLWIPGFAEMAAPLYPLTKPGTLFNWGPDQQKAFQEIKQALLTAPALGLPDLTKPFELFVDEKQGYAKGVLTQKLGPWRRPVAYLSKKLDPVAAGWPPCLRMVAAIAVLTKDAGKLTMGQPLVILAPHAVEALVKQPPDRWLSNARMTHYQALLLDTDRVQFGPVVALNPATLLPLPEEGLQHDCLDILAEAHGTRSDLMDQPLPDADHTWYTDGSSFLQEGQRKAGAAVTTETEVIWARALPAGTSAQRAELIALTQALKMAEGKKLNVYTDSRYAFATAHIHGEIYRRRGWLTSEGKEIKNKDEILALLKALFLPKRLSIIHCPGHQKGNSAEARGNRMADQAAREVATRETPETSTLLAGKRTADGSEFEKRTADGSEFESPKKKAKVE

SEQ ID NO: 6155 - protein, 2105 aa, synthetic construct
MPAAKRVKLDGGDKKYSIGLDIGTNSVGWAVITDEYKVPSKKFKVLGNTDRHSIKKNLIGALLFDSGETAEATRLKRTARRRYTRRKNRICYLQEIFSNEMAKVDDSFFHRLEESFLVEEDKKHERHPIFGNIVDEVAYHEKYPTIYHLRKKLVDSTDKADLRLIYLALAHMIKFRGHFLIEGDLNPDNSDVDKLFIQLVQTYNQLFEENPINASGVDAKAILSARLSKSRRLENLIAQLPGEKKNGLFGNLIALSLGLTPNFKSNFDLAEDAKLQLSKDTYDDDLDNLLAQIGDQYADLFLAAKNLSDAILLSDILRVNTEITKAPLSASMIKRYDEHHQDLTLLKALVRQQLPEKYKEIFFDQSKNGYAGYIDGGASQEEFYKFIKPILEKMDGTEELLVKLNREDLLRKQRTFDNGSIPHQIHLGELHAILRRQEDFYPFLKDNREKIEKILTFRIPYYVGPLARGNSRFAWMTRKSEETITPWNFEEVVDKGASAQSFIERMTNFDKNLPNEKVLPKHSLLYEYFTVYNELTKVKYVTEGMRKPAFLSGEQKKAIVDLLFKTNRKVTVKQLKEDYFKKIECFDSVEISGVEDRFNASLGTYHDLLKIIKDKDFLDNEENEDILEDIVLTLTLFEDREMIEERLKTYAHLFDDKVMKQLKRRRYTGWGRLSRKLINGIRDKQSGKTILDFLKSDGFANRNFMQLIHDDSLTFKEDIQKAQVSGQGDSLHEHIANLAGSPAIKKGILQTVKVVDELVKVMGRHKPENIVIEMARENQTTQKGQKNSRERMKRIEEGIKELGSQILKEHPVENTQLQNEKLYLYYLQNGRDMYVDQELDINRLSDYDVDHIVPQSFLKDDSIDNKVLTRSDKARGKSDNVPSEEVVKKMKNYWRQLLNAKLITQRKFDNLTKAERGGLSELDKAGFIKRQLVETRQITKHVAQILDSRMNTKYDENDKLIREVKVITLKSKLVSDFRKDFQFYKVREINNYHHAHDAYLNAVVGTALIKKYPKLESEFVYGDYKVYDVRKMIAKSEQEIGKATAKYFFYSNIMNFFKTEITLANGEIRKRPLIETNGETGEIVWDKGRDFATVRKVLSMPQVNIVKKTEVQTGGFSKESILPKRNSDKLIARKKDWDPKKYGGFDSPTVAYSVLVVAKVEKGKSKKLKSVKELLGITIMERSSFEKNPIDFLEAKGYKEVKKDLIIKLPKYSLFELENGRKRMLASAGELQKGNELALPSKYVNFLYLASHYEKLKGSPEDNEQKQLFVEQHKHYLDEIIEQISEFSKRVILADANLDKVLSAYNKHRDKPIREQAENIIHLFTLTNLGAPAAFKYFDTTIDRKRYTSTKEVLDATLIHQSITGLYETRIDLSQLGGDGGGGGGSGGGGSGGGGSGGGGSGGTLNIEDEYRLHETSKGPDVPLGSTWLSDFPQAWAETGGMGLAVRQAPLIIPLKATSTPVSIKQYPMSQEARLGIKPHIQRLLDQGILVPCQSPWNTPLLPVKKPGTNDYRPVQDLREVNKRVEDIHPTVPNPYNLLSGLPPSHQWYTVLDLKDAFFCLRLHPTSQSLFAFEWRDPEMGISGQLTWTRLPQGFKNSPTLFNEALHRDLADFRIQHPDLILLQYVDDLLLAATSELDCQQGTRALLQTLGDLGYRASAKKAQICQKQVKYLGYLLKEGQRWLTEARKETVMGQPTPKTPRQLREFLGKAGFCRLFIPGFAEMAAPLYPLTKPGTLFEWGPDQQKAYQEIKQALLTAPALGLPDLTKPFELFVDEKQGYAKGVLTQKLGPWRRPVAYLSKKLDPVAAGWPPCLRMVAAIAVLTKDAGKLTMGQPLVILAPHAVEALVKQPPDRWLSNARMTHYQALLLDTDRVQFGPIVALNPATLLPLPEEGLQHDCLDILAEAHGTRPDLTDQPLPDADHTWYTDGSSFLQEGQRKAGAAVTTETEVVWAKALPAGTSAQRAELIALTQALKMAEGKKLNVYTDSRYAFATAHIHGEIYRRRGWLTSEGKEIKNKDEILALLKALFLPKRLSIIHCPGHQKGNRAEARGNRMADQAAREVATRETPETSTLLAGKRTADGSEFEKRTADGSEFESPKKKAKVE

SEQ ID NO: 6156 - protein, 2105 aa, synthetic construct
MPAAKRVKLDGGDKKYSIGLDIGTNSVGWAVITDEYKVPSKKFKVLGNTDRHSIKKNLIGALLFDSGETAEATRLKRTARRRYTRRKNRICYLQEIFSNEMAKVDDSFFHRLEESFLVEEDKKHERHPIFGNIVDEVAYHEKYPTIYHLRKKLVDSTDKADLRLIYLALAHMIKFRGHFLIEGDLNPDNSDVDKLFIQLVQTYNQLFEENPINASGVDAKAILSARLSKSRRLENLIAQLPGEKKNGLFGNLIALSLGLTPNFKSNFDLAEDAKLQLSKDTYDDDLDNLLAQIGDQYADLFLAAKNLSDAILLSDILRVNTEITKAPLSASMIKRYDEHHQDLTLLKALVRQQLPEKYKEIFFDQSKNGYAGYIDGGASQEEFYKFIKPILEKMDGTEELLVKLNREDLLRKQRTFDNGSIPHQIHLGELHAILRRQEDFYPFLKDNREKIEKILTFRIPYYVGPLARGNSRFAWMTRKSEETITPWNFEEVVDKGASAQSFIERMTNFDKNLPNEKVLPKHSLLYEYFTVYNELTKVKYVTEGMRKPAFLSGEQKKAIVDLLFKTNRKVTVKQLKEDYFKKIECFDSVEISGVEDRFNASLGTYHDLLKIIKDKDFLDNEENEDILEDIVLTLTLFEDREMIEERLKTYAHLFDDKVMKQLKRRRYTGWGRLSRKLINGIRDKQSGKTILDFLKSDGFANRNFMQLIHDDSLTFKEDIQKAQVSGQGDSLHEHIANLAGSPAIKKGILQTVKVVDELVKVMGRHKPENIVIEMARENQTTQKGQKNSRERMKRIEEGIKELGSQILKEHPVENTQLQNEKLYLYYLQNGRDMYVDQELDINRLSDYDVDHIVPQSFLKDDSIDNKVLTRSDKARGKSDNVPSEEVVKKMKNYWRQLLNAKLITQRKFDNLTKAERGGLSELDKAGFIKRQLVETRQITKHVAQILDSRMNTKYDENDKLIREVKVITLKSKLVSDFRKDFQFYKVREINNYHHAHDAYLNAVVGTALIKKYPKLESEFVYGDYKVYDVRKMIAKSEQEIGKATAKYFFYSNIMNFFKTEITLANGEIRKRPLIETNGETGEIVWDKGRDFATVRKVLSMPQVNIVKKTEVQTGGFSKESILPKRNSDKLIARKKDWDPKKYGGFDSPTVAYSVLVVAKVEKGKSKKLKSVKELLGITIMERSSFEKNPIDFLEAKGYKEVKKDLIIKLPKYSLFELENGRKRMLASAGELQKGNELALPSKYVNFLYLASHYEKLKGSPEDNEQKQLFVEQHKHYLDEIIEQISEFSKRVILADANLDKVLSAYNKHRDKPIREQAENIIHLFTLTNLGAPAAFKYFDTTIDRKRYTSTKEVLDATLIHQSITGLYETRIDLSQLGGDGGGGGGSGGGGSGGGGSGGGGSGGTLNIEDEHRLHETSKEPDVSLGSTWLSDFPQAWAETGGMGLAVRQAPLIIPLKATSTPVSIKQYPMSQEARLGIKPHIQRLLDQGILVPCQSPWNTPLLPVKKPGTNDYRPVQDLREVNKRVEDIHPTVPNPYNLLSGLPPSHQWYTVLDLKDAFFCLRLHPTSQPLFAFEWRDPEMGISGQLTWTRLPQGFKNSPTLFDEALHRDLADFRIQHPDLILLQYVDDLLLAATSELDCQQGTRALLQTLGNLGYRASAKKAQICQKQVKYLGYLLKEGQRWLTEARKETVMGQPTPKTPRQLREFLGTAGFCRLWIPGFAEMAAPLYPLTKTGTLFNWGPDQQKAYQEIKQALLTAPALGLPDLTKPFELFVDEKQGYAKGVLTQKLGPWRRPVAYLSKKLDPVAAGWPPCLRMVAAIAVLTKDAGKLTMGQPLVILAPHAVEALVKQPPDRWLSNARMTHYQALLLDTDRVQFGPVVALNPATLLPLPEEGLQHNCLDILAEAHGTRPDLTDQPLPDADHTWYTDGSSLLQEGQRKAGAAVTTETEVIWAKALPAGTSAQRAELIALTQALKMAEGKKLNVYTDSRYAFATAHIHGEIYRRRGLLTSEGKEIKNKDEILALLKALFLPKRLSIIHCPGHQKGHSAEARGNRMADQAARKAAITETPDTSTLLAGKRTADGSEFEKRTADGSEFESPKKKAKVE

SEQ ID NO: 6157 - protein, 2033 aa, synthetic construct
MPAAKRVKLDGGDKKYSIGLDIGTNSVGWAVITDEYKVPSKKFKVLGNTDRHSIKKNLIGALLFDSGETAEATRLKRTARRRYTRRKNRICYLQEIFSNEMAKVDDSFFHRLEESFLVEEDKKHERHPIFGNIVDEVAYHEKYPTIYHLRKKLVDSTDKADLRLIYLALAHMIKFRGHFLIEGDLNPDNSDVDKLFIQLVQTYNQLFEENPINASGVDAKAILSARLSKSRRLENLIAQLPGEKKNGLFGNLIALSLGLTPNFKSNFDLAEDAKLQLSKDTYDDDLDNLLAQIGDQYADLFLAAKNLSDAILLSDILRVNTEITKAPLSASMIKRYDEHHQDLTLLKALVRQQLPEKYKEIFFDQSKNGYAGYIDGGASQEEFYKFIKPILEKMDGTEELLVKLNREDLLRKQRTFDNGSIPHQIHLGELHAILRRQEDFYPFLKDNREKIEKILTFRIPYYVGPLARGNSRFAWMTRKSEETITPWNFEEVVDKGASAQSFIERMTNFDKNLPNEKVLPKHSLLYEYFTVYNELTKVKYVTEGMRKPAFLSGEQKKAIVDLLFKTNRKVTVKQLKEDYFKKIECFDSVEISGVEDRFNASLGTYHDLLKIIKDKDFLDNEENEDILEDIVLTLTLFEDREMIEERLKTYAHLFDDKVMKQLKRRRYTGWGRLSRKLINGIRDKQSGKTILDFLKSDGFANRNFMQLIHDDSLTFKEDIQKAQVSGQGDSLHEHIANLAGSPAIKKGILQTVKVVDELVKVMGRHKPENIVIEMARENQTTQKGQKNSRERMKRIEEGIKELGSQILKEHPVENTQLQNEKLYLYYLQNGRDMYVDQELDINRLSDYDVDHIVPQSFLKDDSIDNKVLTRSDKARGKSDNVPSEEVVKKMKNYWRQLLNAKLITQRKFDNLTKAERGGLSELDKAGFIKRQLVETRQITKHVAQILDSRMNTKYDENDKLIREVKVITLKSKLVSDFRKDFQFYKVREINNYHHAHDAYLNAVVGTALIKKYPKLESEFVYGDYKVYDVRKMIAKSEQEIGKATAKYFFYSNIMNFFKTEITLANGEIRKRPLIETNGETGEIVWDKGRDFATVRKVLSMPQVNIVKKTEVQTGGFSKESILPKRNSDKLIARKKDWDPKKYGGFDSPTVAYSVLVVAKVEKGKSKKLKSVKELLGITIMERSSFEKNPIDFLEAKGYKEVKKDLIIKLPKYSLFELENGRKRMLASAGELQKGNELALPSKYVNFLYLASHYEKLKGSPEDNEQKQLFVEQHKHYLDEIIEQISEFSKRVILADANLDKVLSAYNKHRDKPIREQAENIIHLFTLTNLGAPAAFKYFDTTIDRKRYTSTKEVLDATLIHQSITGLYETRIDLSQLGGDGGGGGGSGGGGSGGGGSGGGGSGGGRDIMKDIKVRLMTDSPDDSQDLMIGAIESNLFADQISWKSDQPVWLNQWPLKQEKLQALQQLVTEQLQLGHLEESNSPWNTPVFVIKKKSGKWRLLQDLRAVNATMHDMGALQPGLPSPVAVPKGWEIIIIDLQDCFFNIKLHPEDCKRFAFSVPSPNFKRPYQRFQWKVLPQGMKNSPTLCQKFVDKAILTVRDKYQDSYIVHYMDDILLAHPSRSIVDEILTSMIQALNKHGLVVSTEKIQKYDNLKYLGTHIQGDSVSYQKLQIRTDKLRTLNDFQKLLGNINWIRPFLKLTTGELKPLFEILNGDSNPISTRKLTPEACKALQLMNERLSTARVKRLDLSQPWSLCILKTEYTPTACLWQDGVVEWIHLPHISPKVITPYDIFCTQLIIKGRHRSKELFSKDPDYIVVPYTKVQFDLLLQEKEDWPISLLGFLGEVHFHLPKDPLLTFTLQTAIIFPHMTSTTPLEKGIVIFTDGSANGRSVTYIQGREPIIKENTQNTAQQAEIVAVITAFEEVSQPFNLYTDSKYVTGLFPEIETATLSPRTKIYTELKHLQRLIHKRQEKFYIGHIRGHTGLPGPLAQGNAYADSLTRILTAGKRTADGSEFEKRTADGSEFESPKKKAKVE

SEQ ID NO: 6158 - protein, 2097 aa, synthetic construct
MPAAKRVKLDGGDKKYSIGLDIGTNSVGWAVITDEYKVPSKKFKVLGNTDRHSIKKNLIGALLFDSGETAEATRLKRTARRRYTRRKNRICYLQEIFSNEMAKVDDSFFHRLEESFLVEEDKKHERHPIFGNIVDEVAYHEKYPTIYHLRKKLVDSTDKADLRLIYLALAHMIKFRGHFLIEGDLNPDNSDVDKLFIQLVQTYNQLFEENPINASGVDAKAILSARLSKSRRLENLIAQLPGEKKNGLFGNLIALSLGLTPNFKSNFDLAEDAKLQLSKDTYDDDLDNLLAQIGDQYADLFLAAKNLSDAILLSDILRVNTEITKAPLSASMIKRYDEHHQDLTLLKALVRQQLPEKYKEIFFDQSKNGYAGYIDGGASQEEFYKFIKPILEKMDGTEELLVKLNREDLLRKQRTFDNGSIPHQIHLGELHAILRRQEDFYPFLKDNREKIEKILTFRIPYYVGPLARGNSRFAWMTRKSEETITPWNFEEVVDKGASAQSFIERMTNFDKNLPNEKVLPKHSLLYEYFTVYNELTKVKYVTEGMRKPAFLSGEQKKAIVDLLFKTNRKVTVKQLKEDYFKKIECFDSVEISGVEDRFNASLGTYHDLLKIIKDKDFLDNEENEDILEDIVLTLTLFEDREMIEERLKTYAHLFDDKVMKQLKRRRYTGWGRLSRKLINGIRDKQSGKTILDFLKSDGFANRNFMQLIHDDSLTFKEDIQKAQVSGQGDSLHEHIANLAGSPAIKKGILQTVKVVDELVKVMGRHKPENIVIEMARENQTTQKGQKNSRERMKRIEEGIKELGSQILKEHPVENTQLQNEKLYLYYLQNGRDMYVDQELDINRLSDYDVDHIVPQSFLKDDSIDNKVLTRSDKARGKSDNVPSEEVVKKMKNYWRQLLNAKLITQRKFDNLTKAERGGLSELDKAGFIKRQLVETRQITKHVAQILDSRMNTKYDENDKLIREVKVITLKSKLVSDFRKDFQFYKVREINNYHHAHDAYLNAVVGTALIKKYPKLESEFVYGDYKVYDVRKMIAKSEQEIGKATAKYFFYSNIMNFFKTEITLANGEIRKRPLIETNGETGEIVWDKGRDFATVRKVLSMPQVNIVKKTEVQTGGFSKESILPKRNSDKLIARKKDWDPKKYGGFDSPTVAYSVLVVAKVEKGKSKKLKSVKELLGITIMERSSFEKNPIDFLEAKGYKEVKKDLIIKLPKYSLFELENGRKRMLASAGELQKGNELALPSKYVNFLYLASHYEKLKGSPEDNEQKQLFVEQHKHYLDEIIEQISEFSKRVILADANLDKVLSAYNKHRDKPIREQAENIIHLFTLTNLGAPAAFKYFDTTIDRKRYTSTKEVLDATLIHQSITGLYETRIDLSQLGGDGGGGGGSGGGGSGGGGSGGGGSGGLDDEYRLYSPLVKPDQNIQFWLEQFPQAWAETAGMGLAKQVPPQVIQLKASATPVSVRQYPLSKEAQEGIRPHVQRLIQQGILVPVQSPWNTPLLPVRKPGTNDYRPVQDLREVNKRVQDIHPTVPNPYNLLCALPPQRSWYTVLDLKDAFFCLRLHPTSQPLFAFEWRDPGTGRTGQLTWTRLPQGFKNSPTIFNEALHRDLANFRIQHPQVTLLQYVDDLLLAGATKQDCLEGTKALLLELSDLGYRASAKKAQICRREVTYLGYSLRDGQRWLTEARKKTVVQIPAPTTAKQVREFLGKAGFCRLFIPGFATLAAPLYPLTKPKGEFSWAPEHQKAFDAIKKALLSAPALALPDVTKPFTLYVDERKGVARGVLTQTLGPWRRPVAYLSKKLDPVASGWPVCLKAIAAVAILVKDADKLTLGQNITVIAPHALENIVRQPPDRWMTNARMTHYQSLLLTERVTFAPPAALNPATLLPEETDEPVTHDCHQLLIEETGVRKDLTDIPLTGEVLTWFTDGSSYVVEGKRMAGAAVVDGTRTIWASSLPEGTSAQKAELMALTQALRLAEGKSINIYTDSRYAFATAHVHGAIYKQRGWLTSAGREIKNKEEILSLLEALHLPKRLAIIHCPGHQKAKDPISRGNQMADRVAKQAAQGVNLLPAGKRTADGSEFEKRTADGSEFESPKKKAKVE

SEQ ID NO: 6159 - protein, 2097 aa, synthetic construct; identical to SEQ ID NO: 6158

SEQ ID NO: 6160 - protein, 2096 aa, synthetic construct
MPAAKRVKLDGGDKKYSIGLDIGTNSVGWAVITDEYKVPSKKFKVLGNTDRHSIKKNLIGALLFDSGETAEATRLKRTARRRYTRRKNRICYLQEIFSNEMAKVDDSFFHRLEESFLVEEDKKHERHPIFGNIVDEVAYHEKYPTIYHLRKKLVDSTDKADLRLIYLALAHMIKFRGHFLIEGDLNPDNSDVDKLFIQLVQTYNQLFEENPINASGVDAKAILSARLSKSRRLENLIAQLPGEKKNGLFGNLIALSLGLTPNFKSNFDLAEDAKLQLSKDTYDDDLDNLLAQIGDQYADLFLAAKNLSDAILLSDILRVNTEITKAPLSASMIKRYDEHHQDLTLLKALVRQQLPEKYKEIFFDQSKNGYAGYIDGGASQEEFYKFIKPILEKMDGTEELLVKLNREDLLRKQRTFDNGSIPHQIHLGELHAILRRQEDFYPFLKDNREKIEKILTFRIPYYVGPLARGNSRFAWMTRKSEETITPWNFEEVVDKGASAQSFIERMTNFDKNLPNEKVLPKHSLLYEYFTVYNELTKVKYVTEGMRKPAFLSGEQKKAIVDLLFKTNRKVTVKQLKEDYFKKIECFDSVEISGVEDRFNASLGTYHDLLKIIKDKDFLDNEENEDILEDIVLTLTLFEDREMIEERLKTYAHLFDDKVMKQLKRRRYTGWGRLSRKLINGIRDKQSGKTILDFLKSDGFANRNFMQLIHDDSLTFKEDIQKAQVSGQGDSLHEHIANLAGSPAIKKGILQTVKVVDELVKVMGRHKPENIVIEMARENQTTQKGQKNSRERMKRIEEGIKELGSQILKEHPVENTQLQNEKLYLYYLQNGRDMYVDQELDINRLSDYDVDHIVPQSFLKDDSIDNKVLTRSDKARGKSDNVPSEEVVKKMKNYWRQLLNAKLITQRKFDNLTKAERGGLSELDKAGFIKRQLVETRQITKHVAQILDSRMNTKYDENDKLIREVKVITLKSKLVSDFRKDFQFYKVREINNYHHAHDAYLNAVVGTALIKKYPKLESEFVYGDYKVYDVRKMIAKSEQEIGKATAKYFFYSNIMNFFKTEITLANGEIRKRPLIETNGETGEIVWDKGRDFATVRKVLSMPQVNIVKKTEVQTGGFSKESILPKRNSDKLIARKKDWDPKKYGGFDSPTVAYSVLVVAKVEKGKSKKLKSVKELLGITIMERSSFEKNPIDFLEAKGYKEVKKDLIIKLPKYSLFELENGRKRMLASAGELQKGNELALPSKYVNFLYLASHYEKLKGSPEDNEQKQLFVEQHKHYLDEIIEQISEFSKRVILADANLDKVLSAYNKHRDKPIREQAENIIHLFTLTNLGAPAAFKYFDTTIDRKRYTSTKEVLDATLIHQSITGLYETRIDLSQLGGDGGGGGGSGGGGSGGGGSGGGGSGGVPWLMKKPLQLTVLVPLHEYQERLLQQTALPKEQKELLQKLFLKYDALWQHWENQVGHRRIKPHNIATGTLAPRPQKQYPINPKAKPSIQIVIDDLLKQGVLIQQNSTMNTPVYPVPKPDGKWRMVLDYREVNKTIPLIAAQNQHSAGILSSIYRGKYKTTLDLTNGFWAHPITPESYWLTAFTWQGKQYCWTRLPQGFLNSPALFTADVVDLLKEIPNVQAYVDDIYISHDDPQEHLEQLEKIFSILLNAGYVVSLKKSEIAQREVEFLGFNITKEGRGLTDTFKQKLLNITPPKDLKQLQSILGLLNFARNFIPNYSELVKPLYTIVANANGKFISWTEDNSNQLQHIISVLNQADNLEERNPETRLIIKVNSSPSAGYIRYYNEGSKRPIMYVNYIFSKAEAKFTQTEKLLTTMHKGLIKAMDLAMGQEILVYSPIVSMTKIQRTPLPERKALPVRWITWMTYLEDPRIQFHYDKSLPELQQIPNVTEDVIAKTKHPSEFAMVFYTDGSAIKHPDVNKSHSAGMGIAQVQFIPEYKIVHQWSIPLGDHTAQLAEIAAVEFACKKALKISGPVLIVTDSFYVAESANKELPYWKSNGFLNNKKKPLRHVSKWKSIAECLQLKPDIIIMHEKGHQQPMTTLHTEGNNLADKLATQGSYVVHAGKRTADGSEFEKRTADGSEFESPKKKAKVE

SEQ ID NO: 6161 - protein, 2185 aa, synthetic construct
MPAAKRVKLDGGDKKYSIGLDIGTNSVGWAVITDEYKVPSKKFKVLGNTDRHSIKKNLIGALLFDSGETAEATRLKRTARRRYTRRKNRICYLQEIFSNEMAKVDDSFFHRLEESFLVEEDKKHERHPIFGNIVDEVAYHEKYPTIYHLRKKLVDSTDKADLRLIYLALAHMIKFRGHFLIEGDLNPDNSDVDKLFIQLVQTYNQLFEENPINASGVDAKAILSARLSKSRRLENLIAQLPGEKKNGLFGNLIALSLGLTPNFKSNFDLAEDAKLQLSKDTYDDDLDNLLAQIGDQYADLFLAAKNLSDAILLSDILRVNTEITKAPLSASMIKRYDEHHQDLTLLKALVRQQLPEKYKEIFFDQSKNGYAGYIDGGASQEEFYKFIKPILEKMDGTEELLVKLNREDLLRKQRTFDNGSIPHQIHLGELHAILRRQEDFYPFLKDNREKIEKILTFRIPYYVGPLARGNSRFAWMTRKSEETITPWNFEEVVDKGASAQSFIERMTNFDKNLPNEKVLPKHSLLYEYFTVYNELTKVKYVTEGMRKPAFLSGEQKKAIVDLLFKTNRKVTVKQLKEDYFKKIECFDSVEISGVEDRFNASLGTYHDLLKIIKDKDFLDNEENEDILEDIVLTLTLFEDREMIEERLKTYAHLFDDKVMKQLKRRRYTGWGRLSRKLINGIRDKQSGKTILDFLKSDGFANRNFMQLIHDDSLTFKEDIQKAQVSGQGDSLHEHIANLAGSPAIKKGILQTVKVVDELVKVMGRHKPENIVIEMARENQTTQKGQKNSRERMKRIEEGIKELGSQILKEHPVENTQLQNEKLYLYYLQNGRDMYVDQELDINRLSDYDVDHIVPQSFLKDDSIDNKVLTRSDKARGKSDNVPSEEVVKKMKNYWRQLLNAKLITQRKFDNLTKAERGGLSELDKAGFIKRQLVETRQITKHVAQILDSRMNTKYDENDKLIREVKVITLKSKLVSDFRKDFQFYKVREINNYHHAHDAYLNAVVGTALIKKYPKLESEFVYGDYKVYDVRKMIAKSEQEIGKATAKYFFYSNIMNFFKTEITLANGEIRKRPLIETNGETGEIVWDKGRDFATVRKVLSMPQVNIVKKTEVQTGGFSKESILPKRNSDKLIARKKDWDPKKYGGFDSPTVAYSVLVVAKVEKGKSKKLKSVKELLGITIMERSSFEKNPIDFLEAKGYKEVKKDLIIKLPKYSLFELENGRKRMLASAGELQKGNELALPSKYVNFLYLASHYEKLKGSPEDNEQKQLFVEQHKHYLDEIIEQISEFSKRVILADANLDKVLSAYNKHRDKPIREQAENIIHLFTLTNLGAPAAFKYFDTTIDRKRYTSTKEVLDATLIHQSITGLYETRIDLSQLGGDGGGGGGSGGGGSGGGGSGGGGSGGMDPLQLLQPLEAEIKGTKLKAHWNSGATITCVPQAFLEEEVPIKNIWIKTIHGEKEQPVYYLTFKIQGRKVEAEVISSPYDYILVSPSDIPWLMKKPLQLTTLVPLQEYEERLLKQTMLTGSYKEKLQSLFLKYDALWQHWENQVGHRRIKPHHIATGTVNPRPQKQYPINPKAKASIQTVINDLLKQGVLIQQNSIMNTPVYPVPKPDGKWRMVLDYREVNKTIPLIAAQNQHSAGILSSIFRGKYKTTLDLSNGFWAHSITPESYWLTAFTWLGQQYCWTRLPQGFLNSPALFTADVVDLLKEVPNVQVYVDDIYISHDDPREHLEQLEKVFSLLLNAGYVVSLKKSEIAQHEVEFLGFNITKEGRGLTETFKQKLLNITPPRDLKQLQSILGLLNFARNFIPNFSELVKPLYNIIATANGKYITWTTDNSQQLQNIISMLNSAENLEERNPEVRLIMKVNTSPSAGYIRFYNEFAKRPIMYLNYVYTKAEVKFTNTEKLLTTIHKGLIKALDLGMGQEILVYSPIVSMTKIQKTPLPERKALPIRWITWMSYLEDPRIQFHYDKTLPELQQVPTVTDDIIAKIKHPSEFSMVFYTDGSAIKHPNVNKSHNAGMGIAQVQFKPEFTVINTWSIPLGDHTAQLAEVAAVEFACKKALKIDGPVLIVTDSFYVAESVNKELPYWQSNGFFNNKKKPLKHVSKWKSIADCIQLKPDIIIIHEKGHQPTASTFHTEGNNLADKLATQGSYVVNAGKRTADGSEFEKRTADGSEFESPKKKAKVE

SEQ ID NO: 6162 - protein, 2096 aa, synthetic construct
MPAAKRVKLDGGDKKYSIGLDIGTNSVGWAVITDEYKVPSKKFKVLGNTDRHSIKKNLIGALLFDSGETAEATRLKRTARRRYTRRKNRICYLQEIFSNEMAKVDDSFFHRLEESFLVEEDKKHERHPIFGNIVDEVAYHEKYPTIYHLRKKLVDSTDKADLRLIYLALAHMIKFRGHFLIEGDLNPDNSDVDKLFIQLVQTYNQLFEENPINASGVDAKAILSARLSKSRRLENLIAQLPGEKKNGLFGNLIALSLGLTPNFKSNFDLAEDAKLQLSKDTYDDDLDNLLAQIGDQYADLFLAAKNLSDAILLSDILRVNTEITKAPLSASMIKRYDEHHQDLTLLKALVRQQLPEKYKEIFFDQSKNGYAGYIDGGASQEEFYKFIKPILEKMDGTEELLVKLNREDLLRKQRTFDNGSIPHQIHLGELHAILRRQEDFYPFLKDNREKIEKILTFRIPYYVGPLARGNSRFAWMTRKSEETITPWNFEEVVDKGASAQSFIERMTNFDKNLPNEKVLPKHSLLYEYFTVYNELTKVKYVTEGMRKPAFLSGEQKKAIVDLLFKTNRKVTVKQLKEDYFKKIECFDSVEISGVEDRFNASLGTYHDLLKIIKDKDFLDNEENEDILEDIVLTLTLFEDREMIEERLKTYAHLFDDKVMKQLKRRRYTGWGRLSRKLINGIRDKQSGKTILDFLKSDGFANRNFMQLIHDDSLTFKEDIQKAQVSGQGDSLHEHIANLAGSPAIKKGILQTVKVVDELVKVMGRHKPENIVIEMARENQTTQKGQKNSRERMKRIEEGIKELGSQILKEHPVENTQLQNEKLYLYYLQNGRDMYVDQELDINRLSDYDVDHIVPQSFLKDDSIDNKVLTRSDKARGKSDNVPSEEVVKKMKNYWRQLLNAKLITQRKFDNLTKAERGGLSELDKAGFIKRQLVETRQITKHVAQILDSRMNTKYDENDKLIREVKVITLKSKLVSDFRKDFQFYKVREINNYHHAHDAYLNAVVGTALIKKYPKLESEFVYGDYKVYDVRKMIAKSEQEIGKATAKYFFYSNIMNFFKTEITLANGEIRKRPLIETNGETGEIVWDKGRDFATVRKVLSMPQVNIVKKTEVQTGGFSKESILPKRNSDKLIARKKDWDPKKYGGFDSPTVAYSVLVVAKVEKGKSKKLKSVKELLGITIMERSSFEKNPIDFLEAKGYKEVKKDLIIKLPKYSLFELENGRKRMLASAGELQKGNELALPSKYVNFLYLASHYEKLKGSPEDNEQKQLFVEQHKHYLDEIIEQISEFSKRVILADANLDKVLSAYNKHRDKPIREQAENIIHLFTLTNLGAPAAFKYFDTTIDRKRYTSTKEVLDATLIHQSITGLYETRIDLSQLGGDGGGGGGSGGGGSGGGGSGGGGSGGIPWLMKKPLQLTTLVPLQEYEERLLKQTMLTGSYKEKLQSLFLKYDALWQHWENQVGHRRIKPHHIATGTVNPRPQKQYPINPKAKASIQTVINDLLKQGVLIQQNSIMNTPVYPVPKPDGKWRMVLDYREVNKTIPLIAAQNQHSAGILSSIFRGKYKTTLDLSNGFWAHSITPESYWLTAFTWLGQQYCWTRLPQGFLNSPALFNADVVDLLKEVPNVQVYVDDIYISHDDPREHLEQLEKVFSLLLNAGYVVSLKKSEIAQHEVEFLGFNITKEGRGLTETFKQKLLNITPPRDLKQLQSILGKLNFARNFIPNFSELVKPLYNIIATAPGKYITWTTDNSQQLQNIISMLNSAENLEERNPEVRLIMKVNTSPSAGYIRFYNEFAKRPIMYLNYVYTKAEVKFTNTEKLLTTIHKGLIKALDLGMGQEILVYSPIVSMTKIQKTPLPERKALPIRWITWMSYLEDPRIQFHYDKTLPELQQVPTVTDDIIAKIKHPSEFSMVFYTDGSAIKHPNVNKSHNAGMGIAQVQFKPEFTVINTWSIPLGDHTAQLAEVAAVEFACKKALKIDGPVLIVTDSFYVAESVNKELPYWQSNGFFNNKKKPLKHVSKWKSIADCIQLKPDIIIIHEKGHQPTASTFHTEGNNLADKLATQGSYVVNAGKRTADGSEFEKRTADGSEFESPKKKAKVE

SEQ ID NO: 6163 - protein, 2103 aa, synthetic construct
MPAAKRVKLDGGDKKYSIGLDIGTNSVGWAVITDEYKVPSKKFKVLGNTDRHSIKKNLIGALLFDSGETAEATRLKRTARRRYTRRKNRICYLQEIFSNEMAKVDDSFFHRLEESFLVEEDKKHERHPIFGNIVDEVAYHEKYPTIYHLRKKLVDSTDKADLRLIYLALAHMIKFRGHFLIEGDLNPDNSDVDKLFIQLVQTYNQLFEENPINASGVDAKAILSARLSKSRRLENLIAQLPGEKKNGLFGNLIALSLGLTPNFKSNFDLAEDAKLQLSKDTYDDDLDNLLAQIGDQYADLFLAAKNLSDAILLSDILRVNTEITKAPLSASMIKRYDEHHQDLTLLKALVRQQLPEKYKEIFFDQSKNGYAGYIDGGASQEEFYKFIKPILEKMDGTEELLVKLNREDLLRKQRTFDNGSIPHQIHLGELHAILRRQEDFYPFLKDNREKIEKILTFRIPYYVGPLARGNSRFAWMTRKSEETITPWNFEEVVDKGASAQSFIERMTNFDKNLPNEKVLPKHSLLYEYFTVYNELTKVKYVTEGMRKPAFLSGEQKKAIVDLLFKTNRKVTVKQLKEDYFKKIECFDSVEISGVEDRFNASLGTYHDLLKIIKDKDFLDNEENEDILEDIVLTLTLFEDREMIEERLKTYAHLFDDKVMKQLKRRRYTGWGRLSRKLINGIRDKQSGKTILDFLKSDGFANRNFMQLIHDDSLTFKEDIQKAQVSGQGDSLHEHIANLAGSPAIKKGILQTVKVVDELVKVMGRHKPENIVIEMARENQTTQKGQKNSRERMKRIEEGIKELGSQILKEHPVENTQLQNEKLYLYYLQNGRDMYVDQELDINRLSDYDVDHIVPQSFLKDDSIDNKVLTRSDKARGKSDNVPSEEVVKKMKNYWRQLLNAKLITQRKFDNLTKAERGGLSELDKAGFIKRQLVETRQITKHVAQILDSRMNTKYDENDKLIREVKVITLKSKLVSDFRKDFQFYKVREINNYHHAHDAYLNAVVGTALIKKYPKLESEFVYGDYKVYDVRKMIAKSEQEIGKATAKYFFYSNIMNFFKTEITLANGEIRKRPLIETNGETGEIVWDKGRDFATVRKVLSMPQVNIVKKTEVQTGGFSKESILPKRNSDKLIARKKDWDPKKYGGFDSPTVAYSVLVVAKVEKGKSKKLKSVKELLGITIMERSSFEKNPIDFLEAKGYKEVKKDLIIKLPKYSLFELENGRKRMLASAGELQKGNELALPSKYVNFLYLASHYEKLKGSPEDNEQKQLFVEQHKHYLDEIIEQISEFSKRVILADANLDKVLSAYNKHRDKPIREQAENIIHLFTLTNLGAPAAFKYFDTTIDRKRYTSTKEVLDATLIHQSITGLYETRIDLSQLGGDGGGGGGSGGGGSGGGGSGGGGSGGVLNLEEEYRLHEKPVPSSIDPSWLQLFPTVWAERAGMGLANQVPPVVVELRSGASPVAVRQYPMSKEAREGIRPHIQRFLDLGVLVPCQSPWNTPLLPVKKPGTNDYRPVQDLREINKRVQDIHPTVPNPYNLLSSLPPSHTWYSVLDLKDAFFCLKLHPNSQPLFAFEWRDPEKGNTGQLTWTRLPQGFKNSPTLFNEALHRDLAPFRALNPQVVLLQYVDDLLVAAPTYRDCKEGTQKLLQELSKLGYRVSAKKAQLCQKEVTYLGYLLKEGKRWLTPARKATVMKIPPPTTPRQVREFLGKAGFCRLFIPGFASLAAPLYPLTKPSIPFIWTEEHQKAFDRIKEALLSAPALALPDLTKPFTLYVDERAGVARGVLTQTLGPWRRPVAYLSKKLDPVASGWPTCLKAVAAVALLLKDADKLTLGQNVTVIASHSLESIVRQPPDRWMTNARMTHYQSLLLNERVSFAPPAVLNPATLLPVESEATPVHRCSEILAEETGTRRDLKDQPLPGVPAWYTDGSSFIAEGKRRAGAAIVDGKRTVWASSLPEGTSAQKAELVALTQALRLAEGKDINIYTDSRYAFATAHIHGAIYKQRGWLTSAGKDIKNKEEILALLEAIHLPKRVAIIHCPGHQKGNDPVATGNRRADEAAKQAALSTRVLAETTKPAGKRTADGSEFEKRTADGSEFESPKKKAKVE

SEQ ID NO: 6164 - protein, 2112 aa, synthetic construct
MPAAKRVKLDGGDKKYSIGLDIGTNSVGWAVITDEYKVPSKKFKVLGNTDRHSIKKNLIGALLFDSGETAEATRLKRTARRRYTRRKNRICYLQEIFSNEMAKVDDSFFHRLEESFLVEEDKKHERHPIFGNIVDEVAYHEKYPTIYHLRKKLVDSTDKADLRLIYLALAHMIKFRGHFLIEGDLNPDNSDVDKLFIQLVQTYNQLFEENPINASGVDAKAILSARLSKSRRLENLIAQLPGEKKNGLFGNLIALSLGLTPNFKSNFDLAEDAKLQLSKDTYDDDLDNLLAQIGDQYADLFLAAKNLSDAILLSDILRVNTEITKAPLSASMIKRYDEHHQDLTLLKALVRQQLPEKYKEIFFDQSKNGYAGYIDGGASQEEFYKFIKPILEKMDGTEELLVKLNREDLLRKQRTFDNGSIPHQIHLGELHAILRRQEDFYPFLKDNREKIEKILTFRIPYYVGPLARGNSRFAWMTRKSEETITPWNFEEVVDKGASAQSFIERMTNFDKNLPNEKVLPKHSLLYEYFTVYNELTKVKYVTEGMRKPAFLSGEQKKAIVDLLFKTNRKVTVKQLKEDYFKKIECFDSVEISGVEDRFNASLGTYHDLLKIIKDKDFLDNEENEDILEDIVLTLTLFEDREMIEERLKTYAHLFDDKVMKQLKRRRYTGWGRLSRKLINGIRDKQSGKTILDFLKSDGFANRNFMQLIHDDSLTFKEDIQKAQVSGQGDSLHEHIANLAGSPAIKKGILQTVKVVDELVKVMGRHKPENIVIEMARENQTTQKGQKNSRERMKRIEEGIKELGSQILKEHPVENTQLQNEKLYLYYLQNGRDMYVDQELDINRLSDYDVDHIVPQSFLKDDSIDNKVLTRSDKARGKSDNVPSEEVVKKMKNYWRQLLNAKLITQRKFDNLTKAERGGLSELDKAGFIKRQLVETRQITKHVAQILDSRMNTKYDENDKLIREVKVITLKSKLVSDFRKDFQFYKVREINNYHHAHDAYLNAVVGTALIKKYPKLESEFVYGDYKVYDVRKMIAKSEQEIGKATAKYFFYSNIMNFFKTEITLANGEIRKRPLIETNGETGEIVWDKGRDFATVRKVLSMPQVNIVKKTEVQTGGFSKESILPKRNSDKLIARKKDWDPKKYGGFDSPTVAYSVLVVAKVEKGKSKKLKSVKELLGITIMERSSFEKNPIDFLEAKGYKEVKKDLIIKLPKYSLFELENGRKRMLASAGELQKGNELALPSKYVNFLYLASHYEKLKGSPEDNEQKQLFVEQHKHYLDEIIEQISEFSKRVILADANLDKVLSAYNKHRDKPIREQAENIIHLFTLTNLGAPAAFKYFDTTIDRKRYTSTKEVLDATLIHQSITGLYETRIDLSQLGGDGGGGGGSGGGGSGGGGSGGGGSGGGGSGGTAPLEEEYRLFLEAPIQNVTLLEQWKREIPKVWAEINPPGLASTQAPIHVQLLSTALPVRVRQYPITLEAKRSLRETIRKFRAAGILRPVHSPWNTPLLPVRKSGTSEYRMVQDLREVNKRVETIHPTVPNPYTLLSLLPPDRIWYSVLDLKDAFFCIPLAPESQLIFAFEWADAEEGESGQLTWTRLPQGFKNSPTLFNEALNRDLQGFRLDHPSVSLLQYVDDLLIAADTQAACLSATRDLLMTLAELGYRVSGKKAQLCQEEVTYLGFKIHKGSRSLSNSRTQAILQIPVPKTKRQVREFLGTIGYCRLWIPGFAELAQPLYAATRPGNDPLVWGEKEEEAFQSLKLALTQPPALALPSLDKPFQLFVEETSGAAKGVLTQALGPWKRPVAYLSKRLDPVAAGWPRCLRAIAAAALLTREASKLTFGQDIEITSSHNLESLLRSPPDKWLTNARITQYQVLLLDPPRVRFKQTAALNPATLLPETDDTLPIHHCLDTLDSLTSTRPDLTDQPLAQAEATLFTDGSSYIRDGKRYAGAAVVTLDSVIWAEPLPIGTSAQKAELIALTKALEWSKDKSVNIYTDSRYAFATLHVHGMIYRERGWLTAGGKAIKNAPEILALLTAVWLPKRVAVMHCKGHQKDDAPTSTGNRRADEVAREVAIRPLSTQATISAGKRTADGSEFEKRTADGSEFESPKKKAKVE

SEQ ID NO: 6165 - protein, 2112 aa, synthetic construct
MPAAKRVKLDGGDKKYSIGLDIGTNSVGWAVITDEYKVPSKKFKVLGNTDRHSIKKNLIGALLFDSGETAEATRLKRTARRRYTRRKNRICYLQEIFSNEMAKVDDSFFHRLEESFLVEEDKKHERHPIFGNIVDEVAYHEKYPTIYHLRKKLVDSTDKADLRLIYLALAHMIKFRGHFLIEGDLNPDNSDVDKLFIQLVQTYNQLFEENPINASGVDAKAILSARLSKSRRLENLIAQLPGEKKNGLFGNLIALSLGLTPNFKSNFDLAEDAKLQLSKDTYDDDLDNLLAQIGDQYADLFLAAKNLSDAILLSDILRVNTEITKAPLSASMIKRYDEHHQDLTLLKALVRQQLPEKYKEIFFDQSKNGYAGYIDGGASQEEFYKFIKPILEKMDGTEELLVKLNREDLLRKQRTFDNGSIPHQIHLGELHAILRRQEDFYPFLKDNREKIEKILTFRIPYYVGPLARGNSRFAWMTRKSEETITPWNFEEVVDKGASAQSFIERMTNFDKNLPNEKVLPKHSLLYEYFTVYNELTKVKYVTEGMRKPAFLSGEQKKAIVDLLFKTNRKVTVKQLKEDYFKKIECFDSVEISGVEDRFNASLGTYHDLLKIIKDKDFLDNEENEDILEDIVLTLTLFEDREMIEERLKTYAHLFDDKVMKQLKRRRYTGWGRLSRKLINGIRDKQSGKTILDFLKSDGFANRNFMQLIHDDSLTFKEDIQKAQVSGQGDSLHEHIANLAGSPAIKKGILQTVKVVDELVKVMGRHKPENIVIEMARENQTTQKGQKNSRERMKRIEEGIKELGSQILKEHPVENTQLQNEKLYLYYLQNGRDMYVDQELDINRLSDYDVDHIVPQSFLKDDSIDNKVLTRSDKARGKSDNVPSEEVVKKMKNYWRQLLNAKLITQRKFDNLTKAERGGLSELDKAGFIKRQLVETRQITKHVAQILDSRMNTKYDENDKLIREVKVITLKSKLVSDFRKDFQFYKVREINNYHHAHDAYLNAVVGTALIKKYPKLESEFVYGDYKVYDVRKMIAKSEQEIGKATAKYFFYSNIMNFFKTEITLANGEIRKRPLIETNGETGEIVWDKGRDFATVRKVLSMPQVNIVKKTEVQTGGFSKESILPKRNSDKLIARKKDWDPKKYGGFDSPTVAYSVLVVAKVEKGKSKKLKSVKELLGITIMERSSFEKNPIDFLEAKGYKEVKKDLIIKLPKYSLFELENGRKRMLASAGELQKGNELALPSKYVNFLYLASHYEKLKGSPEDNEQKQLFVEQHKHYLDEIIEQISEFSKRVILADANLDKVLSAYNKHRDKPIREQAENIIHLFTLTNLGAPAAFKYFDTTIDRKRYTSTKEVLDATLIHQSITGLYETRIDLSQLGGDGGGGGGSGGGGSGGGGSGGGGSGGGGSGGTAPLEEEYRLFLEAPIQNVTLLEQWKREIPKVWAEINPPGLASTQAPIHVQLLSTALPVRVRQYPITLEAKRSLRETIRKFRAAGILRPVHSPWNTPLLPVRKSGTSEYRMVQDLREVNKRVETIHPTVPNPYTLLSLLPPDRIWYSVLDLKDAFFCIPLAPESQLIFAFEWADAEEGESGQLTWTRLPQGFKNSPTLFNEALNRDLQGFRLDHPSVSLLQYVDDLLIAADTQAACLSATRDLLMTLAELGYRVSGKKAQLCQEEVTYLGFKIHKGSRSLSNSRTQAILQIPVPKTKRQVREFLGKIGYCRLFIPGFAELAQPLYAATRPGNDPLVWGEKEEEAFQSLKLALTQPPALALPSLDKPFQLFVEETSGAAKGVLTQALGPWKRPVAYLSKRLDPVAAGWPRCLRAIAAAALLTREASKLTFGQDIEITSSHNLESLLRSPPDKWLTNARITQYQVLLLDPPRVRFKQTAALNPATLLPETDDTLPIHHCLDTLDSLTSTRPDLTDQPLAQAEATLFTDGSSYIRDGKRYAGAAVVTLDSVIWAEPLPIGTSAQKAELIALTKALEWSKDKSVNIYTDSRYAFATLHVHGMIYRERGWLTAGGKAIKNAPEILALLTAVWLPKRVAVMHCKGHQKDDAPTSTGNRRADEVAREVAIRPLSTQATISAGKRTADGSEFEKRTADGSEFESPKKKAKVE

SEQ ID NO: 6166 - protein, 2116 aa, synthetic construct
MPAAKRVKLDGGDKKYSIGLDIGTNSVGWAVITDEYKVPSKKFKVLGNTDRHSIKKNLIGALLFDSGETAEATRLKRTARRRYTRRKNRICYLQEIFSNEMAKVDDSFFHRLEESFLVEEDKKHERHPIFGNIVDEVAYHEKYPTIYHLRKKLVDSTDKADLRLIYLALAHMIKFRGHFLIEGDLNPDNSDVDKLFIQLVQTYNQLFEENPINASGVDAKAILSARLSKSRRLENLIAQLPGEKKNGLFGNLIALSLGLTPNFKSNFDLAEDAKLQLSKDTYDDDLDNLLAQIGDQYADLFLAAKNLSDAILLSDILRVNTEITKAPLSASMIKRYDEHHQDLTLLKALVRQQLPEKYKEIFFDQSKNGYAGYIDGGASQEEFYKFIKPILEKMDGTEELLVKLNREDLLRKQRTFDNGSIPHQIHLGELHAILRRQEDFYPFLKDNREKIEKILTFRIPYYVGPLARGNSRFAWMTRKSEETITPWNFEEVVDKGASAQSFIERMTNFDKNLPNEKVLPKHSLLYEYFTVYNELTKVKYVTEGMRKPAFLSGEQKKAIVDLLFKTNRKVTVKQLKEDYFKKIECFDSVEISGVEDRFNASLGTYHDLLKIIKDKDFLDNEENEDILEDIVLTLTLFEDREMIEERLKTYAHLFDDKVMKQLKRRRYTGWGRLSRKLINGIRDKQSGKTILDFLKSDGFANRNFMQLIHDDSLTFKEDIQKAQVSGQGDSLHEHIANLAGSPAIKKGILQTVKVVDELVKVMGRHKPENIVIEMARENQTTQKGQKNSRERMKRIEEGIKELGSQILKEHPVENTQLQNEKLYLYYLQNGRDMYVDQELDINRLSDYDVDHIVPQSFLKDDSIDNKVLTRSDKARGKSDNVPSEEVVKKMKNYWRQLLNAKLITQRKFDNLTKAERGGLSELDKAGFIKRQLVETRQITKHVAQILDSRMNTKYDENDKLIREVKVITLKSKLVSDFRKDFQFYKVREINNYHHAHDAYLNAVVGTALIKKYPKLESEFVYGDYKVYDVRKMIAKSEQEIGKATAKYFFYSNIMNFFKTEITLANGEIRKRPLIETNGETGEIVWDKGRDFATVRKVLSMPQVNIVKKTEVQTGGFSKESILPKRNSDKLIARKKDWDPKKYGGFDSPTVAYSVLVVAKVEKGKSKKLKSVKELLGITIMERSSFEKNPIDFLEAKGYKEVKKDLIIKLPKYSLFELENGRKRMLASAGELQKGNELALPSKYVNFLYLASHYEKLKGSPEDNEQKQLFVEQHKHYLDEIIEQISEFSKRVILADANLDKVLSAYNKHRDKPIREQAENIIHLFTLTNLGAPAAFKYFDTTIDRKRYTSTKEVLDATLIHQSITGLYETRIDLSQLGGDGGGGGGSGGGGSGGGGSGGGGSGGGGSGGTVSLQDEHRLFDIPVTTSLPDVWLQDFPQAWAETGGLGRAKCQAPIIIDLKPTAVPVSIKQYPMSLEAHMGIRQHIIKFLELGVLRPCRSPWNTPLLPVKKPGTQDYRPVQDLREINKRTVDIHPTVPNPYNLLSTLKPDYSWYTVLDLKDAFFCLPLAPQSQELFAFEWKDPERGISGQLTWTRLPQGFKNSPTLFDEALHRDLTDFRTQHPEVTLLQYVDDLLLAAPTKKACTQGTRHLLQELGEKGYRASAKKAQICQTKVTYLGYILSEGKRWLTPGRIETVARIPPPRNPREVREFLGTAGFCRLWIPGFAELAAPLYALTKESTPFTWQTEHQLAFEALKKALLSAPALGLPDTSKPFTLFLDERQGIAKGVLTQKLGPWKRPVAYLSKKLDPVAAGWPPCLRIMAATAMLVKDSAKLTLGQPLTVITPHTLEAIVRQPPDRWITNARLTHYQALLLDTDRVQFGPPVTLNPATLLPVPENQPSPHDCRQVLAETHGTREDLKDQELPDADHTWYTDGSSYLDSGTRRAGAAVVDGHNTIWAQSLPPGTSAQKAELIALTKALELSKGKKANIYTDSRYAFATAHTHGSIYERRGLLTSEGKEIKNKAEIIALLKALFLPQEVAIIHCPGHQKGQDPVAVGNRQADRVARQAAMAEVLTLATEPDNTSHITAGKRTADGSEFEKRTADGSEFESPKKKAKVE

SEQ ID NO: 6167 - protein, 2015 aa, synthetic construct
MPAAKRVKLDGGDKKYSIGLDIGTNSVGWAVITDEYKVPSKKFKVLGNTDRHSIKKNLIGALLFDSGETAEATRLKRTARRRYTRRKNRICYLQEIFSNEMAKVDDSFFHRLEESFLVEEDKKHERHPIFGNIVDEVAYHEKYPTIYHLRKKLVDSTDKADLRLIYLALAHMIKFRGHFLIEGDLNPDNSDVDKLFIQLVQTYNQLFEENPINASGVDAKAILSARLSKSRRLENLIAQLPGEKKNGLFGNLIALSLGLTPNFKSNFDLAEDAKLQLSKDTYDDDLDNLLAQIGDQYADLFLAAKNLSDAILLSDILRVNTEITKAPLSASMIKRYDEHHQDLTLLKALVRQQLPEKYKEIFFDQSKNGYAGYIDGGASQEEFYKFIKPILEKMDGTEELLVKLNREDLLRKQRTFDNGSIPHQIHLGELHAILRRQEDFYPFLKDNREKIEKILTFRIPYYVGPLARGNSRFAWMTRKSEETITPWNFEEVVDKGASAQSFIERMTNFDKNLPNEKVLPKHSLLYEYFTVYNELTKVKYVTEGMRKPAFLSGEQKKAIVDLLFKTNRKVTVKQLKEDYFKKIECFDSVEISGVEDRFNASLGTYHDLLKIIKDKDFLDNEENEDILEDIVLTLTLFEDREMIEERLKTYAHLFDDKVMKQLKRRRYTGWGRLSRKLINGIRDKQSGKTILDFLKSDGFANRNFMQLIHDDSLTFKEDIQKAQVSGQGDSLHEHIANLAGSPAIKKGILQTVKVVDELVKVMGRHKPENIVIEMARENQTTQKGQKNSRERMKRIEEGIKELGSQILKEHPVENTQLQNEKLYLYYLQNGRDMYVDQELDINRLSDYDVDHIVPQSFLKDDSIDNKVLTRSDKARGKSDNVPSEEVVKKMKNYWRQLLNAKLITQRKFDNLTKAERGGLSELDKAGFIKRQLVETRQITKHVAQILDSRMNTKYDENDKLIREVKVITLKSKLVSDFRKDFQFYKVREINNYHHAHDAYLNAVVGTALIKKYPKLESEFVYGDYKVYDVRKMIAKSEQEIGKATAKYFFYSNIMNFFKTEITLANGEIRKRPLIETNGETGEIVWDKGRDFATVRKVLSMPQVNIVKKTEVQTGGFSKESILPKRNSDKLIARKKDWDPKKYGGFDSPTVAYSVLVVAKVEKGKSKKLKSVKELLGITIMERSSFEKNPIDFLEAKGYKEVKKDLIIKLPKYSLFELENGRKRMLASAGELQKGNELALPSKYVNFLYLASHYEKLKGSPEDNEQKQLFVEQHKHYLDEIIEQISEFSKRVILADANLDKVLSAYNKHRDKPIREQAENIIHLFTLTNLGAPAAFKYFDTTIDRKRYTSTKEVLDATLIHQSITGLYETRIDLSQLGGDGGGGGGSGGGGSGGGGSGGGGSGGGGSGGGVLDAPPSHIGLEHLPPPPEVPQFPLNLERLQALQDLVHRSLEAGYISPWDGPGNNPVFPVRKPNGAWRFVHDLRVTNALTKPIPALSPGPPDLTAIPTHLPHIICLDLKDAFFQIPVEDRFRSYFAFTLPTPGGLQPHRRFAWRVLPQGFINSPALFQRALQEPLRQVSAAFSQSLLVSYMDDILYVSPTEEQRLQCYQTMAAHLRDLGFQVASEKTRQTPSPVPFLGQMVHERMVTYQSLPTLQISSPISLHQLQTVLGDLQWVSRGTPTTRRPLQLLYSSLKPIDDPRAIIHLSPEQQQGIAELRQALSHNARSRYNEQEPLLAYVHLTRAGSTLVLFQKGAQFPLAYFQTPLTDNQASPWGLLLLLGCQYLQAQALSSYAKTILKYYHNLPKTSLDNWIQSSEDPRVQELLQLWPQISSQGIQPPGPWKTLVTRAEVFLTPQFSPEPIPAALCLFSDGAARRGAYCLWKDHLLDFQAVPAPESAQKGELAGLLAGLAAAPPEPLNIWVDSKYLYSLLRTLVLGAWLQPDPVPSYALLYKSLLRHPAIFVGHVRSHSSASHPIASLNNYVDQLAGKRTADGSEFEKRTADGSEFESPKKKAKVE

SEQ ID NO: 6168 - protein, 2187 aa, synthetic construct
MPAAKRVKLDGGDKKYSIGLDIGTNSVGWAVITDEYKVPSKKFKVLGNTDRHSIKKNLIGALLFDSGETAEATRLKRTARRRYTRRKNRICYLQEIFSNEMAKVDDSFFHRLEESFLVEEDKKHERHPIFGNIVDEVAYHEKYPTIYHLRKKLVDSTDKADLRLIYLALAHMIKFRGHFLIEGDLNPDNSDVDKLFIQLVQTYNQLFEENPINASGVDAKAILSARLSKSRRLENLIAQLPGEKKNGLFGNLIALSLGLTPNFKSNFDLAEDAKLQLSKDTYDDDLDNLLAQIGDQYADLFLAAKNLSDAILLSDILRVNTEITKAPLSASMIKRYDEHHQDLTLLKALVRQQLPEKYKEIFFDQSKNGYAGYIDGGASQEEFYKFIKPILEKMDGTEELLVKLNREDLLRKQRTFDNGSIPHQIHLGELHAILRRQEDFYPFLKDNREKIEKILTFRIPYYVGPLARGNSRFAWMTRKSEETITPWNFEEVVDKGASAQSFIERMTNFDKNLPNEKVLPKHSLLYEYFTVYNELTKVKYVTEGMRKPAFLSGEQKKAIVDLLFKTNRKVTVKQLKEDYFKKIECFDSVEISGVEDRFNASLGTYHDLLKIIKDKDFLDNEENEDILEDIVLTLTLFEDREMIEERLKTYAHLFDDKVMKQLKRRRYTGWGRLSRKLINGIRDKQSGKTILDFLKSDGFANRNFMQLIHDDSLTFKEDIQKAQVSGQGDSLHEHIANLAGSPAIKKGILQTVKVVDELVKVMGRHKPENIVIEMARENQTTQKGQKNSRERMKRIEEGIKELGSQILKEHPVENTQLQNEKLYLYYLQNGRDMYVDQELDINRLSDYDVDHIVPQSFLKDDSIDNKVLTRSDKARGKSDNVPSEEVVKKMKNYWRQLLNAKLITQRKFDNLTKAERGGLSELDKAGFIKRQLVETRQITKHVAQILDSRMNTKYDENDKLIREVKVITLKSKLVSDFRKDFQFYKVREINNYHHAHDAYLNAVVGTALIKKYPKLESEFVYGDYKVYDVRKMIAKSEQEIGKATAKYFFYSNIMNFFKTEITLANGEIRKRPLIETNGETGEIVWDKGRDFATVRKVLSMPQVNIVKKTEVQTGGFSKESILPKRNSDKLIARKKDWDPKKYGGFDSPTVAYSVLVVAKVEKGKSKKLKSVKELLGITIMERSSFEKNPIDFLEAKGYKEVKKDLIIKLPKYSLFELENGRKRMLASAGELQKGNELALPSKYVNFLYLASHYEKLKGSPEDNEQKQLFVEQHKHYLDEIIEQISEFSKRVILADANLDKVLSAYNKHRDKPIREQAENIIHLFTLTNLGAPAAFKYFDTTIDRKRYTSTKEVLDATLIHQSITGLYETRIDLSQLGGDGGGGGGSGGGGSGGGGSGGGGSGGGGSGGMDLLKPLTVERKGVKIKGYWNSQADITCVPKDLLQGEEPVRQQNVTTIHGTQEGDVYYVNLKIDGRRINTEVIGTTLDYAIITPGDVPWILKKPLELTIKLDLEEQQGTLLNNSILSKKGKEELKQLFEKYSALWQSWENQVGHRRIRPHKIATGTVKPTPQKQYHINPKAKPDIQIVINDLLKQGVLIQKESTMNTPVYPVPKPNGRWRMVLDYRAVNKVTPLIAVQNQHSYGILGSLFKGRYKTTIDLSNGFWAHPIVPEDYWITAFTWQGKQYCWTVLPQGFLNSPGLFTGDVVDLLQGIPNVEVYVDDVYISHDSEKEHLEYLDILFNRLKEAGYIISLKKSNIANSIVDFLGFQITNEGRGLTDTFKEKLENITAPTTLKQLQSILGLLNFARNFIPDFTELIAPLYALIPKSTKNYVPWQIEHSTTLETLITKLNGAEYLQGRKGDKTLIMKVNASYTTGYIRYYNEGEKKPISYVSIVFSKTELKFTELEKLLTTVHKGLLKALDLSMGQNIHVYSPIVSMQNIQKTPQTAKKALASRWLSWLSYLEDPRIRFFYDPQMPALKDLPAVDTGKDNKKHPSNFQHIFYTDGSAITSPTKEGHLNAGMGIVYFINKDGNLQKQQEWSISLGNHTAQFAEIAAFEFALKKCLPLGGNILVVTDSNYVAKAYNEELDVWASNGFVNNRKKPLKHISKWKSVADLKRLRPDVVVTHEPGHQKLDSSPHAYGNNLADQLATQASFKVHAGKRTADGSEFEKRTADGSEFESPKKKAKVE

SEQ ID NO: 6169 - protein, 2101 aa, synthetic construct
MPAAKRVKLDGGDKKYSIGLDIGTNSVGWAVITDEYKVPSKKFKVLGNTDRHSIKKNLIGALLFDSGETAEATRLKRTARRRYTRRKNRICYLQEIFSNEMAKVDDSFFHRLEESFLVEEDKKHERHPIFGNIVDEVAYHEKYPTIYHLRKKLVDSTDKADLRLIYLALAHMIKFRGHFLIEGDLNPDNSDVDKLFIQLVQTYNQLFEENPINASGVDAKAILSARLSKSRRLENLIAQLPGEKKNGLFGNLIALSLGLTPNFKSNFDLAEDAKLQLSKDTYDDDLDNLLAQIGDQYADLFLAAKNLSDAILLSDILRVNTEITKAPLSASMIKRYDEHHQDLTLLKALVRQQLPEKYKEIFFDQSKNGYAGYIDGGASQEEFYKFIKPILEKMDGTEELLVKLNREDLLRKQRTFDNGSIPHQIHLGELHAILRRQEDFYPFLKDNREKIEKILTFRIPYYVGPLARGNSRFAWMTRKSEETITPWNFEEVVDKGASAQSFIERMTNFDKNLPNEKVLPKHSLLYEYFTVYNELTKVKYVTEGMRKPAFLSGEQKKAIVDLLFKTNRKVTVKQLKEDYFKKIECFDSVEISGVEDRFNASLGTYHDLLKIIKDKDFLDNEENEDILEDIVLTLTLFEDREMIEERLKTYAHLFDDKVMKQLKRRRYTGWGRLSRKLINGIRDKQSGKTILDFLKSDGFANRNFMQLIHDDSLTFKEDIQKAQVSGQGDSLHEHIANLAGSPAIKKGILQTVKVVDELVKVMGRHKPENIVIEMARENQTTQKGQKNSRERMKRIEEGIKELGSQILKEHPVENTQLQNEKLYLYYLQNGRDMYVDQELDINRLSDYDVDHIVPQSFLKDDSIDNKVLTRSDKARGKSDNVPSEEVVKKMKNYWRQLLNAKLITQRKFDNLTKAERGGLSELDKAGFIKRQLVETRQITKHVAQILDSRMNTKYDENDKLIREVKVITLKSKLVSDFRKDFQFYKVREINNYHHAHDAYLNAVVGTALIKKYPKLESEFVYGDYKVYDVRKMIAKSEQEIGKATAKYFFYSNIMNFFKTEITLANGEIRKRPLIETNGETGEIVWDKGRDFATVRKVLSMPQVNIVKKTEVQTGGFSKESILPKRNSDKLIARKKDWDPKKYGGFDSPTVAYSVLVVAKVEKGKSKKLKSVKELLGITIMERSSFEKNPIDFLEAKGYKEVKKDLIIKLPKYSLFELENGRKRMLASAGELQKGNELALPSKYVNFLYLASHYEKLKGSPEDNEQKQLFVEQHKHYLDEIIEQISEFSKRVILADANLDKVLSAYNKHRDKPIREQAENIIHLFTLTNLGAPAAFKYFDTTIDRKRYTSTKEVLDATLIHQSITGLYETRIDLSQLGGDGGGGGGSGGGGSGGGGSGGGGSGGGGSGGVPWILKKPLELTIKLDLEEQQGTLLNNSILSKKGKEELKQLFEKYSALWQSWENQVGHRRIRPHKIATGTVKPTPQKQYHINPKAKPDIQIVINDLLKQGVLIQKESTMNTPVYPVPKPNGRWRMVLDYRAVNKVTPLIAVQNQHSYGILGSLFKGRYKTTIDLSNGFWAHPIVPEDYWITAFTWQGKQYCWTVLPQGFLNSPGLFTGDVVDLLQGIPNVEVYVDDVYISHDSEKEHLEYLDILFNRLKEAGYIISLKKSNIANSIVDFLGFQITNEGRGLTDTFKEKLENITAPTTLKQLQSILGLLNFARNFIPDFTELIAPLYALIPKSTKNYVPWQIEHSTTLETLITKLNGAEYLQGRKGDKTLIMKVNASYTTGYIRYYNEGEKKPISYVSIVFSKTELKFTELEKLLTTVHKGLLKALDLSMGQNIHVYSPIVSMQNIQKTPQTAKKALASRWLSWLSYLEDPRIRFFYDPQMPALKDLPAVDTGKDNKKHPSNFQHIFYTDGSAITSPTKEGHLNAGMGIVYFINKDGNLQKQQEWSISLGNHTAQFAEIAAFEFALKKCLPLGGNILVVTDSNYVAKAYNEELDVWASNGFVNNRKKPLKHISKWKSVADLKRLRPDVVVTHEPGHQKLDSSPHAYGNNLADQLATQASFKVHAGKRTADGSEFEKRTADGSEFESPKKKAKVE

SEQ ID NO: 6170 - protein, 2101 aa, synthetic construct
MPAAKRVKLDGGDKKYSIGLDIGTNSVGWAVITDEYKVPSKKFKVLGNTDRHSIKKNLIGALLFDSGETAEATRLKRTARRRYTRRKNRICYLQEIFSNEMAKVDDSFFHRLEESFLVEEDKKHERHPIFGNIVDEVAYHEKYPTIYHLRKKLVDSTDKADLRLIYLALAHMIKFRGHFLIEGDLNPDNSDVDKLFIQLVQTYNQLFEENPINASGVDAKAILSARLSKSRRLENLIAQLPGEKKNGLFGNLIALSLGLTPNFKSNFDLAEDAKLQLSKDTYDDDLDNLLAQIGDQYADLFLAAKNLSDAILLSDILRVNTEITKAPLSASMIKRYDEHHQDLTLLKALVRQQLPEKYKEIFFDQSKNGYAGYIDGGASQEEFYKFIKPILEKMDGTEELLVKLNREDLLRKQRTFDNGSIPHQIHLGELHAILRRQEDFYPFLKDNREKIEKILTFRIPYYVGPLARGNSRFAWMTRKSEETITPWNFEEVVDKGASAQSFIERMTNFDKNLPNEKVLPKHSLLYEYFTVYNELTKVKYVTEGMRKPAFLSGEQKKAIVDLLFKTNRKVTVKQLKEDYFKKIECFDSVEISGVEDRFNASLGTYHDLLKIIKDKDFLDNEENEDILEDIVLTLTLFEDREMIEERLKTYAHLFDDKVMKQLKRRRYTGWGRLSRKLINGIRDKQSGKTILDFLKSDGFANRNFMQLIHDDSLTFKEDIQKAQVSGQGDSLHEHIANLAGSPAIKKGILQTVKVVDELVKVMGRHKPENIVIEMARENQTTQKGQKNSRERMKRIEEGIKELGSQILKEHPVENTQLQNEKLYLYYLQNGRDMYVDQELDINRLSDYDVDHIVPQSFLKDDSIDNKVLTRSDKARGKSDNVPSEEVVKKMKNYWRQLLNAKLITQRKFDNLTKAERGGLSELDKAGFIKRQLVETRQITKHVAQILDSRMNTKYDENDKLIREVKVITLKSKLVSDFRKDFQFYKVREINNYHHAHDAYLNAVVGTALIKKYPKLESEFVYGDYKVYDVRKMIAKSEQEIGKATAKYFFYSNIMNFFKTEITLANGEIRKRPLIETNGETGEIVWDKGRDFATVRKVLSMPQVNIVKKTEVQTGGFSKESILPKRNSDKLIARKKDWDPKKYGGFDSPTVAYSVLVVAKVEKGKSKKLKSVKELLGITIMERSSFEKNPIDFLEAKGYKEVKKDLIIKLPKYSLFELENGRKRMLASAGELQKGNELALPSKYVNFLYLASHYEKLKGSPEDNEQKQLFVEQHKHYLDEIIEQISEFSKRVILADANLDKVLSAYNKHRDKPIREQAENIIHLFTLTNLGAPAAFKYFDTTIDRKRYTSTKEVLDATLIHQSITGLYETRIDLSQLGGDGGGGGGSGGGGSGGGGSGGGGSGGGGSGGVPWILKKPLELTIKLDLEEQQGTLLNNSILSKKGKEELKQLFEKYSALWQSWENQVGHRRIRPHKIATGTVKPTPQKQYHINPKAKPDIQIVINDLLKQGVLIQKESTMNTPVYPVPKPNGRWRMVLDYRAVNKVTPLIAVQNQHSYGILGSLFKGRYKTTIDLSNGFWAHPIVPEDYWITAFTWQGKQYCWTVLPQGFLNSPGLFNGDVVDLLQGIPNVEVYVDDVYISHDSEKEHLEYLDILFNRLKEAGYIISLKKSNIANSIVDFLGFQITNEGRGLTDTFKEKLENITAPTTLKQLQSILGLLNFARNFIPDFTELIAPLYALIPKSPKNYVPWQIEHSTTLETLITKLNGAEYLQGRKGDKTLIMKVNASYTTGYIRYYNEGEKKPISYVSIVFSKTELKFTELEKLLTTVHKGLLKALDLSMGQNIHVYSPIVSMQNIQKTPQTAKKALASRWLSWLSYLEDPRIRFFYDPQMPALKDLPAVDTGKDNKKHPSNFQHIFYTDGSAITSPTKEGHLNAGMGIVYFINKDGNLQKQQEWSISLGNHTAQFAEIAAFEFALKKCLPLGGNILVVTDSNYVAKAYNEELDVWASNGFVNNRKKPLKHISKWKSVADLKRLRPDVVVTHEPGHQKLDSSPHAYGNNLADQLATQASFKVHAGKRTADGSEFEKRTADGSEFESPKKKAKVE

SEQ ID NO: 6171 - protein, 2109 aa, synthetic construct
MPAAKRVKLDGGDKKYSIGLDIGTNSVGWAVITDEYKVPSKKFKVLGNTDRHSIKKNLIGALLFDSGETAEATRLKRTARRRYTRRKNRICYLQEIFSNEMAKVDDSFFHRLEESFLVEEDKKHERHPIFGNIVDEVAYHEKYPTIYHLRKKLVDSTDKADLRLIYLALAHMIKFRGHFLIEGDLNPDNSDVDKLFIQLVQTYNQLFEENPINASGVDAKAILSARLSKSRRLENLIAQLPGEKKNGLFGNLIALSLGLTPNFKSNFDLAEDAKLQLSKDTYDDDLDNLLAQIGDQYADLFLAAKNLSDAILLSDILRVNTEITKAPLSASMIKRYDEHHQDLTLLKALVRQQLPEKYKEIFFDQSKNGYAGYIDGGASQEEFYKFIKPILEKMDGTEELLVKLNREDLLRKQRTFDNGSIPHQIHLGELHAILRRQEDFYPFLKDNREKIEKILTFRIPYYVGPLARGNSRFAWMTRKSEETITPWNFEEVVDKGASAQSFIERMTNFDKNLPNEKVLPKHSLLYEYFTVYNELTKVKYVTEGMRKPAFLSGEQKKAIVDLLFKTNRKVTVKQLKEDYFKKIECFDSVEISGVEDRFNASLGTYHDLLKIIKDKDFLDNEENEDILEDIVLTLTLFEDREMIEERLKTYAHLFDDKVMKQLKRRRYTGWGRLSRKLINGIRDKQSGKTILDFLKSDGFANRNFMQLIHDDSLTFKEDIQKAQVSGQGDSLHEHIANLAGSPAIKKGILQTVKVVDELVKVMGRHKPENIVIEMARENQTTQKGQKNSRERMKRIEEGIKELGSQILKEHPVENTQLQNEKLYLYYLQNGRDMYVDQELDINRLSDYDVDHIVPQSFLKDDSIDNKVLTRSDKARGKSDNVPSEEVVKKMKNYWRQLLNAKLITQRKFDNLTKAERGGLSELDKAGFIKRQLVETRQITKHVAQILDSRMNTKYDENDKLIREVKVITLKSKLVSDFRKDFQFYKVREINNYHHAHDAYLNAVVGTALIKKYPKLESEFVYGDYKVYDVRKMIAKSEQEIGKATAKYFFYSNIMNFFKTEITLANGEIRKRPLIETNGETGEIVWDKGRDFATVRKVLSMPQVNIVKKTEVQTGGFSKESILPKRNSDKLIARKKDWDPKKYGGFDSPTVAYSVLVVAKVEKGKSKKLKSVKELLGITIMERSSFEKNPIDFLEAKGYKEVKKDLIIKLPKYSLFELENGRKRMLASAGELQKGNELALPSKYVNFLYLASHYEKLKGSPEDNEQKQLFVEQHKHYLDEIIEQISEFSKRVILADANLDKVLSAYNKHRDKPIREQAENIIHLFTLTNLGAPAAFKYFDTTIDRKRYTSTKEVLDATLIHQSITGLYETRIDLSQLGGDGGGGGGSGGGGSGGGGSGGGGSGGGGSGGTLQLEEEYRLFEPESTQKQEMDIWLKNFPQAWAETGGMGTAHCQAPVLIQLKATATPISIRQYPMPHEAYQGIKPHIRRMLDQGILKPCQSPWNTPLLPVKKPGTEDYRPVQDLREVNKRVEDIHPTVPNPYNLLSTLPPSHPWYTVLDLKDAFFCLRLHSESQLLFAFEWRDPEIGLSGQLTWTRLPQGFKNSPTLFNEALHSDLADFRVRYPALVLLQYVDDLLLAAATRTECLEGTKALLETLGNKGYRASAKKAQICLQEVTYLGYSLKDGQRWLTKARKEAILSIPVPKNSRQVREFLGTAGYCRLWIPGFAELAAPLYPLTRPGTLFQWGTEQQLAFEDIKKALLSSPALGLPDITKPFELFIDENSGFAKGVLVQKLGPWKRPVAYLSKKLDTVASGWPPCLRMVAAIAILVKDAGKLTLGQPLTILTSHPVEALVRQPPNKWLSNARMTHYQAMLLDAERVHFGPTVSLNPATLLPLPSGGNHHDCLQILAETHGTRPDLTDQPLPDADLTWYTDGSSFIRNGEREAGAAVTTESEVIWAAPLPPGTSAQRAELIALTQALKMAEGKKLTVYTDSRYAFATTHVHGEIYRRRGWLTSEGKEIKNKNEILALLEALFLPKRLSIIHCPGHQKGDSPQAKGNRLADDTAKKAATETHSSLTVLPAGKRTADGSEFEKRTADGSEFESPKKKAKVE

SEQ ID NO: 6172 - protein, 2108 aa, synthetic construct
MPAAKRVKLDGGDKKYSIGLDIGTNSVGWAVITDEYKVPSKKFKVLGNTDRHSIKKNLIGALLFDSGETAEATRLKRTARRRYTRRKNRICYLQEIFSNEMAKVDDSFFHRLEESFLVEEDKKHERHPIFGNIVDEVAYHEKYPTIYHLRKKLVDSTDKADLRLIYLALAHMIKFRGHFLIEGDLNPDNSDVDKLFIQLVQTYNQLFEENPINASGVDAKAILSARLSKSRRLENLIAQLPGEKKNGLFGNLIALSLGLTPNFKSNFDLAEDAKLQLSKDTYDDDLDNLLAQIGDQYADLFLAAKNLSDAILLSDILRVNTEITKAPLSASMIKRYDEHHQDLTLLKALVRQQLPEKYKEIFFDQSKNGYAGYIDGGASQEEFYKFIKPILEKMDGTEELLVKLNREDLLRKQRTFDNGSIPHQIHLGELHAILRRQEDFYPFLKDNREKIEKILTFRIPYYVGPLARGNSRFAWMTRKSEETITPWNFEEVVDKGASAQSFIERMTNFDKNLPNEKVLPKHSLLYEYFTVYNELTKVKYVTEGMRKPAFLSGEQKKAIVDLLFKTNRKVTVKQLKEDYFKKIECFDSVEISGVEDRFNASLGTYHDLLKIIKDKDFLDNEENEDILEDIVLTLTLFEDREMIEERLKTYAHLFDDKVMKQLKRRRYTGWGRLSRKLINGIRDKQSGKTILDFLKSDGFANRNFMQLIHDDSLTFKEDIQKAQVSGQGDSLHEHIANLAGSPAIKKGILQTVKVVDELVKVMGRHKPENIVIEMARENQTTQKGQKNSRERMKRIEEGIKELGSQILKEHPVENTQLQNEKLYLYYLQNGRDMYVDQELDINRLSDYDVDHIVPQSFLKDDSIDNKVLTRSDKARGKSDNVPSEEVVKKMKNYWRQLLNAKLITQRKFDNLTKAERGGLSELDKAGFIKRQLVETRQITKHVAQILDSRMNTKYDENDKLIREVKVITLKSKLVSDFRKDFQFYKVREINNYHHAHDAYLNAVVGTALIKKYPKLESEFVYGDYKVYDVRKMIAKSEQEIGKATAKYFFYSNIMNFFKTEITLANGEIRKRPLIETNGETGEIVWDKGRDFATVRKVLSMPQVNIVKKTEVQTGGFSKESILPKRNSDKLIARKKDWDPKKYGGFDSPTVAYSVLVVAKVEKGKSKKLKSVKELLGITIMERSSFEKNPIDFLEAKGYKEVKKDLIIKLPKYSLFELENGRKRMLASAGELQKGNELALPSKYVNFLYLASHYEKLKGSPEDNEQKQLFVEQHKHYLDEIIEQISEFSKRVILADANLDKVLSAYNKHRDKPIREQAENIIHLFTLTNLGAPAAFKYFDTTIDRKRYTSTKEVLDATLIHQSITGLYETRIDLSQLGGDGGGGGGSGGGGSGGGGSGGGGSGGGGSGGVLNLEEEYRLHEKPVPSSIDPSWLQLFPTVWAERAGMGLANQVPPVVVELRSGASPVAVRQYPMSKEAREGIRPHIQKFLDLGVLVPCRSPWNTPLLPVKKPGTNDYRPVQDLREINKRVQDIHPTVPNPYNLLSSLPPSYTWYSVLDLKDAFFCLRLHPNSQPLFAFEWKDPEKGNTGQLTWTRLPQGFKNSPTLFNEALHRDLAPFRALNPQVVLLQYVDDLLVAAPTYEDCKKGTQKLLQELSKLGYRVSAKKAQLCQREVTYLGYLLKEGKRWLTPARKATVMKIPVPTTPRQVREFLGKAGFCRLFIPGFASLAAPLYPLTKPSIPFIWTEEHQQAFDHIKKALLSAPALALPDLTKPFTLYIDERAGVARGVLTQTLGPWRRPVAYLSKKLDPVASGWPTCLKAVAAVALLLKDADKLTLGQNVTVIASHSLESIVRQPPDRWMTNARMTHYQSLLLNERVSFAPPAVLNPATLLPVESEATPVHRCSEILAEETGTRRDLEDQPLPGVPTWYTDGSSFITEGKRRAGAPIVDGKRTVWASSLPEGTSAQKAELVALTQALRLAEGKNINIYTDSRYAFATAHIHGAIYKQRGWLTSAGKDIKNKEEILALLEAIHLPRRVAIIHCPGHQRGSNPVATGNRRADEAAKQAALSTRVLAGTTKPAGKRTADGSEFEKRTADGSEFESPKKKAKVE

SEQ ID NO: 6173 - protein, 2232 aa, synthetic construct
MPAAKRVKLDGGDKKYSIGLDIGTNSVGWAVITDEYKVPSKKFKVLGNTDRHSIKKNLIGALLFDSGETAEATRLKRTARRRYTRRKNRICYLQEIFSNEMAKVDDSFFHRLEESFLVEEDKKHERHPIFGNIVDEVAYHEKYPTIYHLRKKLVDSTDKADLRLIYLALAHMIKFRGHFLIEGDLNPDNSDVDKLFIQLVQTYNQLFEENPINASGVDAKAILSARLSKSRRLENLIAQLPGEKKNGLFGNLIALSLGLTPNFKSNFDLAEDAKLQLSKDTYDDDLDNLLAQIGDQYADLFLAAKNLSDAILLSDILRVNTEITKAPLSASMIKRYDEHHQDLTLLKALVRQQLPEKYKEIFFDQSKNGYAGYIDGGASQEEFYKFIKPILEKMDGTEELLVKLNREDLLRKQRTFDNGSIPHQIHLGELHAILRRQEDFYPFLKDNREKIEKILTFRIPYYVGPLARGNSRFAWMTRKSEETITPWNFEEVVDKGASAQSFIERMTNFDKNLPNEKVLPKHSLLYEYFTVYNELTKVKYVTEGMRKPAFLSGEQKKAIVDLLFKTNRKVTVKQLKEDYFKKIECFDSVEISGVEDRFNASLGTYHDLLKIIKDKDFLDNEENEDILEDIVLTLTLFEDREMIEERLKTYAHLFDDKVMKQLKRRRYTGWGRLSRKLINGIRDKQSGKTILDFLKSDGFANRNFMQLIHDDSLTFKEDIQKAQVSGQGDSLHEHIANLAGSPAIKKGILQTVKVVDELVKVMGRHKPENIVIEMARENQTTQKGQKNSRERMKRIEEGIKELGSQILKEHPVENTQLQNEKLYLYYLQNGRDMYVDQELDINRLSDYDVDHIVPQSFLKDDSIDNKVLTRSDKARGKSDNVPSEEVVKKMKNYWRQLLNAKLITQRKFDNLTKAERGGLSELDKAGFIKRQLVETRQITKHVAQILDSRMNTKYDENDKLIREVKVITLKSKLVSDFRKDFQFYKVREINNYHHAHDAYLNAVVGTALIKKYPKLESEFVYGDYKVYDVRKMIAKSEQEIGKATAKYFFYSNIMNFFKTEITLANGEIRKRPLIETNGETGEIVWDKGRDFATVRKVLSMPQVNIVKKTEVQTGGFSKESILPKRNSDKLIARKKDWDPKKYGGFDSPTVAYSVLVVAKVEKGKSKKLKSVKELLGITIMERSSFEKNPIDFLEAKGYKEVKKDLIIKLPKYSLFELENGRKRMLASAGELQKGNELALPSKYVNFLYLASHYEKLKGSPEDNEQKQLFVEQHKHYLDEIIEQISEFSKRVILADANLDKVLSAYNKHRDKPIREQAENIIHLFTLTNLGAPAAFKYFDTTIDRKRYTSTKEVLDATLIHQSITGLYETRIDLSQLGGDGGGGGGSGGGGSGGGGSGGGGSGGGGSGGTLGDQGSRGSDPLPEPRVTLTVEGIPTEFLVNTGAEHSVLTKPMGKMGSKRTVVAGATGSKVYPWTTKRLLKIGQKQVTHSFLVIPECPAPLLGRDLLTKLKAQIQFSTEGPQVTWEDRPAMCLVLNLEEEYRLHEKPVPPSIDPSWLQLFPMVWAEKAGMGLANQVPPVVVELKSDASPVAVRQYPMSKEAREGIRPHIQRFLDLGILVPCQSPWNTPLLPVKKPGTNDYRPVQDLREVNKRVQDIHPTVPNPYNLLSSLPPSHTWYSVLDLKDAFFCLKLHPNSQPLFAFEWRDPEKGNTGQLTWTRLPQGFKNSPTLFDEALHRDLASFRALNPQVVMLQYVDDLLVAAPTYRDCKEGTRRLLQELSKLGYRVSAKKAQLCREEVTYLGYLLKGGKRWLTPARKATVMKIPTPTTPRQVREFLGTAGFCRLWIPGFASLAAPLYPLTREKVPFTWTEAHQEAFGRIKEALLSAPALALPDLTKPFALYVDEKEGVARGVLTQTLGPWRRPVAYLSKKLDPVASGWPTCLKAIAAVALLLKDADKLTLGQNVLVIAPHNLESIVRQPPDRWMTNARMTHYQSLLLNERVSFAPPAILNPATLLPVESDDTPIHICSEILAEETGTRPDLRDQPLPGVPAWYTDGSSFIMDGRRQAGAAIVDNKRTVWASNLPEGTSAQKAELIALTQALRLAEGKSINIYTDSRYAFATAHVHGAIYKQRGLLTSAGKDIKNKEEILALLEAIHLPKRVAIIHCPGHQRGTDPVATGNRKADEAAKQAAQSTRILTETTKNAGKRTADGSEFEKRTADGSEFESPKKKAKVE

SEQ ID NO: 6174 - protein, 2141 aa, synthetic construct
MPAAKRVKLDGGDKKYSIGLDIGTNSVGWAVITDEYKVPSKKFKVLGNTDRHSIKKNLIGALLFDSGETAEATRLKRTARRRYTRRKNRICYLQEIFSNEMAKVDDSFFHRLEESFLVEEDKKHERHPIFGNIVDEVAYHEKYPTIYHLRKKLVDSTDKADLRLIYLALAHMIKFRGHFLIEGDLNPDNSDVDKLFIQLVQTYNQLFEENPINASGVDAKAILSARLSKSRRLENLIAQLPGEKKNGLFGNLIALSLGLTPNFKSNFDLAEDAKLQLSKDTYDDDLDNLLAQIGDQYADLFLAAKNLSDAILLSDILRVNTEITKAPLSASMIKRYDEHHQDLTLLKALVRQQLPEKYKEIFFDQSKNGYAGYIDGGASQEEFYKFIKPILEKMDGTEELLVKLNREDLLRKQRTFDNGSIPHQIHLGELHAILRRQEDFYPFLKDNREKIEKILTFRIPYYVGPLARGNSRFAWMTRKSEETITPWNFEEVVDKGASAQSFIERMTNFDKNLPNEKVLPKHSLLYEYFTVYNELTKVKYVTEGMRKPAFLSGEQKKAIVDLLFKTNRKVTVKQLKEDYFKKIECFDSVEISGVEDRFNASLGTYHDLLKIIKDKDFLDNEENEDILEDIVLTLTLFEDREMIEERLKTYAHLFDDKVMKQLKRRRYTGWGRLSRKLINGIRDKQSGKTILDFLKSDGFANRNFMQLIHDDSLTFKEDIQKAQVSGQGDSLHEHIANLAGSPAIKKGILQTVKVVDELVKVMGRHKPENIVIEMARENQTTQKGQKNSRERMKRIEEGIKELGSQILKEHPVENTQLQNEKLYLYYLQNGRDMYVDQELDINRLSDYDVDHIVPQSFLKDDSIDNKVLTRSDKARGKSDNVPSEEVVKKMKNYWRQLLNAKLITQRKFDNLTKAERGGLSELDKAGFIKRQLVETRQITKHVAQILDSRMNTKYDENDKLIREVKVITLKSKLVSDFRKDFQFYKVREINNYHHAHDAYLNAVVGTALIKKYPKLESEFVYGDYKVYDVRKMIAKSEQEIGKATAKYFFYSNIMNFFKTEITLANGEIRKRPLIETNGETGEIVWDKGRDFATVRKVLSMPQVNIVKKTEVQTGGFSKESILPKRNSDKLIARKKDWDPKKYGGFDSPTVAYSVLVVAKVEKGKSKKLKSVKELLGITIMERSSFEKNPIDFLEAKGYKEVKKDLIIKLPKYSLFELENGRKRMLASAGELQKGNELALPSKYVNFLYLASHYEKLKGSPEDNEQKQLFVEQHKHYLDEIIEQISEFSKRVILADANLDKVLSAYNKHRDKPIREQAENIIHLFTLTNLGAPAAFKYFDTTIDRKRYTSTKEVLDATLIHQSITGLYETRIDLSQLGGDGGGGGGSGGGGSGGGGSGGGGSGGGGSGGLLGRDLLTKLKAQIQFSTEGPQVTWEDRPAMCLVLNLEEEYRLHEKPVPPSIDPSWLQLFPMVWAEKAGMGLANQVPPVVVELKSDASPVAVRQYPMSKEAREGIRPHIQRFLDLGILVPCQSPWNTPLLPVKKPGTNDYRPVQDLREVNKRVQDIHPTVPNPYNLLSSLPPSHTWYSVLDLKDAFFCLKLHPNSQPLFAFEWRDPEKGNTGQLTWTRLPQGFKNSPTLFDEALHRDLASFRALNPQVVMLQYVDDLLVAAPTYRDCKEGTRRLLQELSKLGYRVSAKKAQLCREEVTYLGYLLKGGKRWLTPARKATVMKIPTPTTPRQVREFLGTAGFCRLWIPGFASLAAPLYPLTREKVPFTWTEAHQEAFGRIKEALLSAPALALPDLTKPFALYVDEKEGVARGVLTQTLGPWRRPVAYLSKKLDPVASGWPTCLKAIAAVALLLKDADKLTLGQNVLVIAPHNLESIVRQPPDRWMTNARMTHYQSLLLNERVSFAPPAILNPATLLPVESDDTPIHICSEILAEETGTRPDLRDQPLPGVPAWYTDGSSFIMDGRRQAGAAIVDNKRTVWASNLPEGTSAQKAELIALTQALRLAEGKSINIYTDSRYAFATAHVHGAIYKQRGLLTSAGKDIKNKEEILALLEAIHLPKRVAIIHCPGHQRGTDPVATGNRKADEAAKQAAQSTRILTETTKNAGKRTADGSEFEKRTADGSEFESPKKKAKVE

SEQ ID NO: 6175 - protein, 2141 aa, synthetic construct
MPAAKRVKLDGGDKKYSIGLDIGTNSVGWAVITDEYKVPSKKFKVLGNTDRHSIKKNLIGALLFDSGETAEATRLKRTARRRYTRRKNRICYLQEIFSNEMAKVDDSFFHRLEESFLVEEDKKHERHPIFGNIVDEVAYHEKYPTIYHLRKKLVDSTDKADLRLIYLALAHMIKFRGHFLIEGDLNPDNSDVDKLFIQLVQTYNQLFEENPINASGVDAKAILSARLSKSRRLENLIAQLPGEKKNGLFGNLIALSLGLTPNFKSNFDLAEDAKLQLSKDTYDDDLDNLLAQIGDQYADLFLAAKNLSDAILLSDILRVNTEITKAPLSASMIKRYDEHHQDLTLLKALVRQQLPEKYKEIFFDQSKNGYAGYIDGGASQEEFYKFIKPILEKMDGTEELLVKLNREDLLRKQRTFDNGSIPHQIHLGELHAILRRQEDFYPFLKDNREKIEKILTFRIPYYVGPLARGNSRFAWMTRKSEETITPWNFEEVVDKGASAQSFIERMTNFDKNLPNEKVLPKHSLLYEYFTVYNELTKVKYVTEGMRKPAFLSGEQKKAIVDLLFKTNRKVTVKQLKEDYFKKIECFDSVEISGVEDRFNASLGTYHDLLKIIKDKDFLDNEENEDILEDIVLTLTLFEDREMIEERLKTYAHLFDDKVMKQLKRRRYTGWGRLSRKLINGIRDKQSGKTILDFLKSDGFANRNFMQLIHDDSLTFKEDIQKAQVSGQGDSLHEHIANLAGSPAIKKGILQTVKVVDELVKVMGRHKPENIVIEMARENQTTQKGQKNSRERMKRIEEGIKELGSQILKEHPVENTQLQNEKLYLYYLQNGRDMYVDQELDINRLSDYDVDHIVPQSFLKDDSIDNKVLTRSDKARGKSDNVPSEEVVKKMKNYWRQLLNAKLITQRKFDNLTKAERGGLSELDKAGFIKRQLVETRQITKHVAQILDSRMNTKYDENDKLIREVKVITLKSKLVSDFRKDFQFYKVREINNYHHAHDAYLNAVVGTALIKKYPKLESEFVYGDYKVYDVRKMIAKSEQEIGKATAKYFFYSNIMNFFKTEITLANGEIRKRPLIETNGETGEIVWDKGRDFATVRKVLSMPQVNIVKKTEVQTGGFSKESILPKRNSDKLIARKKDWDPKKYGGFDSPTVAYSVLVVAKVEKGKSKKLKSVKELLGITIMERSSFEKNPIDFLEAKGYKEVKKDLIIKLPKYSLFELENGRKRMLASAGELQKGNELALPSKYVNFLYLASHYEKLKGSPEDNEQKQLFVEQHKHYLDEIIEQISEFSKRVILADANLDKVLSAYNKHRDKPIREQAENIIHLFTLTNLGAPAAFKYFDTTIDRKRYTSTKEVLDATLIHQSITGLYETRIDLSQLGGDGGGGGGSGGGGSGGGGSGGGGSGGGGSGGLLGRDLLTKLKAQIQFSTEGPQVTWEDRPAMCLVLNLEEEYRLHEKPVPPSIDPSWLQLFPMVWAEKAGMGLANQVPPVVVELKSDASPVAVRQYPMSKEAREGIRPHIQRFLDLGILVPCQSPWNTPLLPVKKPGTNDYRPVQDLREVNKRVQDIHPTVPNPYNLLSSLPPSHTWYSVLDLKDAFFCLKLHPNSQPLFAFEWRDPEKGNTGQLTWTRLPQGFKNSPTLFNEALHRDLASFRALNPQVVMLQYVDDLLVAAPTYRDCKEGTRRLLQELSKLGYRVSAKKAQLCREEVTYLGYLLKGGKRWLTPARKATVMKIPTPTTPRQVREFLGTAGFCRLWIPGFASLAAPLYPLTRPKVPFTWTEAHQEAFGRIKEALLSAPALALPDLTKPFALYVDEKEGVARGVLTQTLGPWRRPVAYLSKKLDPVASGWPTCLKAIAAVALLLKDADKLTLGQNVLVIAPHNLESIVRQPPDRWMTNARMTHYQSLLLNERVSFAPPAILNPATLLPVESDDTPIHICSEILAEETGTRPDLRDQPLPGVPAWYTDGSSFIMDGRRQAGAAIVDNKRTVWASNLPEGTSAQKAELIALTQALRLAEGKSINIYTDSRYAFATAHVHGAIYKQRGWLTSAGKDIKNKEEILALLEAIHLPKRVAIIHCPGHQRGTDPVATGNRKADEAAKQAAQSTRILTETTKNAGKRTADGSEFEKRTADGSEFESPKKKAKVE

SEQ ID NO: 6176 - protein, 2141 aa, synthetic construct
MPAAKRVKLDGGDKKYSIGLDIGTNSVGWAVITDEYKVPSKKFKVLGNTDRHSIKKNLIGALLFDSGETAEATRLKRTARRRYTRRKNRICYLQEIFSNEMAKVDDSFFHRLEESFLVEEDKKHERHPIFGNIVDEVAYHEKYPTIYHLRKKLVDSTDKADLRLIYLALAHMIKFRGHFLIEGDLNPDNSDVDKLFIQLVQTYNQLFEENPINASGVDAKAILSARLSKSRRLENLIAQLPGEKKNGLFGNLIALSLGLTPNFKSNFDLAEDAKLQLSKDTYDDDLDNLLAQIGDQYADLFLAAKNLSDAILLSDILRVNTEITKAPLSASMIKRYDEHHQDLTLLKALVRQQLPEKYKEIFFDQSKNGYAGYIDGGASQEEFYKFIKPILEKMDGTEELLVKLNREDLLRKQRTFDNGSIPHQIHLGELHAILRRQEDFYPFLKDNREKIEKILTFRIPYYVGPLARGNSRFAWMTRKSEETITPWNFEEVVDKGASAQSFIERMTNFDKNLPNEKVLPKHSLLYEYFTVYNELTKVKYVTEGMRKPAFLSGEQKKAIVDLLFKTNRKVTVKQLKEDYFKKIECFDSVEISGVEDRFNASLGTYHDLLKIIKDKDFLDNEENEDILEDIVLTLTLFEDREMIEERLKTYAHLFDDKVMKQLKRRRYTGWGRLSRKLINGIRDKQSGKTILDFLKSDGFANRNFMQLIHDDSLTFKEDIQKAQVSGQGDSLHEHIANLAGSPAIKKGILQTVKVVDELVKVMGRHKPENIVIEMARENQTTQKGQKNSRERMKRIEEGIKELGSQILKEHPVENTQLQNEKLYLYYLQNGRDMYVDQELDINRLSDYDVDHIVPQSFLKDDSIDNKVLTRSDKARGKSDNVPSEEVVKKMKNYWRQLLNAKLITQRKFDNLTKAERGGLSELDKAGFIKRQLVETRQITKHVAQILDSRMNTKYDENDKLIREVKVITLKSKLVSDFRKDFQFYKVREINNYHHAHDAYLNAVVGTALIKKYPKLESEFVYGDYKVYDVRKMIAKSEQEIGKATAKYFFYSNIMNFFKTEITLANGEIRKRPLIETNGETGEIVWDKGRDFATVRKVLSMPQVNIVKKTEVQTGGFSKESILPKRNSDKLIARKKDWDPKKYGGFDSPTVAYSVLVVAKVEKGKSKKLKSVKELLGITIMERSSFEKNPIDFLEAKGYKEVKKDLIIKLPKYSLFELENGRKRMLASAGELQKGNELALPSKYVNFLYLASHYEKLKGSPEDNEQKQLFVEQHKHYLDEIIEQISEFSKRVILADANLDKVLSAYNKHRDKPIREQAENIIHLFTLTNLGAPAAFKYFDTTIDRKRYTSTKEVLDATLIHQSITGLYETRIDLSQLGGDGGGGGGSGGGGSGGGGSGGGGSGGGGSGGLLGRDLLTKLKAQIQFSTEGPQVTWEDRPAMCLVLNLEEEYRLHEKPVPPSIDPSWLQLFPMVWAEKAGMGLANQVPPVVVELKSDASPVAVRQYPMSKEAREGIRPHIQRFLDLGILVPCQSPWNTPLLPVKKPGTNDYRPVQDLREVNKRVQDIHPTVPNPYNLLSSLPPSHTWYSVLDLKDAFFCLKLHPNSQPLFAFEWRDPEKGNTGQLTWTRLPQGFKNSPTLFNEALHRDLASFRALNPQVVMLQYVDDLLVAAPTYRDCKEGTRRLLQELSKLGYRVSAKKAQLCREEVTYLGYLLKGGKRWLTPARKATVMKIPTPTTPRQVREFLGKAGFCRLFIPGFASLAAPLYPLTRPKVPFTWTEAHQEAFGRIKEALLSAPALALPDLTKPFALYVDEKEGVARGVLTQTLGPWRRPVAYLSKKLDPVASGWPTCLKAIAAVALLLKDADKLTLGQNVLVIAPHNLESIVRQPPDRWMTNARMTHYQSLLLNERVSFAPPAILNPATLLPVESDDTPIHICSEILAEETGTRPDLRDQPLPGVPAWYTDGSSFIMDGRRQAGAAIVDNKRTVWASNLPEGTSAQKAELIALTQALRLAEGKSINIYTDSRYAFATAHVHGAIYKQRGWLTSAGKDIKNKEEILALLEAIHLPKRVAIIHCPGHQRGTDPVATGNRKADEAAKQAAQSTRILTETTKNAGKRTADGSEFEKRTADGSEFESPKKKAKVE

SEQ ID NO: 6177 - protein, 2232 aa, synthetic construct
MPAAKRVKLDGGDKKYSIGLDIGTNSVGWAVITDEYKVPSKKFKVLGNTDRHSIKKNLIGALLFDSGETAEATRLKRTARRRYTRRKNRICYLQEIFSNEMAKVDDSFFHRLEESFLVEEDKKHERHPIFGNIVDEVAYHEKYPTIYHLRKKLVDSTDKADLRLIYLALAHMIKFRGHFLIEGDLNPDNSDVDKLFIQLVQTYNQLFEENPINASGVDAKAILSARLSKSRRLENLIAQLPGEKKNGLFGNLIALSLGLTPNFKSNFDLAEDAKLQLSKDTYDDDLDNLLAQIGDQYADLFLAAKNLSDAILLSDILRVNTEITKAPLSASMIKRYDEHHQDLTLLKALVRQQLPEKYKEIFFDQSKNGYAGYIDGGASQEEFYKFIKPILEKMDGTEELLVKLNREDLLRKQRTFDNGSIPHQIHLGELHAILRRQEDFYPFLKDNREKIEKILTFRIPYYVGPLARGNSRFAWMTRKSEETITPWNFEEVVDKGASAQSFIERMTNFDKNLPNEKVLPKHSLLYEYFTVYNELTKVKYVTEGMRKPAFLSGEQKKAIVDLLFKTNRKVTVKQLKEDYFKKIECFDSVEISGVEDRFNASLGTYHDLLKIIKDKDFLDNEENEDILEDIVLTLTLFEDREMIEERLKTYAHLFDDKVMKQLKRRRYTGWGRLSRKLINGIRDKQSGKTILDFLKSDGFANRNFMQLIHDDSLTFKEDIQKAQVSGQGDSLHEHIANLAGSPAIKKGILQTVKVVDELVKVMGRHKPENIVIEMARENQTTQKGQKNSRERMKRIEEGIKELGSQILKEHPVENTQLQNEKLYLYYLQNGRDMYVDQELDINRLSDYDVDHIVPQSFLKDDSIDNKVLTRSDKARGKSDNVPSEEVVKKMKNYWRQLLNAKLITQRKFDNLTKAERGGLSELDKAGFIKRQLVETRQITKHVAQILDSRMNTKYDENDKLIREVKVITLKSKLVSDFRKDFQFYKVREINNYHHAHDAYLNAVVGTALIKKYPKLESEFVYGDYKVYDVRKMIAKSEQEIGKATAKYFFYSNIMNFFKTEITLANGEIRKRPLIETNGETGEIVWDKGRDFATVRKVLSMPQVNIVKKTEVQTGGFSKESILPKRNSDKLIARKKDWDPKKYGGFDSPTVAYSVLVVAKVEKGKSKKLKSVKELLGITIMERSSFEKNPIDFLEAKGYKEVKKDLIIKLPKYSLFELENGRKRMLASAGELQKGNELALPSKYVNFLYLASHYEKLKGSPEDNEQKQLFVEQHKHYLDEIIEQISEFSKRVILADANLDKVLSAYNKHRDKPIREQAENIIHLFTLTNLGAPAAFKYFDTTIDRKRYTSTKEVLDATLIHQSITGLYETRIDLSQLGGDGGGGGGSGGGGSGGGGSGGGGSGGGGSGGTLGDQGSRGSDPLPEPRVTLTVEGIPTEFLVNTGAEHSVLTKPMGKMGSKRTVVAGATGSKVYPWTTKRLLKIGQKQVTHSFLVIPECPAPLLGRDLLTKLKAQIQFSTEGPQVTWEDRPAMCLVLNLEEEYRLHEKPVPPSIDPSWLQLFPMVWAEKAGMGLANQVPPVVVELKSDASPVAVRQYPMSKEAREGIRPHIQRFLDLGILVPCQSPWNTPLLPVKKPGTNDYRPVQDLREVNKRVQDIHPTVPNPYNLLSSLPPSHTWYSVLDLKDAFFCLKLHPNSQPLFAFEWRDPEKGNTGQLTWTRLPQGFKNSPTLFNEALHRDLASFRALNPQVVMLQYVDDLLVAAPTYRDCKEGTRRLLQELSKLGYRVSAKKAQLCREEVTYLGYLLKGGKRWLTPARKATVMKIPTPTTPRQVREFLGTAGFCRLWIPGFASLAAPLYPLTRPKVPFTWTEAHQEAFGRIKEALLSAPALALPDLTKPFALYVDEKEGVARGVLTQTLGPWRRPVAYLSKKLDPVASGWPTCLKAIAAVALLLKDADKLTLGQNVLVIAPHNLESIVRQPPDRWMTNARMTHYQSLLLNERVSFAPPAILNPATLLPVESDDTPIHICSEILAEETGTRPDLRDQPLPGVPAWYTDGSSFIMDGRRQAGAAIVDNKRTVWASNLPEGTSAQKAELIALTQALRLAEGKSINIYTDSRYAFATAHVHGAIYKQRGWLTSAGKDIKNKEEILALLEAIHLPKRVAIIHCPGHQRGTDPVATGNRKADEAAKQAAQSTRILTETTKNAGKRTADGSEFEKRTADGSEFESPKKKAKVE

SEQ ID NO: 6178 - protein, 2110 aa, synthetic construct
MPAAKRVKLDGGDKKYSIGLDIGTNSVGWAVITDEYKVPSKKFKVLGNTDRHSIKKNLIGALLFDSGETAEATRLKRTARRRYTRRKNRICYLQEIFSNEMAKVDDSFFHRLEESFLVEEDKKHERHPIFGNIVDEVAYHEKYPTIYHLRKKLVDSTDKADLRLIYLALAHMIKFRGHFLIEGDLNPDNSDVDKLFIQLVQTYNQLFEENPINASGVDAKAILSARLSKSRRLENLIAQLPGEKKNGLFGNLIALSLGLTPNFKSNFDLAEDAKLQLSKDTYDDDLDNLLAQIGDQYADLFLAAKNLSDAILLSDILRVNTEITKAPLSASMIKRYDEHHQDLTLLKALVRQQLPEKYKEIFFDQSKNGYAGYIDGGASQEEFYKFIKPILEKMDGTEELLVKLNREDLLRKQRTFDNGSIPHQIHLGELHAILRRQEDFYPFLKDNREKIEKILTFRIPYYVGPLARGNSRFAWMTRKSEETITPWNFEEVVDKGASAQSFIERMTNFDKNLPNEKVLPKHSLLYEYFTVYNELTKVKYVTEGMRKPAFLSGEQKKAIVDLLFKTNRKVTVKQLKEDYFKKIECFDSVEISGVEDRFNASLGTYHDLLKIIKDKDFLDNEENEDILEDIVLTLTLFEDREMIEERLKTYAHLFDDKVMKQLKRRRYTGWGRLSRKLINGIRDKQSGKTILDFLKSDGFANRNFMQLIHDDSLTFKEDIQKAQVSGQGDSLHEHIANLAGSPAIKKGILQTVKVVDELVKVMGRHKPENIVIEMARENQTTQKGQKNSRERMKRIEEGIKELGSQILKEHPVENTQLQNEKLYLYYLQNGRDMYVDQELDINRLSDYDVDHIVPQSFLKDDSIDNKVLTRSDKARGKSDNVPSEEVVKKMKNYWRQLLNAKLITQRKFDNLTKAERGGLSELDKAGFIKRQLVETRQITKHVAQILDSRMNTKYDENDKLIREVKVITLKSKLVSDFRKDFQFYKVREINNYHHAHDAYLNAVVGTALIKKYPKLESEFVYGDYKVYDVRKMIAKSEQEIGKATAKYFFYSNIMNFFKTEITLANGEIRKRPLIETNGETGEIVWDKGRDFATVRKVLSMPQVNIVKKTEVQTGGFSKESILPKRNSDKLIARKKDWDPKKYGGFDSPTVAYSVLVVAKVEKGKSKKLKSVKELLGITIMERSSFEKNPIDFLEAKGYKEVKKDLIIKLPKYSLFELENGRKRMLASAGELQKGNELALPSKYVNFLYLASHYEKLKGSPEDNEQKQLFVEQHKHYLDEIIEQISEFSKRVILADANLDKVLSAYNKHRDKPIREQAENIIHLFTLTNLGAPAAFKYFDTTIDRKRYTSTKEVLDATLIHQSITGLYETRIDLSQLGGDGGGGGGSGGGGSGGGGSGGGGSGGGGSGGTLNLEDEYRLYETSAEPEVSPGSTWLSDFPQAWAETGGMGLAVRQAPLIIPLKATSTPVSIKQYPMSQEAKLGIKPHIQRLLDQGILVPCQSPWNTPLLPVKKPGTNDYRPVQDLREVNKRVEDIHPTVPNPYNLLSGLPPSHRWYTVLDLKDAFFCLRLHPTSQPLFAFEWRDPGMGISGQLTWTRLPQGFKNSPTLFNEALHRDLADFRIQHPDLILLQYVDDILLAATSELDCQQGTRALLLTLGNLGYRASAKKAQLCQKQVKYLGYLLKEGQRWLTEARKETVMGQPTPKTPRQLREFLGKAGFCRLFIPGFAEMAAPLYPLTKPGTLFNWGPDQQKAYQEIKQALLTAPALGLPDLTKPFELFVDEKQGYAKGVLTQKLGPWRRPVAYLSKKLDPVAAGWPPCLRMVAAIAVLRKDAGKLTMGQPLVILAPHAVEALVKQPPDRWLSNARMTHYQAMLLDTDRVQFGPVVALNPATLLPLPEEGAPHDCLEILAETHGTRPDLTDQPIPDADHTWYTDGSSFLQEGQRKAGAAVTTETEVIWARALPAGTSAQRAELIALTQALKMAEGKRLNVYTDSRYAFATAHIHGEIYRRRGWLTSEGREIKNKSEILALLKALFLPKRLSIIHCLGHQKGDSAEARGNRLADQAAREAAIKTPPDTSTLLAGKRTADGSEFEKRTADGSEFESPKKKAKVE

SEQ ID NO: 6179 - protein, 2110 aa, synthetic construct
MPAAKRVKLDGGDKKYSIGLDIGTNSVGWAVITDEYKVPSKKFKVLGNTDRHSIKKNLIGALLFDSGETAEATRLKRTARRRYTRRKNRICYLQEIFSNEMAKVDDSFFHRLEESFLVEEDKKHERHPIFGNIVDEVAYHEKYPTIYHLRKKLVDSTDKADLRLIYLALAHMIKFRGHFLIEGDLNPDNSDVDKLFIQLVQTYNQLFEENPINASGVDAKAILSARLSKSRRLENLIAQLPGEKKNGLFGNLIALSLGLTPNFKSNFDLAEDAKLQLSKDTYDDDLDNLLAQIGDQYADLFLAAKNLSDAILLSDILRVNTEITKAPLSASMIKRYDEHHQDLTLLKALVRQQLPEKYKEIFFDQSKNGYAGYIDGGASQEEFYKFIKPILEKMDGTEELLVKLNREDLLRKQRTFDNGSIPHQIHLGELHAILRRQEDFYPFLKDNREKIEKILTFRIPYYVGPLARGNSRFAWMTRKSEETITPWNFEEVVDKGASAQSFIERMTNFDKNLPNEKVLPKHSLLYEYFTVYNELTKVKYVTEGMRKPAFLSGEQKKAIVDLLFKTNRKVTVKQLKEDYFKKIECFDSVEISGVEDRFNASLGTYHDLLKIIKDKDFLDNEENEDILEDIVLTLTLFEDREMIEERLKTYAHLFDDKVMKQLKRRRYTGWGRLSRKLINGIRDKQSGKTILDFLKSDGFANRNFMQLIHDDSLTFKEDIQKAQVSGQGDSLHEHIANLAGSPAIKKGILQTVKVVDELVKVMGRHKPENIVIEMARENQTTQKGQKNSRERMKRIEEGIKELGSQILKEHPVENTQLQNEKLYLYYLQNGRDMYVDQELDINRLSDYDVDHIVPQSFLKDDSIDNKVLTRSDKARGKSDNVPSEEVVKKMKNYWRQLLNAKLITQRKFDNLTKAERGGLSELDKAGFIKRQLVETRQITKHVAQILDSRMNTKYDENDKLIREVKVITLKSKLVSDFRKDFQFYKVREINNYHHAHDAYLNAVVGTALIKKYPKLESEFVYGDYKVYDVRKMIAKSEQEIGKATAKYFFYSNIMNFFKTEITLANGEIRKRPLIETNGETGEIVWDKGRDFATVRKVLSMPQVNIVKKTEVQTGGFSKESILPKRNSDKLIARKKDWDPKKYGGFDSPTVAYSVLVVAKVEKGKSKKLKSVKELLGITIMERSSFEKNPIDFLEAKGYKEVKKDLIIKLPKYSLFELENGRKRMLASAGELQKGNELALPSKYVNFLYLASHYEKLKGSPEDNEQKQLFVEQHKHYLDEIIEQISEFSKRVILADANLDKVLSAYNKHRDKPIREQAENIIHLFTLTNLGAPAAFKYFDTTIDRKRYTSTKEVLDATLIHQSITGLYETRIDLSQLGGDGGGGGGSGGGGSGGGGSGGGGSGGGGSGGTLNIEDEYRLHETSKGPDVPLGSTWLSDFPQAWAETGGMGLAFRQAPLIISLKATSTPVSIKQYPMSQEARLGIKPHIQRLLDQGILVPCQSPWNTPLLPVKKPGTNDYRPVQDLREVNKRVEDIHPTVPNPYNLLSGLPPSHQWYTVLDLKDAFFCLRLHPTSQSLFAFEWKDPEMGISGQLTWTRLPQGFKNSPTLFNEALHRDLADFRIQHPDLILLQYVDDLLLAATSELDCQQGTRALLQTLGDLGYRASAKKAQICQKQVKYLGYLLKEGQRWLTEARKETVMGQPTPKTPRQLREFLGTAGLCRLWIPGFAEMAAPLYPLTKPGTLFKWGPDQQKAYQEIKQALLTAPALGLPDLTKPFELFVDEKQGYAKGVLTQKLGPWRRPVAYLSKKLDPVAAGWPPCLRMVAAIAVLTKDVGKLTMGQPLVILAPHAVEALVKQPPDRWLSNARMTHYQALLLDTDRVQFGPIVALNPATLLPLPEEGLQHDCLDILAEAHGTRPDLTDQPLPDADHTWYTDGSSFLQEGQRRAGAAVTTETEVIWAKALPAGTSAQRAELIALTQALKMAAGKKLNVYTDSRYAFATAHIHGEIYRRRGWLTSEGKEIKNKDEILALLKALFLPKRLSIIHCPGHQKGNHAEARGNRMADQAAREVATRETPETSTLLAGKRTADGSEFEKRTADGSEFESPKKKAKVE

SEQ ID NO: 6180 - protein, 2110 aa, synthetic construct
MPAAKRVKLDGGDKKYSIGLDIGTNSVGWAVITDEYKVPSKKFKVLGNTDRHSIKKNLIGALLFDSGETAEATRLKRTARRRYTRRKNRICYLQEIFSNEMAKVDDSFFHRLEESFLVEEDKKHERHPIFGNIVDEVAYHEKYPTIYHLRKKLVDSTDKADLRLIYLALAHMIKFRGHFLIEGDLNPDNSDVDKLFIQLVQTYNQLFEENPINASGVDAKAILSARLSKSRRLENLIAQLPGEKKNGLFGNLIALSLGLTPNFKSNFDLAEDAKLQLSKDTYDDDLDNLLAQIGDQYADLFLAAKNLSDAILLSDILRVNTEITKAPLSASMIKRYDEHHQDLTLLKALVRQQLPEKYKEIFFDQSKNGYAGYIDGGASQEEFYKFIKPILEKMDGTEELLVKLNREDLLRKQRTFDNGSIPHQIHLGELHAILRRQEDFYPFLKDNREKIEKILTFRIPYYVGPLARGNSRFAWMTRKSEETITPWNFEEVVDKGASAQSFIERMTNFDKNLPNEKVLPKHSLLYEYFTVYNELTKVKYVTEGMRKPAFLSGEQKKAIVDLLFKTNRKVTVKQLKEDYFKKIECFDSVEISGVEDRFNASLGTYHDLLKIIKDKDFLDNEENEDILEDIVLTLTLFEDREMIEERLKTYAHLFDDKVMKQLKRRRYTGWGRLSRKLINGIRDKQSGKTILDFLKSDGFANRNFMQLIHDDSLTFKEDIQKAQVSGQGDSLHEHIANLAGSPAIKKGILQTVKVVDELVKVMGRHKPENIVIEMARENQTTQKGQKNSRERMKRIEEGIKELGSQILKEHPVENTQLQNEKLYLYYLQNGRDMYVDQELDINRLSDYDVDHIVPQSFLKDDSIDNKVLTRSDKARGKSDNVPSEEVVKKMKNYWRQLLNAKLITQRKFDNLTKAERGGLSELDKAGFIKRQLVETRQITKHVAQILDSRMNTKYDENDKLIREVKVITLKSKLVSDFRKDFQFYKVREINNYHHAHDAYLNAVVGTALIKKYPKLESEFVYGDYKVYDVRKMIAKSEQEIGKATAKYFFYSNIMNFFKTEITLANGEIRKRPLIETNGETGEIVWDKGRDFATVRKVLSMPQVNIVKKTEVQTGGFSKESILPKRNSDKLIARKKDWDPKKYGGFDSPTVAYSVLVVAKVEKGKSKKLKSVKELLGITIMERSSFEKNPIDFLEAKGYKEVKKDLIIKLPKYSLFELENGRKRMLASAGELQKGNELALPSKYVNFLYLASHYEKLKGSPEDNEQKQLFVEQHKHYLDEIIEQISEFSKRVILADANLDKVLSAYNKHRDKPIREQAENIIHLFTLTNLGAPAAFKYFDTTIDRKRYTSTKEVLDATLIHQSITGLYETRIDLSQLGGDGGGGGGSGGGGSGGGGSGGGGSGGGGSGGTLNIEDEHRLHETSKEPDVSLGSTWLSDFPQAWAETGGMGLAVRQAPLIIPLKATSTPVSIKQYPMSQEARLGIKPHIQRLLDQGILVPCQSPWNTPLLPVKKPGTNDYRPVQDLREVNKRVEDIHPTVPNPYNLLSGLPPSHQWYTVLDLKDAFFCLRLHPTSQPLFAFEWRDPEMGISGQLTWTRLPQGFKNSPTLFNEALHRDLADFRIQHPDLILLQYVDDLLLAATSELDCQQGTRALLQTLGNLGYRASAKKAQICQKQVKYLGYLLKEGQRWLTEARKETVMGQPTPKTPRQLREFLGTAGFCRLWIPGFAEMAAPLYPLTKPGTLFNWGPDQQKAYQEIKQALLTAPALGLPDLTKPFELFVDEKQGYAKGVLTQKLGPWRRPVAYLSKKLDPVAAGWPPCLRMVAAIAVLTKDAGKLTMGQPLVILAPHAVEALVKQPPDRWLSNARMTHYQALLLDTDRVQFGPVVALNPATLLPLPEEGLQHNCLDILAEAHGTRPDLTDQPLPDADHTWYTDGSSLLQEGQRKAGAAVTTETEVIWAKALPAGTSAQRAELIALTQALKMAEGKKLNVYTDSRYAFATAHIHGEIYRRRGWLTSEGKEIKNKDEILALLKALFLPKRLSIIHCPGHQKGHSAEARGNRMADQAARKAAITETPDTSTLLAGKRTADGSEFEKRTADGSEFESPKKKAKVE

SEQ ID NO: 6181 - protein, 2110 aa, synthetic construct; identical to SEQ ID NO: 4504

SEQ ID NO: 6182 - protein, 2110 aa, synthetic construct; identical to SEQ ID NO: 6180

SEQ ID NO: 6183 - protein, 2110 aa, synthetic construct; identical to SEQ ID NO: 4504

SEQ ID NO: 6184 - protein, 2130 aa, synthetic construct
MPAAKRVKLDGGDKKYSIGLDIGTNSVGWAVITDEYKVPSKKFKVLGNTDRHSIKKNLIGALLFDSGETAEATRLKRTARRRYTRRKNRICYLQEIFSNEMAKVDDSFFHRLEESFLVEEDKKHERHPIFGNIVDEVAYHEKYPTIYHLRKKLVDSTDKADLRLIYLALAHMIKFRGHFLIEGDLNPDNSDVDKLFIQLVQTYNQLFEENPINASGVDAKAILSARLSKSRRLENLIAQLPGEKKNGLFGNLIALSLGLTPNFKSNFDLAEDAKLQLSKDTYDDDLDNLLAQIGDQYADLFLAAKNLSDAILLSDILRVNTEITKAPLSASMIKRYDEHHQDLTLLKALVRQQLPEKYKEIFFDQSKNGYAGYIDGGASQEEFYKFIKPILEKMDGTEELLVKLNREDLLRKQRTFDNGSIPHQIHLGELHAILRRQEDFYPFLKDNREKIEKILTFRIPYYVGPLARGNSRFAWMTRKSEETITPWNFEEVVDKGASAQSFIERMTNFDKNLPNEKVLPKHSLLYEYFTVYNELTKVKYVTEGMRKPAFLSGEQKKAIVDLLFKTNRKVTVKQLKEDYFKKIECFDSVEISGVEDRFNASLGTYHDLLKIIKDKDFLDNEENEDILEDIVLTLTLFEDREMIEERLKTYAHLFDDKVMKQLKRRRYTGWGRLSRKLINGIRDKQSGKTILDFLKSDGFANRNFMQLIHDDSLTFKEDIQKAQVSGQGDSLHEHIANLAGSPAIKKGILQTVKVVDELVKVMGRHKPENIVIEMARENQTTQKGQKNSRERMKRIEEGIKELGSQILKEHPVENTQLQNEKLYLYYLQNGRDMYVDQELDINRLSDYDVDHIVPQSFLKDDSIDNKVLTRSDKARGKSDNVPSEEVVKKMKNYWRQLLNAKLITQRKFDNLTKAERGGLSELDKAGFIKRQLVETRQITKHVAQILDSRMNTKYDENDKLIREVKVITLKSKLVSDFRKDFQFYKVREINNYHHAHDAYLNAVVGTALIKKYPKLESEFVYGDYKVYDVRKMIAKSEQEIGKATAKYFFYSNIMNFFKTEITLANGEIRKRPLIETNGETGEIVWDKGRDFATVRKVLSMPQVNIVKKTEVQTGGFSKESILPKRNSDKLIARKKDWDPKKYGGFDSPTVAYSVLVVAKVEKGKSKKLKSVKELLGITIMERSSFEKNPIDFLEAKGYKEVKKDLIIKLPKYSLFELENGRKRMLASAGELQKGNELALPSKYVNFLYLASHYEKLKGSPEDNEQKQLFVEQHKHYLDEIIEQISEFSKRVILADANLDKVLSAYNKHRDKPIREQAENIIHLFTLTNLGAPAAFKYFDTTIDRKRYTSTKEVLDATLIHQSITGLYETRIDLSQLGGDGGGGGGSGGGGSGGGGSGGGGSGGGGSGGVQEISDSRPMLHIYLNGRRFLGLLDTGADKTCIAGRDWPANWPIHQTESSLQGLGMACGVARSSQPLRWQHEDKSGIIHPFVIPTLPFTLWGRDIMKDIKVRLMTDSPDDSQDLMIGAIESNLFADQISWKSDQPVWLNQWPLKQEKLQALQQLVTEQLQLGHLEESNSPWNTPVFVIKKKSGKWRLLQDLRAVNATMHDMGALQPGLPSPVAVPKGWEIIIIDLQDCFFNIKLHPEDCKRFAFSVPSPNFKRPYQRFQWKVLPQGMKNSPTLCQKFVDKAILTVRDKYQDSYIVHYMDDILLAHPSRSIVDEILTSMIQALNKHGLVVSTEKIQKYDNLKYLGTHIQGDSVSYQKLQIRTDKLRTLNDFQKLLGNINWIRPFLKLTTGELKPLFEILNGDSNPISTRKLTPEACKALQLMNERLSTARVKRLDLSQPWSLCILKTEYTPTACLWQDGVVEWIHLPHISPKVITPYDIFCTQLIIKGRHRSKELFSKDPDYIVVPYTKVQFDLLLQEKEDWPISLLGFLGEVHFHLPKDPLLTFTLQTAIIFPHMTSTTPLEKGIVIFTDGSANGRSVTYIQGREPIIKENTQNTAQQAEIVAVITAFEEVSQPFNLYTDSKYVTGLFPEIETATLSPRTKIYTELKHLQRLIHKRQEKFYIGHIRGHTGLPGPLAQGNAYADSLTRILTAAGKRTADGSEFEKRTADGSEFESPKKKAKVE

SEQ ID NO: 6185 - protein, 2130 aa, synthetic construct
MPAAKRVKLDGGDKKYSIGLDIGTNSVGWAVITDEYKVPSKKFKVLGNTDRHSIKKNLIGALLFDSGETAEATRLKRTARRRYTRRKNRICYLQEIFSNEMAKVDDSFFHRLEESFLVEEDKKHERHPIFGNIVDEVAYHEKYPTIYHLRKKLVDSTDKADLRLIYLALAHMIKFRGHFLIEGDLNPDNSDVDKLFIQLVQTYNQLFEENPINASGVDAKAILSARLSKSRRLENLIAQLPGEKKNGLFGNLIALSLGLTPNFKSNFDLAEDAKLQLSKDTYDDDLDNLLAQIGDQYADLFLAAKNLSDAILLSDILRVNTEITKAPLSASMIKRYDEHHQDLTLLKALVRQQLPEKYKEIFFDQSKNGYAGYIDGGASQEEFYKFIKPILEKMDGTEELLVKLNREDLLRKQRTFDNGSIPHQIHLGELHAILRRQEDFYPFLKDNREKIEKILTFRIPYYVGPLARGNSRFAWMTRKSEETITPWNFEEVVDKGASAQSFIERMTNFDKNLPNEKVLPKHSLLYEYFTVYNELTKVKYVTEGMRKPAFLSGEQKKAIVDLLFKTNRKVTVKQLKEDYFKKIECFDSVEISGVEDRFNASLGTYHDLLKIIKDKDFLDNEENEDILEDIVLTLTLFEDREMIEERLKTYAHLFDDKVMKQLKRRRYTGWGRLSRKLINGIRDKQSGKTILDFLKSDGFANRNFMQLIHDDSLTFKEDIQKAQVSGQGDSLHEHIANLAGSPAIKKGILQTVKVVDELVKVMGRHKPENIVIEMARENQTTQKGQKNSRERMKRIEEGIKELGSQILKEHPVENTQLQNEKLYLYYLQNGRDMYVDQELDINRLSDYDVDHIVPQSFLKDDSIDNKVLTRSDKARGKSDNVPSEEVVKKMKNYWRQLLNAKLITQRKFDNLTKAERGGLSELDKAGFIKRQLVETRQITKHVAQILDSRMNTKYDENDKLIREVKVITLKSKLVSDFRKDFQFYKVREINNYHHAHDAYLNAVVGTALIKKYPKLESEFVYGDYKVYDVRKMIAKSEQEIGKATAKYFFYSNIMNFFKTEITLANGEIRKRPLIETNGETGEIVWDKGRDFATVRKVLSMPQVNIVKKTEVQTGGFSKESILPKRNSDKLIARKKDWDPKKYGGFDSPTVAYSVLVVAKVEKGKSKKLKSVKELLGITIMERSSFEKNPIDFLEAKGYKEVKKDLIIKLPKYSLFELENGRKRMLASAGELQKGNELALPSKYVNFLYLASHYEKLKGSPEDNEQKQLFVEQHKHYLDEIIEQISEFSKRVILADANLDKVLSAYNKHRDKPIREQAENIIHLFTLTNLGAPAAFKYFDTTIDRKRYTSTKEVLDATLIHQSITGLYETRIDLSQLGGDGGGGGGSGGGGSGGGGSGGGGSGGGGSGGWVQEISDSRPMLHIYLNGRRFLGLLNTGADKTCIAGRDWPANWPIHQTESSLQGLGMACGVARSSQPLRWQHEDKSGIIHPFVIPTLPFTLWGRDIMKDIKVRLMTDSPDDSQDLMIGAIESNLFADQISWKSDQPVWLNQWPLKQEKLQALQQLVTEQLQLGHLEESNSPWNTPVFVIKKKSGKWRLLQDLRAVNATMHDMGALQPGLPSPVAVPKGWEIIIIDLQDCFFNIKLHPEDCKRFAFSVPSPNFKRPYQRFQWKVLPQGMKNSPTLCQKFVDKAILTVRDKYQDSYIVHYMDDILLAHPSRSIVDEILTSMIQALNKHGLVVSTEKIQKYDNLKYLGTHIQGDSVSYQKLQIRTDKLRTLNDFQKLLGNINWIRPFLKLTTGELKPLFEILNGDSNPISTRKLTPEACKALQLMNERLSTARVKRLDLSQPWSLCILKTEYTPTACLWQDGVVEWIHLPHISPKVITPYDIFCTQLIIKGRHRSKELFSKDPDYIVVPYTKVQFDLLLQEKEDWPISLLGFLGEVHFHLPKDPLLTFTLQTAIIFPHMTSTTPLEKGIVIFTDGSANGRSVTYIQGREPIIKENTQNTAQQAEIVAVITAFEEVSQPFNLYTDSKYVTGLFPEIETATLSPRTKIYTELKHLQRLIHKRQEKFYIGHIRGHTGLPGPLAQGNAYADSLTRILTAGKRTADGSEFEKRTADGSEFESPKKKAKVE

SEQ ID NO: 6186 - protein, 2130 aa, synthetic construct; identical to SEQ ID NO: 6185

SEQ ID NO: 6187 - protein, 2038 aa, synthetic construct
MPAAKRVKLDGGDKKYSIGLDIGTNSVGWAVITDEYKVPSKKFKVLGNTDRHSIKKNLIGALLFDSGETAEATRLKRTARRRYTRRKNRICYLQEIFSNEMAKVDDSFFHRLEESFLVEEDKKHERHPIFGNIVDEVAYHEKYPTIYHLRKKLVDSTDKADLRLIYLALAHMIKFRGHFLIEGDLNPDNSDVDKLFIQLVQTYNQLFEENPINASGVDAKAILSARLSKSRRLENLIAQLPGEKKNGLFGNLIALSLGLTPNFKSNFDLAEDAKLQLSKDTYDDDLDNLLAQIGDQYADLFLAAKNLSDAILLSDILRVNTEITKAPLSASMIKRYDEHHQDLTLLKALVRQQLPEKYKEIFFDQSKNGYAGYIDGGASQEEFYKFIKPILEKMDGTEELLVKLNREDLLRKQRTFDNGSIPHQIHLGELHAILRRQEDFYPFLKDNREKIEKILTFRIPYYVGPLARGNSRFAWMTRKSEETITPWNFEEVVDKGASAQSFIERMTNFDKNLPNEKVLPKHSLLYEYFTVYNELTKVKYVTEGMRKPAFLSGEQKKAIVDLLFKTNRKVTVKQLKEDYFKKIECFDSVEISGVEDRFNASLGTYHDLLKIIKDKDFLDNEENEDILEDIVLTLTLFEDREMIEERLKTYAHLFDDKVMKQLKRRRYTGWGRLSRKLINGIRDKQSGKTILDFLKSDGFANRNFMQLIHDDSLTFKEDIQKAQVSGQGDSLHEHIANLAGSPAIKKGILQTVKVVDELVKVMGRHKPENIVIEMARENQTTQKGQKNSRERMKRIEEGIKELGSQILKEHPVENTQLQNEKLYLYYLQNGRDMYVDQELDINRLSDYDVDHIVPQSFLKDDSIDNKVLTRSDKARGKSDNVPSEEVVKKMKNYWRQLLNAKLITQRKFDNLTKAERGGLSELDKAGFIKRQLVETRQITKHVAQILDSRMNTKYDENDKLIREVKVITLKSKLVSDFRKDFQFYKVREINNYHHAHDAYLNAVVGTALIKKYPKLESEFVYGDYKVYDVRKMIAKSEQEIGKATAKYFFYSNIMNFFKTEITLANGEIRKRPLIETNGETGEIVWDKGRDFATVRKVLSMPQVNIVKKTEVQTGGFSKESILPKRNSDKLIARKKDWDPKKYGGFDSPTVAYSVLVVAKVEKGKSKKLKSVKELLGITIMERSSFEKNPIDFLEAKGYKEVKKDLIIKLPKYSLFELENGRKRMLASAGELQKGNELALPSKYVNFLYLASHYEKLKGSPEDNEQKQLFVEQHKHYLDEIIEQISEFSKRVILADANLDKVLSAYNKHRDKPIREQAENIIHLFTLTNLGAPAAFKYFDTTIDRKRYTSTKEVLDATLIHQSITGLYETRIDLSQLGGDGGGGGGSGGGGSGGGGSGGGGSGGGGSGGGRDIMKDIKVRLMTDSPDDSQDLMIGAIESNLFADQISWKSDQPVWLNQWPLKQEKLQALQQLVTEQLQLGHLEESNSPWNTPVFVIKKKSGKWRLLQDLRAVNATMHDMGALQPGLPSPVAVPKGWEIIIIDLQDCFFNIKLHPEDCKRFAFSVPSPNFKRPYQRFQWKVLPQGMKNSPTLCQKFVDKAILTVRDKYQDSYIVHYMDDILLAHPSRSIVDEILTSMIQALNKHGLVVSTEKIQKYDNLKYLGTHIQGDSVSYQKLQIRTDKLRTLNDFQKLLGNINWIRPFLKLTTGELKPLFEILNGDSNPISTRKLTPEACKALQLMNERLSTARVKRLDLSQPWSLCILKTEYTPTACLWQDGVVEWIHLPHISPKVITPYDIFCTQLIIKGRHRSKELFSKDPDYIVVPYTKVQFDLLLQEKEDWPISLLGFLGEVHFHLPKDPLLTFTLQTAIIFPHMTSTTPLEKGIVIFTDGSANGRSVTYIQGREPIIKENTQNTAQQAEIVAVITAFEEVSQPFNLYTDSKYVTGLFPEIETATLSPRTKIYTELKHLQRLIHKRQEKFYIGHIRGHTGLPGPLAQGNAYADSLTRILTAGKRTADGSEFEKRTADGSEFESPKKKAKVE

SEQ ID NO: 6188 - protein, 2102 aa, synthetic construct
MPAAKRVKLDGGDKKYSIGLDIGTNSVGWAVITDEYKVPSKKFKVLGNTDRHSIKKNLIGALLFDSGETAEATRLKRTARRRYTRRKNRICYLQEIFSNEMAKVDDSFFHRLEESFLVEEDKKHERHPIFGNIVDEVAYHEKYPTIYHLRKKLVDSTDKADLRLIYLALAHMIKFRGHFLIEGDLNPDNSDVDKLFIQLVQTYNQLFEENPINASGVDAKAILSARLSKSRRLENLIAQLPGEKKNGLFGNLIALSLGLTPNFKSNFDLAEDAKLQLSKDTYDDDLDNLLAQIGDQYADLFLAAKNLSDAILLSDILRVNTEITKAPLSASMIKRYDEHHQDLTLLKALVRQQLPEKYKEIFFDQSKNGYAGYIDGGASQEEFYKFIKPILEKMDGTEELLVKLNREDLLRKQRTFDNGSIPHQIHLGELHAILRRQEDFYPFLKDNREKIEKILTFRIPYYVGPLARGNSRFAWMTRKSEETITPWNFEEVVDKGASAQSFIERMTNFDKNLPNEKVLPKHSLLYEYFTVYNELTKVKYVTEGMRKPAFLSGEQKKAIVDLLFKTNRKVTVKQLKEDYFKKIECFDSVEISGVEDRFNASLGTYHDLLKIIKDKDFLDNEENEDILEDIVLTLTLFEDREMIEERLKTYAHLFDDKVMKQLKRRRYTGWGRLSRKLINGIRDKQSGKTILDFLKSDGFANRNFMQLIHDDSLTFKEDIQKAQVSGQGDSLHEHIANLAGSPAIKKGILQTVKVVDELVKVMGRHKPENIVIEMARENQTTQKGQKNSRERMKRIEEGIKELGSQILKEHPVENTQLQNEKLYLYYLQNGRDMYVDQELDINRLSDYDVDHIVPQSFLKDDSIDNKVLTRSDKARGKSDNVPSEEVVKKMKNYWRQLLNAKLITQRKFDNLTKAERGGLSELDKAGFIKRQLVETRQITKHVAQILDSRMNTKYDENDKLIREVKVITLKSKLVSDFRKDFQFYKVREINNYHHAHDAYLNAVVGTALIKKYPKLESEFVYGDYKVYDVRKMIAKSEQEIGKATAKYFFYSNIMNFFKTEITLANGEIRKRPLIETNGETGEIVWDKGRDFATVRKVLSMPQVNIVKKTEVQTGGFSKESILPKRNSDKLIARKKDWDPKKYGGFDSPTVAYSVLVVAKVEKGKSKKLKSVKELLGITIMERSSFEKNPIDFLEAKGYKEVKKDLIIKLPKYSLFELENGRKRMLASAGELQKGNELALPSKYVNFLYLASHYEKLKGSPEDNEQKQLFVEQHKHYLDEIIEQISEFSKRVILADANLDKVLSAYNKHRDKPIREQAENIIHLFTLTNLGAPAAFKYFDTTIDRKRYTSTKEVLDATLIHQSITGLYETRIDLSQLGGDGGGGGGSGGGGSGGGGSGGGGSGGGGSGGLDDEYRLYSPLVKPDQNIQFWLEQFPQAWAETAGMGLAKQVPPQVIQLKASATPVSVRQYPLSKEAQEGIRPHVQRLIQQGILVPVQSPWNTPLLPVRKPGTNDYRPVQDLREVNKRVQDIHPTVPNPYNLLCALPPQRSWYTVLDLKDAFFCLRLHPTSQPLFAFEWRDPGTGRTGQLTWTRLPQGFKNSPTIFNEALHRDLANFRIQHPQVTLLQYVDDLLLAGATKQDCLEGTKALLLELSDLGYRASAKKAQICRREVTYLGYSLRDGQRWLTEARKKTVVQIPAPTTAKQVREFLGKAGFCRLFIPGFATLAAPLYPLTKPKGEFSWAPEHQKAFDAIKKALLSAPALALPDVTKPFTLYVDERKGVARGVLTQTLGPWRRPVAYLSKKLDPVASGWPVCLKAIAAVAILVKDADKLTLGQNITVIAPHALENIVRQPPDRWMTNARMTHYQSLLLTERVTFAPPAALNPATLLPEETDEPVTHDCHQLLIEETGVRKDLTDIPLTGEVLTWFTDGSSYVVEGKRMAGAAVVDGTRTIWASSLPEGTSAQKAELMALTQALRLAEGKSINIYTDSRYAFATAHVHGAIYKQRGWLTSAGREIKNKEEILSLLEALHLPKRLAIIHCPGHQKAKDPISRGNQMADRVAKQAAQGVNLLPAGKRTADGSEFEKRTADGSEFESPKKKAKVE

SEQ ID NO: 6189 - protein, 2104 aa, synthetic construct
MPAAKRVKLDGGDKKYSIGLDIGTNSVGWAVITDEYKVPSKKFKVLGNTDRHSIKKNLIGALLFDSGETAEATRLKRTARRRYTRRKNRICYLQEIFSNEMAKVDDSFFHRLEESFLVEEDKKHERHPIFGNIVDEVAYHEKYPTIYHLRKKLVDSTDKADLRLIYLALAHMIKFRGHFLIEGDLNPDNSDVDKLFIQLVQTYNQLFEENPINASGVDAKAILSARLSKSRRLENLIAQLPGEKKNGLFGNLIALSLGLTPNFKSNFDLAEDAKLQLSKDTYDDDLDNLLAQIGDQYADLFLAAKNLSDAILLSDILRVNTEITKAPLSASMIKRYDEHHQDLTLLKALVRQQLPEKYKEIFFDQSKNGYAGYIDGGASQEEFYKFIKPILEKMDGTEELLVKLNREDLLRKQRTFDNGSIPHQIHLGELHAILRRQEDFYPFLKDNREKIEKILTFRIPYYVGPLARGNSRFAWMTRKSEETITPWNFEEVVDKGASAQSFIERMTNFDKNLPNEKVLPKHSLLYEYFTVYNELTKVKYVTEGMRKPAFLSGEQKKAIVDLLFKTNRKVTVKQLKEDYFKKIECFDSVEISGVEDRFNASLGTYHDLLKIIKDKDFLDNEENEDILEDIVLTLTLFEDREMIEERLKTYAHLFDDKVMKQLKRRRYTGWGRLSRKLINGIRDKQSGKTILDFLKSDGFANRNFMQLIHDDSLTFKEDIQKAQVSGQGDSLHEHIANLAGSPAIKKGILQTVKVVDELVKVMGRHKPENIVIEMARENQTTQKGQKNSRERMKRIEEGIKELGSQILKEHPVENTQLQNEKLYLYYLQNGRDMYVDQELDINRLSDYDVDHIVPQSFLKDDSIDNKVLTRSDKARGKSDNVPSEEVVKKMKNYWRQLLNAKLITQRKFDNLTKAERGGLSELDKAGFIKRQLVETRQITKHVAQILDSRMNTKYDENDKLIREVKVITLKSKLVSDFRKDFQFYKVREINNYHHAHDAYLNAVVGTALIKKYPKLESEFVYGDYKVYDVRKMIAKSEQEIGKATAKYFFYSNIMNFFKTEITLANGEIRKRPLIETNGETGEIVWDKGRDFATVRKVLSMPQVNIVKKTEVQTGGFSKESILPKRNSDKLIARKKDWDPKKYGGFDSPTVAYSVLVVAKVEKGKSKKLKSVKELLGITIMERSSFEKNPIDFLEAKGYKEVKKDLIIKLPKYSLFELENGRKRMLASAGELQKGNELALPSKYVNFLYLASHYEKLKGSPEDNEQKQLFVEQHKHYLDEIIEQISEFSKRVILADANLDKVLSAYNKHRDKPIREQAENIIHLFTLTNLGAPAAFKYFDTTIDRKRYTSTKEVLDATLIHQSITGLYETRIDLSQLGGDGGGGGGSGGGGSGGGGSGGGGSGGGGSGGTLQLDDEYRLYSPLVKPDQNIQFWLEQFPQAWAETAGMGLAKQVPPQVIQLKASATPVSVRQYPLSKEAQEGIRPHVQRLIQQGILVPVQSPWNTPLLPVRKPGTNDYRPVQDLREVNKRVQDIHPTVPNPYNLLCALPPQRSWYTVLDLKDAFFCLRLHPTSQPLFAFEWRDPGTGRTGQLTWTRLPQGFKNSPTIFDEALHRDLANFRIQHPQVTLLQYVDDLLLAGATKQDCLEGTKALLLELSDLGYRASAKKAQICRREVTYLGYSLRDGQRWLTEARKKTVVQIPAPTTAKQVREFLGTAGFCRLWIPGFATLAAPLYPLTKEKGEFSWAPEHQKAFDAIKKALLSAPALALPDVTKPFTLYVDERKGVARGVLTQTLGPWRRPVAYLSKKLDPVASGWPVCLKAIAAVAILVKDADKLTLGQNITVIAPHALENIVRQPPDRWMTNARMTHYQSLLLTERVTFAPPAALNPATLLPEETDEPVTHDCHQLLIEETGVRKDLTDIPLTGEVLTWFTDGSSYVVEGKRMAGAAVVDGTRTIWASSLPEGTSAQKAELMALTQALRLAEGKSINIYTDSRYAFATAHVHGAIYKQRGLLTSAGREIKNKEEILSLLEALHLPKRLAIIHCPGHQKAKDPISRGNQMADRVAKQAAQGVNLLAGKRTADGSEFEKRTADGSEFESPKKKAKVE

SEQ ID NO: 6190 - protein, 2104 aa, synthetic construct
MPAAKRVKLDGGDKKYSIGLDIGTNSVGWAVITDEYKVPSKKFKVLGNTDRHSIKKNLIGALLFDSGETAEATRLKRTARRRYTRRKNRICYLQEIFSNEMAKVDDSFFHRLEESFLVEEDKKHERHPIFGNIVDEVAYHEKYPTIYHLRKKLVDSTDKADLRLIYLALAHMIKFRGHFLIEGDLNPDNSDVDKLFIQLVQTYNQLFEENPINASGVDAKAILSARLSKSRRLENLIAQLPGEKKNGLFGNLIALSLGLTPNFKSNFDLAEDAKLQLSKDTYDDDLDNLLAQIGDQYADLFLAAKNLSDAILLSDILRVNTEITKAPLSASMIKRYDEHHQDLTLLKALVRQQLPEKYKEIFFDQSKNGYAGYIDGGASQEEFYKFIKPILEKMDGTEELLVKLNREDLLRKQRTFDNGSIPHQIHLGELHAILRRQEDFYPFLKDNREKIEKILTFRIPYYVGPLARGNSRFAWMTRKSEETITPWNFEEVVDKGASAQSFIERMTNFDKNLPNEKVLPKHSLLYEYFTVYNELTKVKYVTEGMRKPAFLSGEQKKAIVDLLFKTNRKVTVKQLKEDYFKKIECFDSVEISGVEDRFNASLGTYHDLLKIIKDKDFLDNEENEDILEDIVLTLTLFEDREMIEERLKTYAHLFDDKVMKQLKRRRYTGWGRLSRKLINGIRDKQSGKTILDFLKSDGFANRNFMQLIHDDSLTFKEDIQKAQVSGQGDSLHEHIANLAGSPAIKKGILQTVKVVDELVKVMGRHKPENIVIEMARENQTTQKGQKNSRERMKRIEEGIKELGSQILKEHPVENTQLQNEKLYLYYLQNGRDMYVDQELDINRLSDYDVDHIVPQSFLKDDSIDNKVLTRSDKARGKSDNVPSEEVVKKMKNYWRQLLNAKLITQRKFDNLTKAERGGLSELDKAGFIKRQLVETRQITKHVAQILDSRMNTKYDENDKLIREVKVITLKSKLVSDFRKDFQFYKVREINNYHHAHDAYLNAVVGTALIKKYPKLESEFVYGDYKVYDVRKMIAKSEQEIGKATAKYFFYSNIMNFFKTEITLANGEIRKRPLIETNGETGEIVWDKGRDFATVRKVLSMPQVNIVKKTEVQTGGFSKESILPKRNSDKLIARKKDWDPKKYGGFDSPTVAYSVLVVAKVEKGKSKKLKSVKELLGITIMERSSFEKNPIDFLEAKGYKEVKKDLIIKLPKYSLFELENGRKRMLASAGELQKGNELALPSKYVNFLYLASHYEKLKGSPEDNEQKQLFVEQHKHYLDEIIEQISEFSKRVILADANLDKVLSAYNKHRDKPIREQAENIIHLFTLTNLGAPAAFKYFDTTIDRKRYTSTKEVLDATLIHQSITGLYETRIDLSQLGGDGGGGGGSGGGGSGGGGSGGGGSGGGGSGGTLQLDDEYRLYSPLVKPDQNIQFWLEQFPQAWAETAGMGLAKQVPPQVIQLKASATPVSVRQYPLSKEAQEGIRPHVQRLIQQGILVPVQSPWNTPLLPVRKPGTNDYRPVQDLREVNKRVQDIHPTVPNPYNLLCALPPQRSWYTVLDLKDAFFCLRLHPTSQPLFAFEWRDPGTGRTGQLTWTRLPQGFKNSPTIFNEALHRDLANFRIQHPQVTLLQYVDDLLLAGATKQDCLEGTKALLLELSDLGYRASAKKAQICRREVTYLGYSLRDGQRWLTEARKKTVVQIPAPTTAKQVREFLGTAGFCRLWIPGFATLAAPLYPLTKPKGEFSWAPEHQKAFDAIKKALLSAPALALPDVTKPFTLYVDERKGVARGVLTQTLGPWRRPVAYLSKKLDPVASGWPVCLKAIAAVAILVKDADKLTLGQNITVIAPHALENIVRQPPDRWMTNARMTHYQSLLLTERVTFAPPAALNPATLLPEETDEPVTHDCHQLLIEETGVRKDLTDIPLTGEVLTWFTDGSSYVVEGKRMAGAAVVDGTRTIWASSLPEGTSAQKAELMALTQALRLAEGKSINIYTDSRYAFATAHVHGAIYKQRGWLTSAGREIKNKEEILSLLEALHLPKRLAIIHCPGHQKAKDPISRGNQMADRVAKQAAQGVNLLAGKRTADGSEFEKRTADGSEFESPKKKAKVE

SEQ ID NO: 6191 - protein, 2190 aa, synthetic construct
MPAAKRVKLDGGDKKYSIGLDIGTNSVGWAVITDEYKVPSKKFKVLGNTDRHSIKKNLIGALLFDSGETAEATRLKRTARRRYTRRKNRICYLQEIFSNEMAKVDDSFFHRLEESFLVEEDKKHERHPIFGNIVDEVAYHEKYPTIYHLRKKLVDSTDKADLRLIYLALAHMIKFRGHFLIEGDLNPDNSDVDKLFIQLVQTYNQLFEENPINASGVDAKAILSARLSKSRRLENLIAQLPGEKKNGLFGNLIALSLGLTPNFKSNFDLAEDAKLQLSKDTYDDDLDNLLAQIGDQYADLFLAAKNLSDAILLSDILRVNTEITKAPLSASMIKRYDEHHQDLTLLKALVRQQLPEKYKEIFFDQSKNGYAGYIDGGASQEEFYKFIKPILEKMDGTEELLVKLNREDLLRKQRTFDNGSIPHQIHLGELHAILRRQEDFYPFLKDNREKIEKILTFRIPYYVGPLARGNSRFAWMTRKSEETITPWNFEEVVDKGASAQSFIERMTNFDKNLPNEKVLPKHSLLYEYFTVYNELTKVKYVTEGMRKPAFLSGEQKKAIVDLLFKTNRKVTVKQLKEDYFKKIECFDSVEISGVEDRFNASLGTYHDLLKIIKDKDFLDNEENEDILEDIVLTLTLFEDREMIEERLKTYAHLFDDKVMKQLKRRRYTGWGRLSRKLINGIRDKQSGKTILDFLKSDGFANRNFMQLIHDDSLTFKEDIQKAQVSGQGDSLHEHIANLAGSPAIKKGILQTVKVVDELVKVMGRHKPENIVIEMARENQTTQKGQKNSRERMKRIEEGIKELGSQILKEHPVENTQLQNEKLYLYYLQNGRDMYVDQELDINRLSDYDVDHIVPQSFLKDDSIDNKVLTRSDKARGKSDNVPSEEVVKKMKNYWRQLLNAKLITQRKFDNLTKAERGGLSELDKAGFIKRQLVETRQITKHVAQILDSRMNTKYDENDKLIREVKVITLKSKLVSDFRKDFQFYKVREINNYHHAHDAYLNAVVGTALIKKYPKLESEFVYGDYKVYDVRKMIAKSEQEIGKATAKYFFYSNIMNFFKTEITLANGEIRKRPLIETNGETGEIVWDKGRDFATVRKVLSMPQVNIVKKTEVQTGGFSKESILPKRNSDKLIARKKDWDPKKYGGFDSPTVAYSVLVVAKVEKGKSKKLKSVKELLGITIMERSSFEKNPIDFLEAKGYKEVKKDLIIKLPKYSLFELENGRKRMLASAGELQKGNELALPSKYVNFLYLASHYEKLKGSPEDNEQKQLFVEQHKHYLDEIIEQISEFSKRVILADANLDKVLSAYNKHRDKPIREQAENIIHLFTLTNLGAPAAFKYFDTTIDRKRYTSTKEVLDATLIHQSITGLYETRIDLSQLGGDGGGGGGSGGGGSGGGGSGGGGSGGGGSGGMDPLQLLQPLEAEIKGTKLKAHWNSGATITCVPEAFLEDERPIQTMLIKTIHGEKQQDVYYLTFKVQGRKVEAEVLASPYDYILLNPSDVPWLMKKPLQLTVLVPLHEYQERLLQQTALPKEQKELLQKLFLKYDALWQHWENQVGHRRIKPHNIATGTLAPRPQKQYPINPKAKPSIQIVIDDLLKQGVLIQQNSTMNTPVYPVPKPDGKWRMVLDYREVNKTIPLIAAQNQHSAGILSSIYRGKYKTTLDLTNGFWAHPITPESYWLTAFTWQGKQYCWTRLPQGFLNSPALFTADVVDLLKEIPNVQAYVDDIYISHDDPQEHLEQLEKIFSILLNAGYVVSLKKSEIAQREVEFLGFNITKEGRGLTDTFKQKLLNITPPKDLKQLQSILGLLNFARNFIPNYSELVKPLYTIVANANGKFISWTEDNSNQLQHIISVLNQADNLEERNPETRLIIKVNSSPSAGYIRYYNEGSKRPIMYVNYIFSKAEAKFTQTEKLLTTMHKGLIKAMDLAMGQEILVYSPIVSMTKIQRTPLPERKALPVRWITWMTYLEDPRIQFHYDKSLPELQQIPNVTEDVIAKTKHPSEFAMVFYTDGSAIKHPDVNKSHSAGMGIAQVQFIPEYKIVHQWSIPLGDHTAQLAEIAAVEFACKKALKISGPVLIVTDSFYVAESANKELPYWKSNGFLNNKKKPLRHVSKWKSIAECLQLKPDIIIMHEKGHQQPMTTLHTEGNNLADKLATQGSYVVHAGKRTADGSEFEKRTADGSEFESPKKKAKVE

SEQ ID NO: 6192 - protein, 2101 aa, synthetic construct
MPAAKRVKLDGGDKKYSIGLDIGTNSVGWAVITDEYKVPSKKFKVLGNTDRHSIKKNLIGALLFDSGETAEATRLKRTARRRYTRRKNRICYLQEIFSNEMAKVDDSFFHRLEESFLVEEDKKHERHPIFGNIVDEVAYHEKYPTIYHLRKKLVDSTDKADLRLIYLALAHMIKFRGHFLIEGDLNPDNSDVDKLFIQLVQTYNQLFEENPINASGVDAKAILSARLSKSRRLENLIAQLPGEKKNGLFGNLIALSLGLTPNFKSNFDLAEDAKLQLSKDTYDDDLDNLLAQIGDQYADLFLAAKNLSDAILLSDILRVNTEITKAPLSASMIKRYDEHHQDLTLLKALVRQQLPEKYKEIFFDQSKNGYAGYIDGGASQEEFYKFIKPILEKMDGTEELLVKLNREDLLRKQRTFDNGSIPHQIHLGELHAILRRQEDFYPFLKDNREKIEKILTFRIPYYVGPLARGNSRFAWMTRKSEETITPWNFEEVVDKGASAQSFIERMTNFDKNLPNEKVLPKHSLLYEYFTVYNELTKVKYVTEGMRKPAFLSGEQKKAIVDLLFKTNRKVTVKQLKEDYFKKIECFDSVEISGVEDRFNASLGTYHDLLKIIKDKDFLDNEENEDILEDIVLTLTLFEDREMIEERLKTYAHLFDDKVMKQLKRRRYTGWGRLSRKLINGIRDKQSGKTILDFLKSDGFANRNFMQLIHDDSLTFKEDIQKAQVSGQGDSLHEHIANLAGSPAIKKGILQTVKVVDELVKVMGRHKPENIVIEMARENQTTQKGQKNSRERMKRIEEGIKELGSQILKEHPVENTQLQNEKLYLYYLQNGRDMYVDQELDINRLSDYDVDHIVPQSFLKDDSIDNKVLTRSDKARGKSDNVPSEEVVKKMKNYWRQLLNAKLITQRKFDNLTKAERGGLSELDKAGFIKRQLVETRQITKHVAQILDSRMNTKYDENDKLIREVKVITLKSKLVSDFRKDFQFYKVREINNYHHAHDAYLNAVVGTALIKKYPKLESEFVYGDYKVYDVRKMIAKSEQEIGKATAKYFFYSNIMNFFKTEITLANGEIRKRPLIETNGETGEIVWDKGRDFATVRKVLSMPQVNIVKKTEVQTGGFSKESILPKRNSDKLIARKKDWDPKKYGGFDSPTVAYSVLVVAKVEKGKSKKLKSVKELLGITIMERSSFEKNPIDFLEAKGYKEVKKDLIIKLPKYSLFELENGRKRMLASAGELQKGNELALPSKYVNFLYLASHYEKLKGSPEDNEQKQLFVEQHKHYLDEIIEQISEFSKRVILADANLDKVLSAYNKHRDKPIREQAENIIHLFTLTNLGAPAAFKYFDTTIDRKRYTSTKEVLDATLIHQSITGLYETRIDLSQLGGDGGGGGGSGGGGSGGGGSGGGGSGGGGSGGVPWLMKKPLQLTVLVPLHEYQERLLQQTALPKEQKELLQKLFLKYDALWQHWENQVGHRRIKPHNIATGTLAPRPQKQYPINPKAKPSIQIVIDDLLKQGVLIQQNSTMNTPVYPVPKPDGKWRMVLDYREVNKTIPLIAAQNQHSAGILSSIYRGKYKTTLDLTNGFWAHPITPESYWLTAFTWQGKQYCWTRLPQGFLNSPALFNADVVDLLKEIPNVQAYVDDIYISHDDPQEHLEQLEKIFSILLNAGYVVSLKKSEIAQREVEFLGFNITKEGRGLTDTFKQKLLNITPPKDLKQLQSILGKLNFARNFIPNYSELVKPLYTIVAPANGKFISWTEDNSNQLQHIISVLNQADNLEERNPETRLIIKVNSSPSAGYIRYYNEGSKRPIMYVNYIFSKAEAKFTQTEKLLTTMHKGLIKAMDLAMGQEILVYSPIVSMTKIQRTPLPERKALPVRWITWMTYLEDPRIQFHYDKSLPELQQIPNVTEDVIAKTKHPSEFAMVFYTDGSAIKHPDVNKSHSAGMGIAQVQFIPEYKIVHQWSIPLGDHTAQLAEIAAVEFACKKALKISGPVLIVTDSFYVAESANKELPYWKSNGFLNNKKKPLRHVSKWKSIAECLQLKPDIIIMHEKGHQQPMTTLHTEGNNLADKLATQGSYVVHAGKRTADGSEFEKRTADGSEFESPKKKAKVE

SEQ ID NO: 6193 - protein, 2190 aa, synthetic construct
MPAAKRVKLDGGDKKYSIGLDIGTNSVGWAVITDEYKVPSKKFKVLGNTDRHSIKKNLIGALLFDSGETAEATRLKRTARRRYTRRKNRICYLQEIFSNEMAKVDDSFFHRLEESFLVEEDKKHERHPIFGNIVDEVAYHEKYPTIYHLRKKLVDSTDKADLRLIYLALAHMIKFRGHFLIEGDLNPDNSDVDKLFIQLVQTYNQLFEENPINASGVDAKAILSARLSKSRRLENLIAQLPGEKKNGLFGNLIALSLGLTPNFKSNFDLAEDAKLQLSKDTYDDDLDNLLAQIGDQYADLFLAAKNLSDAILLSDILRVNTEITKAPLSASMIKRYDEHHQDLTLLKALVRQQLPEKYKEIFFDQSKNGYAGYIDGGASQEEFYKFIKPILEKMDGTEELLVKLNREDLLRKQRTFDNGSIPHQIHLGELHAILRRQEDFYPFLKDNREKIEKILTFRIPYYVGPLARGNSRFAWMTRKSEETITPWNFEEVVDKGASAQSFIERMTNFDKNLPNEKVLPKHSLLYEYFTVYNELTKVKYVTEGMRKPAFLSGEQKKAIVDLLFKTNRKVTVKQLKEDYFKKIECFDSVEISGVEDRFNASLGTYHDLLKIIKDKDFLDNEENEDILEDIVLTLTLFEDREMIEERLKTYAHLFDDKVMKQLKRRRYTGWGRLSRKLINGIRDKQSGKTILDFLKSDGFANRNFMQLIHDDSLTFKEDIQKAQVSGQGDSLHEHIANLAGSPAIKKGILQTVKVVDELVKVMGRHKPENIVIEMARENQTTQKGQKNSRERMKRIEEGIKELGSQILKEHPVENTQLQNEKLYLYYLQNGRDMYVDQELDINRLSDYDVDHIVPQSFLKDDSIDNKVLTRSDKARGKSDNVPSEEVVKKMKNYWRQLLNAKLITQRKFDNLTKAERGGLSELDKAGFIKRQLVETRQITKHVAQILDSRMNTKYDENDKLIREVKVITLKSKLVSDFRKDFQFYKVREINNYHHAHDAYLNAVVGTALIKKYPKLESEFVYGDYKVYDVRKMIAKSEQEIGKATAKYFFYSNIMNFFKTEITLANGEIRKRPLIETNGETGEIVWDKGRDFATVRKVLSMPQVNIVKKTEVQTGGFSKESILPKRNSDKLIARKKDWDPKKYGGFDSPTVAYSVLVVAKVEKGKSKKLKSVKELLGITIMERSSFEKNPIDFLEAKGYKEVKKDLIIKLPKYSLFELENGRKRMLASAGELQKGNELALPSKYVNFLYLASHYEKLKGSPEDNEQKQLFVEQHKHYLDEIIEQISEFSKRVILADANLDKVLSAYNKHRDKPIREQAENIIHLFTLTNLGAPAAFKYFDTTIDRKRYTSTKEVLDATLIHQSITGLYETRIDLSQLGGDGGGGGGSGGGGSGGGGSGGGGSGGGGSGGMDPLQLLQPLEAEIKGTKLKAHWNSGATITCVPEAFLEDERPIQTMLIKTIHGEKQQDVYYLTFKVQGRKVEAEVLASPYDYILLNPSDVPWLMKKPLQLTVLVPLHEYQERLLQQTALPKEQKELLQKLFLKYDALWQHWENQVGHRRIKPHNIATGTLAPRPQKQYPINPKAKPSIQIVIDDLLKQGVLIQQNSTMNTPVYPVPKPDGKWRMVLDYREVNKTIPLIAAQNQHSAGILSSIYRGKYKTTLDLTNGFWAHPITPESYWLTAFTWQGKQYCWTRLPQGFLNSPALFNADVVDLLKEIPNVQAYVDDIYISHDDPQEHLEQLEKIFSILLNAGYVVSLKKSEIAQREVEFLGFNITKEGRGLTDTFKQKLLNITPPKDLKQLQSILGLLNFARNFIPNYSELVKPLYTIVAPANGKFISWTEDNSNQLQHIISVLNQADNLEERNPETRLIIKVNSSPSAGYIRYYNEGSKRPIMYVNYIFSKAEAKFTQTEKLLTTMHKGLIKAMDLAMGQEILVYSPIVSMTKIQRTPLPERKALPVRWITWMTYLEDPRIQFHYDKSLPELQQIPNVTEDVIAKTKHPSEFAMVFYTDGSAIKHPDVNKSHSAGMGIAQVQFIPEYKIVHQWSIPLGDHTAQLAEIAAVEFACKKALKISGPVLIVTDSFYVAESANKELPYWKSNGFLNNKKKPLRHVSKWKSIAECLQLKPDIIIMHEKGHQQPMTTLHTEGNNLADKLATQGSYVVHAGKRTADGSEFEKRTADGSEFESPKKKAKVE

SEQ ID NO: 6194 - protein, 2190 aa, synthetic construct
MPAAKRVKLDGGDKKYSIGLDIGTNSVGWAVITDEYKVPSKKFKVLGNTDRHSIKKNLIGALLFDSGETAEATRLKRTARRRYTRRKNRICYLQEIFSNEMAKVDDSFFHRLEESFLVEEDKKHERHPIFGNIVDEVAYHEKYPTIYHLRKKLVDSTDKADLRLIYLALAHMIKFRGHFLIEGDLNPDNSDVDKLFIQLVQTYNQLFEENPINASGVDAKAILSARLSKSRRLENLIAQLPGEKKNGLFGNLIALSLGLTPNFKSNFDLAEDAKLQLSKDTYDDDLDNLLAQIGDQYADLFLAAKNLSDAILLSDILRVNTEITKAPLSASMIKRYDEHHQDLTLLKALVRQQLPEKYKEIFFDQSKNGYAGYIDGGASQEEFYKFIKPILEKMDGTEELLVKLNREDLLRKQRTFDNGSIPHQIHLGELHAILRRQEDFYPFLKDNREKIEKILTFRIPYYVGPLARGNSRFAWMTRKSEETITPWNFEEVVDKGASAQSFIERMTNFDKNLPNEKVLPKHSLLYEYFTVYNELTKVKYVTEGMRKPAFLSGEQKKAIVDLLFKTNRKVTVKQLKEDYFKKIECFDSVEISGVEDRFNASLGTYHDLLKIIKDKDFLDNEENEDILEDIVLTLTLFEDREMIEERLKTYAHLFDDKVMKQLKRRRYTGWGRLSRKLINGIRDKQSGKTILDFLKSDGFANRNFMQLIHDDSLTFKEDIQKAQVSGQGDSLHEHIANLAGSPAIKKGILQTVKVVDELVKVMGRHKPENIVIEMARENQTTQKGQKNSRERMKRIEEGIKELGSQILKEHPVENTQLQNEKLYLYYLQNGRDMYVDQELDINRLSDYDVDHIVPQSFLKDDSIDNKVLTRSDKARGKSDNVPSEEVVKKMKNYWRQLLNAKLITQRKFDNLTKAERGGLSELDKAGFIKRQLVETRQITKHVAQILDSRMNTKYDENDKLIREVKVITLKSKLVSDFRKDFQFYKVREINNYHHAHDAYLNAVVGTALIKKYPKLESEFVYGDYKVYDVRKMIAKSEQEIGKATAKYFFYSNIMNFFKTEITLANGEIRKRPLIETNGETGEIVWDKGRDFATVRKVLSMPQVNIVKKTEVQTGGFSKESILPKRNSDKLIARKKDWDPKKYGGFDSPTVAYSVLVVAKVEKGKSKKLKSVKELLGITIMERSSFEKNPIDFLEAKGYKEVKKDLIIKLPKYSLFELENGRKRMLASAGELQKGNELALPSKYVNFLYLASHYEKLKGSPEDNEQKQLFVEQHKHYLDEIIEQISEFSKRVILADANLDKVLSAYNKHRDKPIREQAENIIHLFTLTNLGAPAAFKYFDTTIDRKRYTSTKEVLDATLIHQSITGLYETRIDLSQLGGDGGGGGGSGGGGSGGGGSGGGGSGGGGSGGMDPLQLLQPLEAEIKGTKLKAHWNSGATITCVPEAFLEDERPIQTMLIKTIHGEKQQDVYYLTFKVQGRKVEAEVLASPYDYILLNPSDVPWLMKKPLQLTVLVPLHEYQERLLQQTALPKEQKELLQKLFLKYDALWQHWENQVGHRRIKPHNIATGTLAPRPQKQYPINPKAKPSIQIVIDDLLKQGVLIQQNSTMNTPVYPVPKPDGKWRMVLDYREVNKTIPLIAAQNQHSAGILSSIYRGKYKTTLDLTNGFWAHPITPESYWLTAFTWQGKQYCWTRLPQGFLNSPALFNADVVDLLKEIPNVQAYVDDIYISHDDPQEHLEQLEKIFSILLNAGYVVSLKKSEIAQREVEFLGFNITKEGRGLTDTFKQKLLNITPPKDLKQLQSILGKLNFARNFIPNYSELVKPLYTIVAPANGKFISWTEDNSNQLQHIISVLNQADNLEERNPETRLIIKVNSSPSAGYIRYYNEGSKRPIMYVNYIFSKAEAKFTQTEKLLTTMHKGLIKAMDLAMGQEILVYSPIVSMTKIQRTPLPERKALPVRWITWMTYLEDPRIQFHYDKSLPELQQIPNVTEDVIAKTKHPSEFAMVFYTDGSAIKHPDVNKSHSAGMGIAQVQFIPEYKIVHQWSIPLGDHTAQLAEIAAVEFACKKALKISGPVLIVTDSFYVAESANKELPYWKSNGFLNNKKKPLRHVSKWKSIAECLQLKPDIIIMHEKGHQQPMTTLHTEGNNLADKLATQGSYVVHAGKRTADGSEFEKRTADGSEFESPKKKAKVE

SEQ ID NO: 6195 - protein, 2101 aa, synthetic construct
MPAAKRVKLDGGDKKYSIGLDIGTNSVGWAVITDEYKVPSKKFKVLGNTDRHSIKKNLIGALLFDSGETAEATRLKRTARRRYTRRKNRICYLQEIFSNEMAKVDDSFFHRLEESFLVEEDKKHERHPIFGNIVDEVAYHEKYPTIYHLRKKLVDSTDKADLRLIYLALAHMIKFRGHFLIEGDLNPDNSDVDKLFIQLVQTYNQLFEENPINASGVDAKAILSARLSKSRRLENLIAQLPGEKKNGLFGNLIALSLGLTPNFKSNFDLAEDAKLQLSKDTYDDDLDNLLAQIGDQYADLFLAAKNLSDAILLSDILRVNTEITKAPLSASMIKRYDEHHQDLTLLKALVRQQLPEKYKEIFFDQSKNGYAGYIDGGASQEEFYKFIKPILEKMDGTEELLVKLNREDLLRKQRTFDNGSIPHQIHLGELHAILRRQEDFYPFLKDNREKIEKILTFRIPYYVGPLARGNSRFAWMTRKSEETITPWNFEEVVDKGASAQSFIERMTNFDKNLPNEKVLPKHSLLYEYFTVYNELTKVKYVTEGMRKPAFLSGEQKKAIVDLLFKTNRKVTVKQLKEDYFKKIECFDSVEISGVEDRFNASLGTYHDLLKIIKDKDFLDNEENEDILEDIVLTLTLFEDREMIEERLKTYAHLFDDKVMKQLKRRRYTGWGRLSRKLINGIRDKQSGKTILDFLKSDGFANRNFMQLIHDDSLTFKEDIQKAQVSGQGDSLHEHIANLAGSPAIKKGILQTVKVVDELVKVMGRHKPENIVIEMARENQTTQKGQKNSRERMKRIEEGIKELGSQILKEHPVENTQLQNEKLYLYYLQNGRDMYVDQELDINRLSDYDVDHIVPQSFLKDDSIDNKVLTRSDKARGKSDNVPSEEVVKKMKNYWRQLLNAKLITQRKFDNLTKAERGGLSELDKAGFIKRQLVETRQITKHVAQILDSRMNTKYDENDKLIREVKVITLKSKLVSDFRKDFQFYKVREINNYHHAHDAYLNAVVGTALIKKYPKLESEFVYGDYKVYDVRKMIAKSEQEIGKATAKYFFYSNIMNFFKTEITLANGEIRKRPLIETNGETGEIVWDKGRDFATVRKVLSMPQVNIVKKTEVQTGGFSKESILPKRNSDKLIARKKDWDPKKYGGFDSPTVAYSVLVVAKVEKGKSKKLKSVKELLGITIMERSSFEKNPIDFLEAKGYKEVKKDLIIKLPKYSLFELENGRKRMLASAGELQKGNELALPSKYVNFLYLASHYEKLKGSPEDNEQKQLFVEQHKHYLDEIIEQISEFSKRVILADANLDKVLSAYNKHRDKPIREQAENIIHLFTLTNLGAPAAFKYFDTTIDRKRYTSTKEVLDATLIHQSITGLYETRIDLSQLGGDGGGGGGSGGGGSGGGGSGGGGSGGGGSGGIPWLMKKPLQLTTLVPLQEYEERLLKQTMLTGSYKEKLQSLFLKYDALWQHWENQVGHRRIKPHHIATGTVNPRPQKQYPINPKAKASIQTVINDLLKQGVLIQQNSIMNTPVYPVPKPDGKWRMVLDYREVNKTIPLIAAQNQHSAGILSSIFRGKYKTTLDLSNGFWAHSITPESYWLTAFTWLGQQYCWTRLPQGFLNSPALFNADVVDLLKEVPNVQVYVDDIYISHDDPREHLEQLEKVFSLLLNAGYVVSLKKSEIAQHEVEFLGFNITKEGRGLTETFKQKLLNITPPRDLKQLQSILGKLNFARNFIPNFSELVKPLYNIIATAPGKYITWTTDNSQQLQNIISMLNSAENLEERNPEVRLIMKVNTSPSAGYIRFYNEFAKRPIMYLNYVYTKAEVKFTNTEKLLTTIHKGLIKALDLGMGQEILVYSPIVSMTKIQKTPLPERKALPIRWITWMSYLEDPRIQFHYDKTLPELQQVPTVTDDIIAKIKHPSEFSMVFYTDGSAIKHPNVNKSHNAGMGIAQVQFKPEFTVINTWSIPLGDHTAQLAEVAAVEFACKKALKIDGPVLIVTDSFYVAESVNKELPYWQSNGFFNNKKKPLKHVSKWKSIADCIQLKPDIIIIHEKGHQPTASTFHTEGNNLADKLATQGSYVVNAGKRTADGSEFEKRTADGSEFESPKKKAKVE

SEQ ID NO: 6196 - protein, 2190 aa, synthetic construct
MPAAKRVKLDGGDKKYSIGLDIGTNSVGWAVITDEYKVPSKKFKVLGNTDRHSIKKNLIGALLFDSGETAEATRLKRTARRRYTRRKNRICYLQEIFSNEMAKVDDSFFHRLEESFLVEEDKKHERHPIFGNIVDEVAYHEKYPTIYHLRKKLVDSTDKADLRLIYLALAHMIKFRGHFLIEGDLNPDNSDVDKLFIQLVQTYNQLFEENPINASGVDAKAILSARLSKSRRLENLIAQLPGEKKNGLFGNLIALSLGLTPNFKSNFDLAEDAKLQLSKDTYDDDLDNLLAQIGDQYADLFLAAKNLSDAILLSDILRVNTEITKAPLSASMIKRYDEHHQDLTLLKALVRQQLPEKYKEIFFDQSKNGYAGYIDGGASQEEFYKFIKPILEKMDGTEELLVKLNREDLLRKQRTFDNGSIPHQIHLGELHAILRRQEDFYPFLKDNREKIEKILTFRIPYYVGPLARGNSRFAWMTRKSEETITPWNFEEVVDKGASAQSFIERMTNFDKNLPNEKVLPKHSLLYEYFTVYNELTKVKYVTEGMRKPAFLSGEQKKAIVDLLFKTNRKVTVKQLKEDYFKKIECFDSVEISGVEDRFNASLGTYHDLLKIIKDKDFLDNEENEDILEDIVLTLTLFEDREMIEERLKTYAHLFDDKVMKQLKRRRYTGWGRLSRKLINGIRDKQSGKTILDFLKSDGFANRNFMQLIHDDSLTFKEDIQKAQVSGQGDSLHEHIANLAGSPAIKKGILQTVKVVDELVKVMGRHKPENIVIEMARENQTTQKGQKNSRERMKRIEEGIKELGSQILKEHPVENTQLQNEKLYLYYLQNGRDMYVDQELDINRLSDYDVDHIVPQSFLKDDSIDNKVLTRSDKARGKSDNVPSEEVVKKMKNYWRQLLNAKLITQRKFDNLTKAERGGLSELDKAGFIKRQLVETRQITKHVAQILDSRMNTKYDENDKLIREVKVITLKSKLVSDFRKDFQFYKVREINNYHHAHDAYLNAVVGTALIKKYPKLESEFVYGDYKVYDVRKMIAKSEQEIGKATAKYFFYSNIMNFFKTEITLANGEIRKRPLIETNGETGEIVWDKGRDFATVRKVLSMPQVNIVKKTEVQTGGFSKESILPKRNSDKLIARKKDWDPKKYGGFDSPTVAYSVLVVAKVEKGKSKKLKSVKELLGITIMERSSFEKNPIDFLEAKGYKEVKKDLIIKLPKYSLFELENGRKRMLASAGELQKGNELALPSKYVNFLYLASHYEKLKGSPEDNEQKQLFVEQHKHYLDEIIEQISEFSKRVILADANLDKVLSAYNKHRDKPIREQAENIIHLFTLTNLGAPAAFKYFDTTIDRKRYTSTKEVLDATLIHQSITGLYETRIDLSQLGGDGGGGGGSGGGGSGGGGSGGGGSGGGGSGGMDPLQLLQPLEAEIKGTKLKAHWNSGATITCVPQAFLEEEVPIKNIWIKTIHGEKEQPVYYLTFKIQGRKVEAEVISSPYDYILVSPSDIPWLMKKPLQLTTLVPLQEYEERLLKQTMLTGSYKEKLQSLFLKYDALWQHWENQVGHRRIKPHHIATGTVNPRPQKQYPINPKAKASIQTVINDLLKQGVLIQQNSIMNTPVYPVPKPDGKWRMVLDYREVNKTIPLIAAQNQHSAGILSSIFRGKYKTTLDLSNGFWAHSITPESYWLTAFTWLGQQYCWTRLPQGFLNSPALFNADVVDLLKEVPNVQVYVDDIYISHDDPREHLEQLEKVFSLLLNAGYVVSLKKSEIAQHEVEFLGFNITKEGRGLTETFKQKLLNITPPRDLKQLQSILGLLNFARNFIPNFSELVKPLYNIIATAPGKYITWTTDNSQQLQNIISMLNSAENLEERNPEVRLIMKVNTSPSAGYIRFYNEFAKRPIMYLNYVYTKAEVKFTNTEKLLTTIHKGLIKALDLGMGQEILVYSPIVSMTKIQKTPLPERKALPIRWITWMSYLEDPRIQFHYDKTLPELQQVPTVTDDIIAKIKHPSEFSMVFYTDGSAIKHPNVNKSHNAGMGIAQVQFKPEFTVINTWSIPLGDHTAQLAEVAAVEFACKKALKIDGPVLIVTDSFYVAESVNKELPYWQSNGFFNNKKKPLKHVSKWKSIADCIQLKPDIIIIHEKGHQPTASTFHTEGNNLADKLATQGSYVVNAGKRTADGSEFEKRTADGSEFESPKKKAKVE

SEQ ID NO: 6197 - protein, 2190 aa, synthetic construct
MPAAKRVKLDGGDKKYSIGLDIGTNSVGWAVITDEYKVPSKKFKVLGNTDRHSIKKNLIGALLFDSGETAEATRLKRTARRRYTRRKNRICYLQEIFSNEMAKVDDSFFHRLEESFLVEEDKKHERHPIFGNIVDEVAYHEKYPTIYHLRKKLVDSTDKADLRLIYLALAHMIKFRGHFLIEGDLNPDNSDVDKLFIQLVQTYNQLFEENPINASGVDAKAILSARLSKSRRLENLIAQLPGEKKNGLFGNLIALSLGLTPNFKSNFDLAEDAKLQLSKDTYDDDLDNLLAQIGDQYADLFLAAKNLSDAILLSDILRVNTEITKAPLSASMIKRYDEHHQDLTLLKALVRQQLPEKYKEIFFDQSKNGYAGYIDGGASQEEFYKFIKPILEKMDGTEELLVKLNREDLLRKQRTFDNGSIPHQIHLGELHAILRRQEDFYPFLKDNREKIEKILTFRIPYYVGPLARGNSRFAWMTRKSEETITPWNFEEVVDKGASAQSFIERMTNFDKNLPNEKVLPKHSLLYEYFTVYNELTKVKYVTEGMRKPAFLSGEQKKAIVDLLFKTNRKVTVKQLKEDYFKKIECFDSVEISGVEDRFNASLGTYHDLLKIIKDKDFLDNEENEDILEDIVLTLTLFEDREMIEERLKTYAHLFDDKVMKQLKRRRYTGWGRLSRKLINGIRDKQSGKTILDFLKSDGFANRNFMQLIHDDSLTFKEDIQKAQVSGQGDSLHEHIANLAGSPAIKKGILQTVKVVDELVKVMGRHKPENIVIEMARENQTTQKGQKNSRERMKRIEEGIKELGSQILKEHPVENTQLQNEKLYLYYLQNGRDMYVDQELDINRLSDYDVDHIVPQSFLKDDSIDNKVLTRSDKARGKSDNVPSEEVVKKMKNYWRQLLNAKLITQRKFDNLTKAERGGLSELDKAGFIKRQLVETRQITKHVAQILDSRMNTKYDENDKLIREVKVITLKSKLVSDFRKDFQFYKVREINNYHHAHDAYLNAVVGTALIKKYPKLESEFVYGDYKVYDVRKMIAKSEQEIGKATAKYFFYSNIMNFFKTEITLANGEIRKRPLIETNGETGEIVWDKGRDFATVRKVLSMPQVNIVKKTEVQTGGFSKESILPKRNSDKLIARKKDWDPKKYGGFDSPTVAYSVLVVAKVEKGKSKKLKSVKELLGITIMERSSFEKNPIDFLEAKGYKEVKKDLIIKLPKYSLFELENGRKRMLASAGELQKGNELALPSKYVNFLYLASHYEKLKGSPEDNEQKQLFVEQHKHYLDEIIEQISEFSKRVILADANLDKVLSAYNKHRDKPIREQAENIIHLFTLTNLGAPAAFKYFDTTIDRKRYTSTKEVLDATLIHQSITGLYETRIDLSQLGGDGGGGGGSGGGGSGGGGSGGGGSGGGGSGGMDPLQLLQPLEAEIKGTKLKAHWNSGATITCVPQAFLEEEVPIKNIWIKTIHGEKEQPVYYLTFKIQGRKVEAEVISSPYDYILVSPSDIPWLMKKPLQLTTLVPLQEYEERLLKQTMLTGSYKEKLQSLFLKYDALWQHWENQVGHRRIKPHHIATGTVNPRPQKQYPINPKAKASIQTVINDLLKQGVLIQQNSIMNTPVYPVPKPDGKWRMVLDYREVNKTIPLIAAQNQHSAGILSSIFRGKYKTTLDLSNGFWAHSITPESYWLTAFTWLGQQYCWTRLPQGFLNSPALFNADVVDLLKEVPNVQVYVDDIYISHDDPREHLEQLEKVFSLLLNAGYVVSLKKSEIAQHEVEFLGFNITKEGRGLTETFKQKLLNITPPRDLKQLQSILGKLNFARNFIPNFSELVKPLYNIIATAPGKYITWTTDNSQQLQNIISMLNSAENLEERNPEVRLIMKVNTSPSAGYIRFYNEFAKRPIMYLNYVYTKAEVKFTNTEKLLTTIHKGLIKALDLGMGQEILVYSPIVSMTKIQKTPLPERKALPIRWITWMSYLEDPRIQFHYDKTLPELQQVPTVTDDIIAKIKHPSEFSMVFYTDGSAIKHPNVNKSHNAGMGIAQVQFKPEFTVINTWSIPLGDHTAQLAEVAAVEFACKKALKIDGPVLIVTDSFYVAESVNKELPYWQSNGFFNNKKKPLKHVSKWKSIADCIQLKPDIIIIHEKGHQPTASTFHTEGNNLADKLATQGSYVVNAGKRTADGSEFEKRTADGSEFESPKKKAKVE

SEQ ID NO: 6198 - protein, 2108 aa, synthetic construct
MPAAKRVKLDGGDKKYSIGLDIGTNSVGWAVITDEYKVPSKKFKVLGNTDRHSIKKNLIGALLFDSGETAEATRLKRTARRRYTRRKNRICYLQEIFSNEMAKVDDSFFHRLEESFLVEEDKKHERHPIFGNIVDEVAYHEKYPTIYHLRKKLVDSTDKADLRLIYLALAHMIKFRGHFLIEGDLNPDNSDVDKLFIQLVQTYNQLFEENPINASGVDAKAILSARLSKSRRLENLIAQLPGEKKNGLFGNLIALSLGLTPNFKSNFDLAEDAKLQLSKDTYDDDLDNLLAQIGDQYADLFLAAKNLSDAILLSDILRVNTEITKAPLSASMIKRYDEHHQDLTLLKALVRQQLPEKYKEIFFDQSKNGYAGYIDGGASQEEFYKFIKPILEKMDGTEELLVKLNREDLLRKQRTFDNGSIPHQIHLGELHAILRRQEDFYPFLKDNREKIEKILTFRIPYYVGPLARGNSRFAWMTRKSEETITPWNFEEVVDKGASAQSFIERMTNFDKNLPNEKVLPKHSLLYEYFTVYNELTKVKYVTEGMRKPAFLSGEQKKAIVDLLFKTNRKVTVKQLKEDYFKKIECFDSVEISGVEDRFNASLGTYHDLLKIIKDKDFLDNEENEDILEDIVLTLTLFEDREMIEERLKTYAHLFDDKVMKQLKRRRYTGWGRLSRKLINGIRDKQSGKTILDFLKSDGFANRNFMQLIHDDSLTFKEDIQKAQVSGQGDSLHEHIANLAGSPAIKKGILQTVKVVDELVKVMGRHKPENIVIEMARENQTTQKGQKNSRERMKRIEEGIKELGSQILKEHPVENTQLQNEKLYLYYLQNGRDMYVDQELDINRLSDYDVDHIVPQSFLKDDSIDNKVLTRSDKARGKSDNVPSEEVVKKMKNYWRQLLNAKLITQRKFDNLTKAERGGLSELDKAGFIKRQLVETRQITKHVAQILDSRMNTKYDENDKLIREVKVITLKSKLVSDFRKDFQFYKVREINNYHHAHDAYLNAVVGTALIKKYPKLESEFVYGDYKVYDVRKMIAKSEQEIGKATAKYFFYSNIMNFFKTEITLANGEIRKRPLIETNGETGEIVWDKGRDFATVRKVLSMPQVNIVKKTEVQTGGFSKESILPKRNSDKLIARKKDWDPKKYGGFDSPTVAYSVLVVAKVEKGKSKKLKSVKELLGITIMERSSFEKNPIDFLEAKGYKEVKKDLIIKLPKYSLFELENGRKRMLASAGELQKGNELALPSKYVNFLYLASHYEKLKGSPEDNEQKQLFVEQHKHYLDEIIEQISEFSKRVILADANLDKVLSAYNKHRDKPIREQAENIIHLFTLTNLGAPAAFKYFDTTIDRKRYTSTKEVLDATLIHQSITGLYETRIDLSQLGGDGGGGGGSGGGGSGGGGSGGGGSGGGGSGGVLNLEEEYRLHEKPVPSSIDPSWLQLFPTVWAERAGMGLANQVPPVVVELRSGASPVAVRQYPMSKEAREGIRPHIQRFLDLGVLVPCQSPWNTPLLPVKKPGTNDYRPVQDLREINKRVQDIHPTVPNPYNLLSSLPPSHTWYSVLDLKDAFFCLKLHPNSQPLFAFEWRDPEKGNTGQLTWTRLPQGFKNSPTLFNEALHRDLAPFRALNPQVVLLQYVDDLLVAAPTYRDCKEGTQKLLQELSKLGYRVSAKKAQLCQKEVTYLGYLLKEGKRWLTPARKATVMKIPPPTTPRQVREFLGTAGFCRLWIPGFASLAAPLYPLTKPSIPFIWTEEHQKAFDRIKEALLSAPALALPDLTKPFTLYVDERAGVARGVLTQTLGPWRRPVAYLSKKLDPVASGWPTCLKAVAAVALLLKDADKLTLGQNVTVIASHSLESIVRQPPDRWMTNARMTHYQSLLLNERVSFAPPAVLNPATLLPVESEATPVHRCSEILAEETGTRRDLKDQPLPGVPAWYTDGSSFIAEGKRRAGAAIVDGKRTVWASSLPEGTSAQKAELVALTQALRLAEGKDINIYTDSRYAFATAHIHGAIYKQRGWLTSAGKDIKNKEEILALLEAIHLPKRVAIIHCPGHQKGNDPVATGNRRADEAAKQAALSTRVLAETTKPAGKRTADGSEFEKRTADGSEFESPKKKAKVE

SEQ ID NO: 6199 - protein, 2110 aa, synthetic construct
MPAAKRVKLDGGDKKYSIGLDIGTNSVGWAVITDEYKVPSKKFKVLGNTDRHSIKKNLIGALLFDSGETAEATRLKRTARRRYTRRKNRICYLQEIFSNEMAKVDDSFFHRLEESFLVEEDKKHERHPIFGNIVDEVAYHEKYPTIYHLRKKLVDSTDKADLRLIYLALAHMIKFRGHFLIEGDLNPDNSDVDKLFIQLVQTYNQLFEENPINASGVDAKAILSARLSKSRRLENLIAQLPGEKKNGLFGNLIALSLGLTPNFKSNFDLAEDAKLQLSKDTYDDDLDNLLAQIGDQYADLFLAAKNLSDAILLSDILRVNTEITKAPLSASMIKRYDEHHQDLTLLKALVRQQLPEKYKEIFFDQSKNGYAGYIDGGASQEEFYKFIKPILEKMDGTEELLVKLNREDLLRKQRTFDNGSIPHQIHLGELHAILRRQEDFYPFLKDNREKIEKILTFRIPYYVGPLARGNSRFAWMTRKSEETITPWNFEEVVDKGASAQSFIERMTNFDKNLPNEKVLPKHSLLYEYFTVYNELTKVKYVTEGMRKPAFLSGEQKKAIVDLLFKTNRKVTVKQLKEDYFKKIECFDSVEISGVEDRFNASLGTYHDLLKIIKDKDFLDNEENEDILEDIVLTLTLFEDREMIEERLKTYAHLFDDKVMKQLKRRRYTGWGRLSRKLINGIRDKQSGKTILDFLKSDGFANRNFMQLIHDDSLTFKEDIQKAQVSGQGDSLHEHIANLAGSPAIKKGILQTVKVVDELVKVMGRHKPENIVIEMARENQTTQKGQKNSRERMKRIEEGIKELGSQILKEHPVENTQLQNEKLYLYYLQNGRDMYVDQELDINRLSDYDVDHIVPQSFLKDDSIDNKVLTRSDKARGKSDNVPSEEVVKKMKNYWRQLLNAKLITQRKFDNLTKAERGGLSELDKAGFIKRQLVETRQITKHVAQILDSRMNTKYDENDKLIREVKVITLKSKLVSDFRKDFQFYKVREINNYHHAHDAYLNAVVGTALIKKYPKLESEFVYGDYKVYDVRKMIAKSEQEIGKATAKYFFYSNIMNFFKTEITLANGEIRKRPLIETNGETGEIVWDKGRDFATVRKVLSMPQVNIVKKTEVQTGGFSKESILPKRNSDKLIARKKDWDPKKYGGFDSPTVAYSVLVVAKVEKGKSKKLKSVKELLGITIMERSSFEKNPIDFLEAKGYKEVKKDLIIKLPKYSLFELENGRKRMLASAGELQKGNELALPSKYVNFLYLASHYEKLKGSPEDNEQKQLFVEQHKHYLDEIIEQISEFSKRVILADANLDKVLSAYNKHRDKPIREQAENIIHLFTLTNLGAPAAFKYFDTTIDRKRYTSTKEVLDATLIHQSITGLYETRIDLSQLGGDGGGGGGSGGGGSGGGGSGGGGSGGGGSGGTLNIEDEYRLHETSKEPDVPLGSTWLSDFPQAWAETGGMGLAVRQAPLIIPLKATSTPVSIKQYPMSQEARLGIKPHIQRLLDQGILVPCQSPWNTPLLPVKKPGTNDYRPVQDLREVNKRVEDIHPTVPNPYNLLSGLPPSHQWYTVLDLKDAFFCLRLHPTSQPLFAFEWRDPEMGISGQLTWTRLPQGFKNSPTLFNEALHRDLADFRIQHPDLILLQYVDDLLLAATSEQDCQRGTRALLQTLGNLGYRASAKKAQICQKQVKYLGYLLKEGQRWLTEARKETVMGQPTPKTPRQLREFLGTAGFCRLWIPGFAEMAAPLYPLTKPGTLFNWGPDQQKAYQEIKQALLTAPALGLPDLTKPFELFVDEKQGYAKGVLTQKLGPWRRPVAYLSKKLDPVAAGWPPCLRMVAAIAVLTKDAGKLTMGQPLVILAPHAVEALVKQPPDRWLSNARMTHYQAMLLDTDRVQFGPVVALNPATLLPLPEKEAPHDCLEILAETHGTRPDLTDQPIPDADYTWYTDGSSFLQEGQRRAGAAVTTETEVIWARALPAGTSAQRAELIALTQALKMAEGKKLNVYTDSRYAFATAHVHGEIYRRRGWLTSEGREIKNKNEILALLKALFLPKRLSIIHCPGHQKGNSAEARGNRMADQAAREAAMKAVLETSTLLAGKRTADGSEFEKRTADGSEFESPKKKAKVE

SEQ ID NO: 6200 - protein, 2117 aa, synthetic construct
MPAAKRVKLDGGDKKYSIGLDIGTNSVGWAVITDEYKVPSKKFKVLGNTDRHSIKKNLIGALLFDSGETAEATRLKRTARRRYTRRKNRICYLQEIFSNEMAKVDDSFFHRLEESFLVEEDKKHERHPIFGNIVDEVAYHEKYPTIYHLRKKLVDSTDKADLRLIYLALAHMIKFRGHFLIEGDLNPDNSDVDKLFIQLVQTYNQLFEENPINASGVDAKAILSARLSKSRRLENLIAQLPGEKKNGLFGNLIALSLGLTPNFKSNFDLAEDAKLQLSKDTYDDDLDNLLAQIGDQYADLFLAAKNLSDAILLSDILRVNTEITKAPLSASMIKRYDEHHQDLTLLKALVRQQLPEKYKEIFFDQSKNGYAGYIDGGASQEEFYKFIKPILEKMDGTEELLVKLNREDLLRKQRTFDNGSIPHQIHLGELHAILRRQEDFYPFLKDNREKIEKILTFRIPYYVGPLARGNSRFAWMTRKSEETITPWNFEEVVDKGASAQSFIERMTNFDKNLPNEKVLPKHSLLYEYFTVYNELTKVKYVTEGMRKPAFLSGEQKKAIVDLLFKTNRKVTVKQLKEDYFKKIECFDSVEISGVEDRFNASLGTYHDLLKIIKDKDFLDNEENEDILEDIVLTLTLFEDREMIEERLKTYAHLFDDKVMKQLKRRRYTGWGRLSRKLINGIRDKQSGKTILDFLKSDGFANRNFMQLIHDDSLTFKEDIQKAQVSGQGDSLHEHIANLAGSPAIKKGILQTVKVVDELVKVMGRHKPENIVIEMARENQTTQKGQKNSRERMKRIEEGIKELGSQILKEHPVENTQLQNEKLYLYYLQNGRDMYVDQELDINRLSDYDVDHIVPQSFLKDDSIDNKVLTRSDKARGKSDNVPSEEVVKKMKNYWRQLLNAKLITQRKFDNLTKAERGGLSELDKAGFIKRQLVETRQITKHVAQILDSRMNTKYDENDKLIREVKVITLKSKLVSDFRKDFQFYKVREINNYHHAHDAYLNAVVGTALIKKYPKLESEFVYGDYKVYDVRKMIAKSEQEIGKATAKYFFYSNIMNFFKTEITLANGEIRKRPLIETNGETGEIVWDKGRDFATVRKVLSMPQVNIVKKTEVQTGGFSKESILPKRNSDKLIARKKDWDPKKYGGFDSPTVAYSVLVVAKVEKGKSKKLKSVKELLGITIMERSSFEKNPIDFLEAKGYKEVKKDLIIKLPKYSLFELENGRKRMLASAGELQKGNELALPSKYVNFLYLASHYEKLKGSPEDNEQKQLFVEQHKHYLDEIIEQISEFSKRVILADANLDKVLSAYNKHRDKPIREQAENIIHLFTLTNLGAPAAFKYFDTTIDRKRYTSTKEVLDATLIHQSITGLYETRIDLSQLGGDGGGGGGSGGGGSGGGGSGGGGSGGGGSGGGGSGGTAPLEEEYRLFLEAPIQNVTLLEQWKREIPKVWAEINPPGLASTQAPIHVQLLSTALPVRVRQYPITLEAKRSLRETIRKFRAAGILRPVHSPWNTPLLPVRKSGTSEYRMVQDLREVNKRVETIHPTVPNPYTLLSLLPPDRIWYSVLDLKDAFFCIPLAPESQLIFAFEWADAEEGESGQLTWTRLPQGFKNSPTLFDEALNRDLQGFRLDHPSVSLLQYVDDLLIAADTQAACLSATRDLLMTLAELGYRVSGKKAQLCQEEVTYLGFKIHKGSRSLSNSRTQAILQIPVPKTKRQVREFLGTIGYCRLWIPGFAELAQPLYAATRGGNDPLVWGEKEEEAFQSLKLALTQPPALALPSLDKPFQLFVEETSGAAKGVLTQALGPWKRPVAYLSKRLDPVAAGWPRCLRAIAAAALLTREASKLTFGQDIEITSSHNLESLLRSPPDKWLTNARITQYQVLLLDPPRVRFKQTAALNPATLLPETDDTLPIHHCLDTLDSLTSTRPDLTDQPLAQAEATLFTDGSSYIRDGKRYAGAAVVTLDSVIWAEPLPIGTSAQKAELIALTKALEWSKDKSVNIYTDSRYAFATLHVHGMIYRERGLLTAGGKAIKNAPEILALLTAVWLPKRVAVMHCKGHQKDDAPTSTGNRRADEVAREVAIRPLSTQATISAGKRTADGSEFEKRTADGSEFESPKKKAKVE

SEQ ID NO: 6201 - protein, 2117 aa, synthetic construct
MPAAKRVKLDGGDKKYSIGLDIGTNSVGWAVITDEYKVPSKKFKVLGNTDRHSIKKNLIGALLFDSGETAEATRLKRTARRRYTRRKNRICYLQEIFSNEMAKVDDSFFHRLEESFLVEEDKKHERHPIFGNIVDEVAYHEKYPTIYHLRKKLVDSTDKADLRLIYLALAHMIKFRGHFLIEGDLNPDNSDVDKLFIQLVQTYNQLFEENPINASGVDAKAILSARLSKSRRLENLIAQLPGEKKNGLFGNLIALSLGLTPNFKSNFDLAEDAKLQLSKDTYDDDLDNLLAQIGDQYADLFLAAKNLSDAILLSDILRVNTEITKAPLSASMIKRYDEHHQDLTLLKALVRQQLPEKYKEIFFDQSKNGYAGYIDGGASQEEFYKFIKPILEKMDGTEELLVKLNREDLLRKQRTFDNGSIPHQIHLGELHAILRRQEDFYPFLKDNREKIEKILTFRIPYYVGPLARGNSRFAWMTRKSEETITPWNFEEVVDKGASAQSFIERMTNFDKNLPNEKVLPKHSLLYEYFTVYNELTKVKYVTEGMRKPAFLSGEQKKAIVDLLFKTNRKVTVKQLKEDYFKKIECFDSVEISGVEDRFNASLGTYHDLLKIIKDKDFLDNEENEDILEDIVLTLTLFEDREMIEERLKTYAHLFDDKVMKQLKRRRYTGWGRLSRKLINGIRDKQSGKTILDFLKSDGFANRNFMQLIHDDSLTFKEDIQKAQVSGQGDSLHEHIANLAGSPAIKKGILQTVKVVDELVKVMGRHKPENIVIEMARENQTTQKGQKNSRERMKRIEEGIKELGSQILKEHPVENTQLQNEKLYLYYLQNGRDMYVDQELDINRLSDYDVDHIVPQSFLKDDSIDNKVLTRSDKARGKSDNVPSEEVVKKMKNYWRQLLNAKLITQRKFDNLTKAERGGLSELDKAGFIKRQLVETRQITKHVAQILDSRMNTKYDENDKLIREVKVITLKSKLVSDFRKDFQFYKVREINNYHHAHDAYLNAVVGTALIKKYPKLESEFVYGDYKVYDVRKMIAKSEQEIGKATAKYFFYSNIMNFFKTEITLANGEIRKRPLIETNGETGEIVWDKGRDFATVRKVLSMPQVNIVKKTEVQTGGFSKESILPKRNSDKLIARKKDWDPKKYGGFDSPTVAYSVLVVAKVEKGKSKKLKSVKELLGITIMERSSFEKNPIDFLEAKGYKEVKKDLIIKLPKYSLFELENGRKRMLASAGELQKGNELALPSKYVNFLYLASHYEKLKGSPEDNEQKQLFVEQHKHYLDEIIEQISEFSKRVILADANLDKVLSAYNKHRDKPIREQAENIIHLFTLTNLGAPAAFKYFDTTIDRKRYTSTKEVLDATLIHQSITGLYETRIDLSQLGGDGGGGGGSGGGGSGGGGSGGGGSGGGGSGGGGSGGTAPLEEEYRLFLEAPIQNVTLLEQWKREIPKVWAEINPPGLASTQAPIHVQLLSTALPVRVRQYPITLEAKRSLRETIRKFRAAGILRPVHSPWNTPLLPVRKSGTSEYRMVQDLREVNKRVETIHPTVPNPYTLLSLLPPDRIWYSVLDLKDAFFCIPLAPESQLIFAFEWADAEEGESGQLTWTRLPQGFKNSPTLFNEALNRDLQGFRLDHPSVSLLQYVDDLLIAADTQAACLSATRDLLMTLAELGYRVSGKKAQLCQEEVTYLGFKIHKGSRSLSNSRTQAILQIPVPKTKRQVREFLGTIGYCRLWIPGFAELAQPLYAATRPGNDPLVWGEKEEEAFQSLKLALTQPPALALPSLDKPFQLFVEETSGAAKGVLTQALGPWKRPVAYLSKRLDPVAAGWPRCLRAIAAAALLTREASKLTFGQDIEITSSHNLESLLRSPPDKWLTNARITQYQVLLLDPPRVRFKQTAALNPATLLPETDDTLPIHHCLDTLDSLTSTRPDLTDQPLAQAEATLFTDGSSYIRDGKRYAGAAVVTLDSVIWAEPLPIGTSAQKAELIALTKALEWSKDKSVNIYTDSRYAFATLHVHGMIYRERGWLTAGGKAIKNAPEILALLTAVWLPKRVAVMHCKGHQKDDAPTSTGNRRADEVAREVAIRPLSTQATISAGKRTADGSEFEKRTADGSEFESPKKKAKVE

SEQ ID NO: 6202 - protein, 2121 aa, synthetic construct
MPAAKRVKLDGGDKKYSIGLDIGTNSVGWAVITDEYKVPSKKFKVLGNTDRHSIKKNLIGALLFDSGETAEATRLKRTARRRYTRRKNRICYLQEIFSNEMAKVDDSFFHRLEESFLVEEDKKHERHPIFGNIVDEVAYHEKYPTIYHLRKKLVDSTDKADLRLIYLALAHMIKFRGHFLIEGDLNPDNSDVDKLFIQLVQTYNQLFEENPINASGVDAKAILSARLSKSRRLENLIAQLPGEKKNGLFGNLIALSLGLTPNFKSNFDLAEDAKLQLSKDTYDDDLDNLLAQIGDQYADLFLAAKNLSDAILLSDILRVNTEITKAPLSASMIKRYDEHHQDLTLLKALVRQQLPEKYKEIFFDQSKNGYAGYIDGGASQEEFYKFIKPILEKMDGTEELLVKLNREDLLRKQRTFDNGSIPHQIHLGELHAILRRQEDFYPFLKDNREKIEKILTFRIPYYVGPLARGNSRFAWMTRKSEETITPWNFEEVVDKGASAQSFIERMTNFDKNLPNEKVLPKHSLLYEYFTVYNELTKVKYVTEGMRKPAFLSGEQKKAIVDLLFKTNRKVTVKQLKEDYFKKIECFDSVEISGVEDRFNASLGTYHDLLKIIKDKDFLDNEENEDILEDIVLTLTLFEDREMIEERLKTYAHLFDDKVMKQLKRRRYTGWGRLSRKLINGIRDKQSGKTILDFLKSDGFANRNFMQLIHDDSLTFKEDIQKAQVSGQGDSLHEHIANLAGSPAIKKGILQTVKVVDELVKVMGRHKPENIVIEMARENQTTQKGQKNSRERMKRIEEGIKELGSQILKEHPVENTQLQNEKLYLYYLQNGRDMYVDQELDINRLSDYDVDHIVPQSFLKDDSIDNKVLTRSDKARGKSDNVPSEEVVKKMKNYWRQLLNAKLITQRKFDNLTKAERGGLSELDKAGFIKRQLVETRQITKHVAQILDSRMNTKYDENDKLIREVKVITLKSKLVSDFRKDFQFYKVREINNYHHAHDAYLNAVVGTALIKKYPKLESEFVYGDYKVYDVRKMIAKSEQEIGKATAKYFFYSNIMNFFKTEITLANGEIRKRPLIETNGETGEIVWDKGRDFATVRKVLSMPQVNIVKKTEVQTGGFSKESILPKRNSDKLIARKKDWDPKKYGGFDSPTVAYSVLVVAKVEKGKSKKLKSVKELLGITIMERSSFEKNPIDFLEAKGYKEVKKDLIIKLPKYSLFELENGRKRMLASAGELQKGNELALPSKYVNFLYLASHYEKLKGSPEDNEQKQLFVEQHKHYLDEIIEQISEFSKRVILADANLDKVLSAYNKHRDKPIREQAENIIHLFTLTNLGAPAAFKYFDTTIDRKRYTSTKEVLDATLIHQSITGLYETRIDLSQLGGDGGGGGGSGGGGSGGGGSGGGGSGGGGSGGGGSGGTVSLQDEHRLFDIPVTTSLPDVWLQDFPQAWAETGGLGRAKCQAPIIIDLKPTAVPVSIKQYPMSLEAHMGIRQHIIKFLELGVLRPCRSPWNTPLLPVKKPGTQDYRPVQDLREINKRTVDIHPTVPNPYNLLSTLKPDYSWYTVLDLKDAFFCLPLAPQSQELFAFEWKDPERGISGQLTWTRLPQGFKNSPTLFDEALHRDLTDFRTQHPEVTLLQYVDDLLLAAPTKKACTQGTRHLLQELGEKGYRASAKKAQICQTKVTYLGYILSEGKRWLTPGRIETVARIPPPRNPREVREFLGTAGFCRLWIPGFAELAAPLYALTKESTPFTWQTEHQLAFEALKKALLSAPALGLPDTSKPFTLFLDERQGIAKGVLTQKLGPWKRPVAYLSKKLDPVAAGWPPCLRIMAATAMLVKDSAKLTLGQPLTVITPHTLEAIVRQPPDRWITNARLTHYQALLLDTDRVQFGPPVTLNPATLLPVPENQPSPHDCRQVLAETHGTREDLKDQELPDADHTWYTDGSSYLDSGTRRAGAAVVDGHNTIWAQSLPPGTSAQKAELIALTKALELSKGKKANIYTDSRYAFATAHTHGSIYERRGLLTSEGKEIKNKAEIIALLKALFLPQEVAIIHCPGHQKGQDPVAVGNRQADRVARQAAMAEVLTLATEPDNTSHITAGKRTADGSEFEKRTADGSEFESPKKKAKVE

SEQ ID NO: 6203 - protein, 2121 aa, synthetic construct
MPAAKRVKLDGGDKKYSIGLDIGTNSVGWAVITDEYKVPSKKFKVLGNTDRHSIKKNLIGALLFDSGETAEATRLKRTARRRYTRRKNRICYLQEIFSNEMAKVDDSFFHRLEESFLVEEDKKHERHPIFGNIVDEVAYHEKYPTIYHLRKKLVDSTDKADLRLIYLALAHMIKFRGHFLIEGDLNPDNSDVDKLFIQLVQTYNQLFEENPINASGVDAKAILSARLSKSRRLENLIAQLPGEKKNGLFGNLIALSLGLTPNFKSNFDLAEDAKLQLSKDTYDDDLDNLLAQIGDQYADLFLAAKNLSDAILLSDILRVNTEITKAPLSASMIKRYDEHHQDLTLLKALVRQQLPEKYKEIFFDQSKNGYAGYIDGGASQEEFYKFIKPILEKMDGTEELLVKLNREDLLRKQRTFDNGSIPHQIHLGELHAILRRQEDFYPFLKDNREKIEKILTFRIPYYVGPLARGNSRFAWMTRKSEETITPWNFEEVVDKGASAQSFIERMTNFDKNLPNEKVLPKHSLLYEYFTVYNELTKVKYVTEGMRKPAFLSGEQKKAIVDLLFKTNRKVTVKQLKEDYFKKIECFDSVEISGVEDRFNASLGTYHDLLKIIKDKDFLDNEENEDILEDIVLTLTLFEDREMIEERLKTYAHLFDDKVMKQLKRRRYTGWGRLSRKLINGIRDKQSGKTILDFLKSDGFANRNFMQLIHDDSLTFKEDIQKAQVSGQGDSLHEHIANLAGSPAIKKGILQTVKVVDELVKVMGRHKPENIVIEMARENQTTQKGQKNSRERMKRIEEGIKELGSQILKEHPVENTQLQNEKLYLYYLQNGRDMYVDQELDINRLSDYDVDHIVPQSFLKDDSIDNKVLTRSDKARGKSDNVPSEEVVKKMKNYWRQLLNAKLITQRKFDNLTKAERGGLSELDKAGFIKRQLVETRQITKHVAQILDSRMNTKYDENDKLIREVKVITLKSKLVSDFRKDFQFYKVREINNYHHAHDAYLNAVVGTALIKKYPKLESEFVYGDYKVYDVRKMIAKSEQEIGKATAKYFFYSNIMNFFKTEITLANGEIRKRPLIETNGETGEIVWDKGRDFATVRKVLSMPQVNIVKKTEVQTGGFSKESILPKRNSDKLIARKKDWDPKKYGGFDSPTVAYSVLVVAKVEKGKSKKLKSVKELLGITIMERSSFEKNPIDFLEAKGYKEVKKDLIIKLPKYSLFELENGRKRMLASAGELQKGNELALPSKYVNFLYLASHYEKLKGSPEDNEQKQLFVEQHKHYLDEIIEQISEFSKRVILADANLDKVLSAYNKHRDKPIREQAENIIHLFTLTNLGAPAAFKYFDTTIDRKRYTSTKEVLDATLIHQSITGLYETRIDLSQLGGDGGGGGGSGGGGSGGGGSGGGGSGGGGSGGGGSGGTVSLQDEHRLFDIPVTTSLPDVWLQDFPQAWAETGGLGRAKCQAPIIIDLKPTAVPVSIKQYPMSLEAHMGIRQHIIKFLELGVLRPCRSPWNTPLLPVKKPGTQDYRPVQDLREINKRTVDIHPTVPNPYNLLSTLKPDYSWYTVLDLKDAFFCLPLAPQSQELFAFEWKDPERGISGQLTWTRLPQGFKNSPTLFNEALHRDLTDFRTQHPEVTLLQYVDDLLLAAPTKKACTQGTRHLLQELGEKGYRASAKKAQICQTKVTYLGYILSEGKRWLTPGRIETVARIPPPRNPREVREFLGTAGFCRLWIPGFAELAAPLYALTKPSTPFTWQTEHQLAFEALKKALLSAPALGLPDTSKPFTLFLDERQGIAKGVLTQKLGPWKRPVAYLSKKLDPVAAGWPPCLRIMAATAMLVKDSAKLTLGQPLTVITPHTLEAIVRQPPDRWITNARLTHYQALLLDTDRVQFGPPVTLNPATLLPVPENQPSPHDCRQVLAETHGTREDLKDQELPDADHTWYTDGSSYLDSGTRRAGAAVVDGHNTIWAQSLPPGTSAQKAELIALTKALELSKGKKANIYTDSRYAFATAHTHGSIYERRGWLTSEGKEIKNKAEIIALLKALFLPQEVAIIHCPGHQKGQDPVAVGNRQADRVARQAAMAEVLTLATEPDNTSHITAGKRTADGSEFEKRTADGSEFESPKKKAKVE

SEQ ID NO: 6204 - protein, 2106 aa, synthetic construct
MPAAKRVKLDGGDKKYSIGLDIGTNSVGWAVITDEYKVPSKKFKVLGNTDRHSIKKNLIGALLFDSGETAEATRLKRTARRRYTRRKNRICYLQEIFSNEMAKVDDSFFHRLEESFLVEEDKKHERHPIFGNIVDEVAYHEKYPTIYHLRKKLVDSTDKADLRLIYLALAHMIKFRGHFLIEGDLNPDNSDVDKLFIQLVQTYNQLFEENPINASGVDAKAILSARLSKSRRLENLIAQLPGEKKNGLFGNLIALSLGLTPNFKSNFDLAEDAKLQLSKDTYDDDLDNLLAQIGDQYADLFLAAKNLSDAILLSDILRVNTEITKAPLSASMIKRYDEHHQDLTLLKALVRQQLPEKYKEIFFDQSKNGYAGYIDGGASQEEFYKFIKPILEKMDGTEELLVKLNREDLLRKQRTFDNGSIPHQIHLGELHAILRRQEDFYPFLKDNREKIEKILTFRIPYYVGPLARGNSRFAWMTRKSEETITPWNFEEVVDKGASAQSFIERMTNFDKNLPNEKVLPKHSLLYEYFTVYNELTKVKYVTEGMRKPAFLSGEQKKAIVDLLFKTNRKVTVKQLKEDYFKKIECFDSVEISGVEDRFNASLGTYHDLLKIIKDKDFLDNEENEDILEDIVLTLTLFEDREMIEERLKTYAHLFDDKVMKQLKRRRYTGWGRLSRKLINGIRDKQSGKTILDFLKSDGFANRNFMQLIHDDSLTFKEDIQKAQVSGQGDSLHEHIANLAGSPAIKKGILQTVKVVDELVKVMGRHKPENIVIEMARENQTTQKGQKNSRERMKRIEEGIKELGSQILKEHPVENTQLQNEKLYLYYLQNGRDMYVDQELDINRLSDYDVDHIVPQSFLKDDSIDNKVLTRSDKARGKSDNVPSEEVVKKMKNYWRQLLNAKLITQRKFDNLTKAERGGLSELDKAGFIKRQLVETRQITKHVAQILDSRMNTKYDENDKLIREVKVITLKSKLVSDFRKDFQFYKVREINNYHHAHDAYLNAVVGTALIKKYPKLESEFVYGDYKVYDVRKMIAKSEQEIGKATAKYFFYSNIMNFFKTEITLANGEIRKRPLIETNGETGEIVWDKGRDFATVRKVLSMPQVNIVKKTEVQTGGFSKESILPKRNSDKLIARKKDWDPKKYGGFDSPTVAYSVLVVAKVEKGKSKKLKSVKELLGITIMERSSFEKNPIDFLEAKGYKEVKKDLIIKLPKYSLFELENGRKRMLASAGELQKGNELALPSKYVNFLYLASHYEKLKGSPEDNEQKQLFVEQHKHYLDEIIEQISEFSKRVILADANLDKVLSAYNKHRDKPIREQAENIIHLFTLTNLGAPAAFKYFDTTIDRKRYTSTKEVLDATLIHQSITGLYETRIDLSQLGGDGGGGGGSGGGGSGGGGSGGGGSGGGGSGGGGSGGVPWILKKPLELTIKLDLEEQQGTLLNNSILSKKGKEELKQLFEKYSALWQSWENQVGHRRIRPHKIATGTVKPTPQKQYHINPKAKPDIQIVINDLLKQGVLIQKESTMNTPVYPVPKPNGRWRMVLDYRAVNKVTPLIAVQNQHSYGILGSLFKGRYKTTIDLSNGFWAHPIVPEDYWITAFTWQGKQYCWTVLPQGFLNSPGLFNGDVVDLLQGIPNVEVYVDDVYISHDSEKEHLEYLDILFNRLKEAGYIISLKKSNIANSIVDFLGFQITNEGRGLTDTFKEKLENITAPTTLKQLQSILGLLNFARNFIPDFTELIAPLYALIPKSPKNYVPWQIEHSTTLETLITKLNGAEYLQGRKGDKTLIMKVNASYTTGYIRYYNEGEKKPISYVSIVFSKTELKFTELEKLLTTVHKGLLKALDLSMGQNIHVYSPIVSMQNIQKTPQTAKKALASRWLSWLSYLEDPRIRFFYDPQMPALKDLPAVDTGKDNKKHPSNFQHIFYTDGSAITSPTKEGHLNAGMGIVYFINKDGNLQKQQEWSISLGNHTAQFAEIAAFEFALKKCLPLGGNILVVTDSNYVAKAYNEELDVWASNGFVNNRKKPLKHISKWKSVADLKRLRPDVVVTHEPGHQKLDSSPHAYGNNLADQLATQASFKVHAGKRTADGSEFEKRTADGSEFESPKKKAKVE

SEQ ID NO: 6205 - protein, 2114 aa, synthetic construct
MPAAKRVKLDGGDKKYSIGLDIGTNSVGWAVITDEYKVPSKKFKVLGNTDRHSIKKNLIGALLFDSGETAEATRLKRTARRRYTRRKNRICYLQEIFSNEMAKVDDSFFHRLEESFLVEEDKKHERHPIFGNIVDEVAYHEKYPTIYHLRKKLVDSTDKADLRLIYLALAHMIKFRGHFLIEGDLNPDNSDVDKLFIQLVQTYNQLFEENPINASGVDAKAILSARLSKSRRLENLIAQLPGEKKNGLFGNLIALSLGLTPNFKSNFDLAEDAKLQLSKDTYDDDLDNLLAQIGDQYADLFLAAKNLSDAILLSDILRVNTEITKAPLSASMIKRYDEHHQDLTLLKALVRQQLPEKYKEIFFDQSKNGYAGYIDGGASQEEFYKFIKPILEKMDGTEELLVKLNREDLLRKQRTFDNGSIPHQIHLGELHAILRRQEDFYPFLKDNREKIEKILTFRIPYYVGPLARGNSRFAWMTRKSEETITPWNFEEVVDKGASAQSFIERMTNFDKNLPNEKVLPKHSLLYEYFTVYNELTKVKYVTEGMRKPAFLSGEQKKAIVDLLFKTNRKVTVKQLKEDYFKKIECFDSVEISGVEDRFNASLGTYHDLLKIIKDKDFLDNEENEDILEDIVLTLTLFEDREMIEERLKTYAHLFDDKVMKQLKRRRYTGWGRLSRKLINGIRDKQSGKTILDFLKSDGFANRNFMQLIHDDSLTFKEDIQKAQVSGQGDSLHEHIANLAGSPAIKKGILQTVKVVDELVKVMGRHKPENIVIEMARENQTTQKGQKNSRERMKRIEEGIKELGSQILKEHPVENTQLQNEKLYLYYLQNGRDMYVDQELDINRLSDYDVDHIVPQSFLKDDSIDNKVLTRSDKARGKSDNVPSEEVVKKMKNYWRQLLNAKLITQRKFDNLTKAERGGLSELDKAGFIKRQLVETRQITKHVAQILDSRMNTKYDENDKLIREVKVITLKSKLVSDFRKDFQFYKVREINNYHHAHDAYLNAVVGTALIKKYPKLESEFVYGDYKVYDVRKMIAKSEQEIGKATAKYFFYSNIMNFFKTEITLANGEIRKRPLIETNGETGEIVWDKGRDFATVRKVLSMPQVNIVKKTEVQTGGFSKESILPKRNSDKLIARKKDWDPKKYGGFDSPTVAYSVLVVAKVEKGKSKKLKSVKELLGITIMERSSFEKNPIDFLEAKGYKEVKKDLIIKLPKYSLFELENGRKRMLASAGELQKGNELALPSKYVNFLYLASHYEKLKGSPEDNEQKQLFVEQHKHYLDEIIEQISEFSKRVILADANLDKVLSAYNKHRDKPIREQAENIIHLFTLTNLGAPAAFKYFDTTIDRKRYTSTKEVLDATLIHQSITGLYETRIDLSQLGGDGGGGGGSGGGGSGGGGSGGGGSGGGGSGGGGSGGTLQLEEEYRLFEPESTQKQEMDIWLKNFPQAWAETGGMGTAHCQAPVLIQLKATATPISIRQYPMPHEAYQGIKPHIRRMLDQGILKPCQSPWNTPLLPVKKPGTEDYRPVQDLREVNKRVEDIHPTVPNPYNLLSTLPPSHPWYTVLDLKDAFFCLRLHSESQLLFAFEWRDPEIGLSGQLTWTRLPQGFKNSPTLFNEALHSDLADFRVRYPALVLLQYVDDLLLAAATRTECLEGTKALLETLGNKGYRASAKKAQICLQEVTYLGYSLKDGQRWLTKARKEAILSIPVPKNSRQVREFLGTAGYCRLWIPGFAELAAPLYPLTRPGTLFQWGTEQQLAFEDIKKALLSSPALGLPDITKPFELFIDENSGFAKGVLVQKLGPWKRPVAYLSKKLDTVASGWPPCLRMVAAIAILVKDAGKLTLGQPLTILTSHPVEALVRQPPNKWLSNARMTHYQAMLLDAERVHFGPTVSLNPATLLPLPSGGNHHDCLQILAETHGTRPDLTDQPLPDADLTWYTDGSSFIRNGEREAGAAVTTESEVIWAAPLPPGTSAQRAELIALTQALKMAEGKKLTVYTDSRYAFATTHVHGEIYRRRGWLTSEGKEIKNKNEILALLEALFLPKRLSIIHCPGHQKGDSPQAKGNRLADDTAKKAATETHSSLTVLPAGKRTADGSEFEKRTADGSEFESPKKKAKVE

SEQ ID NO: 6206 - protein, 2106 aa, synthetic construct
MPAAKRVKLDGGDKKYSIGLDIGTNSVGWAVITDEYKVPSKKFKVLGNTDRHSIKKNLIGALLFDSGETAEATRLKRTARRRYTRRKNRICYLQEIFSNEMAKVDDSFFHRLEESFLVEEDKKHERHPIFGNIVDEVAYHEKYPTIYHLRKKLVDSTDKADLRLIYLALAHMIKFRGHFLIEGDLNPDNSDVDKLFIQLVQTYNQLFEENPINASGVDAKAILSARLSKSRRLENLIAQLPGEKKNGLFGNLIALSLGLTPNFKSNFDLAEDAKLQLSKDTYDDDLDNLLAQIGDQYADLFLAAKNLSDAILLSDILRVNTEITKAPLSASMIKRYDEHHQDLTLLKALVRQQLPEKYKEIFFDQSKNGYAGYIDGGASQEEFYKFIKPILEKMDGTEELLVKLNREDLLRKQRTFDNGSIPHQIHLGELHAILRRQEDFYPFLKDNREKIEKILTFRIPYYVGPLARGNSRFAWMTRKSEETITPWNFEEVVDKGASAQSFIERMTNFDKNLPNEKVLPKHSLLYEYFTVYNELTKVKYVTEGMRKPAFLSGEQKKAIVDLLFKTNRKVTVKQLKEDYFKKIECFDSVEISGVEDRFNASLGTYHDLLKIIKDKDFLDNEENEDILEDIVLTLTLFEDREMIEERLKTYAHLFDDKVMKQLKRRRYTGWGRLSRKLINGIRDKQSGKTILDFLKSDGFANRNFMQLIHDDSLTFKEDIQKAQVSGQGDSLHEHIANLAGSPAIKKGILQTVKVVDELVKVMGRHKPENIVIEMARENQTTQKGQKNSRERMKRIEEGIKELGSQILKEHPVENTQLQNEKLYLYYLQNGRDMYVDQELDINRLSDYDVDHIVPQSFLKDDSIDNKVLTRSDKARGKSDNVPSEEVVKKMKNYWRQLLNAKLITQRKFDNLTKAERGGLSELDKAGFIKRQLVETRQITKHVAQILDSRMNTKYDENDKLIREVKVITLKSKLVSDFRKDFQFYKVREINNYHHAHDAYLNAVVGTALIKKYPKLESEFVYGDYKVYDVRKMIAKSEQEIGKATAKYFFYSNIMNFFKTEITLANGEIRKRPLIETNGETGEIVWDKGRDFATVRKVLSMPQVNIVKKTEVQTGGFSKESILPKRNSDKLIARKKDWDPKKYGGFDSPTVAYSVLVVAKVEKGKSKKLKSVKELLGITIMERSSFEKNPIDFLEAKGYKEVKKDLIIKLPKYSLFELENGRKRMLASAGELQKGNELALPSKYVNFLYLASHYEKLKGSPEDNEQKQLFVEQHKHYLDEIIEQISEFSKRVILADANLDKVLSAYNKHRDKPIREQAENIIHLFTLTNLGAPAAFKYFDTTIDRKRYTSTKEVLDATLIHQSITGLYETRIDLSQLGGDGGGGGGSGGGGSGGGGSGGGGSGGGGSGGGGSGGVPWLTQQPLQLTILVPLQEYQEKILSKTALPEDQKQQLKTLFVKYDNLWQHWENQVGHRKIRPHNIATGDYPPRPQKQYPINPKAKPSIQIVIDDLLKQGVLTPQNSTMNTPVYPVPKPDGRWRMVLDYREVNKTIPLTAAQNQHSAGILATIVRQKYKTTLDLANGFWAHPITPESYWLTAFTWQGKQYCWTRLPQGFLNSPALFNADVVDLLKEIPNVQVYVDDIYLSHDDPKEHVQQLEKVFQILLQAGYVVSLKKSEIGQKTVEFLGFNITKEGRGLTDTFKTKLLNITPPKDLKQLQSILGLLNFARNFIPNFAELVQPLYNLIAPAKGKYIEWSEENTKQLNMVIEALNTASNLEERLPEQRLVIKVNTSPSAGYVRYYNETGKKPIMYLNYVFSKAELKFSMLEKLLTTMHKALIKAMDLAMGQEILVYSPIVSMTKIQKTPLPERKALPIRWITWMTYLEDPRIQFHYDKTLPELKHIPDVYTSSQSPVKHPSQYEGVFYTDGSAIKSPDPTKSNNAGMGIVHATYKPEYQVLNQWSIPLGNHTAQMAEIAAVEFACKKALKIPGPVLVITDSFYVAESANKELPYWKSNGFVNNKKKPLKHISKWKSIAECLSMKPDITIQHEKGISLQIPVFILKGNALADKLATQGSYVVNAGKRTADGSEFEKRTADGSEFESPKKKAKVE

SEQ ID NO: 6207 - protein, 2106 aa, synthetic construct
MPAAKRVKLDGGDKKYSIGLDIGTNSVGWAVITDEYKVPSKKFKVLGNTDRHSIKKNLIGALLFDSGETAEATRLKRTARRRYTRRKNRICYLQEIFSNEMAKVDDSFFHRLEESFLVEEDKKHERHPIFGNIVDEVAYHEKYPTIYHLRKKLVDSTDKADLRLIYLALAHMIKFRGHFLIEGDLNPDNSDVDKLFIQLVQTYNQLFEENPINASGVDAKAILSARLSKSRRLENLIAQLPGEKKNGLFGNLIALSLGLTPNFKSNFDLAEDAKLQLSKDTYDDDLDNLLAQIGDQYADLFLAAKNLSDAILLSDILRVNTEITKAPLSASMIKRYDEHHQDLTLLKALVRQQLPEKYKEIFFDQSKNGYAGYIDGGASQEEFYKFIKPILEKMDGTEELLVKLNREDLLRKQRTFDNGSIPHQIHLGELHAILRRQEDFYPFLKDNREKIEKILTFRIPYYVGPLARGNSRFAWMTRKSEETITPWNFEEVVDKGASAQSFIERMTNFDKNLPNEKVLPKHSLLYEYFTVYNELTKVKYVTEGMRKPAFLSGEQKKAIVDLLFKTNRKVTVKQLKEDYFKKIECFDSVEISGVEDRFNASLGTYHDLLKIIKDKDFLDNEENEDILEDIVLTLTLFEDREMIEERLKTYAHLFDDKVMKQLKRRRYTGWGRLSRKLINGIRDKQSGKTILDFLKSDGFANRNFMQLIHDDSLTFKEDIQKAQVSGQGDSLHEHIANLAGSPAIKKGILQTVKVVDELVKVMGRHKPENIVIEMARENQTTQKGQKNSRERMKRIEEGIKELGSQILKEHPVENTQLQNEKLYLYYLQNGRDMYVDQELDINRLSDYDVDHIVPQSFLKDDSIDNKVLTRSDKARGKSDNVPSEEVVKKMKNYWRQLLNAKLITQRKFDNLTKAERGGLSELDKAGFIKRQLVETRQITKHVAQILDSRMNTKYDENDKLIREVKVITLKSKLVSDFRKDFQFYKVREINNYHHAHDAYLNAVVGTALIKKYPKLESEFVYGDYKVYDVRKMIAKSEQEIGKATAKYFFYSNIMNFFKTEITLANGEIRKRPLIETNGETGEIVWDKGRDFATVRKVLSMPQVNIVKKTEVQTGGFSKESILPKRNSDKLIARKKDWDPKKYGGFDSPTVAYSVLVVAKVEKGKSKKLKSVKELLGITIMERSSFEKNPIDFLEAKGYKEVKKDLIIKLPKYSLFELENGRKRMLASAGELQKGNELALPSKYVNFLYLASHYEKLKGSPEDNEQKQLFVEQHKHYLDEIIEQISEFSKRVILADANLDKVLSAYNKHRDKPIREQAENIIHLFTLTNLGAPAAFKYFDTTIDRKRYTSTKEVLDATLIHQSITGLYETRIDLSQLGGDGGGGGGSGGGGSGGGGSGGGGSGGGGSGGGGSGGVPWLTQQPLQLTILVPLQEYQEKILSKTALPEDQKQQLKTLFVKYDNLWQHWENQVGHRKIRPHNIATGDYPPRPQKQYPINPKAKPSIQIVIDDLLKQGVLTPQNSTMNTPVYPVPKPDGRWRMVLDYREVNKTIPLTAAQNQHSAGILATIVRQKYKTTLDLANGFWAHPITPESYWLTAFTWQGKQYCWTRLPQGFLNSPALFNADVVDLLKEIPNVQVYVDDIYLSHDDPKEHVQQLEKVFQILLQAGYVVSLKKSEIGQKTVEFLGFNITKEGRGLTDTFKTKLLNITPPKDLKQLQSILGKLNFARNFIPNFAELVQPLYNLIAPAKGKYIEWSEENTKQLNMVIEALNTASNLEERLPEQRLVIKVNTSPSAGYVRYYNETGKKPIMYLNYVFSKAELKFSMLEKLLTTMHKALIKAMDLAMGQEILVYSPIVSMTKIQKTPLPERKALPIRWITWMTYLEDPRIQFHYDKTLPELKHIPDVYTSSQSPVKHPSQYEGVFYTDGSAIKSPDPTKSNNAGMGIVHATYKPEYQVLNQWSIPLGNHTAQMAEIAAVEFACKKALKIPGPVLVITDSFYVAESANKELPYWKSNGFVNNKKKPLKHISKWKSIAECLSMKPDITIQHEKGISLQIPVFILKGNALADKLATQGSYVVNAGKRTADGSEFEKRTADGSEFESPKKKAKVE

SEQ ID NO: 6208 - protein, 2195 aa, synthetic construct
MPAAKRVKLDGGDKKYSIGLDIGTNSVGWAVITDEYKVPSKKFKVLGNTDRHSIKKNLIGALLFDSGETAEATRLKRTARRRYTRRKNRICYLQEIFSNEMAKVDDSFFHRLEESFLVEEDKKHERHPIFGNIVDEVAYHEKYPTIYHLRKKLVDSTDKADLRLIYLALAHMIKFRGHFLIEGDLNPDNSDVDKLFIQLVQTYNQLFEENPINASGVDAKAILSARLSKSRRLENLIAQLPGEKKNGLFGNLIALSLGLTPNFKSNFDLAEDAKLQLSKDTYDDDLDNLLAQIGDQYADLFLAAKNLSDAILLSDILRVNTEITKAPLSASMIKRYDEHHQDLTLLKALVRQQLPEKYKEIFFDQSKNGYAGYIDGGASQEEFYKFIKPILEKMDGTEELLVKLNREDLLRKQRTFDNGSIPHQIHLGELHAILRRQEDFYPFLKDNREKIEKILTFRIPYYVGPLARGNSRFAWMTRKSEETITPWNFEEVVDKGASAQSFIERMTNFDKNLPNEKVLPKHSLLYEYFTVYNELTKVKYVTEGMRKPAFLSGEQKKAIVDLLFKTNRKVTVKQLKEDYFKKIECFDSVEISGVEDRFNASLGTYHDLLKIIKDKDFLDNEENEDILEDIVLTLTLFEDREMIEERLKTYAHLFDDKVMKQLKRRRYTGWGRLSRKLINGIRDKQSGKTILDFLKSDGFANRNFMQLIHDDSLTFKEDIQKAQVSGQGDSLHEHIANLAGSPAIKKGILQTVKVVDELVKVMGRHKPENIVIEMARENQTTQKGQKNSRERMKRIEEGIKELGSQILKEHPVENTQLQNEKLYLYYLQNGRDMYVDQELDINRLSDYDVDHIVPQSFLKDDSIDNKVLTRSDKARGKSDNVPSEEVVKKMKNYWRQLLNAKLITQRKFDNLTKAERGGLSELDKAGFIKRQLVETRQITKHVAQILDSRMNTKYDENDKLIREVKVITLKSKLVSDFRKDFQFYKVREINNYHHAHDAYLNAVVGTALIKKYPKLESEFVYGDYKVYDVRKMIAKSEQEIGKATAKYFFYSNIMNFFKTEITLANGEIRKRPLIETNGETGEIVWDKGRDFATVRKVLSMPQVNIVKKTEVQTGGFSKESILPKRNSDKLIARKKDWDPKKYGGFDSPTVAYSVLVVAKVEKGKSKKLKSVKELLGITIMERSSFEKNPIDFLEAKGYKEVKKDLIIKLPKYSLFELENGRKRMLASAGELQKGNELALPSKYVNFLYLASHYEKLKGSPEDNEQKQLFVEQHKHYLDEIIEQISEFSKRVILADANLDKVLSAYNKHRDKPIREQAENIIHLFTLTNLGAPAAFKYFDTTIDRKRYTSTKEVLDATLIHQSITGLYETRIDLSQLGGDGGGGGGSGGGGSGGGGSGGGGSGGGGSGGGGSGGMNPLQLLQPLPAEIKGTKLLAHWNSGATITCIPESFLEDEQPIKKTLIKTIHGEKQQNVYYVTFKVKGRKVEAEVIASPYEYILLSPTDVPWLTQQPLQLTILVPLQEYQEKILSKTALPEDQKQQLKTLFVKYDNLWQHWENQVGHRKIRPHNIATGDYPPRPQKQYPINPKAKPSIQIVIDDLLKQGVLTPQNSTMNTPVYPVPKPDGRWRMVLDYREVNKTIPLTAAQNQHSAGILATIVRQKYKTTLDLANGFWAHPITPESYWLTAFTWQGKQYCWTRLPQGFLNSPALFNADVVDLLKEIPNVQVYVDDIYLSHDDPKEHVQQLEKVFQILLQAGYVVSLKKSEIGQKTVEFLGFNITKEGRGLTDTFKTKLLNITPPKDLKQLQSILGLLNFARNFIPNFAELVQPLYNLIAPAKGKYIEWSEENTKQLNMVIEALNTASNLEERLPEQRLVIKVNTSPSAGYVRYYNETGKKPIMYLNYVFSKAELKFSMLEKLLTTMHKALIKAMDLAMGQEILVYSPIVSMTKIQKTPLPERKALPIRWITWMTYLEDPRIQFHYDKTLPELKHIPDVYTSSQSPVKHPSQYEGVFYTDGSAIKSPDPTKSNNAGMGIVHATYKPEYQVLNQWSIPLGNHTAQMAEIAAVEFACKKALKIPGPVLVITDSFYVAESANKELPYWKSNGFVNNKKKPLKHISKWKSIAECLSMKPDITIQHEKGISLQIPVFILKGNALADKLATQGSYVVNAGKRTADGSEFEKRTADGSEFESPKKKAKVE

SEQ ID NO: 6209 - protein, 2195 aa, synthetic construct
MPAAKRVKLDGGDKKYSIGLDIGTNSVGWAVITDEYKVPSKKFKVLGNTDRHSIKKNLIGALLFDSGETAEATRLKRTARRRYTRRKNRICYLQEIFSNEMAKVDDSFFHRLEESFLVEEDKKHERHPIFGNIVDEVAYHEKYPTIYHLRKKLVDSTDKADLRLIYLALAHMIKFRGHFLIEGDLNPDNSDVDKLFIQLVQTYNQLFEENPINASGVDAKAILSARLSKSRRLENLIAQLPGEKKNGLFGNLIALSLGLTPNFKSNFDLAEDAKLQLSKDTYDDDLDNLLAQIGDQYADLFLAAKNLSDAILLSDILRVNTEITKAPLSASMIKRYDEHHQDLTLLKALVRQQLPEKYKEIFFDQSKNGYAGYIDGGASQEEFYKFIKPILEKMDGTEELLVKLNREDLLRKQRTFDNGSIPHQIHLGELHAILRRQEDFYPFLKDNREKIEKILTFRIPYYVGPLARGNSRFAWMTRKSEETITPWNFEEVVDKGASAQSFIERMTNFDKNLPNEKVLPKHSLLYEYFTVYNELTKVKYVTEGMRKPAFLSGEQKKAIVDLLFKTNRKVTVKQLKEDYFKKIECFDSVEISGVEDRFNASLGTYHDLLKIIKDKDFLDNEENEDILEDIVLTLTLFEDREMIEERLKTYAHLFDDKVMKQLKRRRYTGWGRLSRKLINGIRDKQSGKTILDFLKSDGFANRNFMQLIHDDSLTFKEDIQKAQVSGQGDSLHEHIANLAGSPAIKKGILQTVKVVDELVKVMGRHKPENIVIEMARENQTTQKGQKNSRERMKRIEEGIKELGSQILKEHPVENTQLQNEKLYLYYLQNGRDMYVDQELDINRLSDYDVDHIVPQSFLKDDSIDNKVLTRSDKARGKSDNVPSEEVVKKMKNYWRQLLNAKLITQRKFDNLTKAERGGLSELDKAGFIKRQLVETRQITKHVAQILDSRMNTKYDENDKLIREVKVITLKSKLVSDFRKDFQFYKVREINNYHHAHDAYLNAVVGTALIKKYPKLESEFVYGDYKVYDVRKMIAKSEQEIGKATAKYFFYSNIMNFFKTEITLANGEIRKRPLIETNGETGEIVWDKGRDFATVRKVLSMPQVNIVKKTEVQTGGFSKESILPKRNSDKLIARKKDWDPKKYGGFDSPTVAYSVLVVAKVEKGKSKKLKSVKELLGITIMERSSFEKNPIDFLEAKGYKEVKKDLIIKLPKYSLFELENGRKRMLASAGELQKGNELALPSKYVNFLYLASHYEKLKGSPEDNEQKQLFVEQHKHYLDEIIEQISEFSKRVILADANLDKVLSAYNKHRDKPIREQAENIIHLFTLTNLGAPAAFKYFDTTIDRKRYTSTKEVLDATLIHQSITGLYETRIDLSQLGGDGGGGGGSGGGGSGGGGSGGGGSGGGGSGGGGSGGMNPLQLLQPLPAEIKGTKLLAHWNSGATITCIPESFLEDEQPIKKTLIKTIHGEKQQNVYYVTFKVKGRKVEAEVIASPYEYILLSPTDVPWLTQQPLQLTILVPLQEYQEKILSKTALPEDQKQQLKTLFVKYDNLWQHWENQVGHRKIRPHNIATGDYPPRPQKQYPINPKAKPSIQIVIDDLLKQGVLTPQNSTMNTPVYPVPKPDGRWRMVLDYREVNKTIPLTAAQNQHSAGILATIVRQKYKTTLDLANGFWAHPITPESYWLTAFTWQGKQYCWTRLPQGFLNSPALFNADVVDLLKEIPNVQVYVDDIYLSHDDPKEHVQQLEKVFQILLQAGYVVSLKKSEIGQKTVEFLGFNITKEGRGLTDTFKTKLLNITPPKDLKQLQSILGKLNFARNFIPNFAELVQPLYNLIAPAKGKYIEWSEENTKQLNMVIEALNTASNLEERLPEQRLVIKVNTSPSAGYVRYYNETGKKPIMYLNYVFSKAELKFSMLEKLLTTMHKALIKAMDLAMGQEILVYSPIVSMTKIQKTPLPERKALPIRWITWMTYLEDPRIQFHYDKTLPELKHIPDVYTSSQSPVKHPSQYEGVFYTDGSAIKSPDPTKSNNAGMGIVHATYKPEYQVLNQWSIPLGNHTAQMAEIAAVEFACKKALKIPGPVLVITDSFYVAESANKELPYWKSNGFVNNKKKPLKHISKWKSIAECLSMKPDITIQHEKGISLQIPVFILKGNALADKLATQGSYVVNAGKRTADGSEFEKRTADGSEFESPKKKAKVE

SEQ ID NO: 6210 - protein, 2113 aa, synthetic construct
MPAAKRVKLDGGDKKYSIGLDIGTNSVGWAVITDEYKVPSKKFKVLGNTDRHSIKKNLIGALLFDSGETAEATRLKRTARRRYTRRKNRICYLQEIFSNEMAKVDDSFFHRLEESFLVEEDKKHERHPIFGNIVDEVAYHEKYPTIYHLRKKLVDSTDKADLRLIYLALAHMIKFRGHFLIEGDLNPDNSDVDKLFIQLVQTYNQLFEENPINASGVDAKAILSARLSKSRRLENLIAQLPGEKKNGLFGNLIALSLGLTPNFKSNFDLAEDAKLQLSKDTYDDDLDNLLAQIGDQYADLFLAAKNLSDAILLSDILRVNTEITKAPLSASMIKRYDEHHQDLTLLKALVRQQLPEKYKEIFFDQSKNGYAGYIDGGASQEEFYKFIKPILEKMDGTEELLVKLNREDLLRKQRTFDNGSIPHQIHLGELHAILRRQEDFYPFLKDNREKIEKILTFRIPYYVGPLARGNSRFAWMTRKSEETITPWNFEEVVDKGASAQSFIERMTNFDKNLPNEKVLPKHSLLYEYFTVYNELTKVKYVTEGMRKPAFLSGEQKKAIVDLLFKTNRKVTVKQLKEDYFKKIECFDSVEISGVEDRFNASLGTYHDLLKIIKDKDFLDNEENEDILEDIVLTLTLFEDREMIEERLKTYAHLFDDKVMKQLKRRRYTGWGRLSRKLINGIRDKQSGKTILDFLKSDGFANRNFMQLIHDDSLTFKEDIQKAQVSGQGDSLHEHIANLAGSPAIKKGILQTVKVVDELVKVMGRHKPENIVIEMARENQTTQKGQKNSRERMKRIEEGIKELGSQILKEHPVENTQLQNEKLYLYYLQNGRDMYVDQELDINRLSDYDVDHIVPQSFLKDDSIDNKVLTRSDKARGKSDNVPSEEVVKKMKNYWRQLLNAKLITQRKFDNLTKAERGGLSELDKAGFIKRQLVETRQITKHVAQILDSRMNTKYDENDKLIREVKVITLKSKLVSDFRKDFQFYKVREINNYHHAHDAYLNAVVGTALIKKYPKLESEFVYGDYKVYDVRKMIAKSEQEIGKATAKYFFYSNIMNFFKTEITLANGEIRKRPLIETNGETGEIVWDKGRDFATVRKVLSMPQVNIVKKTEVQTGGFSKESILPKRNSDKLIARKKDWDPKKYGGFDSPTVAYSVLVVAKVEKGKSKKLKSVKELLGITIMERSSFEKNPIDFLEAKGYKEVKKDLIIKLPKYSLFELENGRKRMLASAGELQKGNELALPSKYVNFLYLASHYEKLKGSPEDNEQKQLFVEQHKHYLDEIIEQISEFSKRVILADANLDKVLSAYNKHRDKPIREQAENIIHLFTLTNLGAPAAFKYFDTTIDRKRYTSTKEVLDATLIHQSITGLYETRIDLSQLGGDGGGGGGSGGGGSGGGGSGGGGSGGGGSGGGGSGGVLNLEEEYRLHEKPVPSSIDPSWLQLFPTVWAERAGMGLANQVPPVVVELRSGASPVAVRQYPMSKEAREGIRPHIQKFLDLGVLVPCRSPWNTPLLPVKKPGTNDYRPVQDLREINKRVQDIHPTVPNPYNLLSSLPPSYTWYSVLDLKDAFFCLRLHPNSQPLFAFEWKDPEKGNTGQLTWTRLPQGFKNSPTLFDEALHRDLAPFRALNPQVVLLQYVDDLLVAAPTYEDCKKGTQKLLQELSKLGYRVSAKKAQLCQREVTYLGYLLKEGKRWLTPARKATVMKIPVPTTPRQVREFLGTAGFCRLWIPGFASLAAPLYPLTKESIPFIWTEEHQQAFDHIKKALLSAPALALPDLTKPFTLYIDERAGVARGVLTQTLGPWRRPVAYLSKKLDPVASGWPTCLKAVAAVALLLKDADKLTLGQNVTVIASHSLESIVRQPPDRWMTNARMTHYQSLLLNERVSFAPPAVLNPATLLPVESEATPVHRCSEILAEETGTRRDLEDQPLPGVPTWYTDGSSFITEGKRRAGAPIVDGKRTVWASSLPEGTSAQKAELVALTQALRLAEGKNINIYTDSRYAFATAHIHGAIYKQRGLLTSAGKDIKNKEEILALLEAIHLPRRVAIIHCPGHQRGSNPVATGNRRADEAAKQAALSTRVLAGTTKPAGKRTADGSEFEKRTADGSEFESPKKKAKVE

SEQ ID NO: 6211 - protein, 2113 aa, synthetic construct
MPAAKRVKLDGGDKKYSIGLDIGTNSVGWAVITDEYKVPSKKFKVLGNTDRHSIKKNLIGALLFDSGETAEATRLKRTARRRYTRRKNRICYLQEIFSNEMAKVDDSFFHRLEESFLVEEDKKHERHPIFGNIVDEVAYHEKYPTIYHLRKKLVDSTDKADLRLIYLALAHMIKFRGHFLIEGDLNPDNSDVDKLFIQLVQTYNQLFEENPINASGVDAKAILSARLSKSRRLENLIAQLPGEKKNGLFGNLIALSLGLTPNFKSNFDLAEDAKLQLSKDTYDDDLDNLLAQIGDQYADLFLAAKNLSDAILLSDILRVNTEITKAPLSASMIKRYDEHHQDLTLLKALVRQQLPEKYKEIFFDQSKNGYAGYIDGGASQEEFYKFIKPILEKMDGTEELLVKLNREDLLRKQRTFDNGSIPHQIHLGELHAILRRQEDFYPFLKDNREKIEKILTFRIPYYVGPLARGNSRFAWMTRKSEETITPWNFEEVVDKGASAQSFIERMTNFDKNLPNEKVLPKHSLLYEYFTVYNELTKVKYVTEGMRKPAFLSGEQKKAIVDLLFKTNRKVTVKQLKEDYFKKIECFDSVEISGVEDRFNASLGTYHDLLKIIKDKDFLDNEENEDILEDIVLTLTLFEDREMIEERLKTYAHLFDDKVMKQLKRRRYTGWGRLSRKLINGIRDKQSGKTILDFLKSDGFANRNFMQLIHDDSLTFKEDIQKAQVSGQGDSLHEHIANLAGSPAIKKGILQTVKVVDELVKVMGRHKPENIVIEMARENQTTQKGQKNSRERMKRIEEGIKELGSQILKEHPVENTQLQNEKLYLYYLQNGRDMYVDQELDINRLSDYDVDHIVPQSFLKDDSIDNKVLTRSDKARGKSDNVPSEEVVKKMKNYWRQLLNAKLITQRKFDNLTKAERGGLSELDKAGFIKRQLVETRQITKHVAQILDSRMNTKYDENDKLIREVKVITLKSKLVSDFRKDFQFYKVREINNYHHAHDAYLNAVVGTALIKKYPKLESEFVYGDYKVYDVRKMIAKSEQEIGKATAKYFFYSNIMNFFKTEITLANGEIRKRPLIETNGETGEIVWDKGRDFATVRKVLSMPQVNIVKKTEVQTGGFSKESILPKRNSDKLIARKKDWDPKKYGGFDSPTVAYSVLVVAKVEKGKSKKLKSVKELLGITIMERSSFEKNPIDFLEAKGYKEVKKDLIIKLPKYSLFELENGRKRMLASAGELQKGNELALPSKYVNFLYLASHYEKLKGSPEDNEQKQLFVEQHKHYLDEIIEQISEFSKRVILADANLDKVLSAYNKHRDKPIREQAENIIHLFTLTNLGAPAAFKYFDTTIDRKRYTSTKEVLDATLIHQSITGLYETRIDLSQLGGDGGGGGGSGGGGSGGGGSGGGGSGGGGSGGGGSGGVLNLEEEYRLHEKPVPSSIDPSWLQLFPTVWAERAGMGLANQVPPVVVELRSGASPVAVRQYPMSKEAREGIRPHIQKFLDLGVLVPCRSPWNTPLLPVKKPGTNDYRPVQDLREINKRVQDIHPTVPNPYNLLSSLPPSYTWYSVLDLKDAFFCLRLHPNSQPLFAFEWKDPEKGNTGQLTWTRLPQGFKNSPTLFNEALHRDLAPFRALNPQVVLLQYVDDLLVAAPTYEDCKKGTQKLLQELSKLGYRVSAKKAQLCQREVTYLGYLLKEGKRWLTPARKATVMKIPVPTTPRQVREFLGKAGFCRLFIPGFASLAAPLYPLTKPSIPFIWTEEHQQAFDHIKKALLSAPALALPDLTKPFTLYIDERAGVARGVLTQTLGPWRRPVAYLSKKLDPVASGWPTCLKAVAAVALLLKDADKLTLGQNVTVIASHSLESIVRQPPDRWMTNARMTHYQSLLLNERVSFAPPAVLNPATLLPVESEATPVHRCSEILAEETGTRRDLEDQPLPGVPTWYTDGSSFITEGKRRAGAPIVDGKRTVWASSLPEGTSAQKAELVALTQALRLAEGKNINIYTDSRYAFATAHIHGAIYKQRGWLTSAGKDIKNKEEILALLEAIHLPRRVAIIHCPGHQRGSNPVATGNRRADEAAKQAALSTRVLAGTTKPAGKRTADGSEFEKRTADGSEFESPKKKAKVE

SEQ ID NO: 6212 - protein, 2146 aa, synthetic construct
MPAAKRVKLDGGDKKYSIGLDIGTNSVGWAVITDEYKVPSKKFKVLGNTDRHSIKKNLIGALLFDSGETAEATRLKRTARRRYTRRKNRICYLQEIFSNEMAKVDDSFFHRLEESFLVEEDKKHERHPIFGNIVDEVAYHEKYPTIYHLRKKLVDSTDKADLRLIYLALAHMIKFRGHFLIEGDLNPDNSDVDKLFIQLVQTYNQLFEENPINASGVDAKAILSARLSKSRRLENLIAQLPGEKKNGLFGNLIALSLGLTPNFKSNFDLAEDAKLQLSKDTYDDDLDNLLAQIGDQYADLFLAAKNLSDAILLSDILRVNTEITKAPLSASMIKRYDEHHQDLTLLKALVRQQLPEKYKEIFFDQSKNGYAGYIDGGASQEEFYKFIKPILEKMDGTEELLVKLNREDLLRKQRTFDNGSIPHQIHLGELHAILRRQEDFYPFLKDNREKIEKILTFRIPYYVGPLARGNSRFAWMTRKSEETITPWNFEEVVDKGASAQSFIERMTNFDKNLPNEKVLPKHSLLYEYFTVYNELTKVKYVTEGMRKPAFLSGEQKKAIVDLLFKTNRKVTVKQLKEDYFKKIECFDSVEISGVEDRFNASLGTYHDLLKIIKDKDFLDNEENEDILEDIVLTLTLFEDREMIEERLKTYAHLFDDKVMKQLKRRRYTGWGRLSRKLINGIRDKQSGKTILDFLKSDGFANRNFMQLIHDDSLTFKEDIQKAQVSGQGDSLHEHIANLAGSPAIKKGILQTVKVVDELVKVMGRHKPENIVIEMARENQTTQKGQKNSRERMKRIEEGIKELGSQILKEHPVENTQLQNEKLYLYYLQNGRDMYVDQELDINRLSDYDVDHIVPQSFLKDDSIDNKVLTRSDKARGKSDNVPSEEVVKKMKNYWRQLLNAKLITQRKFDNLTKAERGGLSELDKAGFIKRQLVETRQITKHVAQILDSRMNTKYDENDKLIREVKVITLKSKLVSDFRKDFQFYKVREINNYHHAHDAYLNAVVGTALIKKYPKLESEFVYGDYKVYDVRKMIAKSEQEIGKATAKYFFYSNIMNFFKTEITLANGEIRKRPLIETNGETGEIVWDKGRDFATVRKVLSMPQVNIVKKTEVQTGGFSKESILPKRNSDKLIARKKDWDPKKYGGFDSPTVAYSVLVVAKVEKGKSKKLKSVKELLGITIMERSSFEKNPIDFLEAKGYKEVKKDLIIKLPKYSLFELENGRKRMLASAGELQKGNELALPSKYVNFLYLASHYEKLKGSPEDNEQKQLFVEQHKHYLDEIIEQISEFSKRVILADANLDKVLSAYNKHRDKPIREQAENIIHLFTLTNLGAPAAFKYFDTTIDRKRYTSTKEVLDATLIHQSITGLYETRIDLSQLGGDGGGGGGSGGGGSGGGGSGGGGSGGGGSGGGGSGGLLGRDLLTKLKAQIQFSTEGPQVTWEDRPAMCLVLNLEEEYRLHEKPVPPSIDPSWLQLFPMVWAEKAGMGLANQVPPVVVELKSDASPVAVRQYPMSKEAREGIRPHIQRFLDLGILVPCQSPWNTPLLPVKKPGTNDYRPVQDLREVNKRVQDIHPTVPNPYNLLSSLPPSHTWYSVLDLKDAFFCLKLHPNSQPLFAFEWRDPEKGNTGQLTWTRLPQGFKNSPTLFNEALHRDLASFRALNPQVVMLQYVDDLLVAAPTYRDCKEGTRRLLQELSKLGYRVSAKKAQLCREEVTYLGYLLKGGKRWLTPARKATVMKIPTPTTPRQVREFLGTAGFCRLWIPGFASLAAPLYPLTRPKVPFTWTEAHQEAFGRIKEALLSAPALALPDLTKPFALYVDEKEGVARGVLTQTLGPWRRPVAYLSKKLDPVASGWPTCLKAIAAVALLLKDADKLTLGQNVLVIAPHNLESIVRQPPDRWMTNARMTHYQSLLLNERVSFAPPAILNPATLLPVESDDTPIHICSEILAEETGTRPDLRDQPLPGVPAWYTDGSSFIMDGRRQAGAAIVDNKRTVWASNLPEGTSAQKAELIALTQALRLAEGKSINIYTDSRYAFATAHVHGAIYKQRGWLTSAGKDIKNKEEILALLEAIHLPKRVAIIHCPGHQRGTDPVATGNRKADEAAKQAAQSTRILTETTKNAGKRTADGSEFEKRTADGSEFESPKKKAKVE

SEQ ID NO: 6213 - protein, 2115 aa, synthetic construct
MPAAKRVKLDGGDKKYSIGLDIGTNSVGWAVITDEYKVPSKKFKVLGNTDRHSIKKNLIGALLFDSGETAEATRLKRTARRRYTRRKNRICYLQEIFSNEMAKVDDSFFHRLEESFLVEEDKKHERHPIFGNIVDEVAYHEKYPTIYHLRKKLVDSTDKADLRLIYLALAHMIKFRGHFLIEGDLNPDNSDVDKLFIQLVQTYNQLFEENPINASGVDAKAILSARLSKSRRLENLIAQLPGEKKNGLFGNLIALSLGLTPNFKSNFDLAEDAKLQLSKDTYDDDLDNLLAQIGDQYADLFLAAKNLSDAILLSDILRVNTEITKAPLSASMIKRYDEHHQDLTLLKALVRQQLPEKYKEIFFDQSKNGYAGYIDGGASQEEFYKFIKPILEKMDGTEELLVKLNREDLLRKQRTFDNGSIPHQIHLGELHAILRRQEDFYPFLKDNREKIEKILTFRIPYYVGPLARGNSRFAWMTRKSEETITPWNFEEVVDKGASAQSFIERMTNFDKNLPNEKVLPKHSLLYEYFTVYNELTKVKYVTEGMRKPAFLSGEQKKAIVDLLFKTNRKVTVKQLKEDYFKKIECFDSVEISGVEDRFNASLGTYHDLLKIIKDKDFLDNEENEDILEDIVLTLTLFEDREMIEERLKTYAHLFDDKVMKQLKRRRYTGWGRLSRKLINGIRDKQSGKTILDFLKSDGFANRNFMQLIHDDSLTFKEDIQKAQVSGQGDSLHEHIANLAGSPAIKKGILQTVKVVDELVKVMGRHKPENIVIEMARENQTTQKGQKNSRERMKRIEEGIKELGSQILKEHPVENTQLQNEKLYLYYLQNGRDMYVDQELDINRLSDYDVDHIVPQSFLKDDSIDNKVLTRSDKARGKSDNVPSEEVVKKMKNYWRQLLNAKLITQRKFDNLTKAERGGLSELDKAGFIKRQLVETRQITKHVAQILDSRMNTKYDENDKLIREVKVITLKSKLVSDFRKDFQFYKVREINNYHHAHDAYLNAVVGTALIKKYPKLESEFVYGDYKVYDVRKMIAKSEQEIGKATAKYFFYSNIMNFFKTEITLANGEIRKRPLIETNGETGEIVWDKGRDFATVRKVLSMPQVNIVKKTEVQTGGFSKESILPKRNSDKLIARKKDWDPKKYGGFDSPTVAYSVLVVAKVEKGKSKKLKSVKELLGITIMERSSFEKNPIDFLEAKGYKEVKKDLIIKLPKYSLFELENGRKRMLASAGELQKGNELALPSKYVNFLYLASHYEKLKGSPEDNEQKQLFVEQHKHYLDEIIEQISEFSKRVILADANLDKVLSAYNKHRDKPIREQAENIIHLFTLTNLGAPAAFKYFDTTIDRKRYTSTKEVLDATLIHQSITGLYETRIDLSQLGGDGGGGGGSGGGGSGGGGSGGGGSGGGGSGGGGSGGTLNLEDEYRLYETSAEPEVSPGSTWLSDFPQAWAETGGMGLAVRQAPLIIPLKATSTPVSIKQYPMSQEAKLGIKPHIQRLLDQGILVPCQSPWNTPLLPVKKPGTNDYRPVQDLREVNKRVEDIHPTVPNPYNLLSGLPPSHRWYTVLDLKDAFFCLRLHPTSQPLFAFEWRDPGMGISGQLTWTRLPQGFKNSPTLFNEALHRDLADFRIQHPDLILLQYVDDILLAATSELDCQQGTRALLLTLGNLGYRASAKKAQLCQKQVKYLGYLLKEGQRWLTEARKETVMGQPTPKTPRQLREFLGKAGFCRLFIPGFAEMAAPLYPLTKPGTLFNWGPDQQKAYQEIKQALLTAPALGLPDLTKPFELFVDEKQGYAKGVLTQKLGPWRRPVAYLSKKLDPVAAGWPPCLRMVAAIAVLRKDAGKLTMGQPLVILAPHAVEALVKQPPDRWLSNARMTHYQAMLLDTDRVQFGPVVALNPATLLPLPEEGAPHDCLEILAETHGTRPDLTDQPIPDADHTWYTDGSSFLQEGQRKAGAAVTTETEVIWARALPAGTSAQRAELIALTQALKMAEGKRLNVYTDSRYAFATAHIHGEIYRRRGWLTSEGREIKNKSEILALLKALFLPKRLSIIHCLGHQKGDSAEARGNRLADQAAREAAIKTPPDTSTLLAGKRTADGSEFEKRTADGSEFESPKKKAKVE

SEQ ID NO: 6214 - protein, 2115 aa, synthetic construct
MPAAKRVKLDGGDKKYSIGLDIGTNSVGWAVITDEYKVPSKKFKVLGNTDRHSIKKNLIGALLFDSGETAEATRLKRTARRRYTRRKNRICYLQEIFSNEMAKVDDSFFHRLEESFLVEEDKKHERHPIFGNIVDEVAYHEKYPTIYHLRKKLVDSTDKADLRLIYLALAHMIKFRGHFLIEGDLNPDNSDVDKLFIQLVQTYNQLFEENPINASGVDAKAILSARLSKSRRLENLIAQLPGEKKNGLFGNLIALSLGLTPNFKSNFDLAEDAKLQLSKDTYDDDLDNLLAQIGDQYADLFLAAKNLSDAILLSDILRVNTEITKAPLSASMIKRYDEHHQDLTLLKALVRQQLPEKYKEIFFDQSKNGYAGYIDGGASQEEFYKFIKPILEKMDGTEELLVKLNREDLLRKQRTFDNGSIPHQIHLGELHAILRRQEDFYPFLKDNREKIEKILTFRIPYYVGPLARGNSRFAWMTRKSEETITPWNFEEVVDKGASAQSFIERMTNFDKNLPNEKVLPKHSLLYEYFTVYNELTKVKYVTEGMRKPAFLSGEQKKAIVDLLFKTNRKVTVKQLKEDYFKKIECFDSVEISGVEDRFNASLGTYHDLLKIIKDKDFLDNEENEDILEDIVLTLTLFEDREMIEERLKTYAHLFDDKVMKQLKRRRYTGWGRLSRKLINGIRDKQSGKTILDFLKSDGFANRNFMQLIHDDSLTFKEDIQKAQVSGQGDSLHEHIANLAGSPAIKKGILQTVKVVDELVKVMGRHKPENIVIEMARENQTTQKGQKNSRERMKRIEEGIKELGSQILKEHPVENTQLQNEKLYLYYLQNGRDMYVDQELDINRLSDYDVDHIVPQSFLKDDSIDNKVLTRSDKARGKSDNVPSEEVVKKMKNYWRQLLNAKLITQRKFDNLTKAERGGLSELDKAGFIKRQLVETRQITKHVAQILDSRMNTKYDENDKLIREVKVITLKSKLVSDFRKDFQFYKVREINNYHHAHDAYLNAVVGTALIKKYPKLESEFVYGDYKVYDVRKMIAKSEQEIGKATAKYFFYSNIMNFFKTEITLANGEIRKRPLIETNGETGEIVWDKGRDFATVRKVLSMPQVNIVKKTEVQTGGFSKESILPKRNSDKLIARKKDWDPKKYGGFDSPTVAYSVLVVAKVEKGKSKKLKSVKELLGITIMERSSFEKNPIDFLEAKGYKEVKKDLIIKLPKYSLFELENGRKRMLASAGELQKGNELALPSKYVNFLYLASHYEKLKGSPEDNEQKQLFVEQHKHYLDEIIEQISEFSKRVILADANLDKVLSAYNKHRDKPIREQAENIIHLFTLTNLGAPAAFKYFDTTIDRKRYTSTKEVLDATLIHQSITGLYETRIDLSQLGGDGGGGGGSGGGGSGGGGSGGGGSGGGGSGGGGSGGTLNIEDEYRLHETSKGPDVPLGSTWLSDFPQAWAETGGMGLAVRQAPLIIPLKATSTPVSIKQYPMSQEARLGIKPHIQRLLDQGILVPCQSPWNTPLLPVKKPGTNDYRPVQDLREVNKRVEDIHPTVPNPYNLLSGLPPSHQWYTVLDLKDAFFCLRLHPTSQSLFAFEWRDPEMGISGQLTWTRLPQGFKNSPTLFNEALHRDLADFRIQHPDLILLQYVDDLLLAATSELDCQQGTRALLQTLGDLGYRASAKKAQICQKQVKYLGYLLKEGQRWLTEARKETVMGQPTPKTPRQLREFLGTAGFCRLWIPGFAEMAAPLYPLTKPGTLFEWGPDQQKAYQEIKQALLTAPALGLPDLTKPFELFVDEKQGYAKGVLTQKLGPWRRPVAYLSKKLDPVAAGWPPCLRMVAAIAVLTKDAGKLTMGQPLVILAPHAVEALVKQPPDRWLSNARMTHYQALLLDTDRVQFGPIVALNPATLLPLPEEGLQHDCLDILAEAHGTRPDLTDQPLPDADHTWYTDGSSFLQEGQRKAGAAVTTETEVVWAKALPAGTSAQRAELIALTQALKMAEGKKLNVYTDSRYAFATAHIHGEIYRRRGWLTSEGKEIKNKDEILALLKALFLPKRLSIIHCPGHQKGNRAEARGNRMADQAAREVATRETPETSTLLAGKRTADGSEFEKRTADGSEFESPKKKAKVE

SEQ ID NO: 6215 - protein, 2115 aa, synthetic construct
MPAAKRVKLDGGDKKYSIGLDIGTNSVGWAVITDEYKVPSKKFKVLGNTDRHSIKKNLIGALLFDSGETAEATRLKRTARRRYTRRKNRICYLQEIFSNEMAKVDDSFFHRLEESFLVEEDKKHERHPIFGNIVDEVAYHEKYPTIYHLRKKLVDSTDKADLRLIYLALAHMIKFRGHFLIEGDLNPDNSDVDKLFIQLVQTYNQLFEENPINASGVDAKAILSARLSKSRRLENLIAQLPGEKKNGLFGNLIALSLGLTPNFKSNFDLAEDAKLQLSKDTYDDDLDNLLAQIGDQYADLFLAAKNLSDAILLSDILRVNTEITKAPLSASMIKRYDEHHQDLTLLKALVRQQLPEKYKEIFFDQSKNGYAGYIDGGASQEEFYKFIKPILEKMDGTEELLVKLNREDLLRKQRTFDNGSIPHQIHLGELHAILRRQEDFYPFLKDNREKIEKILTFRIPYYVGPLARGNSRFAWMTRKSEETITPWNFEEVVDKGASAQSFIERMTNFDKNLPNEKVLPKHSLLYEYFTVYNELTKVKYVTEGMRKPAFLSGEQKKAIVDLLFKTNRKVTVKQLKEDYFKKIECFDSVEISGVEDRFNASLGTYHDLLKIIKDKDFLDNEENEDILEDIVLTLTLFEDREMIEERLKTYAHLFDDKVMKQLKRRRYTGWGRLSRKLINGIRDKQSGKTILDFLKSDGFANRNFMQLIHDDSLTFKEDIQKAQVSGQGDSLHEHIANLAGSPAIKKGILQTVKVVDELVKVMGRHKPENIVIEMARENQTTQKGQKNSRERMKRIEEGIKELGSQILKEHPVENTQLQNEKLYLYYLQNGRDMYVDQELDINRLSDYDVDHIVPQSFLKDDSIDNKVLTRSDKARGKSDNVPSEEVVKKMKNYWRQLLNAKLITQRKFDNLTKAERGGLSELDKAGFIKRQLVETRQITKHVAQILDSRMNTKYDENDKLIREVKVITLKSKLVSDFRKDFQFYKVREINNYHHAHDAYLNAVVGTALIKKYPKLESEFVYGDYKVYDVRKMIAKSEQEIGKATAKYFFYSNIMNFFKTEITLANGEIRKRPLIETNGETGEIVWDKGRDFATVRKVLSMPQVNIVKKTEVQTGGFSKESILPKRNSDKLIARKKDWDPKKYGGFDSPTVAYSVLVVAKVEKGKSKKLKSVKELLGITIMERSSFEKNPIDFLEAKGYKEVKKDLIIKLPKYSLFELENGRKRMLASAGELQKGNELALPSKYVNFLYLASHYEKLKGSPEDNEQKQLFVEQHKHYLDEIIEQISEFSKRVILADANLDKVLSAYNKHRDKPIREQAENIIHLFTLTNLGAPAAFKYFDTTIDRKRYTSTKEVLDATLIHQSITGLYETRIDLSQLGGDGGGGGGSGGGGSGGGGSGGGGSGGGGSGGGGSGGTLNIEDEHRLHETSKEPDVSLGSTWLSDFPQAWAETGGMGLAVRQAPLIIPLKATSTPVSIKQYPMSQEARLGIKPHIQRLLDQGILVPCQSPWNTPLLPVKKPGTNDYRPVQDLREVNKRVEDIHPTVPNPYNLLSGLPPSHQWYTVLDLKDAFFCLRLHPTSQPLFAFEWRDPEMGISGQLTWTRLPQGFKNSPTLFDEALHRDLADFRIQHPDLILLQYVDDLLLAATSELDCQQGTRALLQTLGNLGYRASAKKAQICQKQVKYLGYLLKEGQRWLTEARKETVMGQPTPKTPRQLREFLGTAGFCRLWIPGFAEMAAPLYPLTKTGTLFNWGPDQQKAYQEIKQALLTAPALGLPDLTKPFELFVDEKQGYAKGVLTQKLGPWRRPVAYLSKKLDPVAAGWPPCLRMVAAIAVLTKDAGKLTMGQPLVILAPHAVEALVKQPPDRWLSNARMTHYQALLLDTDRVQFGPVVALNPATLLPLPEEGLQHNCLDILAEAHGTRPDLTDQPLPDADHTWYTDGSSLLQEGQRKAGAAVTTETEVIWAKALPAGTSAQRAELIALTQALKMAEGKKLNVYTDSRYAFATAHIHGEIYRRRGLLTSEGKEIKNKDEILALLKALFLPKRLSIIHCPGHQKGHSAEARGNRMADQAARKAAITETPDTSTLLAGKRTADGSEFEKRTADGSEFESPKKKAKVE

SEQ ID NO: 6216 - protein, 2115 aa, synthetic construct; identical to SEQ ID NO: 6215

SEQ ID NO: 6217 - protein, 2115 aa, synthetic construct
MPAAKRVKLDGGDKKYSIGLDIGTNSVGWAVITDEYKVPSKKFKVLGNTDRHSIKKNLIGALLFDSGETAEATRLKRTARRRYTRRKNRICYLQEIFSNEMAKVDDSFFHRLEESFLVEEDKKHERHPIFGNIVDEVAYHEKYPTIYHLRKKLVDSTDKADLRLIYLALAHMIKFRGHFLIEGDLNPDNSDVDKLFIQLVQTYNQLFEENPINASGVDAKAILSARLSKSRRLENLIAQLPGEKKNGLFGNLIALSLGLTPNFKSNFDLAEDAKLQLSKDTYDDDLDNLLAQIGDQYADLFLAAKNLSDAILLSDILRVNTEITKAPLSASMIKRYDEHHQDLTLLKALVRQQLPEKYKEIFFDQSKNGYAGYIDGGASQEEFYKFIKPILEKMDGTEELLVKLNREDLLRKQRTFDNGSIPHQIHLGELHAILRRQEDFYPFLKDNREKIEKILTFRIPYYVGPLARGNSRFAWMTRKSEETITPWNFEEVVDKGASAQSFIERMTNFDKNLPNEKVLPKHSLLYEYFTVYNELTKVKYVTEGMRKPAFLSGEQKKAIVDLLFKTNRKVTVKQLKEDYFKKIECFDSVEISGVEDRFNASLGTYHDLLKIIKDKDFLDNEENEDILEDIVLTLTLFEDREMIEERLKTYAHLFDDKVMKQLKRRRYTGWGRLSRKLINGIRDKQSGKTILDFLKSDGFANRNFMQLIHDDSLTFKEDIQKAQVSGQGDSLHEHIANLAGSPAIKKGILQTVKVVDELVKVMGRHKPENIVIEMARENQTTQKGQKNSRERMKRIEEGIKELGSQILKEHPVENTQLQNEKLYLYYLQNGRDMYVDQELDINRLSDYDVDHIVPQSFLKDDSIDNKVLTRSDKARGKSDNVPSEEVVKKMKNYWRQLLNAKLITQRKFDNLTKAERGGLSELDKAGFIKRQLVETRQITKHVAQILDSRMNTKYDENDKLIREVKVITLKSKLVSDFRKDFQFYKVREINNYHHAHDAYLNAVVGTALIKKYPKLESEFVYGDYKVYDVRKMIAKSEQEIGKATAKYFFYSNIMNFFKTEITLANGEIRKRPLIETNGETGEIVWDKGRDFATVRKVLSMPQVNIVKKTEVQTGGFSKESILPKRNSDKLIARKKDWDPKKYGGFDSPTVAYSVLVVAKVEKGKSKKLKSVKELLGITIMERSSFEKNPIDFLEAKGYKEVKKDLIIKLPKYSLFELENGRKRMLASAGELQKGNELALPSKYVNFLYLASHYEKLKGSPEDNEQKQLFVEQHKHYLDEIIEQISEFSKRVILADANLDKVLSAYNKHRDKPIREQAENIIHLFTLTNLGAPAAFKYFDTTIDRKRYTSTKEVLDATLIHQSITGLYETRIDLSQLGGDGGGGGGSGGGGSGGGGSGGGGSGGGGSGGGGSGGTLNIEDEYRLHEISTEPDVSPGSTWLSDFPQAWAETGGMGLAVRQAPLIIPLKATSTPVSIKQYPMSQEAKLGIKPHIQRLLDQGILVPCQSPWNTPLLPVKKPGTNDYRPVQGLREVNKRVEDIHPTVPNPYNLLSGLPTSHRWYTVLDLKDAFFCLRLHPTSQPLFASEWRDPGMGISGQLTWTRLPQGFKNSPTLFNEALHRGLADFRIQHPDLILLQYVDDLLLAATSELDCQQGTRALLKTLGNLGYRASAKKAQICQKQVKYLGYLLREGQRWLTEARKETVMGQPTPKTPRQLREFLGTAGFCRLWIPRFAEMAAPLYPLTKPGTLFNWGPDQQKAYHEIKQALLTAPALGLPDLTKPFELFVDEKQGYAKGVLTQKLGPWRRPVAYLSKKLDPVAAGWPPCLRMVAAIAVLTKDAGKLTMGQPLVILAPHAVEALVKQPPDRWLSNARMTHYQAMLLDTDRVQFGPVVALNPATLLPLPEEGAPHDCLEILAETHGTEPDLTDQPIPDADHTWYTDGSSFLQEGQRKAGAAVTTETEVIWARALPAGTSAQRAELIALTQALKMAEGKRLNVYTDSRYAFATAHIHGEIYKRRGWLTSEGREIKNKSEILALLKALFLPKRLSIIHCLGHQKGDSAEARGNRLADQAAREAAIKTPPDTSTLLAGKRTADGSEFEKRTADGSEFESPKKKAKVE

SEQ ID NO: 6218 - protein, 2109 aa, synthetic construct
MPAAKRVKLDGGDKKYSIGLDIGTNSVGWAVITDEYKVPSKKFKVLGNTDRHSIKKNLIGALLFDSGETAEATRLKRTARRRYTRRKNRICYLQEIFSNEMAKVDDSFFHRLEESFLVEEDKKHERHPIFGNIVDEVAYHEKYPTIYHLRKKLVDSTDKADLRLIYLALAHMIKFRGHFLIEGDLNPDNSDVDKLFIQLVQTYNQLFEENPINASGVDAKAILSARLSKSRRLENLIAQLPGEKKNGLFGNLIALSLGLTPNFKSNFDLAEDAKLQLSKDTYDDDLDNLLAQIGDQYADLFLAAKNLSDAILLSDILRVNTEITKAPLSASMIKRYDEHHQDLTLLKALVRQQLPEKYKEIFFDQSKNGYAGYIDGGASQEEFYKFIKPILEKMDGTEELLVKLNREDLLRKQRTFDNGSIPHQIHLGELHAILRRQEDFYPFLKDNREKIEKILTFRIPYYVGPLARGNSRFAWMTRKSEETITPWNFEEVVDKGASAQSFIERMTNFDKNLPNEKVLPKHSLLYEYFTVYNELTKVKYVTEGMRKPAFLSGEQKKAIVDLLFKTNRKVTVKQLKEDYFKKIECFDSVEISGVEDRFNASLGTYHDLLKIIKDKDFLDNEENEDILEDIVLTLTLFEDREMIEERLKTYAHLFDDKVMKQLKRRRYTGWGRLSRKLINGIRDKQSGKTILDFLKSDGFANRNFMQLIHDDSLTFKEDIQKAQVSGQGDSLHEHIANLAGSPAIKKGILQTVKVVDELVKVMGRHKPENIVIEMARENQTTQKGQKNSRERMKRIEEGIKELGSQILKEHPVENTQLQNEKLYLYYLQNGRDMYVDQELDINRLSDYDVDHIVPQSFLKDDSIDNKVLTRSDKARGKSDNVPSEEVVKKMKNYWRQLLNAKLITQRKFDNLTKAERGGLSELDKAGFIKRQLVETRQITKHVAQILDSRMNTKYDENDKLIREVKVITLKSKLVSDFRKDFQFYKVREINNYHHAHDAYLNAVVGTALIKKYPKLESEFVYGDYKVYDVRKMIAKSEQEIGKATAKYFFYSNIMNFFKTEITLANGEIRKRPLIETNGETGEIVWDKGRDFATVRKVLSMPQVNIVKKTEVQTGGFSKESILPKRNSDKLIARKKDWDPKKYGGFDSPTVAYSVLVVAKVEKGKSKKLKSVKELLGITIMERSSFEKNPIDFLEAKGYKEVKKDLIIKLPKYSLFELENGRKRMLASAGELQKGNELALPSKYVNFLYLASHYEKLKGSPEDNEQKQLFVEQHKHYLDEIIEQISEFSKRVILADANLDKVLSAYNKHRDKPIREQAENIIHLFTLTNLGAPAAFKYFDTTIDRKRYTSTKEVLDATLIHQSITGLYETRIDLSQLGGDGGGGGGSGGGGSGGGGSGGGGSGGGGSGGGGSGGTLQLDDEYRLYSPLVKPDQNIQFWLEQFPQAWAETAGMGLAKQVPPQVIQLKASATPVSVRQYPLSKEAQEGIRPHVQRLIQQGILVPVQSPWNTPLLPVRKPGTNDYRPVQDLREVNKRVQDIHPTVPNPYNLLCALPPQRSWYTVLDLKDAFFCLRLHPTSQPLFAFEWRDPGTGRTGQLTWTRLPQGFKNSPTIFDEALHRDLANFRIQHPQVTLLQYVDDLLLAGATKQDCLEGTKALLLELSDLGYRASAKKAQICRREVTYLGYSLRDGQRWLTEARKKTVVQIPAPTTAKQVREFLGTAGFCRLWIPGFATLAAPLYPLTKEKGEFSWAPEHQKAFDAIKKALLSAPALALPDVTKPFTLYVDERKGVARGVLTQTLGPWRRPVAYLSKKLDPVASGWPVCLKAIAAVAILVKDADKLTLGQNITVIAPHALENIVRQPPDRWMTNARMTHYQSLLLTERVTFAPPAALNPATLLPEETDEPVTHDCHQLLIEETGVRKDLTDIPLTGEVLTWFTDGSSYVVEGKRMAGAAVVDGTRTIWASSLPEGTSAQKAELMALTQALRLAEGKSINIYTDSRYAFATAHVHGAIYKQRGLLTSAGREIKNKEEILSLLEALHLPKRLAIIHCPGHQKAKDPISRGNQMADRVAKQAAQGVNLLAGKRTADGSEFEKRTADGSEFESPKKKAKVE

SEQ ID NO: 6219 - protein, 2109 aa, synthetic construct
MPAAKRVKLDGGDKKYSIGLDIGTNSVGWAVITDEYKVPSKKFKVLGNTDRHSIKKNLIGALLFDSGETAEATRLKRTARRRYTRRKNRICYLQEIFSNEMAKVDDSFFHRLEESFLVEEDKKHERHPIFGNIVDEVAYHEKYPTIYHLRKKLVDSTDKADLRLIYLALAHMIKFRGHFLIEGDLNPDNSDVDKLFIQLVQTYNQLFEENPINASGVDAKAILSARLSKSRRLENLIAQLPGEKKNGLFGNLIALSLGLTPNFKSNFDLAEDAKLQLSKDTYDDDLDNLLAQIGDQYADLFLAAKNLSDAILLSDILRVNTEITKAPLSASMIKRYDEHHQDLTLLKALVRQQLPEKYKEIFFDQSKNGYAGYIDGGASQEEFYKFIKPILEKMDGTEELLVKLNREDLLRKQRTFDNGSIPHQIHLGELHAILRRQEDFYPFLKDNREKIEKILTFRIPYYVGPLARGNSRFAWMTRKSEETITPWNFEEVVDKGASAQSFIERMTNFDKNLPNEKVLPKHSLLYEYFTVYNELTKVKYVTEGMRKPAFLSGEQKKAIVDLLFKTNRKVTVKQLKEDYFKKIECFDSVEISGVEDRFNASLGTYHDLLKIIKDKDFLDNEENEDILEDIVLTLTLFEDREMIEERLKTYAHLFDDKVMKQLKRRRYTGWGRLSRKLINGIRDKQSGKTILDFLKSDGFANRNFMQLIHDDSLTFKEDIQKAQVSGQGDSLHEHIANLAGSPAIKKGILQTVKVVDELVKVMGRHKPENIVIEMARENQTTQKGQKNSRERMKRIEEGIKELGSQILKEHPVENTQLQNEKLYLYYLQNGRDMYVDQELDINRLSDYDVDHIVPQSFLKDDSIDNKVLTRSDKARGKSDNVPSEEVVKKMKNYWRQLLNAKLITQRKFDNLTKAERGGLSELDKAGFIKRQLVETRQITKHVAQILDSRMNTKYDENDKLIREVKVITLKSKLVSDFRKDFQFYKVREINNYHHAHDAYLNAVVGTALIKKYPKLESEFVYGDYKVYDVRKMIAKSEQEIGKATAKYFFYSNIMNFFKTEITLANGEIRKRPLIETNGETGEIVWDKGRDFATVRKVLSMPQVNIVKKTEVQTGGFSKESILPKRNSDKLIARKKDWDPKKYGGFDSPTVAYSVLVVAKVEKGKSKKLKSVKELLGITIMERSSFEKNPIDFLEAKGYKEVKKDLIIKLPKYSLFELENGRKRMLASAGELQKGNELALPSKYVNFLYLASHYEKLKGSPEDNEQKQLFVEQHKHYLDEIIEQISEFSKRVILADANLDKVLSAYNKHRDKPIREQAENIIHLFTLTNLGAPAAFKYFDTTIDRKRYTSTKEVLDATLIHQSITGLYETRIDLSQLGGDGGGGGGSGGGGSGGGGSGGGGSGGGGSGGGGSGGTLQLDDEYRLYSPLVKPDQNIQFWLEQFPQAWAETAGMGLAKQVPPQVIQLKASATPVSVRQYPLSKEAQEGIRPHVQRLIQQGILVPVQSPWNTPLLPVRKPGTNDYRPVQDLREVNKRVQDIHPTVPNPYNLLCALPPQRSWYTVLDLKDAFFCLRLHPTSQPLFAFEWRDPGTGRTGQLTWTRLPQGFKNSPTIFNEALHRDLANFRIQHPQVTLLQYVDDLLLAGATKQDCLEGTKALLLELSDLGYRASAKKAQICRREVTYLGYSLRDGQRWLTEARKKTVVQIPAPTTAKQVREFLGTAGFCRLWIPGFATLAAPLYPLTKPKGEFSWAPEHQKAFDAIKKALLSAPALALPDVTKPFTLYVDERKGVARGVLTQTLGPWRRPVAYLSKKLDPVASGWPVCLKAIAAVAILVKDADKLTLGQNITVIAPHALENIVRQPPDRWMTNARMTHYQSLLLTERVTFAPPAALNPATLLPEETDEPVTHDCHQLLIEETGVRKDLTDIPLTGEVLTWFTDGSSYVVEGKRMAGAAVVDGTRTIWASSLPEGTSAQKAELMALTQALRLAEGKSINIYTDSRYAFATAHVHGAIYKQRGWLTSAGREIKNKEEILSLLEALHLPKRLAIIHCPGHQKAKDPISRGNQMADRVAKQAAQGVNLLAGKRTADGSEFEKRTADGSEFESPKKKAKVE

SEQ ID NO: 6220 - protein, 2106 aa, synthetic construct
MPAAKRVKLDGGDKKYSIGLDIGTNSVGWAVITDEYKVPSKKFKVLGNTDRHSIKKNLIGALLFDSGETAEATRLKRTARRRYTRRKNRICYLQEIFSNEMAKVDDSFFHRLEESFLVEEDKKHERHPIFGNIVDEVAYHEKYPTIYHLRKKLVDSTDKADLRLIYLALAHMIKFRGHFLIEGDLNPDNSDVDKLFIQLVQTYNQLFEENPINASGVDAKAILSARLSKSRRLENLIAQLPGEKKNGLFGNLIALSLGLTPNFKSNFDLAEDAKLQLSKDTYDDDLDNLLAQIGDQYADLFLAAKNLSDAILLSDILRVNTEITKAPLSASMIKRYDEHHQDLTLLKALVRQQLPEKYKEIFFDQSKNGYAGYIDGGASQEEFYKFIKPILEKMDGTEELLVKLNREDLLRKQRTFDNGSIPHQIHLGELHAILRRQEDFYPFLKDNREKIEKILTFRIPYYVGPLARGNSRFAWMTRKSEETITPWNFEEVVDKGASAQSFIERMTNFDKNLPNEKVLPKHSLLYEYFTVYNELTKVKYVTEGMRKPAFLSGEQKKAIVDLLFKTNRKVTVKQLKEDYFKKIECFDSVEISGVEDRFNASLGTYHDLLKIIKDKDFLDNEENEDILEDIVLTLTLFEDREMIEERLKTYAHLFDDKVMKQLKRRRYTGWGRLSRKLINGIRDKQSGKTILDFLKSDGFANRNFMQLIHDDSLTFKEDIQKAQVSGQGDSLHEHIANLAGSPAIKKGILQTVKVVDELVKVMGRHKPENIVIEMARENQTTQKGQKNSRERMKRIEEGIKELGSQILKEHPVENTQLQNEKLYLYYLQNGRDMYVDQELDINRLSDYDVDHIVPQSFLKDDSIDNKVLTRSDKARGKSDNVPSEEVVKKMKNYWRQLLNAKLITQRKFDNLTKAERGGLSELDKAGFIKRQLVETRQITKHVAQILDSRMNTKYDENDKLIREVKVITLKSKLVSDFRKDFQFYKVREINNYHHAHDAYLNAVVGTALIKKYPKLESEFVYGDYKVYDVRKMIAKSEQEIGKATAKYFFYSNIMNFFKTEITLANGEIRKRPLIETNGETGEIVWDKGRDFATVRKVLSMPQVNIVKKTEVQTGGFSKESILPKRNSDKLIARKKDWDPKKYGGFDSPTVAYSVLVVAKVEKGKSKKLKSVKELLGITIMERSSFEKNPIDFLEAKGYKEVKKDLIIKLPKYSLFELENGRKRMLASAGELQKGNELALPSKYVNFLYLASHYEKLKGSPEDNEQKQLFVEQHKHYLDEIIEQISEFSKRVILADANLDKVLSAYNKHRDKPIREQAENIIHLFTLTNLGAPAAFKYFDTTIDRKRYTSTKEVLDATLIHQSITGLYETRIDLSQLGGDGGGGGGSGGGGSGGGGSGGGGSGGGGSGGGGSGGVPWLMKKPLQLTVLVPLHEYQERLLQQTALPKEQKELLQKLFLKYDALWQHWENQVGHRRIKPHNIATGTLAPRPQKQYPINPKAKPSIQIVIDDLLKQGVLIQQNSTMNTPVYPVPKPDGKWRMVLDYREVNKTIPLIAAQNQHSAGILSSIYRGKYKTTLDLTNGFWAHPITPESYWLTAFTWQGKQYCWTRLPQGFLNSPALFNADVVDLLKEIPNVQAYVDDIYISHDDPQEHLEQLEKIFSILLNAGYVVSLKKSEIAQREVEFLGFNITKEGRGLTDTFKQKLLNITPPKDLKQLQSILGKLNFARNFIPNYSELVKPLYTIVAPANGKFISWTEDNSNQLQHIISVLNQADNLEERNPETRLIIKVNSSPSAGYIRYYNEGSKRPIMYVNYIFSKAEAKFTQTEKLLTTMHKGLIKAMDLAMGQEILVYSPIVSMTKIQRTPLPERKALPVRWITWMTYLEDPRIQFHYDKSLPELQQIPNVTEDVIAKTKHPSEFAMVFYTDGSAIKHPDVNKSHSAGMGIAQVQFIPEYKIVHQWSIPLGDHTAQLAEIAAVEFACKKALKISGPVLIVTDSFYVAESANKELPYWKSNGFLNNKKKPLRHVSKWKSIAECLQLKPDIIIMHEKGHQQPMTTLHTEGNNLADKLATQGSYVVHAGKRTADGSEFEKRTADGSEFESPKKKAKVE

SEQ ID NO: 6221 - protein, 2195 aa, synthetic construct
MPAAKRVKLDGGDKKYSIGLDIGTNSVGWAVITDEYKVPSKKFKVLGNTDRHSIKKNLIGALLFDSGETAEATRLKRTARRRYTRRKNRICYLQEIFSNEMAKVDDSFFHRLEESFLVEEDKKHERHPIFGNIVDEVAYHEKYPTIYHLRKKLVDSTDKADLRLIYLALAHMIKFRGHFLIEGDLNPDNSDVDKLFIQLVQTYNQLFEENPINASGVDAKAILSARLSKSRRLENLIAQLPGEKKNGLFGNLIALSLGLTPNFKSNFDLAEDAKLQLSKDTYDDDLDNLLAQIGDQYADLFLAAKNLSDAILLSDILRVNTEITKAPLSASMIKRYDEHHQDLTLLKALVRQQLPEKYKEIFFDQSKNGYAGYIDGGASQEEFYKFIKPILEKMDGTEELLVKLNREDLLRKQRTFDNGSIPHQIHLGELHAILRRQEDFYPFLKDNREKIEKILTFRIPYYVGPLARGNSRFAWMTRKSEETITPWNFEEVVDKGASAQSFIERMTNFDKNLPNEKVLPKHSLLYEYFTVYNELTKVKYVTEGMRKPAFLSGEQKKAIVDLLFKTNRKVTVKQLKEDYFKKIECFDSVEISGVEDRFNASLGTYHDLLKIIKDKDFLDNEENEDILEDIVLTLTLFEDREMIEERLKTYAHLFDDKVMKQLKRRRYTGWGRLSRKLINGIRDKQSGKTILDFLKSDGFANRNFMQLIHDDSLTFKEDIQKAQVSGQGDSLHEHIANLAGSPAIKKGILQTVKVVDELVKVMGRHKPENIVIEMARENQTTQKGQKNSRERMKRIEEGIKELGSQILKEHPVENTQLQNEKLYLYYLQNGRDMYVDQELDINRLSDYDVDHIVPQSFLKDDSIDNKVLTRSDKARGKSDNVPSEEVVKKMKNYWRQLLNAKLITQRKFDNLTKAERGGLSELDKAGFIKRQLVETRQITKHVAQILDSRMNTKYDENDKLIREVKVITLKSKLVSDFRKDFQFYKVREINNYHHAHDAYLNAVVGTALIKKYPKLESEFVYGDYKVYDVRKMIAKSEQEIGKATAKYFFYSNIMNFFKTEITLANGEIRKRPLIETNGETGEIVWDKGRDFATVRKVLSMPQVNIVKKTEVQTGGFSKESILPKRNSDKLIARKKDWDPKKYGGFDSPTVAYSVLVVAKVEKGKSKKLKSVKELLGITIMERSSFEKNPIDFLEAKGYKEVKKDLIIKLPKYSLFELENGRKRMLASAGELQKGNELALPSKYVNFLYLASHYEKLKGSPEDNEQKQLFVEQHKHYLDEIIEQISEFSKRVILADANLDKVLSAYNKHRDKPIREQAENIIHLFTLTNLGAPAAFKYFDTTIDRKRYTSTKEVLDATLIHQSITGLYETRIDLSQLGGDGGGGGGSGGGGSGGGGSGGGGSGGGGSGGGGSGGMDPLQLLQPLEAEIKGTKLKAHWNSGATITCVPEAFLEDERPIQTMLIKTIHGEKQQDVYYLTFKVQGRKVEAEVLASPYDYILLNPSDVPWLMKKPLQLTVLVPLHEYQERLLQQTALPKEQKELLQKLFLKYDALWQHWENQVGHRRIKPHNIATGTLAPRPQKQYPINPKAKPSIQIVIDDLLKQGVLIQQNSTMNTPVYPVPKPDGKWRMVLDYREVNKTIPLIAAQNQHSAGILSSIYRGKYKTTLDLTNGFWAHPITPESYWLTAFTWQGKQYCWTRLPQGFLNSPALFNADVVDLLKEIPNVQAYVDDIYISHDDPQEHLEQLEKIFSILLNAGYVVSLKKSEIAQREVEFLGFNITKEGRGLTDTFKQKLLNITPPKDLKQLQSILGLLNFARNFIPNYSELVKPLYTIVAPANGKFISWTEDNSNQLQHIISVLNQADNLEERNPETRLIIKVNSSPSAGYIRYYNEGSKRPIMYVNYIFSKAEAKFTQTEKLLTTMHKGLIKAMDLAMGQEILVYSPIVSMTKIQRTPLPERKALPVRWITWMTYLEDPRIQFHYDKSLPELQQIPNVTEDVIAKTKHPSEFAMVFYTDGSAIKHPDVNKSHSAGMGIAQVQFIPEYKIVHQWSIPLGDHTAQLAEIAAVEFACKKALKISGPVLIVTDSFYVAESANKELPYWKSNGFLNNKKKPLRHVSKWKSIAECLQLKPDIIIMHEKGHQQPMTTLHTEGNNLADKLATQGSYVVHAGKRTADGSEFEKRTADGSEFESPKKKAKVE

SEQ ID NO: 6222 - protein, 2195 aa, synthetic construct
MPAAKRVKLDGGDKKYSIGLDIGTNSVGWAVITDEYKVPSKKFKVLGNTDRHSIKKNLIGALLFDSGETAEATRLKRTARRRYTRRKNRICYLQEIFSNEMAKVDDSFFHRLEESFLVEEDKKHERHPIFGNIVDEVAYHEKYPTIYHLRKKLVDSTDKADLRLIYLALAHMIKFRGHFLIEGDLNPDNSDVDKLFIQLVQTYNQLFEENPINASGVDAKAILSARLSKSRRLENLIAQLPGEKKNGLFGNLIALSLGLTPNFKSNFDLAEDAKLQLSKDTYDDDLDNLLAQIGDQYADLFLAAKNLSDAILLSDILRVNTEITKAPLSASMIKRYDEHHQDLTLLKALVRQQLPEKYKEIFFDQSKNGYAGYIDGGASQEEFYKFIKPILEKMDGTEELLVKLNREDLLRKQRTFDNGSIPHQIHLGELHAILRRQEDFYPFLKDNREKIEKILTFRIPYYVGPLARGNSRFAWMTRKSEETITPWNFEEVVDKGASAQSFIERMTNFDKNLPNEKVLPKHSLLYEYFTVYNELTKVKYVTEGMRKPAFLSGEQKKAIVDLLFKTNRKVTVKQLKEDYFKKIECFDSVEISGVEDRFNASLGTYHDLLKIIKDKDFLDNEENEDILEDIVLTLTLFEDREMIEERLKTYAHLFDDKVMKQLKRRRYTGWGRLSRKLINGIRDKQSGKTILDFLKSDGFANRNFMQLIHDDSLTFKEDIQKAQVSGQGDSLHEHIANLAGSPAIKKGILQTVKVVDELVKVMGRHKPENIVIEMARENQTTQKGQKNSRERMKRIEEGIKELGSQILKEHPVENTQLQNEKLYLYYLQNGRDMYVDQELDINRLSDYDVDHIVPQSFLKDDSIDNKVLTRSDKARGKSDNVPSEEVVKKMKNYWRQLLNAKLITQRKFDNLTKAERGGLSELDKAGFIKRQLVETRQITKHVAQILDSRMNTKYDENDKLIREVKVITLKSKLVSDFRKDFQFYKVREINNYHHAHDAYLNAVVGTALIKKYPKLESEFVYGDYKVYDVRKMIAKSEQEIGKATAKYFFYSNIMNFFKTEITLANGEIRKRPLIETNGETGEIVWDKGRDFATVRKVLSMPQVNIVKKTEVQTGGFSKESILPKRNSDKLIARKKDWDPKKYGGFDSPTVAYSVLVVAKVEKGKSKKLKSVKELLGITIMERSSFEKNPIDFLEAKGYKEVKKDLIIKLPKYSLFELENGRKRMLASAGELQKGNELALPSKYVNFLYLASHYEKLKGSPEDNEQKQLFVEQHKHYLDEIIEQISEFSKRVILADANLDKVLSAYNKHRDKPIREQAENIIHLFTLTNLGAPAAFKYFDTTIDRKRYTSTKEVLDATLIHQSITGLYETRIDLSQLGGDGGGGGGSGGGGSGGGGSGGGGSGGGGSGGGGSGGMDPLQLLQPLEAEIKGTKLKAHWNSGATITCVPQAFLEEEVPIKNIWIKTIHGEKEQPVYYLTFKIQGRKVEAEVISSPYDYILVSPSDIPWLMKKPLQLTTLVPLQEYEERLLKQTMLTGSYKEKLQSLFLKYDALWQHWENQVGHRRIKPHHIATGTVNPRPQKQYPINPKAKASIQTVINDLLKQGVLIQQNSIMNTPVYPVPKPDGKWRMVLDYREVNKTIPLIAAQNQHSAGILSSIFRGKYKTTLDLSNGFWAHSITPESYWLTAFTWLGQQYCWTRLPQGFLNSPALFTADVVDLLKEVPNVQVYVDDIYISHDDPREHLEQLEKVFSLLLNAGYVVSLKKSEIAQHEVEFLGFNITKEGRGLTETFKQKLLNITPPRDLKQLQSILGLLNFARNFIPNFSELVKPLYNIIATANGKYITWTTDNSQQLQNIISMLNSAENLEERNPEVRLIMKVNTSPSAGYIRFYNEFAKRPIMYLNYVYTKAEVKFTNTEKLLTTIHKGLIKALDLGMGQEILVYSPIVSMTKIQKTPLPERKALPIRWITWMSYLEDPRIQFHYDKTLPELQQVPTVTDDIIAKIKHPSEFSMVFYTDGSAIKHPNVNKSHNAGMGIAQVQFKPEFTVINTWSIPLGDHTAQLAEVAAVEFACKKALKIDGPVLIVTDSFYVAESVNKELPYWQSNGFFNNKKKPLKHVSKWKSIADCIQLKPDIIIIHEKGHQPTASTFHTEGNNLADKLATQGSYVVNAGKRTADGSEFEKRTADGSEFESPKKKAKVE

SEQ ID NO: 6223 - protein, 2106 aa, synthetic construct
MPAAKRVKLDGGDKKYSIGLDIGTNSVGWAVITDEYKVPSKKFKVLGNTDRHSIKKNLIGALLFDSGETAEATRLKRTARRRYTRRKNRICYLQEIFSNEMAKVDDSFFHRLEESFLVEEDKKHERHPIFGNIVDEVAYHEKYPTIYHLRKKLVDSTDKADLRLIYLALAHMIKFRGHFLIEGDLNPDNSDVDKLFIQLVQTYNQLFEENPINASGVDAKAILSARLSKSRRLENLIAQLPGEKKNGLFGNLIALSLGLTPNFKSNFDLAEDAKLQLSKDTYDDDLDNLLAQIGDQYADLFLAAKNLSDAILLSDILRVNTEITKAPLSASMIKRYDEHHQDLTLLKALVRQQLPEKYKEIFFDQSKNGYAGYIDGGASQEEFYKFIKPILEKMDGTEELLVKLNREDLLRKQRTFDNGSIPHQIHLGELHAILRRQEDFYPFLKDNREKIEKILTFRIPYYVGPLARGNSRFAWMTRKSEETITPWNFEEVVDKGASAQSFIERMTNFDKNLPNEKVLPKHSLLYEYFTVYNELTKVKYVTEGMRKPAFLSGEQKKAIVDLLFKTNRKVTVKQLKEDYFKKIECFDSVEISGVEDRFNASLGTYHDLLKIIKDKDFLDNEENEDILEDIVLTLTLFEDREMIEERLKTYAHLFDDKVMKQLKRRRYTGWGRLSRKLINGIRDKQSGKTILDFLKSDGFANRNFMQLIHDDSLTFKEDIQKAQVSGQGDSLHEHIANLAGSPAIKKGILQTVKVVDELVKVMGRHKPENIVIEMARENQTTQKGQKNSRERMKRIEEGIKELGSQILKEHPVENTQLQNEKLYLYYLQNGRDMYVDQELDINRLSDYDVDHIVPQSFLKDDSIDNKVLTRSDKARGKSDNVPSEEVVKKMKNYWRQLLNAKLITQRKFDNLTKAERGGLSELDKAGFIKRQLVETRQITKHVAQILDSRMNTKYDENDKLIREVKVITLKSKLVSDFRKDFQFYKVREINNYHHAHDAYLNAVVGTALIKKYPKLESEFVYGDYKVYDVRKMIAKSEQEIGKATAKYFFYSNIMNFFKTEITLANGEIRKRPLIETNGETGEIVWDKGRDFATVRKVLSMPQVNIVKKTEVQTGGFSKESILPKRNSDKLIARKKDWDPKKYGGFDSPTVAYSVLVVAKVEKGKSKKLKSVKELLGITIMERSSFEKNPIDFLEAKGYKEVKKDLIIKLPKYSLFELENGRKRMLASAGELQKGNELALPSKYVNFLYLASHYEKLKGSPEDNEQKQLFVEQHKHYLDEIIEQISEFSKRVILADANLDKVLSAYNKHRDKPIREQAENIIHLFTLTNLGAPAAFKYFDTTIDRKRYTSTKEVLDATLIHQSITGLYETRIDLSQLGGDGGGGGGSGGGGSGGGGSGGGGSGGGGSGGGGSGGIPWLMKKPLQLTTLVPLQEYEERLLKQTMLTGSYKEKLQSLFLKYDALWQHWENQVGHRRIKPHHIATGTVNPRPQKQYPINPKAKASIQTVINDLLKQGVLIQQNSIMNTPVYPVPKPDGKWRMVLDYREVNKTIPLIAAQNQHSAGILSSIFRGKYKTTLDLSNGFWAHSITPESYWLTAFTWLGQQYCWTRLPQGFLNSPALFNADVVDLLKEVPNVQVYVDDIYISHDDPREHLEQLEKVFSLLLNAGYVVSLKKSEIAQHEVEFLGFNITKEGRGLTETFKQKLLNITPPRDLKQLQSILGKLNFARNFIPNFSELVKPLYNIIATAPGKYITWTTDNSQQLQNIISMLNSAENLEERNPEVRLIMKVNTSPSAGYIRFYNEFAKRPIMYLNYVYTKAEVKFTNTEKLLTTIHKGLIKALDLGMGQEILVYSPIVSMTKIQKTPLPERKALPIRWITWMSYLEDPRIQFHYDKTLPELQQVPTVTDDIIAKIKHPSEFSMVFYTDGSAIKHPNVNKSHNAGMGIAQVQFKPEFTVINTWSIPLGDHTAQLAEVAAVEFACKKALKIDGPVLIVTDSFYVAESVNKELPYWQSNGFFNNKKKPLKHVSKWKSIADCIQLKPDIIIIHEKGHQPTASTFHTEGNNLADKLATQGSYVVNAGKRTADGSEFEKRTADGSEFESPKKKAKVE

SEQ ID NO: 6224 - protein, 2106 aa, synthetic construct
MPAAKRVKLDGGDKKYSIGLDIGTNSVGWAVITDEYKVPSKKFKVLGNTDRHSIKKNLIGALLFDSGETAEATRLKRTARRRYTRRKNRICYLQEIFSNEMAKVDDSFFHRLEESFLVEEDKKHERHPIFGNIVDEVAYHEKYPTIYHLRKKLVDSTDKADLRLIYLALAHMIKFRGHFLIEGDLNPDNSDVDKLFIQLVQTYNQLFEENPINASGVDAKAILSARLSKSRRLENLIAQLPGEKKNGLFGNLIALSLGLTPNFKSNFDLAEDAKLQLSKDTYDDDLDNLLAQIGDQYADLFLAAKNLSDAILLSDILRVNTEITKAPLSASMIKRYDEHHQDLTLLKALVRQQLPEKYKEIFFDQSKNGYAGYIDGGASQEEFYKFIKPILEKMDGTEELLVKLNREDLLRKQRTFDNGSIPHQIHLGELHAILRRQEDFYPFLKDNREKIEKILTFRIPYYVGPLARGNSRFAWMTRKSEETITPWNFEEVVDKGASAQSFIERMTNFDKNLPNEKVLPKHSLLYEYFTVYNELTKVKYVTEGMRKPAFLSGEQKKAIVDLLFKTNRKVTVKQLKEDYFKKIECFDSVEISGVEDRFNASLGTYHDLLKIIKDKDFLDNEENEDILEDIVLTLTLFEDREMIEERLKTYAHLFDDKVMKQLKRRRYTGWGRLSRKLINGIRDKQSGKTILDFLKSDGFANRNFMQLIHDDSLTFKEDIQKAQVSGQGDSLHEHIANLAGSPAIKKGILQTVKVVDELVKVMGRHKPENIVIEMARENQTTQKGQKNSRERMKRIEEGIKELGSQILKEHPVENTQLQNEKLYLYYLQNGRDMYVDQELDINRLSDYDVDHIVPQSFLKDDSIDNKVLTRSDKARGKSDNVPSEEVVKKMKNYWRQLLNAKLITQRKFDNLTKAERGGLSELDKAGFIKRQLVETRQITKHVAQILDSRMNTKYDENDKLIREVKVITLKSKLVSDFRKDFQFYKVREINNYHHAHDAYLNAVVGTALIKKYPKLESEFVYGDYKVYDVRKMIAKSEQEIGKATAKYFFYSNIMNFFKTEITLANGEIRKRPLIETNGETGEIVWDKGRDFATVRKVLSMPQVNIVKKTEVQTGGFSKESILPKRNSDKLIARKKDWDPKKYGGFDSPTVAYSVLVVAKVEKGKSKKLKSVKELLGITIMERSSFEKNPIDFLEAKGYKEVKKDLIIKLPKYSLFELENGRKRMLASAGELQKGNELALPSKYVNFLYLASHYEKLKGSPEDNEQKQLFVEQHKHYLDEIIEQISEFSKRVILADANLDKVLSAYNKHRDKPIREQAENIIHLFTLTNLGAPAAFKYFDTTIDRKRYTSTKEVLDATLIHQSITGLYETRIDLSQLGGDGGGGGGSGGGGSGGGGSGGGGSGGGGSGGGGSGGVPWLTQQPLQLTILVPLQEYQDRILNKTALPEEQKQQLKALFTKYDNLWQHWENQVGHRKIRPHNIATGDYPPRPQKQYPINPKAKPSIQIVIDDLLKQGVLTPQNSTMNTPVYPVPKPDGRWRMVLDYREVNKTIPLTAAQNQHSAGILATIVRQKYKTTLDLANGFWAHPITPDSYWLTAFTWQGKQYCWTRLPQGFLNSPALFNADAVDLLKEVPNVQVYVDDIYLSHDNPHEHIQQLEKVFQILLQAGYVVSLKKSEIGQRTVEFLGFNITKEGRGLTDTFKTKLLNVTPPKDLKQLQSILGKLNFARNFIPNFAELVQTLYNLIASSPGKYIEWTEDNTKQLNKVIEALNTASNLEERLPDQRLVIKVNTSPSAGYVRYYNESGKKPIMYLNYVFSKAELKFSMLEKLLTTMHKALIKAMDLAMGQEILVYSPIVSMTKIQKTPLPERKALPIRWITWMTYLEDPRIQFHYDKTLPELKHIPDVYTSSIPPLKHPSQYEGVFCTDGSAIKSPDPTKSNNAGMGIVHAIYNPEYKILNQWSIPLGHHTAQMAEIAAVEFACKKALKVPGPVLVITDSFYVAESANKELPYWKSNGFVNNKKEPLKHISKWKSIAECLSIKPDITIQHEKGHQPINTSIHTEGNALADKLATQGSYVVNAGKRTADGSEFEKRTADGSEFESPKKKAKVE

SEQ ID NO: 6225 - protein, 2113 aa, synthetic construct
MPAAKRVKLDGGDKKYSIGLDIGTNSVGWAVITDEYKVPSKKFKVLGNTDRHSIKKNLIGALLFDSGETAEATRLKRTARRRYTRRKNRICYLQEIFSNEMAKVDDSFFHRLEESFLVEEDKKHERHPIFGNIVDEVAYHEKYPTIYHLRKKLVDSTDKADLRLIYLALAHMIKFRGHFLIEGDLNPDNSDVDKLFIQLVQTYNQLFEENPINASGVDAKAILSARLSKSRRLENLIAQLPGEKKNGLFGNLIALSLGLTPNFKSNFDLAEDAKLQLSKDTYDDDLDNLLAQIGDQYADLFLAAKNLSDAILLSDILRVNTEITKAPLSASMIKRYDEHHQDLTLLKALVRQQLPEKYKEIFFDQSKNGYAGYIDGGASQEEFYKFIKPILEKMDGTEELLVKLNREDLLRKQRTFDNGSIPHQIHLGELHAILRRQEDFYPFLKDNREKIEKILTFRIPYYVGPLARGNSRFAWMTRKSEETITPWNFEEVVDKGASAQSFIERMTNFDKNLPNEKVLPKHSLLYEYFTVYNELTKVKYVTEGMRKPAFLSGEQKKAIVDLLFKTNRKVTVKQLKEDYFKKIECFDSVEISGVEDRFNASLGTYHDLLKIIKDKDFLDNEENEDILEDIVLTLTLFEDREMIEERLKTYAHLFDDKVMKQLKRRRYTGWGRLSRKLINGIRDKQSGKTILDFLKSDGFANRNFMQLIHDDSLTFKEDIQKAQVSGQGDSLHEHIANLAGSPAIKKGILQTVKVVDELVKVMGRHKPENIVIEMARENQTTQKGQKNSRERMKRIEEGIKELGSQILKEHPVENTQLQNEKLYLYYLQNGRDMYVDQELDINRLSDYDVDHIVPQSFLKDDSIDNKVLTRSDKARGKSDNVPSEEVVKKMKNYWRQLLNAKLITQRKFDNLTKAERGGLSELDKAGFIKRQLVETRQITKHVAQILDSRMNTKYDENDKLIREVKVITLKSKLVSDFRKDFQFYKVREINNYHHAHDAYLNAVVGTALIKKYPKLESEFVYGDYKVYDVRKMIAKSEQEIGKATAKYFFYSNIMNFFKTEITLANGEIRKRPLIETNGETGEIVWDKGRDFATVRKVLSMPQVNIVKKTEVQTGGFSKESILPKRNSDKLIARKKDWDPKKYGGFDSPTVAYSVLVVAKVEKGKSKKLKSVKELLGITIMERSSFEKNPIDFLEAKGYKEVKKDLIIKLPKYSLFELENGRKRMLASAGELQKGNELALPSKYVNFLYLASHYEKLKGSPEDNEQKQLFVEQHKHYLDEIIEQISEFSKRVILADANLDKVLSAYNKHRDKPIREQAENIIHLFTLTNLGAPAAFKYFDTTIDRKRYTSTKEVLDATLIHQSITGLYETRIDLSQLGGDGGGGGGSGGGGSGGGGSGGGGSGGGGSGGGGSGGVLNLEEEYRLHEKPVPSSIDPSWLQLFPTVWAERAGMGLANQVPPVVVELRSGASPVAVRQYPMSKEAREGIRPHIQRFLDLGVLVPCQSPWNTPLLPVKKPGTNDYRPVQDLREINKRVQDIHPTVPNPYNLLSSLPPSHTWYSVLDLKDAFFCLKLHPNSQPLFAFEWRDPEKGNTGQLTWTRLPQGFKNSPTLFNEALHRDLAPFRALNPQVVLLQYVDDLLVAAPTYRDCKEGTQKLLQELSKLGYRVSAKKAQLCQKEVTYLGYLLKEGKRWLTPARKATVMKIPPPTTPRQVREFLGTAGFCRLWIPGFASLAAPLYPLTKPSIPFIWTEEHQKAFDRIKEALLSAPALALPDLTKPFTLYVDERAGVARGVLTQTLGPWRRPVAYLSKKLDPVASGWPTCLKAVAAVALLLKDADKLTLGQNVTVIASHSLESIVRQPPDRWMTNARMTHYQSLLLNERVSFAPPAVLNPATLLPVESEATPVHRCSEILAEETGTRRDLKDQPLPGVPAWYTDGSSFIAEGKRRAGAAIVDGKRTVWASSLPEGTSAQKAELVALTQALRLAEGKDINIYTDSRYAFATAHIHGAIYKQRGWLTSAGKDIKNKEEILALLEAIHLPKRVAIIHCPGHQKGNDPVATGNRRADEAAKQAALSTRVLAETTKPAGKRTADGSEFEKRTADGSEFESPKKKAKVE

SEQ ID NO: 6226 - protein, 2113 aa, synthetic construct
MPAAKRVKLDGGDKKYSIGLDIGTNSVGWAVITDEYKVPSKKFKVLGNTDRHSIKKNLIGALLFDSGETAEATRLKRTARRRYTRRKNRICYLQEIFSNEMAKVDDSFFHRLEESFLVEEDKKHERHPIFGNIVDEVAYHEKYPTIYHLRKKLVDSTDKADLRLIYLALAHMIKFRGHFLIEGDLNPDNSDVDKLFIQLVQTYNQLFEENPINASGVDAKAILSARLSKSRRLENLIAQLPGEKKNGLFGNLIALSLGLTPNFKSNFDLAEDAKLQLSKDTYDDDLDNLLAQIGDQYADLFLAAKNLSDAILLSDILRVNTEITKAPLSASMIKRYDEHHQDLTLLKALVRQQLPEKYKEIFFDQSKNGYAGYIDGGASQEEFYKFIKPILEKMDGTEELLVKLNREDLLRKQRTFDNGSIPHQIHLGELHAILRRQEDFYPFLKDNREKIEKILTFRIPYYVGPLARGNSRFAWMTRKSEETITPWNFEEVVDKGASAQSFIERMTNFDKNLPNEKVLPKHSLLYEYFTVYNELTKVKYVTEGMRKPAFLSGEQKKAIVDLLFKTNRKVTVKQLKEDYFKKIECFDSVEISGVEDRFNASLGTYHDLLKIIKDKDFLDNEENEDILEDIVLTLTLFEDREMIEERLKTYAHLFDDKVMKQLKRRRYTGWGRLSRKLINGIRDKQSGKTILDFLKSDGFANRNFMQLIHDDSLTFKEDIQKAQVSGQGDSLHEHIANLAGSPAIKKGILQTVKVVDELVKVMGRHKPENIVIEMARENQTTQKGQKNSRERMKRIEEGIKELGSQILKEHPVENTQLQNEKLYLYYLQNGRDMYVDQELDINRLSDYDVDHIVPQSFLKDDSIDNKVLTRSDKARGKSDNVPSEEVVKKMKNYWRQLLNAKLITQRKFDNLTKAERGGLSELDKAGFIKRQLVETRQITKHVAQILDSRMNTKYDENDKLIREVKVITLKSKLVSDFRKDFQFYKVREINNYHHAHDAYLNAVVGTALIKKYPKLESEFVYGDYKVYDVRKMIAKSEQEIGKATAKYFFYSNIMNFFKTEITLANGEIRKRPLIETNGETGEIVWDKGRDFATVRKVLSMPQVNIVKKTEVQTGGFSKESILPKRNSDKLIARKKDWDPKKYGGFDSPTVAYSVLVVAKVEKGKSKKLKSVKELLGITIMERSSFEKNPIDFLEAKGYKEVKKDLIIKLPKYSLFELENGRKRMLASAGELQKGNELALPSKYVNFLYLASHYEKLKGSPEDNEQKQLFVEQHKHYLDEIIEQISEFSKRVILADANLDKVLSAYNKHRDKPIREQAENIIHLFTLTNLGAPAAFKYFDTTIDRKRYTSTKEVLDATLIHQSITGLYETRIDLSQLGGDGGGGGGSGGGGSGGGGSGGGGSGGGGSGGGGSGGVLNLEEEYRLHEKPVPSSIDPSWLQLFPTVWAERAGMGLANQVPPVVVELRSGASPVAVRQYPMSKEAREGIRPHIQRFLDLGVLVPCQSPWNTPLLPVKKPGTNDYRPVQDLREINKRVQDIHPTVPNPYNLLSSLPPSHTWYSVLDLKDAFFCLKLHPNSQPLFAFEWRDPEKGNTGQLTWTRLPQGFKNSPTLFNEALHRDLAPFRALNPQVVLLQYVDDLLVAAPTYRDCKEGTQKLLQELSKLGYRVSAKKAQLCQKEVTYLGYLLKEGKRWLTPARKATVMKIPPPTTPRQVREFLGKAGFCRLFIPGFASLAAPLYPLTKPSIPFIWTEEHQKAFDRIKEALLSAPALALPDLTKPFTLYVDERAGVARGVLTQTLGPWRRPVAYLSKKLDPVASGWPTCLKAVAAVALLLKDADKLTLGQNVTVIASHSLESIVRQPPDRWMTNARMTHYQSLLLNERVSFAPPAVLNPATLLPVESEATPVHRCSEILAEETGTRRDLKDQPLPGVPAWYTDGSSFIAEGKRRAGAAIVDGKRTVWASSLPEGTSAQKAELVALTQALRLAEGKDINIYTDSRYAFATAHIHGAIYKQRGWLTSAGKDIKNKEEILALLEAIHLPKRVAIIHCPGHQKGNDPVATGNRRADEAAKQAALSTRVLAETTKPAGKRTADGSEFEKRTADGSEFESPKKKAKVE

SEQ ID NO: 6227 - protein, 2090 aa, synthetic construct
MPAAKRVKLDGGDKKYSIGLDIGTNSVGWAVITDEYKVPSKKFKVLGNTDRHSIKKNLIGALLFDSGETAEATRLKRTARRRYTRRKNRICYLQEIFSNEMAKVDDSFFHRLEESFLVEEDKKHERHPIFGNIVDEVAYHEKYPTIYHLRKKLVDSTDKADLRLIYLALAHMIKFRGHFLIEGDLNPDNSDVDKLFIQLVQTYNQLFEENPINASGVDAKAILSARLSKSRRLENLIAQLPGEKKNGLFGNLIALSLGLTPNFKSNFDLAEDAKLQLSKDTYDDDLDNLLAQIGDQYADLFLAAKNLSDAILLSDILRVNTEITKAPLSASMIKRYDEHHQDLTLLKALVRQQLPEKYKEIFFDQSKNGYAGYIDGGASQEEFYKFIKPILEKMDGTEELLVKLNREDLLRKQRTFDNGSIPHQIHLGELHAILRRQEDFYPFLKDNREKIEKILTFRIPYYVGPLARGNSRFAWMTRKSEETITPWNFEEVVDKGASAQSFIERMTNFDKNLPNEKVLPKHSLLYEYFTVYNELTKVKYVTEGMRKPAFLSGEQKKAIVDLLFKTNRKVTVKQLKEDYFKKIECFDSVEISGVEDRFNASLGTYHDLLKIIKDKDFLDNEENEDILEDIVLTLTLFEDREMIEERLKTYAHLFDDKVMKQLKRRRYTGWGRLSRKLINGIRDKQSGKTILDFLKSDGFANRNFMQLIHDDSLTFKEDIQKAQVSGQGDSLHEHIANLAGSPAIKKGILQTVKVVDELVKVMGRHKPENIVIEMARENQTTQKGQKNSRERMKRIEEGIKELGSQILKEHPVENTQLQNEKLYLYYLQNGRDMYVDQELDINRLSDYDVDHIVPQSFLKDDSIDNKVLTRSDKARGKSDNVPSEEVVKKMKNYWRQLLNAKLITQRKFDNLTKAERGGLSELDKAGFIKRQLVETRQITKHVAQILDSRMNTKYDENDKLIREVKVITLKSKLVSDFRKDFQFYKVREINNYHHAHDAYLNAVVGTALIKKYPKLESEFVYGDYKVYDVRKMIAKSEQEIGKATAKYFFYSNIMNFFKTEITLANGEIRKRPLIETNGETGEIVWDKGRDFATVRKVLSMPQVNIVKKTEVQTGGFSKESILPKRNSDKLIARKKDWDPKKYGGFDSPTVAYSVLVVAKVEKGKSKKLKSVKELLGITIMERSSFEKNPIDFLEAKGYKEVKKDLIIKLPKYSLFELENGRKRMLASAGELQKGNELALPSKYVNFLYLASHYEKLKGSPEDNEQKQLFVEQHKHYLDEIIEQISEFSKRVILADANLDKVLSAYNKHRDKPIREQAENIIHLFTLTNLGAPAAFKYFDTTIDRKRYTSTKEVLDATLIHQSITGLYETRIDLSQLGGDGGGGGGGTAPLEEEYRLFLEAPIQNVTLLEQWKREIPKVWAEINPPGLASTQAPIHVQLLSTALPVRVRQYPITLEAKRSLRETIRKFRAAGILRPVHSPWNTPLLPVRKSGTSEYRMVQDLREVNKRVETIHPTVPNPYTLLSLLPPDRIWYSVLDLKDAFFCIPLAPESQLIFAFEWADAEEGESGQLTWTRLPQGFKNSPTLFNEALNRDLQGFRLDHPSVSLLQYVDDLLIAADTQAACLSATRDLLMTLAELGYRVSGKKAQLCQEEVTYLGFKIHKGSRSLSNSRTQAILQIPVPKTKRQVREFLGTIGYCRLWIPGFAELAQPLYAATRPGNDPLVWGEKEEEAFQSLKLALTQPPALALPSLDKPFQLFVEETSGAAKGVLTQALGPWKRPVAYLSKRLDPVAAGWPRCLRAIAAAALLTREASKLTFGQDIEITSSHNLESLLRSPPDKWLTNARITQYQVLLLDPPRVRFKQTAALNPATLLPETDDTLPIHHCLDTLDSLTSTRPDLTDQPLAQAEATLFTDGSSYIRDGKRYAGAAVVTLDSVIWAEPLPIGTSAQKAELIALTKALEWSKDKSVNIYTDSRYAFATLHVHGMIYRERGWLTAGGKAIKNAPEILALLTAVWLPKRVAVMHCKGHQKDDAPTSTGNRRADEVAREVAIRPLSTQATISAGKRTADGSEFEKRTADGSEFESPKKKAKVE

SEQ ID NO: 6228 - protein, 2094 aa, synthetic construct
MPAAKRVKLDGGDKKYSIGLDIGTNSVGWAVITDEYKVPSKKFKVLGNTDRHSIKKNLIGALLFDSGETAEATRLKRTARRRYTRRKNRICYLQEIFSNEMAKVDDSFFHRLEESFLVEEDKKHERHPIFGNIVDEVAYHEKYPTIYHLRKKLVDSTDKADLRLIYLALAHMIKFRGHFLIEGDLNPDNSDVDKLFIQLVQTYNQLFEENPINASGVDAKAILSARLSKSRRLENLIAQLPGEKKNGLFGNLIALSLGLTPNFKSNFDLAEDAKLQLSKDTYDDDLDNLLAQIGDQYADLFLAAKNLSDAILLSDILRVNTEITKAPLSASMIKRYDEHHQDLTLLKALVRQQLPEKYKEIFFDQSKNGYAGYIDGGASQEEFYKFIKPILEKMDGTEELLVKLNREDLLRKQRTFDNGSIPHQIHLGELHAILRRQEDFYPFLKDNREKIEKILTFRIPYYVGPLARGNSRFAWMTRKSEETITPWNFEEVVDKGASAQSFIERMTNFDKNLPNEKVLPKHSLLYEYFTVYNELTKVKYVTEGMRKPAFLSGEQKKAIVDLLFKTNRKVTVKQLKEDYFKKIECFDSVEISGVEDRFNASLGTYHDLLKIIKDKDFLDNEENEDILEDIVLTLTLFEDREMIEERLKTYAHLFDDKVMKQLKRRRYTGWGRLSRKLINGIRDKQSGKTILDFLKSDGFANRNFMQLIHDDSLTFKEDIQKAQVSGQGDSLHEHIANLAGSPAIKKGILQTVKVVDELVKVMGRHKPENIVIEMARENQTTQKGQKNSRERMKRIEEGIKELGSQILKEHPVENTQLQNEKLYLYYLQNGRDMYVDQELDINRLSDYDVDHIVPQSFLKDDSIDNKVLTRSDKARGKSDNVPSEEVVKKMKNYWRQLLNAKLITQRKFDNLTKAERGGLSELDKAGFIKRQLVETRQITKHVAQILDSRMNTKYDENDKLIREVKVITLKSKLVSDFRKDFQFYKVREINNYHHAHDAYLNAVVGTALIKKYPKLESEFVYGDYKVYDVRKMIAKSEQEIGKATAKYFFYSNIMNFFKTEITLANGEIRKRPLIETNGETGEIVWDKGRDFATVRKVLSMPQVNIVKKTEVQTGGFSKESILPKRNSDKLIARKKDWDPKKYGGFDSPTVAYSVLVVAKVEKGKSKKLKSVKELLGITIMERSSFEKNPIDFLEAKGYKEVKKDLIIKLPKYSLFELENGRKRMLASAGELQKGNELALPSKYVNFLYLASHYEKLKGSPEDNEQKQLFVEQHKHYLDEIIEQISEFSKRVILADANLDKVLSAYNKHRDKPIREQAENIIHLFTLTNLGAPAAFKYFDTTIDRKRYTSTKEVLDATLIHQSITGLYETRIDLSQLGGDGGGGGGGTVSLQDEHRLFDIPVTTSLPDVWLQDFPQAWAETGGLGRAKCQAPIIIDLKPTAVPVSIKQYPMSLEAHMGIRQHIIKFLELGVLRPCRSPWNTPLLPVKKPGTQDYRPVQDLREINKRTVDIHPTVPNPYNLLSTLKPDYSWYTVLDLKDAFFCLPLAPQSQELFAFEWKDPERGISGQLTWTRLPQGFKNSPTLFNEALHRDLTDFRTQHPEVTLLQYVDDLLLAAPTKKACTQGTRHLLQELGEKGYRASAKKAQICQTKVTYLGYILSEGKRWLTPGRIETVARIPPPRNPREVREFLGTAGFCRLWIPGFAELAAPLYALTKPSTPFTWQTEHQLAFEALKKALLSAPALGLPDTSKPFTLFLDERQGIAKGVLTQKLGPWKRPVAYLSKKLDPVAAGWPPCLRIMAATAMLVKDSAKLTLGQPLTVITPHTLEAIVRQPPDRWITNARLTHYQALLLDTDRVQFGPPVTLNPATLLPVPENQPSPHDCRQVLAETHGTREDLKDQELPDADHTWYTDGSSYLDSGTRRAGAAVVDGHNTIWAQSLPPGTSAQKAELIALTKALELSKGKKANIYTDSRYAFATAHTHGSIYERRGWLTSEGKEIKNKAEIIALLKALFLPQEVAIIHCPGHQKGQDPVAVGNRQADRVARQAAMAEVLTLATEPDNTSHITAGKRTADGSEFEKRTADGSEFESPKKKAKVE

SEQ ID NO: 6229 - protein, 2094 aa, synthetic construct
MPAAKRVKLDGGDKKYSIGLDIGTNSVGWAVITDEYKVPSKKFKVLGNTDRHSIKKNLIGALLFDSGETAEATRLKRTARRRYTRRKNRICYLQEIFSNEMAKVDDSFFHRLEESFLVEEDKKHERHPIFGNIVDEVAYHEKYPTIYHLRKKLVDSTDKADLRLIYLALAHMIKFRGHFLIEGDLNPDNSDVDKLFIQLVQTYNQLFEENPINASGVDAKAILSARLSKSRRLENLIAQLPGEKKNGLFGNLIALSLGLTPNFKSNFDLAEDAKLQLSKDTYDDDLDNLLAQIGDQYADLFLAAKNLSDAILLSDILRVNTEITKAPLSASMIKRYDEHHQDLTLLKALVRQQLPEKYKEIFFDQSKNGYAGYIDGGASQEEFYKFIKPILEKMDGTEELLVKLNREDLLRKQRTFDNGSIPHQIHLGELHAILRRQEDFYPFLKDNREKIEKILTFRIPYYVGPLARGNSRFAWMTRKSEETITPWNFEEVVDKGASAQSFIERMTNFDKNLPNEKVLPKHSLLYEYFTVYNELTKVKYVTEGMRKPAFLSGEQKKAIVDLLFKTNRKVTVKQLKEDYFKKIECFDSVEISGVEDRFNASLGTYHDLLKIIKDKDFLDNEENEDILEDIVLTLTLFEDREMIEERLKTYAHLFDDKVMKQLKRRRYTGWGRLSRKLINGIRDKQSGKTILDFLKSDGFANRNFMQLIHDDSLTFKEDIQKAQVSGQGDSLHEHIANLAGSPAIKKGILQTVKVVDELVKVMGRHKPENIVIEMARENQTTQKGQKNSRERMKRIEEGIKELGSQILKEHPVENTQLQNEKLYLYYLQNGRDMYVDQELDINRLSDYDVDHIVPQSFLKDDSIDNKVLTRSDKARGKSDNVPSEEVVKKMKNYWRQLLNAKLITQRKFDNLTKAERGGLSELDKAGFIKRQLVETRQITKHVAQILDSRMNTKYDENDKLIREVKVITLKSKLVSDFRKDFQFYKVREINNYHHAHDAYLNAVVGTALIKKYPKLESEFVYGDYKVYDVRKMIAKSEQEIGKATAKYFFYSNIMNFFKTEITLANGEIRKRPLIETNGETGEIVWDKGRDFATVRKVLSMPQVNIVKKTEVQTGGFSKESILPKRNSDKLIARKKDWDPKKYGGFDSPTVAYSVLVVAKVEKGKSKKLKSVKELLGITIMERSSFEKNPIDFLEAKGYKEVKKDLIIKLPKYSLFELENGRKRMLASAGELQKGNELALPSKYVNFLYLASHYEKLKGSPEDNEQKQLFVEQHKHYLDEIIEQISEFSKRVILADANLDKVLSAYNKHRDKPIREQAENIIHLFTLTNLGAPAAFKYFDTTIDRKRYTSTKEVLDATLIHQSITGLYETRIDLSQLGGDGGGGGGGTVSLQDEHRLFDIPVTTSLPDVWLQDFPQAWAETGGLGRAKCQAPIIIDLKPTAVPVSIKQYPMSLEAHMGIRQHIIKFLELGVLRPCRSPWNTPLLPVKKPGTQDYRPVQDLREINKRTVDIHPTVPNPYNLLSTLKPDYSWYTVLDLKDAFFCLPLAPQSQELFAFEWKDPERGISGQLTWTRLPQGFKNSPTLFNEALHRDLTDFRTQHPEVTLLQYVDDLLLAAPTKKACTQGTRHLLQELGEKGYRASAKKAQICQTKVTYLGYILSEGKRWLTPGRIETVARIPPPRNPREVREFLGKAGFCRLFIPGFAELAAPLYALTKPSTPFTWQTEHQLAFEALKKALLSAPALGLPDTSKPFTLFLDERQGIAKGVLTQKLGPWKRPVAYLSKKLDPVAAGWPPCLRIMAATAMLVKDSAKLTLGQPLTVITPHTLEAIVRQPPDRWITNARLTHYQALLLDTDRVQFGPPVTLNPATLLPVPENQPSPHDCRQVLAETHGTREDLKDQELPDADHTWYTDGSSYLDSGTRRAGAAVVDGHNTIWAQSLPPGTSAQKAELIALTKALELSKGKKANIYTDSRYAFATAHTHGSIYERRGWLTSEGKEIKNKAEIIALLKALFLPQEVAIIHCPGHQKGQDPVAVGNRQADRVARQAAMAEVLTLATEPDNTSHITAGKRTADGSEFEKRTADGSEFESPKKKAKVE

SEQ ID NO: 6230 - protein, 2165 aa, synthetic construct
MPAAKRVKLDGGDKKYSIGLDIGTNSVGWAVITDEYKVPSKKFKVLGNTDRHSIKKNLIGALLFDSGETAEATRLKRTARRRYTRRKNRICYLQEIFSNEMAKVDDSFFHRLEESFLVEEDKKHERHPIFGNIVDEVAYHEKYPTIYHLRKKLVDSTDKADLRLIYLALAHMIKFRGHFLIEGDLNPDNSDVDKLFIQLVQTYNQLFEENPINASGVDAKAILSARLSKSRRLENLIAQLPGEKKNGLFGNLIALSLGLTPNFKSNFDLAEDAKLQLSKDTYDDDLDNLLAQIGDQYADLFLAAKNLSDAILLSDILRVNTEITKAPLSASMIKRYDEHHQDLTLLKALVRQQLPEKYKEIFFDQSKNGYAGYIDGGASQEEFYKFIKPILEKMDGTEELLVKLNREDLLRKQRTFDNGSIPHQIHLGELHAILRRQEDFYPFLKDNREKIEKILTFRIPYYVGPLARGNSRFAWMTRKSEETITPWNFEEVVDKGASAQSFIERMTNFDKNLPNEKVLPKHSLLYEYFTVYNELTKVKYVTEGMRKPAFLSGEQKKAIVDLLFKTNRKVTVKQLKEDYFKKIECFDSVEISGVEDRFNASLGTYHDLLKIIKDKDFLDNEENEDILEDIVLTLTLFEDREMIEERLKTYAHLFDDKVMKQLKRRRYTGWGRLSRKLINGIRDKQSGKTILDFLKSDGFANRNFMQLIHDDSLTFKEDIQKAQVSGQGDSLHEHIANLAGSPAIKKGILQTVKVVDELVKVMGRHKPENIVIEMARENQTTQKGQKNSRERMKRIEEGIKELGSQILKEHPVENTQLQNEKLYLYYLQNGRDMYVDQELDINRLSDYDVDHIVPQSFLKDDSIDNKVLTRSDKARGKSDNVPSEEVVKKMKNYWRQLLNAKLITQRKFDNLTKAERGGLSELDKAGFIKRQLVETRQITKHVAQILDSRMNTKYDENDKLIREVKVITLKSKLVSDFRKDFQFYKVREINNYHHAHDAYLNAVVGTALIKKYPKLESEFVYGDYKVYDVRKMIAKSEQEIGKATAKYFFYSNIMNFFKTEITLANGEIRKRPLIETNGETGEIVWDKGRDFATVRKVLSMPQVNIVKKTEVQTGGFSKESILPKRNSDKLIARKKDWDPKKYGGFDSPTVAYSVLVVAKVEKGKSKKLKSVKELLGITIMERSSFEKNPIDFLEAKGYKEVKKDLIIKLPKYSLFELENGRKRMLASAGELQKGNELALPSKYVNFLYLASHYEKLKGSPEDNEQKQLFVEQHKHYLDEIIEQISEFSKRVILADANLDKVLSAYNKHRDKPIREQAENIIHLFTLTNLGAPAAFKYFDTTIDRKRYTSTKEVLDATLIHQSITGLYETRIDLSQLGGDGGGGGGGMDLLKPLTVERKGVKIKGYWNSQADITCVPKDLLQGEEPVRQQNVTTIHGTQEGDVYYVNLKIDGRRINTEVIGTTLDYAIITPGDVPWILKKPLELTIKLDLEEQQGTLLNNSILSKKGKEELKQLFEKYSALWQSWENQVGHRRIRPHKIATGTVKPTPQKQYHINPKAKPDIQIVINDLLKQGVLIQKESTMNTPVYPVPKPNGRWRMVLDYRAVNKVTPLIAVQNQHSYGILGSLFKGRYKTTIDLSNGFWAHPIVPEDYWITAFTWQGKQYCWTVLPQGFLNSPGLFNGDVVDLLQGIPNVEVYVDDVYISHDSEKEHLEYLDILFNRLKEAGYIISLKKSNIANSIVDFLGFQITNEGRGLTDTFKEKLENITAPTTLKQLQSILGLLNFARNFIPDFTELIAPLYALIPKSPKNYVPWQIEHSTTLETLITKLNGAEYLQGRKGDKTLIMKVNASYTTGYIRYYNEGEKKPISYVSIVFSKTELKFTELEKLLTTVHKGLLKALDLSMGQNIHVYSPIVSMQNIQKTPQTAKKALASRWLSWLSYLEDPRIRFFYDPQMPALKDLPAVDTGKDNKKHPSNFQHIFYTDGSAITSPTKEGHLNAGMGIVYFINKDGNLQKQQEWSISLGNHTAQFAEIAAFEFALKKCLPLGGNILVVTDSNYVAKAYNEELDVWASNGFVNNRKKPLKHISKWKSVADLKRLRPDVVVTHEPGHQKLDSSPHAYGNNLADQLATQASFKVHAGKRTADGSEFEKRTADGSEFESPKKKAKVE

SEQ ID NO: 6231 - protein, 2086 aa, synthetic construct
MPAAKRVKLDGGDKKYSIGLDIGTNSVGWAVITDEYKVPSKKFKVLGNTDRHSIKKNLIGALLFDSGETAEATRLKRTARRRYTRRKNRICYLQEIFSNEMAKVDDSFFHRLEESFLVEEDKKHERHPIFGNIVDEVAYHEKYPTIYHLRKKLVDSTDKADLRLIYLALAHMIKFRGHFLIEGDLNPDNSDVDKLFIQLVQTYNQLFEENPINASGVDAKAILSARLSKSRRLENLIAQLPGEKKNGLFGNLIALSLGLTPNFKSNFDLAEDAKLQLSKDTYDDDLDNLLAQIGDQYADLFLAAKNLSDAILLSDILRVNTEITKAPLSASMIKRYDEHHQDLTLLKALVRQQLPEKYKEIFFDQSKNGYAGYIDGGASQEEFYKFIKPILEKMDGTEELLVKLNREDLLRKQRTFDNGSIPHQIHLGELHAILRRQEDFYPFLKDNREKIEKILTFRIPYYVGPLARGNSRFAWMTRKSEETITPWNFEEVVDKGASAQSFIERMTNFDKNLPNEKVLPKHSLLYEYFTVYNELTKVKYVTEGMRKPAFLSGEQKKAIVDLLFKTNRKVTVKQLKEDYFKKIECFDSVEISGVEDRFNASLGTYHDLLKIIKDKDFLDNEENEDILEDIVLTLTLFEDREMIEERLKTYAHLFDDKVMKQLKRRRYTGWGRLSRKLINGIRDKQSGKTILDFLKSDGFANRNFMQLIHDDSLTFKEDIQKAQVSGQGDSLHEHIANLAGSPAIKKGILQTVKVVDELVKVMGRHKPENIVIEMARENQTTQKGQKNSRERMKRIEEGIKELGSQILKEHPVENTQLQNEKLYLYYLQNGRDMYVDQELDINRLSDYDVDHIVPQSFLKDDSIDNKVLTRSDKARGKSDNVPSEEVVKKMKNYWRQLLNAKLITQRKFDNLTKAERGGLSELDKAGFIKRQLVETRQITKHVAQILDSRMNTKYDENDKLIREVKVITLKSKLVSDFRKDFQFYKVREINNYHHAHDAYLNAVVGTALIKKYPKLESEFVYGDYKVYDVRKMIAKSEQEIGKATAKYFFYSNIMNFFKTEITLANGEIRKRPLIETNGETGEIVWDKGRDFATVRKVLSMPQVNIVKKTEVQTGGFSKESILPKRNSDKLIARKKDWDPKKYGGFDSPTVAYSVLVVAKVEKGKSKKLKSVKELLGITIMERSSFEKNPIDFLEAKGYKEVKKDLIIKLPKYSLFELENGRKRMLASAGELQKGNELALPSKYVNFLYLASHYEKLKGSPEDNEQKQLFVEQHKHYLDEIIEQISEFSKRVILADANLDKVLSAYNKHRDKPIREQAENIIHLFTLTNLGAPAAFKYFDTTIDRKRYTSTKEVLDATLIHQSITGLYETRIDLSQLGGDGGGGGGGVLNLEEEYRLHEKPVPSSIDPSWLQLFPTVWAERAGMGLANQVPPVVVELRSGASPVAVRQYPMSKEAREGIRPHIQKFLDLGVLVPCRSPWNTPLLPVKKPGTNDYRPVQDLREINKRVQDIHPTVPNPYNLLSSLPPSYTWYSVLDLKDAFFCLRLHPNSQPLFAFEWKDPEKGNTGQLTWTRLPQGFKNSPTLFNEALHRDLAPFRALNPQVVLLQYVDDLLVAAPTYEDCKKGTQKLLQELSKLGYRVSAKKAQLCQREVTYLGYLLKEGKRWLTPARKATVMKIPVPTTPRQVREFLGTAGFCRLWIPGFASLAAPLYPLTKPSIPFIWTEEHQQAFDHIKKALLSAPALALPDLTKPFTLYIDERAGVARGVLTQTLGPWRRPVAYLSKKLDPVASGWPTCLKAVAAVALLLKDADKLTLGQNVTVIASHSLESIVRQPPDRWMTNARMTHYQSLLLNERVSFAPPAVLNPATLLPVESEATPVHRCSEILAEETGTRRDLEDQPLPGVPTWYTDGSSFITEGKRRAGAPIVDGKRTVWASSLPEGTSAQKAELVALTQALRLAEGKNINIYTDSRYAFATAHIHGAIYKQRGWLTSAGKDIKNKEEILALLEAIHLPRRVAIIHCPGHQRGSNPVATGNRRADEAAKQAALSTRVLAGTTKPAGKRTADGSEFEKRTADGSEFESPKKKAKVE

SEQ ID NO: 6232 - protein, 2086 aa, synthetic construct
MPAAKRVKLDGGDKKYSIGLDIGTNSVGWAVITDEYKVPSKKFKVLGNTDRHSIKKNLIGALLFDSGETAEATRLKRTARRRYTRRKNRICYLQEIFSNEMAKVDDSFFHRLEESFLVEEDKKHERHPIFGNIVDEVAYHEKYPTIYHLRKKLVDSTDKADLRLIYLALAHMIKFRGHFLIEGDLNPDNSDVDKLFIQLVQTYNQLFEENPINASGVDAKAILSARLSKSRRLENLIAQLPGEKKNGLFGNLIALSLGLTPNFKSNFDLAEDAKLQLSKDTYDDDLDNLLAQIGDQYADLFLAAKNLSDAILLSDILRVNTEITKAPLSASMIKRYDEHHQDLTLLKALVRQQLPEKYKEIFFDQSKNGYAGYIDGGASQEEFYKFIKPILEKMDGTEELLVKLNREDLLRKQRTFDNGSIPHQIHLGELHAILRRQEDFYPFLKDNREKIEKILTFRIPYYVGPLARGNSRFAWMTRKSEETITPWNFEEVVDKGASAQSFIERMTNFDKNLPNEKVLPKHSLLYEYFTVYNELTKVKYVTEGMRKPAFLSGEQKKAIVDLLFKTNRKVTVKQLKEDYFKKIECFDSVEISGVEDRFNASLGTYHDLLKIIKDKDFLDNEENEDILEDIVLTLTLFEDREMIEERLKTYAHLFDDKVMKQLKRRRYTGWGRLSRKLINGIRDKQSGKTILDFLKSDGFANRNFMQLIHDDSLTFKEDIQKAQVSGQGDSLHEHIANLAGSPAIKKGILQTVKVVDELVKVMGRHKPENIVIEMARENQTTQKGQKNSRERMKRIEEGIKELGSQILKEHPVENTQLQNEKLYLYYLQNGRDMYVDQELDINRLSDYDVDHIVPQSFLKDDSIDNKVLTRSDKARGKSDNVPSEEVVKKMKNYWRQLLNAKLITQRKFDNLTKAERGGLSELDKAGFIKRQLVETRQITKHVAQILDSRMNTKYDENDKLIREVKVITLKSKLVSDFRKDFQFYKVREINNYHHAHDAYLNAVVGTALIKKYPKLESEFVYGDYKVYDVRKMIAKSEQEIGKATAKYFFYSNIMNFFKTEITLANGEIRKRPLIETNGETGEIVWDKGRDFATVRKVLSMPQVNIVKKTEVQTGGFSKESILPKRNSDKLIARKKDWDPKKYGGFDSPTVAYSVLVVAKVEKGKSKKLKSVKELLGITIMERSSFEKNPIDFLEAKGYKEVKKDLIIKLPKYSLFELENGRKRMLASAGELQKGNELALPSKYVNFLYLASHYEKLKGSPEDNEQKQLFVEQHKHYLDEIIEQISEFSKRVILADANLDKVLSAYNKHRDKPIREQAENIIHLFTLTNLGAPAAFKYFDTTIDRKRYTSTKEVLDATLIHQSITGLYETRIDLSQLGGDGGGGGGGVLNLEEEYRLHEKPVPSSIDPSWLQLFPTVWAERAGMGLANQVPPVVVELRSGASPVAVRQYPMSKEAREGIRPHIQKFLDLGVLVPCRSPWNTPLLPVKKPGTNDYRPVQDLREINKRVQDIHPTVPNPYNLLSSLPPSYTWYSVLDLKDAFFCLRLHPNSQPLFAFEWKDPEKGNTGQLTWTRLPQGFKNSPTLFNEALHRDLAPFRALNPQVVLLQYVDDLLVAAPTYEDCKKGTQKLLQELSKLGYRVSAKKAQLCQREVTYLGYLLKEGKRWLTPARKATVMKIPVPTTPRQVREFLGKAGFCRLFIPGFASLAAPLYPLTKPSIPFIWTEEHQQAFDHIKKALLSAPALALPDLTKPFTLYIDERAGVARGVLTQTLGPWRRPVAYLSKKLDPVASGWPTCLKAVAAVALLLKDADKLTLGQNVTVIASHSLESIVRQPPDRWMTNARMTHYQSLLLNERVSFAPPAVLNPATLLPVESEATPVHRCSEILAEETGTRRDLEDQPLPGVPTWYTDGSSFITEGKRRAGAPIVDGKRTVWASSLPEGTSAQKAELVALTQALRLAEGKNINIYTDSRYAFATAHIHGAIYKQRGWLTSAGKDIKNKEEILALLEAIHLPRRVAIIHCPGHQRGSNPVATGNRRADEAAKQAALSTRVLAGTTKPAGKRTADGSEFEKRTADGSEFESPKKKAKVE

SEQ ID NO: 6233 - protein, 2119 aa, synthetic construct
MPAAKRVKLDGGDKKYSIGLDIGTNSVGWAVITDEYKVPSKKFKVLGNTDRHSIKKNLIGALLFDSGETAEATRLKRTARRRYTRRKNRICYLQEIFSNEMAKVDDSFFHRLEESFLVEEDKKHERHPIFGNIVDEVAYHEKYPTIYHLRKKLVDSTDKADLRLIYLALAHMIKFRGHFLIEGDLNPDNSDVDKLFIQLVQTYNQLFEENPINASGVDAKAILSARLSKSRRLENLIAQLPGEKKNGLFGNLIALSLGLTPNFKSNFDLAEDAKLQLSKDTYDDDLDNLLAQIGDQYADLFLAAKNLSDAILLSDILRVNTEITKAPLSASMIKRYDEHHQDLTLLKALVRQQLPEKYKEIFFDQSKNGYAGYIDGGASQEEFYKFIKPILEKMDGTEELLVKLNREDLLRKQRTFDNGSIPHQIHLGELHAILRRQEDFYPFLKDNREKIEKILTFRIPYYVGPLARGNSRFAWMTRKSEETITPWNFEEVVDKGASAQSFIERMTNFDKNLPNEKVLPKHSLLYEYFTVYNELTKVKYVTEGMRKPAFLSGEQKKAIVDLLFKTNRKVTVKQLKEDYFKKIECFDSVEISGVEDRFNASLGTYHDLLKIIKDKDFLDNEENEDILEDIVLTLTLFEDREMIEERLKTYAHLFDDKVMKQLKRRRYTGWGRLSRKLINGIRDKQSGKTILDFLKSDGFANRNFMQLIHDDSLTFKEDIQKAQVSGQGDSLHEHIANLAGSPAIKKGILQTVKVVDELVKVMGRHKPENIVIEMARENQTTQKGQKNSRERMKRIEEGIKELGSQILKEHPVENTQLQNEKLYLYYLQNGRDMYVDQELDINRLSDYDVDHIVPQSFLKDDSIDNKVLTRSDKARGKSDNVPSEEVVKKMKNYWRQLLNAKLITQRKFDNLTKAERGGLSELDKAGFIKRQLVETRQITKHVAQILDSRMNTKYDENDKLIREVKVITLKSKLVSDFRKDFQFYKVREINNYHHAHDAYLNAVVGTALIKKYPKLESEFVYGDYKVYDVRKMIAKSEQEIGKATAKYFFYSNIMNFFKTEITLANGEIRKRPLIETNGETGEIVWDKGRDFATVRKVLSMPQVNIVKKTEVQTGGFSKESILPKRNSDKLIARKKDWDPKKYGGFDSPTVAYSVLVVAKVEKGKSKKLKSVKELLGITIMERSSFEKNPIDFLEAKGYKEVKKDLIIKLPKYSLFELENGRKRMLASAGELQKGNELALPSKYVNFLYLASHYEKLKGSPEDNEQKQLFVEQHKHYLDEIIEQISEFSKRVILADANLDKVLSAYNKHRDKPIREQAENIIHLFTLTNLGAPAAFKYFDTTIDRKRYTSTKEVLDATLIHQSITGLYETRIDLSQLGGDGGGGGGGLLGRDLLTKLKAQIQFSTEGPQVTWEDRPAMCLVLNLEEEYRLHEKPVPPSIDPSWLQLFPMVWAEKAGMGLANQVPPVVVELKSDASPVAVRQYPMSKEAREGIRPHIQRFLDLGILVPCQSPWNTPLLPVKKPGTNDYRPVQDLREVNKRVQDIHPTVPNPYNLLSSLPPSHTWYSVLDLKDAFFCLKLHPNSQPLFAFEWRDPEKGNTGQLTWTRLPQGFKNSPTLFNEALHRDLASFRALNPQVVMLQYVDDLLVAAPTYRDCKEGTRRLLQELSKLGYRVSAKKAQLCREEVTYLGYLLKGGKRWLTPARKATVMKIPTPTTPRQVREFLGKAGFCRLFIPGFASLAAPLYPLTRPKVPFTWTEAHQEAFGRIKEALLSAPALALPDLTKPFALYVDEKEGVARGVLTQTLGPWRRPVAYLSKKLDPVASGWPTCLKAIAAVALLLKDADKLTLGQNVLVIAPHNLESIVRQPPDRWMTNARMTHYQSLLLNERVSFAPPAILNPATLLPVESDDTPIHICSEILAEETGTRPDLRDQPLPGVPAWYTDGSSFIMDGRRQAGAAIVDNKRTVWASNLPEGTSAQKAELIALTQALRLAEGKSINIYTDSRYAFATAHVHGAIYKQRGWLTSAGKDIKNKEEILALLEAIHLPKRVAIIHCPGHQRGTDPVATGNRKADEAAKQAAQSTRILTETTKNAGKRTADGSEFEKRTADGSEFESPKKKAKVE

SEQ ID NO: 6234 - protein, 2210 aa, synthetic construct
MPAAKRVKLDGGDKKYSIGLDIGTNSVGWAVITDEYKVPSKKFKVLGNTDRHSIKKNLIGALLFDSGETAEATRLKRTARRRYTRRKNRICYLQEIFSNEMAKVDDSFFHRLEESFLVEEDKKHERHPIFGNIVDEVAYHEKYPTIYHLRKKLVDSTDKADLRLIYLALAHMIKFRGHFLIEGDLNPDNSDVDKLFIQLVQTYNQLFEENPINASGVDAKAILSARLSKSRRLENLIAQLPGEKKNGLFGNLIALSLGLTPNFKSNFDLAEDAKLQLSKDTYDDDLDNLLAQIGDQYADLFLAAKNLSDAILLSDILRVNTEITKAPLSASMIKRYDEHHQDLTLLKALVRQQLPEKYKEIFFDQSKNGYAGYIDGGASQEEFYKFIKPILEKMDGTEELLVKLNREDLLRKQRTFDNGSIPHQIHLGELHAILRRQEDFYPFLKDNREKIEKILTFRIPYYVGPLARGNSRFAWMTRKSEETITPWNFEEVVDKGASAQSFIERMTNFDKNLPNEKVLPKHSLLYEYFTVYNELTKVKYVTEGMRKPAFLSGEQKKAIVDLLFKTNRKVTVKQLKEDYFKKIECFDSVEISGVEDRFNASLGTYHDLLKIIKDKDFLDNEENEDILEDIVLTLTLFEDREMIEERLKTYAHLFDDKVMKQLKRRRYTGWGRLSRKLINGIRDKQSGKTILDFLKSDGFANRNFMQLIHDDSLTFKEDIQKAQVSGQGDSLHEHIANLAGSPAIKKGILQTVKVVDELVKVMGRHKPENIVIEMARENQTTQKGQKNSRERMKRIEEGIKELGSQILKEHPVENTQLQNEKLYLYYLQNGRDMYVDQELDINRLSDYDVDHIVPQSFLKDDSIDNKVLTRSDKARGKSDNVPSEEVVKKMKNYWRQLLNAKLITQRKFDNLTKAERGGLSELDKAGFIKRQLVETRQITKHVAQILDSRMNTKYDENDKLIREVKVITLKSKLVSDFRKDFQFYKVREINNYHHAHDAYLNAVVGTALIKKYPKLESEFVYGDYKVYDVRKMIAKSEQEIGKATAKYFFYSNIMNFFKTEITLANGEIRKRPLIETNGETGEIVWDKGRDFATVRKVLSMPQVNIVKKTEVQTGGFSKESILPKRNSDKLIARKKDWDPKKYGGFDSPTVAYSVLVVAKVEKGKSKKLKSVKELLGITIMERSSFEKNPIDFLEAKGYKEVKKDLIIKLPKYSLFELENGRKRMLASAGELQKGNELALPSKYVNFLYLASHYEKLKGSPEDNEQKQLFVEQHKHYLDEIIEQISEFSKRVILADANLDKVLSAYNKHRDKPIREQAENIIHLFTLTNLGAPAAFKYFDTTIDRKRYTSTKEVLDATLIHQSITGLYETRIDLSQLGGDGGGGGGGTLGDQGSRGSDPLPEPRVTLTVEGIPTEFLVNTGAEHSVLTKPMGKMGSKRTVVAGATGSKVYPWTTKRLLKIGQKQVTHSFLVIPECPAPLLGRDLLTKLKAQIQFSTEGPQVTWEDRPAMCLVLNLEEEYRLHEKPVPPSIDPSWLQLFPMVWAEKAGMGLANQVPPVVVELKSDASPVAVRQYPMSKEAREGIRPHIQRFLDLGILVPCQSPWNTPLLPVKKPGTNDYRPVQDLREVNKRVQDIHPTVPNPYNLLSSLPPSHTWYSVLDLKDAFFCLKLHPNSQPLFAFEWRDPEKGNTGQLTWTRLPQGFKNSPTLFNEALHRDLASFRALNPQVVMLQYVDDLLVAAPTYRDCKEGTRRLLQELSKLGYRVSAKKAQLCREEVTYLGYLLKGGKRWLTPARKATVMKIPTPTTPRQVREFLGTAGFCRLWIPGFASLAAPLYPLTRPKVPFTWTEAHQEAFGRIKEALLSAPALALPDLTKPFALYVDEKEGVARGVLTQTLGPWRRPVAYLSKKLDPVASGWPTCLKAIAAVALLLKDADKLTLGQNVLVIAPHNLESIVRQPPDRWMTNARMTHYQSLLLNERVSFAPPAILNPATLLPVESDDTPIHICSEILAEETGTRPDLRDQPLPGVPAWYTDGSSFIMDGRRQAGAAIVDNKRTVWASNLPEGTSAQKAELIALTQALRLAEGKSINIYTDSRYAFATAHVHGAIYKQRGWLTSAGKDIKNKEEILALLEAIHLPKRVAIIHCPGHQRGTDPVATGNRKADEAAKQAAQSTRILTETTKNAGKRTADGSEFEKRTADGSEFESPKKKAKVE

SEQ ID NO: 6235 - protein, 2088 aa, synthetic construct
MPAAKRVKLDGGDKKYSIGLDIGTNSVGWAVITDEYKVPSKKFKVLGNTDRHSIKKNLIGALLFDSGETAEATRLKRTARRRYTRRKNRICYLQEIFSNEMAKVDDSFFHRLEESFLVEEDKKHERHPIFGNIVDEVAYHEKYPTIYHLRKKLVDSTDKADLRLIYLALAHMIKFRGHFLIEGDLNPDNSDVDKLFIQLVQTYNQLFEENPINASGVDAKAILSARLSKSRRLENLIAQLPGEKKNGLFGNLIALSLGLTPNFKSNFDLAEDAKLQLSKDTYDDDLDNLLAQIGDQYADLFLAAKNLSDAILLSDILRVNTEITKAPLSASMIKRYDEHHQDLTLLKALVRQQLPEKYKEIFFDQSKNGYAGYIDGGASQEEFYKFIKPILEKMDGTEELLVKLNREDLLRKQRTFDNGSIPHQIHLGELHAILRRQEDFYPFLKDNREKIEKILTFRIPYYVGPLARGNSRFAWMTRKSEETITPWNFEEVVDKGASAQSFIERMTNFDKNLPNEKVLPKHSLLYEYFTVYNELTKVKYVTEGMRKPAFLSGEQKKAIVDLLFKTNRKVTVKQLKEDYFKKIECFDSVEISGVEDRFNASLGTYHDLLKIIKDKDFLDNEENEDILEDIVLTLTLFEDREMIEERLKTYAHLFDDKVMKQLKRRRYTGWGRLSRKLINGIRDKQSGKTILDFLKSDGFANRNFMQLIHDDSLTFKEDIQKAQVSGQGDSLHEHIANLAGSPAIKKGILQTVKVVDELVKVMGRHKPENIVIEMARENQTTQKGQKNSRERMKRIEEGIKELGSQILKEHPVENTQLQNEKLYLYYLQNGRDMYVDQELDINRLSDYDVDHIVPQSFLKDDSIDNKVLTRSDKARGKSDNVPSEEVVKKMKNYWRQLLNAKLITQRKFDNLTKAERGGLSELDKAGFIKRQLVETRQITKHVAQILDSRMNTKYDENDKLIREVKVITLKSKLVSDFRKDFQFYKVREINNYHHAHDAYLNAVVGTALIKKYPKLESEFVYGDYKVYDVRKMIAKSEQEIGKATAKYFFYSNIMNFFKTEITLANGEIRKRPLIETNGETGEIVWDKGRDFATVRKVLSMPQVNIVKKTEVQTGGFSKESILPKRNSDKLIARKKDWDPKKYGGFDSPTVAYSVLVVAKVEKGKSKKLKSVKELLGITIMERSSFEKNPIDFLEAKGYKEVKKDLIIKLPKYSLFELENGRKRMLASAGELQKGNELALPSKYVNFLYLASHYEKLKGSPEDNEQKQLFVEQHKHYLDEIIEQISEFSKRVILADANLDKVLSAYNKHRDKPIREQAENIIHLFTLTNLGAPAAFKYFDTTIDRKRYTSTKEVLDATLIHQSITGLYETRIDLSQLGGDGGGGGGGTLNLEDEYRLYETSAEPEVSPGSTWLSDFPQAWAETGGMGLAVRQAPLIIPLKATSTPVSIKQYPMSQEAKLGIKPHIQRLLDQGILVPCQSPWNTPLLPVKKPGTNDYRPVQDLREVNKRVEDIHPTVPNPYNLLSGLPPSHRWYTVLDLKDAFFCLRLHPTSQPLFAFEWRDPGMGISGQLTWTRLPQGFKNSPTLFNEALHRDLADFRIQHPDLILLQYVDDILLAATSELDCQQGTRALLLTLGNLGYRASAKKAQLCQKQVKYLGYLLKEGQRWLTEARKETVMGQPTPKTPRQLREFLGKAGFCRLFIPGFAEMAAPLYPLTKPGTLFNWGPDQQKAYQEIKQALLTAPALGLPDLTKPFELFVDEKQGYAKGVLTQKLGPWRRPVAYLSKKLDPVAAGWPPCLRMVAAIAVLRKDAGKLTMGQPLVILAPHAVEALVKQPPDRWLSNARMTHYQAMLLDTDRVQFGPVVALNPATLLPLPEEGAPHDCLEILAETHGTRPDLTDQPIPDADHTWYTDGSSFLQEGQRKAGAAVTTETEVIWARALPAGTSAQRAELIALTQALKMAEGKRLNVYTDSRYAFATAHIHGEIYRRRGWLTSEGREIKNKSEILALLKALFLPKRLSIIHCLGHQKGDSAEARGNRLADQAAREAAIKTPPDTSTLLAGKRTADGSEFEKRTADGSEFESPKKKAKVE

SEQ ID NO: 6236 - protein, 2088 aa, synthetic construct
MPAAKRVKLDGGDKKYSIGLDIGTNSVGWAVITDEYKVPSKKFKVLGNTDRHSIKKNLIGALLFDSGETAEATRLKRTARRRYTRRKNRICYLQEIFSNEMAKVDDSFFHRLEESFLVEEDKKHERHPIFGNIVDEVAYHEKYPTIYHLRKKLVDSTDKADLRLIYLALAHMIKFRGHFLIEGDLNPDNSDVDKLFIQLVQTYNQLFEENPINASGVDAKAILSARLSKSRRLENLIAQLPGEKKNGLFGNLIALSLGLTPNFKSNFDLAEDAKLQLSKDTYDDDLDNLLAQIGDQYADLFLAAKNLSDAILLSDILRVNTEITKAPLSASMIKRYDEHHQDLTLLKALVRQQLPEKYKEIFFDQSKNGYAGYIDGGASQEEFYKFIKPILEKMDGTEELLVKLNREDLLRKQRTFDNGSIPHQIHLGELHAILRRQEDFYPFLKDNREKIEKILTFRIPYYVGPLARGNSRFAWMTRKSEETITPWNFEEVVDKGASAQSFIERMTNFDKNLPNEKVLPKHSLLYEYFTVYNELTKVKYVTEGMRKPAFLSGEQKKAIVDLLFKTNRKVTVKQLKEDYFKKIECFDSVEISGVEDRFNASLGTYHDLLKIIKDKDFLDNEENEDILEDIVLTLTLFEDREMIEERLKTYAHLFDDKVMKQLKRRRYTGWGRLSRKLINGIRDKQSGKTILDFLKSDGFANRNFMQLIHDDSLTFKEDIQKAQVSGQGDSLHEHIANLAGSPAIKKGILQTVKVVDELVKVMGRHKPENIVIEMARENQTTQKGQKNSRERMKRIEEGIKELGSQILKEHPVENTQLQNEKLYLYYLQNGRDMYVDQELDINRLSDYDVDHIVPQSFLKDDSIDNKVLTRSDKARGKSDNVPSEEVVKKMKNYWRQLLNAKLITQRKFDNLTKAERGGLSELDKAGFIKRQLVETRQITKHVAQILDSRMNTKYDENDKLIREVKVITLKSKLVSDFRKDFQFYKVREINNYHHAHDAYLNAVVGTALIKKYPKLESEFVYGDYKVYDVRKMIAKSEQEIGKATAKYFFYSNIMNFFKTEITLANGEIRKRPLIETNGETGEIVWDKGRDFATVRKVLSMPQVNIVKKTEVQTGGFSKESILPKRNSDKLIARKKDWDPKKYGGFDSPTVAYSVLVVAKVEKGKSKKLKSVKELLGITIMERSSFEKNPIDFLEAKGYKEVKKDLIIKLPKYSLFELENGRKRMLASAGELQKGNELALPSKYVNFLYLASHYEKLKGSPEDNEQKQLFVEQHKHYLDEIIEQISEFSKRVILADANLDKVLSAYNKHRDKPIREQAENIIHLFTLTNLGAPAAFKYFDTTIDRKRYTSTKEVLDATLIHQSITGLYETRIDLSQLGGDGGGGGGGTLNIEDEYRLHETSKGPDVPLGSTWLSDFPQAWAETGGMGLAVRQAPLIIPLKATSTPVSIKQYPMSQEARLGIKPHIQRLLDQGILVPCQSPWNTPLLPVKKPGTNDYRPVQDLREVNKRVEDIHPTVPNPYNLLSGLPPSHQWYTVLDLKDAFFCLRLHPTSQSLFAFEWRDPEMGISGQLTWTRLPQGFKNSPTLFNEALHRDLADFRIQHPDLILLQYVDDLLLAATSELDCQQGTRALLQTLGDLGYRASAKKAQICQKQVKYLGYLLKEGQRWLTEARKETVMGQPTPKTPRQLREFLGTAGFCRLWIPGFAEMAAPLYPLTKPGTLFEWGPDQQKAYQEIKQALLTAPALGLPDLTKPFELFVDEKQGYAKGVLTQKLGPWRRPVAYLSKKLDPVAAGWPPCLRMVAAIAVLTKDAGKLTMGQPLVILAPHAVEALVKQPPDRWLSNARMTHYQALLLDTDRVQFGPIVALNPATLLPLPEEGLQHDCLDILAEAHGTRPDLTDQPLPDADHTWYTDGSSFLQEGQRKAGAAVTTETEVVWAKALPAGTSAQRAELIALTQALKMAEGKKLNVYTDSRYAFATAHIHGEIYRRRGWLTSEGKEIKNKDEILALLKALFLPKRLSIIHCPGHQKGNRAEARGNRMADQAAREVATRETPETSTLLAGKRTADGSEFEKRTADGSEFESPKKKAKVE

SEQ ID NO: 6237 - protein, 2088 aa, synthetic construct
MPAAKRVKLDGGDKKYSIGLDIGTNSVGWAVITDEYKVPSKKFKVLGNTDRHSIKKNLIGALLFDSGETAEATRLKRTARRRYTRRKNRICYLQEIFSNEMAKVDDSFFHRLEESFLVEEDKKHERHPIFGNIVDEVAYHEKYPTIYHLRKKLVDSTDKADLRLIYLALAHMIKFRGHFLIEGDLNPDNSDVDKLFIQLVQTYNQLFEENPINASGVDAKAILSARLSKSRRLENLIAQLPGEKKNGLFGNLIALSLGLTPNFKSNFDLAEDAKLQLSKDTYDDDLDNLLAQIGDQYADLFLAAKNLSDAILLSDILRVNTEITKAPLSASMIKRYDEHHQDLTLLKALVRQQLPEKYKEIFFDQSKNGYAGYIDGGASQEEFYKFIKPILEKMDGTEELLVKLNREDLLRKQRTFDNGSIPHQIHLGELHAILRRQEDFYPFLKDNREKIEKILTFRIPYYVGPLARGNSRFAWMTRKSEETITPWNFEEVVDKGASAQSFIERMTNFDKNLPNEKVLPKHSLLYEYFTVYNELTKVKYVTEGMRKPAFLSGEQKKAIVDLLFKTNRKVTVKQLKEDYFKKIECFDSVEISGVEDRFNASLGTYHDLLKIIKDKDFLDNEENEDILEDIVLTLTLFEDREMIEERLKTYAHLFDDKVMKQLKRRRYTGWGRLSRKLINGIRDKQSGKTILDFLKSDGFANRNFMQLIHDDSLTFKEDIQKAQVSGQGDSLHEHIANLAGSPAIKKGILQTVKVVDELVKVMGRHKPENIVIEMARENQTTQKGQKNSRERMKRIEEGIKELGSQILKEHPVENTQLQNEKLYLYYLQNGRDMYVDQELDINRLSDYDVDHIVPQSFLKDDSIDNKVLTRSDKARGKSDNVPSEEVVKKMKNYWRQLLNAKLITQRKFDNLTKAERGGLSELDKAGFIKRQLVETRQITKHVAQILDSRMNTKYDENDKLIREVKVITLKSKLVSDFRKDFQFYKVREINNYHHAHDAYLNAVVGTALIKKYPKLESEFVYGDYKVYDVRKMIAKSEQEIGKATAKYFFYSNIMNFFKTEITLANGEIRKRPLIETNGETGEIVWDKGRDFATVRKVLSMPQVNIVKKTEVQTGGFSKESILPKRNSDKLIARKKDWDPKKYGGFDSPTVAYSVLVVAKVEKGKSKKLKSVKELLGITIMERSSFEKNPIDFLEAKGYKEVKKDLIIKLPKYSLFELENGRKRMLASAGELQKGNELALPSKYVNFLYLASHYEKLKGSPEDNEQKQLFVEQHKHYLDEIIEQISEFSKRVILADANLDKVLSAYNKHRDKPIREQAENIIHLFTLTNLGAPAAFKYFDTTIDRKRYTSTKEVLDATLIHQSITGLYETRIDLSQLGGDGGGGGGGTLNIEDEHRLHETSKEPDVSLGSTWLSDFPQAWAETGGMGLAVRQAPLIIPLKATSTPVSIKQYPMSQEARLGIKPHIQRLLDQGILVPCQSPWNTPLLPVKKPGTNDYRPVQDLREVNKRVEDIHPTVPNPYNLLSGLPPSHQWYTVLDLKDAFFCLRLHPTSQPLFAFEWRDPEMGISGQLTWTRLPQGFKNSPTLFNEALHRDLADFRIQHPDLILLQYVDDLLLAATSELDCQQGTRALLQTLGNLGYRASAKKAQICQKQVKYLGYLLKEGQRWLTEARKETVMGQPTPKTPRQLREFLGTAGFCRLWIPGFAEMAAPLYPLTKPGTLFNWGPDQQKAYQEIKQALLTAPALGLPDLTKPFELFVDEKQGYAKGVLTQKLGPWRRPVAYLSKKLDPVAAGWPPCLRMVAAIAVLTKDAGKLTMGQPLVILAPHAVEALVKQPPDRWLSNARMTHYQALLLDTDRVQFGPVVALNPATLLPLPEEGLQHNCLDILAEAHGTRPDLTDQPLPDADHTWYTDGSSLLQEGQRKAGAAVTTETEVIWAKALPAGTSAQRAELIALTQALKMAEGKKLNVYTDSRYAFATAHIHGEIYRRRGWLTSEGKEIKNKDEILALLKALFLPKRLSIIHCPGHQKGHSAEARGNRMADQAARKAAITETPDTSTLLAGKRTADGSEFEKRTADGSEFESPKKKAKVE

SEQ ID NO: 6238 - protein, 2088 aa, synthetic construct; identical to SEQ ID NO: 6237

SEQ ID NO: 6239 - protein, 2088 aa, synthetic construct
MPAAKRVKLDGGDKKYSIGLDIGTNSVGWAVITDEYKVPSKKFKVLGNTDRHSIKKNLIGALLFDSGETAEATRLKRTARRRYTRRKNRICYLQEIFSNEMAKVDDSFFHRLEESFLVEEDKKHERHPIFGNIVDEVAYHEKYPTIYHLRKKLVDSTDKADLRLIYLALAHMIKFRGHFLIEGDLNPDNSDVDKLFIQLVQTYNQLFEENPINASGVDAKAILSARLSKSRRLENLIAQLPGEKKNGLFGNLIALSLGLTPNFKSNFDLAEDAKLQLSKDTYDDDLDNLLAQIGDQYADLFLAAKNLSDAILLSDILRVNTEITKAPLSASMIKRYDEHHQDLTLLKALVRQQLPEKYKEIFFDQSKNGYAGYIDGGASQEEFYKFIKPILEKMDGTEELLVKLNREDLLRKQRTFDNGSIPHQIHLGELHAILRRQEDFYPFLKDNREKIEKILTFRIPYYVGPLARGNSRFAWMTRKSEETITPWNFEEVVDKGASAQSFIERMTNFDKNLPNEKVLPKHSLLYEYFTVYNELTKVKYVTEGMRKPAFLSGEQKKAIVDLLFKTNRKVTVKQLKEDYFKKIECFDSVEISGVEDRFNASLGTYHDLLKIIKDKDFLDNEENEDILEDIVLTLTLFEDREMIEERLKTYAHLFDDKVMKQLKRRRYTGWGRLSRKLINGIRDKQSGKTILDFLKSDGFANRNFMQLIHDDSLTFKEDIQKAQVSGQGDSLHEHIANLAGSPAIKKGILQTVKVVDELVKVMGRHKPENIVIEMARENQTTQKGQKNSRERMKRIEEGIKELGSQILKEHPVENTQLQNEKLYLYYLQNGRDMYVDQELDINRLSDYDVDHIVPQSFLKDDSIDNKVLTRSDKARGKSDNVPSEEVVKKMKNYWRQLLNAKLITQRKFDNLTKAERGGLSELDKAGFIKRQLVETRQITKHVAQILDSRMNTKYDENDKLIREVKVITLKSKLVSDFRKDFQFYKVREINNYHHAHDAYLNAVVGTALIKKYPKLESEFVYGDYKVYDVRKMIAKSEQEIGKATAKYFFYSNIMNFFKTEITLANGEIRKRPLIETNGETGEIVWDKGRDFATVRKVLSMPQVNIVKKTEVQTGGFSKESILPKRNSDKLIARKKDWDPKKYGGFDSPTVAYSVLVVAKVEKGKSKKLKSVKELLGITIMERSSFEKNPIDFLEAKGYKEVKKDLIIKLPKYSLFELENGRKRMLASAGELQKGNELALPSKYVNFLYLASHYEKLKGSPEDNEQKQLFVEQHKHYLDEIIEQISEFSKRVILADANLDKVLSAYNKHRDKPIREQAENIIHLFTLTNLGAPAAFKYFDTTIDRKRYTSTKEVLDATLIHQSITGLYETRIDLSQLGGDGGGGGGGTLNIEDEYRLHEISTEPDVSPGSTWLSDFPQAWAETGGMGLAVRQAPLIIPLKATSTPVSIKQYPMSQEAKLGIKPHIQRLLDQGILVPCQSPWNTPLLPVKKPGTNDYRPVQGLREVNKRVEDIHPTVPNPYNLLSGLPTSHRWYTVLDLKDAFFCLRLHPTSQPLFASEWRDPGMGISGQLTWTRLPQGFKNSPTLFNEALHRGLADFRIQHPDLILLQYVDDLLLAATSELDCQQGTRALLKTLGNLGYRASAKKAQICQKQVKYLGYLLREGQRWLTEARKETVMGQPTPKTPRQLREFLGTAGFCRLWIPRFAEMAAPLYPLTKPGTLFNWGPDQQKAYHEIKQALLTAPALGLPDLTKPFELFVDEKQGYAKGVLTQKLGPWRRPVAYLSKKLDPVAAGWPPCLRMVAAIAVLTKDAGKLTMGQPLVILAPHAVEALVKQPPDRWLSNARMTHYQAMLLDTDRVQFGPVVALNPATLLPLPEEGAPHDCLEILAETHGTEPDLTDQPIPDADHTWYTDGSSFLQEGQRKAGAAVTTETEVIWARALPAGTSAQRAELIALTQALKMAEGKRLNVYTDSRYAFATAHIHGEIYKRRGWLTSEGREIKNKSEILALLKALFLPKRLSIIHCLGHQKGDSAEARGNRLADQAAREAAIKTPPDTSTLLAGKRTADGSEFEKRTADGSEFESPKKKAKVE

SEQ ID NO: 6240 - protein, 2082 aa, synthetic construct
MPAAKRVKLDGGDKKYSIGLDIGTNSVGWAVITDEYKVPSKKFKVLGNTDRHSIKKNLIGALLFDSGETAEATRLKRTARRRYTRRKNRICYLQEIFSNEMAKVDDSFFHRLEESFLVEEDKKHERHPIFGNIVDEVAYHEKYPTIYHLRKKLVDSTDKADLRLIYLALAHMIKFRGHFLIEGDLNPDNSDVDKLFIQLVQTYNQLFEENPINASGVDAKAILSARLSKSRRLENLIAQLPGEKKNGLFGNLIALSLGLTPNFKSNFDLAEDAKLQLSKDTYDDDLDNLLAQIGDQYADLFLAAKNLSDAILLSDILRVNTEITKAPLSASMIKRYDEHHQDLTLLKALVRQQLPEKYKEIFFDQSKNGYAGYIDGGASQEEFYKFIKPILEKMDGTEELLVKLNREDLLRKQRTFDNGSIPHQIHLGELHAILRRQEDFYPFLKDNREKIEKILTFRIPYYVGPLARGNSRFAWMTRKSEETITPWNFEEVVDKGASAQSFIERMTNFDKNLPNEKVLPKHSLLYEYFTVYNELTKVKYVTEGMRKPAFLSGEQKKAIVDLLFKTNRKVTVKQLKEDYFKKIECFDSVEISGVEDRFNASLGTYHDLLKIIKDKDFLDNEENEDILEDIVLTLTLFEDREMIEERLKTYAHLFDDKVMKQLKRRRYTGWGRLSRKLINGIRDKQSGKTILDFLKSDGFANRNFMQLIHDDSLTFKEDIQKAQVSGQGDSLHEHIANLAGSPAIKKGILQTVKVVDELVKVMGRHKPENIVIEMARENQTTQKGQKNSRERMKRIEEGIKELGSQILKEHPVENTQLQNEKLYLYYLQNGRDMYVDQELDINRLSDYDVDHIVPQSFLKDDSIDNKVLTRSDKARGKSDNVPSEEVVKKMKNYWRQLLNAKLITQRKFDNLTKAERGGLSELDKAGFIKRQLVETRQITKHVAQILDSRMNTKYDENDKLIREVKVITLKSKLVSDFRKDFQFYKVREINNYHHAHDAYLNAVVGTALIKKYPKLESEFVYGDYKVYDVRKMIAKSEQEIGKATAKYFFYSNIMNFFKTEITLANGEIRKRPLIETNGETGEIVWDKGRDFATVRKVLSMPQVNIVKKTEVQTGGFSKESILPKRNSDKLIARKKDWDPKKYGGFDSPTVAYSVLVVAKVEKGKSKKLKSVKELLGITIMERSSFEKNPIDFLEAKGYKEVKKDLIIKLPKYSLFELENGRKRMLASAGELQKGNELALPSKYVNFLYLASHYEKLKGSPEDNEQKQLFVEQHKHYLDEIIEQISEFSKRVILADANLDKVLSAYNKHRDKPIREQAENIIHLFTLTNLGAPAAFKYFDTTIDRKRYTSTKEVLDATLIHQSITGLYETRIDLSQLGGDGGGGGGGTLQLDDEYRLYSPLVKPDQNIQFWLEQFPQAWAETAGMGLAKQVPPQVIQLKASATPVSVRQYPLSKEAQEGIRPHVQRLIQQGILVPVQSPWNTPLLPVRKPGTNDYRPVQDLREVNKRVQDIHPTVPNPYNLLCALPPQRSWYTVLDLKDAFFCLRLHPTSQPLFAFEWRDPGTGRTGQLTWTRLPQGFKNSPTIFNEALHRDLANFRIQHPQVTLLQYVDDLLLAGATKQDCLEGTKALLLELSDLGYRASAKKAQICRREVTYLGYSLRDGQRWLTEARKKTVVQIPAPTTAKQVREFLGTAGFCRLWIPGFATLAAPLYPLTKPKGEFSWAPEHQKAFDAIKKALLSAPALALPDVTKPFTLYVDERKGVARGVLTQTLGPWRRPVAYLSKKLDPVASGWPVCLKAIAAVAILVKDADKLTLGQNITVIAPHALENIVRQPPDRWMTNARMTHYQSLLLTERVTFAPPAALNPATLLPEETDEPVTHDCHQLLIEETGVRKDLTDIPLTGEVLTWFTDGSSYVVEGKRMAGAAVVDGTRTIWASSLPEGTSAQKAELMALTQALRLAEGKSINIYTDSRYAFATAHVHGAIYKQRGWLTSAGREIKNKEEILSLLEALHLPKRLAIIHCPGHQKAKDPISRGNQMADRVAKQAAQGVNLLAGKRTADGSEFEKRTADGSEFESPKKKAKVE

SEQ ID NO: 6241 - protein, 2079 aa, synthetic construct
MPAAKRVKLDGGDKKYSIGLDIGTNSVGWAVITDEYKVPSKKFKVLGNTDRHSIKKNLIGALLFDSGETAEATRLKRTARRRYTRRKNRICYLQEIFSNEMAKVDDSFFHRLEESFLVEEDKKHERHPIFGNIVDEVAYHEKYPTIYHLRKKLVDSTDKADLRLIYLALAHMIKFRGHFLIEGDLNPDNSDVDKLFIQLVQTYNQLFEENPINASGVDAKAILSARLSKSRRLENLIAQLPGEKKNGLFGNLIALSLGLTPNFKSNFDLAEDAKLQLSKDTYDDDLDNLLAQIGDQYADLFLAAKNLSDAILLSDILRVNTEITKAPLSASMIKRYDEHHQDLTLLKALVRQQLPEKYKEIFFDQSKNGYAGYIDGGASQEEFYKFIKPILEKMDGTEELLVKLNREDLLRKQRTFDNGSIPHQIHLGELHAILRRQEDFYPFLKDNREKIEKILTFRIPYYVGPLARGNSRFAWMTRKSEETITPWNFEEVVDKGASAQSFIERMTNFDKNLPNEKVLPKHSLLYEYFTVYNELTKVKYVTEGMRKPAFLSGEQKKAIVDLLFKTNRKVTVKQLKEDYFKKIECFDSVEISGVEDRFNASLGTYHDLLKIIKDKDFLDNEENEDILEDIVLTLTLFEDREMIEERLKTYAHLFDDKVMKQLKRRRYTGWGRLSRKLINGIRDKQSGKTILDFLKSDGFANRNFMQLIHDDSLTFKEDIQKAQVSGQGDSLHEHIANLAGSPAIKKGILQTVKVVDELVKVMGRHKPENIVIEMARENQTTQKGQKNSRERMKRIEEGIKELGSQILKEHPVENTQLQNEKLYLYYLQNGRDMYVDQELDINRLSDYDVDHIVPQSFLKDDSIDNKVLTRSDKARGKSDNVPSEEVVKKMKNYWRQLLNAKLITQRKFDNLTKAERGGLSELDKAGFIKRQLVETRQITKHVAQILDSRMNTKYDENDKLIREVKVITLKSKLVSDFRKDFQFYKVREINNYHHAHDAYLNAVVGTALIKKYPKLESEFVYGDYKVYDVRKMIAKSEQEIGKATAKYFFYSNIMNFFKTEITLANGEIRKRPLIETNGETGEIVWDKGRDFATVRKVLSMPQVNIVKKTEVQTGGFSKESILPKRNSDKLIARKKDWDPKKYGGFDSPTVAYSVLVVAKVEKGKSKKLKSVKELLGITIMERSSFEKNPIDFLEAKGYKEVKKDLIIKLPKYSLFELENGRKRMLASAGELQKGNELALPSKYVNFLYLASHYEKLKGSPEDNEQKQLFVEQHKHYLDEIIEQISEFSKRVILADANLDKVLSAYNKHRDKPIREQAENIIHLFTLTNLGAPAAFKYFDTTIDRKRYTSTKEVLDATLIHQSITGLYETRIDLSQLGGDGGGGGGGIPWLMKKPLQLTTLVPLQEYEERLLKQTMLTGSYKEKLQSLFLKYDALWQHWENQVGHRRIKPHHIATGTVNPRPQKQYPINPKAKASIQTVINDLLKQGVLIQQNSIMNTPVYPVPKPDGKWRMVLDYREVNKTIPLIAAQNQHSAGILSSIFRGKYKTTLDLSNGFWAHSITPESYWLTAFTWLGQQYCWTRLPQGFLNSPALFNADVVDLLKEVPNVQVYVDDIYISHDDPREHLEQLEKVFSLLLNAGYVVSLKKSEIAQHEVEFLGFNITKEGRGLTETFKQKLLNITPPRDLKQLQSILGKLNFARNFIPNFSELVKPLYNIIATAPGKYITWTTDNSQQLQNIISMLNSAENLEERNPEVRLIMKVNTSPSAGYIRFYNEFAKRPIMYLNYVYTKAEVKFTNTEKLLTTIHKGLIKALDLGMGQEILVYSPIVSMTKIQKTPLPERKALPIRWITWMSYLEDPRIQFHYDKTLPELQQVPTVTDDIIAKIKHPSEFSMVFYTDGSAIKHPNVNKSHNAGMGIAQVQFKPEFTVINTWSIPLGDHTAQLAEVAAVEFACKKALKIDGPVLIVTDSFYVAESVNKELPYWQSNGFFNNKKKPLKHVSKWKSIADCIQLKPDIIIIHEKGHQPTASTFHTEGNNLADKLATQGSYVVNAGKRTADGSEFEKRTADGSEFESPKKKAKVE

SEQ ID NO: 6242 - protein, 2086 aa, synthetic construct
MPAAKRVKLDGGDKKYSIGLDIGTNSVGWAVITDEYKVPSKKFKVLGNTDRHSIKKNLIGALLFDSGETAEATRLKRTARRRYTRRKNRICYLQEIFSNEMAKVDDSFFHRLEESFLVEEDKKHERHPIFGNIVDEVAYHEKYPTIYHLRKKLVDSTDKADLRLIYLALAHMIKFRGHFLIEGDLNPDNSDVDKLFIQLVQTYNQLFEENPINASGVDAKAILSARLSKSRRLENLIAQLPGEKKNGLFGNLIALSLGLTPNFKSNFDLAEDAKLQLSKDTYDDDLDNLLAQIGDQYADLFLAAKNLSDAILLSDILRVNTEITKAPLSASMIKRYDEHHQDLTLLKALVRQQLPEKYKEIFFDQSKNGYAGYIDGGASQEEFYKFIKPILEKMDGTEELLVKLNREDLLRKQRTFDNGSIPHQIHLGELHAILRRQEDFYPFLKDNREKIEKILTFRIPYYVGPLARGNSRFAWMTRKSEETITPWNFEEVVDKGASAQSFIERMTNFDKNLPNEKVLPKHSLLYEYFTVYNELTKVKYVTEGMRKPAFLSGEQKKAIVDLLFKTNRKVTVKQLKEDYFKKIECFDSVEISGVEDRFNASLGTYHDLLKIIKDKDFLDNEENEDILEDIVLTLTLFEDREMIEERLKTYAHLFDDKVMKQLKRRRYTGWGRLSRKLINGIRDKQSGKTILDFLKSDGFANRNFMQLIHDDSLTFKEDIQKAQVSGQGDSLHEHIANLAGSPAIKKGILQTVKVVDELVKVMGRHKPENIVIEMARENQTTQKGQKNSRERMKRIEEGIKELGSQILKEHPVENTQLQNEKLYLYYLQNGRDMYVDQELDINRLSDYDVDHIVPQSFLKDDSIDNKVLTRSDKARGKSDNVPSEEVVKKMKNYWRQLLNAKLITQRKFDNLTKAERGGLSELDKAGFIKRQLVETRQITKHVAQILDSRMNTKYDENDKLIREVKVITLKSKLVSDFRKDFQFYKVREINNYHHAHDAYLNAVVGTALIKKYPKLESEFVYGDYKVYDVRKMIAKSEQEIGKATAKYFFYSNIMNFFKTEITLANGEIRKRPLIETNGETGEIVWDKGRDFATVRKVLSMPQVNIVKKTEVQTGGFSKESILPKRNSDKLIARKKDWDPKKYGGFDSPTVAYSVLVVAKVEKGKSKKLKSVKELLGITIMERSSFEKNPIDFLEAKGYKEVKKDLIIKLPKYSLFELENGRKRMLASAGELQKGNELALPSKYVNFLYLASHYEKLKGSPEDNEQKQLFVEQHKHYLDEIIEQISEFSKRVILADANLDKVLSAYNKHRDKPIREQAENIIHLFTLTNLGAPAAFKYFDTTIDRKRYTSTKEVLDATLIHQSITGLYETRIDLSQLGGDGGGGGGGVLNLEEEYRLHEKPVPSSIDPSWLQLFPTVWAERAGMGLANQVPPVVVELRSGASPVAVRQYPMSKEAREGIRPHIQRFLDLGVLVPCQSPWNTPLLPVKKPGTNDYRPVQDLREINKRVQDIHPTVPNPYNLLSSLPPSHTWYSVLDLKDAFFCLKLHPNSQPLFAFEWRDPEKGNTGQLTWTRLPQGFKNSPTLFDEALHRDLAPFRALNPQVVLLQYVDDLLVAAPTYRDCKEGTQKLLQELSKLGYRVSAKKAQLCQKEVTYLGYLLKEGKRWLTPARKATVMKIPPPTTPRQVREFLGTAGFCRLWIPGFASLAAPLYPLTKESIPFIWTEEHQKAFDRIKEALLSAPALALPDLTKPFTLYVDERAGVARGVLTQTLGPWRRPVAYLSKKLDPVASGWPTCLKAVAAVALLLKDADKLTLGQNVTVIASHSLESIVRQPPDRWMTNARMTHYQSLLLNERVSFAPPAVLNPATLLPVESEATPVHRCSEILAEETGTRRDLKDQPLPGVPAWYTDGSSFIAEGKRRAGAAIVDGKRTVWASSLPEGTSAQKAELVALTQALRLAEGKDINIYTDSRYAFATAHIHGAIYKQRGLLTSAGKDIKNKEEILALLEAIHLPKRVAIIHCPGHQKGNDPVATGNRRADEAAKQAALSTRVLAETTKPAGKRTADGSEFEKRTADGSEFESPKKKAKVE

SEQ ID NO: 6243 - protein, 2086 aa, synthetic construct
MPAAKRVKLDGGDKKYSIGLDIGTNSVGWAVITDEYKVPSKKFKVLGNTDRHSIKKNLIGALLFDSGETAEATRLKRTARRRYTRRKNRICYLQEIFSNEMAKVDDSFFHRLEESFLVEEDKKHERHPIFGNIVDEVAYHEKYPTIYHLRKKLVDSTDKADLRLIYLALAHMIKFRGHFLIEGDLNPDNSDVDKLFIQLVQTYNQLFEENPINASGVDAKAILSARLSKSRRLENLIAQLPGEKKNGLFGNLIALSLGLTPNFKSNFDLAEDAKLQLSKDTYDDDLDNLLAQIGDQYADLFLAAKNLSDAILLSDILRVNTEITKAPLSASMIKRYDEHHQDLTLLKALVRQQLPEKYKEIFFDQSKNGYAGYIDGGASQEEFYKFIKPILEKMDGTEELLVKLNREDLLRKQRTFDNGSIPHQIHLGELHAILRRQEDFYPFLKDNREKIEKILTFRIPYYVGPLARGNSRFAWMTRKSEETITPWNFEEVVDKGASAQSFIERMTNFDKNLPNEKVLPKHSLLYEYFTVYNELTKVKYVTEGMRKPAFLSGEQKKAIVDLLFKTNRKVTVKQLKEDYFKKIECFDSVEISGVEDRFNASLGTYHDLLKIIKDKDFLDNEENEDILEDIVLTLTLFEDREMIEERLKTYAHLFDDKVMKQLKRRRYTGWGRLSRKLINGIRDKQSGKTILDFLKSDGFANRNFMQLIHDDSLTFKEDIQKAQVSGQGDSLHEHIANLAGSPAIKKGILQTVKVVDELVKVMGRHKPENIVIEMARENQTTQKGQKNSRERMKRIEEGIKELGSQILKEHPVENTQLQNEKLYLYYLQNGRDMYVDQELDINRLSDYDVDHIVPQSFLKDDSIDNKVLTRSDKARGKSDNVPSEEVVKKMKNYWRQLLNAKLITQRKFDNLTKAERGGLSELDKAGFIKRQLVETRQITKHVAQILDSRMNTKYDENDKLIREVKVITLKSKLVSDFRKDFQFYKVREINNYHHAHDAYLNAVVGTALIKKYPKLESEFVYGDYKVYDVRKMIAKSEQEIGKATAKYFFYSNIMNFFKTEITLANGEIRKRPLIETNGETGEIVWDKGRDFATVRKVLSMPQVNIVKKTEVQTGGFSKESILPKRNSDKLIARKKDWDPKKYGGFDSPTVAYSVLVVAKVEKGKSKKLKSVKELLGITIMERSSFEKNPIDFLEAKGYKEVKKDLIIKLPKYSLFELENGRKRMLASAGELQKGNELALPSKYVNFLYLASHYEKLKGSPEDNEQKQLFVEQHKHYLDEIIEQISEFSKRVILADANLDKVLSAYNKHRDKPIREQAENIIHLFTLTNLGAPAAFKYFDTTIDRKRYTSTKEVLDATLIHQSITGLYETRIDLSQLGGDGGGGGGGVLNLEEEYRLHEKPVPSSIDPSWLQLFPTVWAERAGMGLANQVPPVVVELRSGASPVAVRQYPMSKEAREGIRPHIQRFLDLGVLVPCQSPWNTPLLPVKKPGTNDYRPVQDLREINKRVQDIHPTVPNPYNLLSSLPPSHTWYSVLDLKDAFFCLKLHPNSQPLFAFEWRDPEKGNTGQLTWTRLPQGFKNSPTLFNEALHRDLAPFRALNPQVVLLQYVDDLLVAAPTYRDCKEGTQKLLQELSKLGYRVSAKKAQLCQKEVTYLGYLLKEGKRWLTPARKATVMKIPPPTTPRQVREFLGKAGFCRLFIPGFASLAAPLYPLTKPSIPFIWTEEHQKAFDRIKEALLSAPALALPDLTKPFTLYVDERAGVARGVLTQTLGPWRRPVAYLSKKLDPVASGWPTCLKAVAAVALLLKDADKLTLGQNVTVIASHSLESIVRQPPDRWMTNARMTHYQSLLLNERVSFAPPAVLNPATLLPVESEATPVHRCSEILAEETGTRRDLKDQPLPGVPAWYTDGSSFIAEGKRRAGAAIVDGKRTVWASSLPEGTSAQKAELVALTQALRLAEGKDINIYTDSRYAFATAHIHGAIYKQRGWLTSAGKDIKNKEEILALLEAIHLPKRVAIIHCPGHQKGNDPVATGNRRADEAAKQAALSTRVLAETTKPAGKRTADGSEFEKRTADGSEFESPKKKAKVE

SEQ ID NO: 6244 - protein, 2091 aa, synthetic construct
MPAAKRVKLDGGDKKYSIGLDIGTNSVGWAVITDEYKVPSKKFKVLGNTDRHSIKKNLIGALLFDSGETAEATRLKRTARRRYTRRKNRICYLQEIFSNEMAKVDDSFFHRLEESFLVEEDKKHERHPIFGNIVDEVAYHEKYPTIYHLRKKLVDSTDKADLRLIYLALAHMIKFRGHFLIEGDLNPDNSDVDKLFIQLVQTYNQLFEENPINASGVDAKAILSARLSKSRRLENLIAQLPGEKKNGLFGNLIALSLGLTPNFKSNFDLAEDAKLQLSKDTYDDDLDNLLAQIGDQYADLFLAAKNLSDAILLSDILRVNTEITKAPLSASMIKRYDEHHQDLTLLKALVRQQLPEKYKEIFFDQSKNGYAGYIDGGASQEEFYKFIKPILEKMDGTEELLVKLNREDLLRKQRTFDNGSIPHQIHLGELHAILRRQEDFYPFLKDNREKIEKILTFRIPYYVGPLARGNSRFAWMTRKSEETITPWNFEEVVDKGASAQSFIERMTNFDKNLPNEKVLPKHSLLYEYFTVYNELTKVKYVTEGMRKPAFLSGEQKKAIVDLLFKTNRKVTVKQLKEDYFKKIECFDSVEISGVEDRFNASLGTYHDLLKIIKDKDFLDNEENEDILEDIVLTLTLFEDREMIEERLKTYAHLFDDKVMKQLKRRRYTGWGRLSRKLINGIRDKQSGKTILDFLKSDGFANRNFMQLIHDDSLTFKEDIQKAQVSGQGDSLHEHIANLAGSPAIKKGILQTVKVVDELVKVMGRHKPENIVIEMARENQTTQKGQKNSRERMKRIEEGIKELGSQILKEHPVENTQLQNEKLYLYYLQNGRDMYVDQELDINRLSDYDVDHIVPQSFLKDDSIDNKVLTRSDKARGKSDNVPSEEVVKKMKNYWRQLLNAKLITQRKFDNLTKAERGGLSELDKAGFIKRQLVETRQITKHVAQILDSRMNTKYDENDKLIREVKVITLKSKLVSDFRKDFQFYKVREINNYHHAHDAYLNAVVGTALIKKYPKLESEFVYGDYKVYDVRKMIAKSEQEIGKATAKYFFYSNIMNFFKTEITLANGEIRKRPLIETNGETGEIVWDKGRDFATVRKVLSMPQVNIVKKTEVQTGGFSKESILPKRNSDKLIARKKDWDPKKYGGFDSPTVAYSVLVVAKVEKGKSKKLKSVKELLGITIMERSSFEKNPIDFLEAKGYKEVKKDLIIKLPKYSLFELENGRKRMLASAGELQKGNELALPSKYVNFLYLASHYEKLKGSPEDNEQKQLFVEQHKHYLDEIIEQISEFSKRVILADANLDKVLSAYNKHRDKPIREQAENIIHLFTLTNLGAPAAFKYFDTTIDRKRYTSTKEVLDATLIHQSITGLYETRIDLSQLGGDGGGGGGGGTAPLEEEYRLFLEAPIQNVTLLEQWKREIPKVWAEINPPGLASTQAPIHVQLLSTALPVRVRQYPITLEAKRSLRETIRKFRAAGILRPVHSPWNTPLLPVRKSGTSEYRMVQDLREVNKRVETIHPTVPNPYTLLSLLPPDRIWYSVLDLKDAFFCIPLAPESQLIFAFEWADAEEGESGQLTWTRLPQGFKNSPTLFNEALNRDLQGFRLDHPSVSLLQYVDDLLIAADTQAACLSATRDLLMTLAELGYRVSGKKAQLCQEEVTYLGFKIHKGSRSLSNSRTQAILQIPVPKTKRQVREFLGTIGYCRLWIPGFAELAQPLYAATRPGNDPLVWGEKEEEAFQSLKLALTQPPALALPSLDKPFQLFVEETSGAAKGVLTQALGPWKRPVAYLSKRLDPVAAGWPRCLRAIAAAALLTREASKLTFGQDIEITSSHNLESLLRSPPDKWLTNARITQYQVLLLDPPRVRFKQTAALNPATLLPETDDTLPIHHCLDTLDSLTSTRPDLTDQPLAQAEATLFTDGSSYIRDGKRYAGAAVVTLDSVIWAEPLPIGTSAQKAELIALTKALEWSKDKSVNIYTDSRYAFATLHVHGMIYRERGWLTAGGKAIKNAPEILALLTAVWLPKRVAVMHCKGHQKDDAPTSTGNRRADEVAREVAIRPLSTQATISAGKRTADGSEFEKRTADGSEFESPKKKAKVE

SEQ ID NO: 6245 - protein, 2095 aa, synthetic construct
MPAAKRVKLDGGDKKYSIGLDIGTNSVGWAVITDEYKVPSKKFKVLGNTDRHSIKKNLIGALLFDSGETAEATRLKRTARRRYTRRKNRICYLQEIFSNEMAKVDDSFFHRLEESFLVEEDKKHERHPIFGNIVDEVAYHEKYPTIYHLRKKLVDSTDKADLRLIYLALAHMIKFRGHFLIEGDLNPDNSDVDKLFIQLVQTYNQLFEENPINASGVDAKAILSARLSKSRRLENLIAQLPGEKKNGLFGNLIALSLGLTPNFKSNFDLAEDAKLQLSKDTYDDDLDNLLAQIGDQYADLFLAAKNLSDAILLSDILRVNTEITKAPLSASMIKRYDEHHQDLTLLKALVRQQLPEKYKEIFFDQSKNGYAGYIDGGASQEEFYKFIKPILEKMDGTEELLVKLNREDLLRKQRTFDNGSIPHQIHLGELHAILRRQEDFYPFLKDNREKIEKILTFRIPYYVGPLARGNSRFAWMTRKSEETITPWNFEEVVDKGASAQSFIERMTNFDKNLPNEKVLPKHSLLYEYFTVYNELTKVKYVTEGMRKPAFLSGEQKKAIVDLLFKTNRKVTVKQLKEDYFKKIECFDSVEISGVEDRFNASLGTYHDLLKIIKDKDFLDNEENEDILEDIVLTLTLFEDREMIEERLKTYAHLFDDKVMKQLKRRRYTGWGRLSRKLINGIRDKQSGKTILDFLKSDGFANRNFMQLIHDDSLTFKEDIQKAQVSGQGDSLHEHIANLAGSPAIKKGILQTVKVVDELVKVMGRHKPENIVIEMARENQTTQKGQKNSRERMKRIEEGIKELGSQILKEHPVENTQLQNEKLYLYYLQNGRDMYVDQELDINRLSDYDVDHIVPQSFLKDDSIDNKVLTRSDKARGKSDNVPSEEVVKKMKNYWRQLLNAKLITQRKFDNLTKAERGGLSELDKAGFIKRQLVETRQITKHVAQILDSRMNTKYDENDKLIREVKVITLKSKLVSDFRKDFQFYKVREINNYHHAHDAYLNAVVGTALIKKYPKLESEFVYGDYKVYDVRKMIAKSEQEIGKATAKYFFYSNIMNFFKTEITLANGEIRKRPLIETNGETGEIVWDKGRDFATVRKVLSMPQVNIVKKTEVQTGGFSKESILPKRNSDKLIARKKDWDPKKYGGFDSPTVAYSVLVVAKVEKGKSKKLKSVKELLGITIMERSSFEKNPIDFLEAKGYKEVKKDLIIKLPKYSLFELENGRKRMLASAGELQKGNELALPSKYVNFLYLASHYEKLKGSPEDNEQKQLFVEQHKHYLDEIIEQISEFSKRVILADANLDKVLSAYNKHRDKPIREQAENIIHLFTLTNLGAPAAFKYFDTTIDRKRYTSTKEVLDATLIHQSITGLYETRIDLSQLGGDGGGGGGGGTVSLQDEHRLFDIPVTTSLPDVWLQDFPQAWAETGGLGRAKCQAPIIIDLKPTAVPVSIKQYPMSLEAHMGIRQHIIKFLELGVLRPCRSPWNTPLLPVKKPGTQDYRPVQDLREINKRTVDIHPTVPNPYNLLSTLKPDYSWYTVLDLKDAFFCLPLAPQSQELFAFEWKDPERGISGQLTWTRLPQGFKNSPTLFNEALHRDLTDFRTQHPEVTLLQYVDDLLLAAPTKKACTQGTRHLLQELGEKGYRASAKKAQICQTKVTYLGYILSEGKRWLTPGRIETVARIPPPRNPREVREFLGTAGFCRLWIPGFAELAAPLYALTKPSTPFTWQTEHQLAFEALKKALLSAPALGLPDTSKPFTLFLDERQGIAKGVLTQKLGPWKRPVAYLSKKLDPVAAGWPPCLRIMAATAMLVKDSAKLTLGQPLTVITPHTLEAIVRQPPDRWITNARLTHYQALLLDTDRVQFGPPVTLNPATLLPVPENQPSPHDCRQVLAETHGTREDLKDQELPDADHTWYTDGSSYLDSGTRRAGAAVVDGHNTIWAQSLPPGTSAQKAELIALTKALELSKGKKANIYTDSRYAFATAHTHGSIYERRGWLTSEGKEIKNKAEIIALLKALFLPQEVAIIHCPGHQKGQDPVAVGNRQADRVARQAAMAEVLTLATEPDNTSHITAGKRTADGSEFEKRTADGSEFESPKKKAKVE

SEQ ID NO: 6246 - protein, 2087 aa, synthetic construct
MPAAKRVKLDGGDKKYSIGLDIGTNSVGWAVITDEYKVPSKKFKVLGNTDRHSIKKNLIGALLFDSGETAEATRLKRTARRRYTRRKNRICYLQEIFSNEMAKVDDSFFHRLEESFLVEEDKKHERHPIFGNIVDEVAYHEKYPTIYHLRKKLVDSTDKADLRLIYLALAHMIKFRGHFLIEGDLNPDNSDVDKLFIQLVQTYNQLFEENPINASGVDAKAILSARLSKSRRLENLIAQLPGEKKNGLFGNLIALSLGLTPNFKSNFDLAEDAKLQLSKDTYDDDLDNLLAQIGDQYADLFLAAKNLSDAILLSDILRVNTEITKAPLSASMIKRYDEHHQDLTLLKALVRQQLPEKYKEIFFDQSKNGYAGYIDGGASQEEFYKFIKPILEKMDGTEELLVKLNREDLLRKQRTFDNGSIPHQIHLGELHAILRRQEDFYPFLKDNREKIEKILTFRIPYYVGPLARGNSRFAWMTRKSEETITPWNFEEVVDKGASAQSFIERMTNFDKNLPNEKVLPKHSLLYEYFTVYNELTKVKYVTEGMRKPAFLSGEQKKAIVDLLFKTNRKVTVKQLKEDYFKKIECFDSVEISGVEDRFNASLGTYHDLLKIIKDKDFLDNEENEDILEDIVLTLTLFEDREMIEERLKTYAHLFDDKVMKQLKRRRYTGWGRLSRKLINGIRDKQSGKTILDFLKSDGFANRNFMQLIHDDSLTFKEDIQKAQVSGQGDSLHEHIANLAGSPAIKKGILQTVKVVDELVKVMGRHKPENIVIEMARENQTTQKGQKNSRERMKRIEEGIKELGSQILKEHPVENTQLQNEKLYLYYLQNGRDMYVDQELDINRLSDYDVDHIVPQSFLKDDSIDNKVLTRSDKARGKSDNVPSEEVVKKMKNYWRQLLNAKLITQRKFDNLTKAERGGLSELDKAGFIKRQLVETRQITKHVAQILDSRMNTKYDENDKLIREVKVITLKSKLVSDFRKDFQFYKVREINNYHHAHDAYLNAVVGTALIKKYPKLESEFVYGDYKVYDVRKMIAKSEQEIGKATAKYFFYSNIMNFFKTEITLANGEIRKRPLIETNGETGEIVWDKGRDFATVRKVLSMPQVNIVKKTEVQTGGFSKESILPKRNSDKLIARKKDWDPKKYGGFDSPTVAYSVLVVAKVEKGKSKKLKSVKELLGITIMERSSFEKNPIDFLEAKGYKEVKKDLIIKLPKYSLFELENGRKRMLASAGELQKGNELALPSKYVNFLYLASHYEKLKGSPEDNEQKQLFVEQHKHYLDEIIEQISEFSKRVILADANLDKVLSAYNKHRDKPIREQAENIIHLFTLTNLGAPAAFKYFDTTIDRKRYTSTKEVLDATLIHQSITGLYETRIDLSQLGGDGGGGGGGGVLNLEEEYRLHEKPVPSSIDPSWLQLFPTVWAERAGMGLANQVPPVVVELRSGASPVAVRQYPMSKEAREGIRPHIQKFLDLGVLVPCRSPWNTPLLPVKKPGTNDYRPVQDLREINKRVQDIHPTVPNPYNLLSSLPPSYTWYSVLDLKDAFFCLRLHPNSQPLFAFEWKDPEKGNTGQLTWTRLPQGFKNSPTLFNEALHRDLAPFRALNPQVVLLQYVDDLLVAAPTYEDCKKGTQKLLQELSKLGYRVSAKKAQLCQREVTYLGYLLKEGKRWLTPARKATVMKIPVPTTPRQVREFLGKAGFCRLFIPGFASLAAPLYPLTKPSIPFIWTEEHQQAFDHIKKALLSAPALALPDLTKPFTLYIDERAGVARGVLTQTLGPWRRPVAYLSKKLDPVASGWPTCLKAVAAVALLLKDADKLTLGQNVTVIASHSLESIVRQPPDRWMTNARMTHYQSLLLNERVSFAPPAVLNPATLLPVESEATPVHRCSEILAEETGTRRDLEDQPLPGVPTWYTDGSSFITEGKRRAGAPIVDGKRTVWASSLPEGTSAQKAELVALTQALRLAEGKNINIYTDSRYAFATAHIHGAIYKQRGWLTSAGKDIKNKEEILALLEAIHLPRRVAIIHCPGHQRGSNPVATGNRRADEAAKQAALSTRVLAGTTKPAGKRTADGSEFEKRTADGSEFESPKKKAKVE

SEQ ID NO: 6247 - protein, 2211 aa, synthetic construct
MPAAKRVKLDGGDKKYSIGLDIGTNSVGWAVITDEYKVPSKKFKVLGNTDRHSIKKNLIGALLFDSGETAEATRLKRTARRRYTRRKNRICYLQEIFSNEMAKVDDSFFHRLEESFLVEEDKKHERHPIFGNIVDEVAYHEKYPTIYHLRKKLVDSTDKADLRLIYLALAHMIKFRGHFLIEGDLNPDNSDVDKLFIQLVQTYNQLFEENPINASGVDAKAILSARLSKSRRLENLIAQLPGEKKNGLFGNLIALSLGLTPNFKSNFDLAEDAKLQLSKDTYDDDLDNLLAQIGDQYADLFLAAKNLSDAILLSDILRVNTEITKAPLSASMIKRYDEHHQDLTLLKALVRQQLPEKYKEIFFDQSKNGYAGYIDGGASQEEFYKFIKPILEKMDGTEELLVKLNREDLLRKQRTFDNGSIPHQIHLGELHAILRRQEDFYPFLKDNREKIEKILTFRIPYYVGPLARGNSRFAWMTRKSEETITPWNFEEVVDKGASAQSFIERMTNFDKNLPNEKVLPKHSLLYEYFTVYNELTKVKYVTEGMRKPAFLSGEQKKAIVDLLFKTNRKVTVKQLKEDYFKKIECFDSVEISGVEDRFNASLGTYHDLLKIIKDKDFLDNEENEDILEDIVLTLTLFEDREMIEERLKTYAHLFDDKVMKQLKRRRYTGWGRLSRKLINGIRDKQSGKTILDFLKSDGFANRNFMQLIHDDSLTFKEDIQKAQVSGQGDSLHEHIANLAGSPAIKKGILQTVKVVDELVKVMGRHKPENIVIEMARENQTTQKGQKNSRERMKRIEEGIKELGSQILKEHPVENTQLQNEKLYLYYLQNGRDMYVDQELDINRLSDYDVDHIVPQSFLKDDSIDNKVLTRSDKARGKSDNVPSEEVVKKMKNYWRQLLNAKLITQRKFDNLTKAERGGLSELDKAGFIKRQLVETRQITKHVAQILDSRMNTKYDENDKLIREVKVITLKSKLVSDFRKDFQFYKVREINNYHHAHDAYLNAVVGTALIKKYPKLESEFVYGDYKVYDVRKMIAKSEQEIGKATAKYFFYSNIMNFFKTEITLANGEIRKRPLIETNGETGEIVWDKGRDFATVRKVLSMPQVNIVKKTEVQTGGFSKESILPKRNSDKLIARKKDWDPKKYGGFDSPTVAYSVLVVAKVEKGKSKKLKSVKELLGITIMERSSFEKNPIDFLEAKGYKEVKKDLIIKLPKYSLFELENGRKRMLASAGELQKGNELALPSKYVNFLYLASHYEKLKGSPEDNEQKQLFVEQHKHYLDEIIEQISEFSKRVILADANLDKVLSAYNKHRDKPIREQAENIIHLFTLTNLGAPAAFKYFDTTIDRKRYTSTKEVLDATLIHQSITGLYETRIDLSQLGGDGGGGGGGGTLGDQGSRGSDPLPEPRVTLTVEGIPTEFLVNTGAEHSVLTKPMGKMGSKRTVVAGATGSKVYPWTTKRLLKIGQKQVTHSFLVIPECPAPLLGRDLLTKLKAQIQFSTEGPQVTWEDRPAMCLVLNLEEEYRLHEKPVPPSIDPSWLQLFPMVWAEKAGMGLANQVPPVVVELKSDASPVAVRQYPMSKEAREGIRPHIQRFLDLGILVPCQSPWNTPLLPVKKPGTNDYRPVQDLREVNKRVQDIHPTVPNPYNLLSSLPPSHTWYSVLDLKDAFFCLKLHPNSQPLFAFEWRDPEKGNTGQLTWTRLPQGFKNSPTLFNEALHRDLASFRALNPQVVMLQYVDDLLVAAPTYRDCKEGTRRLLQELSKLGYRVSAKKAQLCREEVTYLGYLLKGGKRWLTPARKATVMKIPTPTTPRQVREFLGTAGFCRLWIPGFASLAAPLYPLTRPKVPFTWTEAHQEAFGRIKEALLSAPALALPDLTKPFALYVDEKEGVARGVLTQTLGPWRRPVAYLSKKLDPVASGWPTCLKAIAAVALLLKDADKLTLGQNVLVIAPHNLESIVRQPPDRWMTNARMTHYQSLLLNERVSFAPPAILNPATLLPVESDDTPIHICSEILAEETGTRPDLRDQPLPGVPAWYTDGSSFIMDGRRQAGAAIVDNKRTVWASNLPEGTSAQKAELIALTQALRLAEGKSINIYTDSRYAFATAHVHGAIYKQRGWLTSAGKDIKNKEEILALLEAIHLPKRVAIIHCPGHQRGTDPVATGNRKADEAAKQAAQSTRILTETTKNAGKRTADGSEFEKRTADGSEFESPKKKAKVE

SEQ ID NO: 6248 - protein, 2089 aa, synthetic construct
MPAAKRVKLDGGDKKYSIGLDIGTNSVGWAVITDEYKVPSKKFKVLGNTDRHSIKKNLIGALLFDSGETAEATRLKRTARRRYTRRKNRICYLQEIFSNEMAKVDDSFFHRLEESFLVEEDKKHERHPIFGNIVDEVAYHEKYPTIYHLRKKLVDSTDKADLRLIYLALAHMIKFRGHFLIEGDLNPDNSDVDKLFIQLVQTYNQLFEENPINASGVDAKAILSARLSKSRRLENLIAQLPGEKKNGLFGNLIALSLGLTPNFKSNFDLAEDAKLQLSKDTYDDDLDNLLAQIGDQYADLFLAAKNLSDAILLSDILRVNTEITKAPLSASMIKRYDEHHQDLTLLKALVRQQLPEKYKEIFFDQSKNGYAGYIDGGASQEEFYKFIKPILEKMDGTEELLVKLNREDLLRKQRTFDNGSIPHQIHLGELHAILRRQEDFYPFLKDNREKIEKILTFRIPYYVGPLARGNSRFAWMTRKSEETITPWNFEEVVDKGASAQSFIERMTNFDKNLPNEKVLPKHSLLYEYFTVYNELTKVKYVTEGMRKPAFLSGEQKKAIVDLLFKTNRKVTVKQLKEDYFKKIECFDSVEISGVEDRFNASLGTYHDLLKIIKDKDFLDNEENEDILEDIVLTLTLFEDREMIEERLKTYAHLFDDKVMKQLKRRRYTGWGRLSRKLINGIRDKQSGKTILDFLKSDGFANRNFMQLIHDDSLTFKEDIQKAQVSGQGDSLHEHIANLAGSPAIKKGILQTVKVVDELVKVMGRHKPENIVIEMARENQTTQKGQKNSRERMKRIEEGIKELGSQILKEHPVENTQLQNEKLYLYYLQNGRDMYVDQELDINRLSDYDVDHIVPQSFLKDDSIDNKVLTRSDKARGKSDNVPSEEVVKKMKNYWRQLLNAKLITQRKFDNLTKAERGGLSELDKAGFIKRQLVETRQITKHVAQILDSRMNTKYDENDKLIREVKVITLKSKLVSDFRKDFQFYKVREINNYHHAHDAYLNAVVGTALIKKYPKLESEFVYGDYKVYDVRKMIAKSEQEIGKATAKYFFYSNIMNFFKTEITLANGEIRKRPLIETNGETGEIVWDKGRDFATVRKVLSMPQVNIVKKTEVQTGGFSKESILPKRNSDKLIARKKDWDPKKYGGFDSPTVAYSVLVVAKVEKGKSKKLKSVKELLGITIMERSSFEKNPIDFLEAKGYKEVKKDLIIKLPKYSLFELENGRKRMLASAGELQKGNELALPSKYVNFLYLASHYEKLKGSPEDNEQKQLFVEQHKHYLDEIIEQISEFSKRVILADANLDKVLSAYNKHRDKPIREQAENIIHLFTLTNLGAPAAFKYFDTTIDRKRYTSTKEVLDATLIHQSITGLYETRIDLSQLGGDGGGGGGGGTLNLEDEYRLYETSAEPEVSPGSTWLSDFPQAWAETGGMGLAVRQAPLIIPLKATSTPVSIKQYPMSQEAKLGIKPHIQRLLDQGILVPCQSPWNTPLLPVKKPGTNDYRPVQDLREVNKRVEDIHPTVPNPYNLLSGLPPSHRWYTVLDLKDAFFCLRLHPTSQPLFAFEWRDPGMGISGQLTWTRLPQGFKNSPTLFNEALHRDLADFRIQHPDLILLQYVDDILLAATSELDCQQGTRALLLTLGNLGYRASAKKAQLCQKQVKYLGYLLKEGQRWLTEARKETVMGQPTPKTPRQLREFLGKAGFCRLFIPGFAEMAAPLYPLTKPGTLFNWGPDQQKAYQEIKQALLTAPALGLPDLTKPFELFVDEKQGYAKGVLTQKLGPWRRPVAYLSKKLDPVAAGWPPCLRMVAAIAVLRKDAGKLTMGQPLVILAPHAVEALVKQPPDRWLSNARMTHYQAMLLDTDRVQFGPVVALNPATLLPLPEEGAPHDCLEILAETHGTRPDLTDQPIPDADHTWYTDGSSFLQEGQRKAGAAVTTETEVIWARALPAGTSAQRAELIALTQALKMAEGKRLNVYTDSRYAFATAHIHGEIYRRRGWLTSEGREIKNKSEILALLKALFLPKRLSIIHCLGHQKGDSAEARGNRLADQAAREAAIKTPPDTSTLLAGKRTADGSEFEKRTADGSEFESPKKKAKVE

SEQ ID NO: 6249 - protein, 2089 aa, synthetic construct
MPAAKRVKLDGGDKKYSIGLDIGTNSVGWAVITDEYKVPSKKFKVLGNTDRHSIKKNLIGALLFDSGETAEATRLKRTARRRYTRRKNRICYLQEIFSNEMAKVDDSFFHRLEESFLVEEDKKHERHPIFGNIVDEVAYHEKYPTIYHLRKKLVDSTDKADLRLIYLALAHMIKFRGHFLIEGDLNPDNSDVDKLFIQLVQTYNQLFEENPINASGVDAKAILSARLSKSRRLENLIAQLPGEKKNGLFGNLIALSLGLTPNFKSNFDLAEDAKLQLSKDTYDDDLDNLLAQIGDQYADLFLAAKNLSDAILLSDILRVNTEITKAPLSASMIKRYDEHHQDLTLLKALVRQQLPEKYKEIFFDQSKNGYAGYIDGGASQEEFYKFIKPILEKMDGTEELLVKLNREDLLRKQRTFDNGSIPHQIHLGELHAILRRQEDFYPFLKDNREKIEKILTFRIPYYVGPLARGNSRFAWMTRKSEETITPWNFEEVVDKGASAQSFIERMTNFDKNLPNEKVLPKHSLLYEYFTVYNELTKVKYVTEGMRKPAFLSGEQKKAIVDLLFKTNRKVTVKQLKEDYFKKIECFDSVEISGVEDRFNASLGTYHDLLKIIKDKDFLDNEENEDILEDIVLTLTLFEDREMIEERLKTYAHLFDDKVMKQLKRRRYTGWGRLSRKLINGIRDKQSGKTILDFLKSDGFANRNFMQLIHDDSLTFKEDIQKAQVSGQGDSLHEHIANLAGSPAIKKGILQTVKVVDELVKVMGRHKPENIVIEMARENQTTQKGQKNSRERMKRIEEGIKELGSQILKEHPVENTQLQNEKLYLYYLQNGRDMYVDQELDINRLSDYDVDHIVPQSFLKDDSIDNKVLTRSDKARGKSDNVPSEEVVKKMKNYWRQLLNAKLITQRKFDNLTKAERGGLSELDKAGFIKRQLVETRQITKHVAQILDSRMNTKYDENDKLIREVKVITLKSKLVSDFRKDFQFYKVREINNYHHAHDAYLNAVVGTALIKKYPKLESEFVYGDYKVYDVRKMIAKSEQEIGKATAKYFFYSNIMNFFKTEITLANGEIRKRPLIETNGETGEIVWDKGRDFATVRKVLSMPQVNIVKKTEVQTGGFSKESILPKRNSDKLIARKKDWDPKKYGGFDSPTVAYSVLVVAKVEKGKSKKLKSVKELLGITIMERSSFEKNPIDFLEAKGYKEVKKDLIIKLPKYSLFELENGRKRMLASAGELQKGNELALPSKYVNFLYLASHYEKLKGSPEDNEQKQLFVEQHKHYLDEIIEQISEFSKRVILADANLDKVLSAYNKHRDKPIREQAENIIHLFTLTNLGAPAAFKYFDTTIDRKRYTSTKEVLDATLIHQSITGLYETRIDLSQLGGDGGGGGGGGLGIEDEYRLHETSTEPDVSLGSTWLSDFPQAWAETGGMGLAVRQAPLIIPLKATSTPVSIQQYPMSHEARLGIKPHIQRLLDQGILVPCQSPWNTPLLPVKKPGTNDYRPVQDLREVNKRVEDIHPTVPNPYNLLSGLPPSHQWYTVLDLKDAFFCLRLHPTSQPLFAFEWRDPGMGISGQLTWTRLPQGFKNSPTLFNEALHRDLADFRIQHPDLILLQYVDDILLAATSELDCQQGTRALLQTLGDLGYRASAKKAQICQKQVKYLGYLLREGQRWLTEARKETVMGQPVPKTPRQLREFLGKAGFCRLFIPGFAEMAAPLYPLTKPGTLFSWGPDQQKAYQEIKQALLTAPALGLPDLTKPFELFVDEKQGYAKGVLTQKLGPWRRPVAYLSKKLDPVAAGWPPCLRMVAAIAVLTKDAGKLTMGQPLVILAPHAVEALVKQPPDRWLSNARMTHYQAMLLDTDRVQFGPVVALNPATLLPLPEEGAPHDCLEILAETHGTRPDLTDQPIPDADHTWYTDGSSFLQEGQRKAGAAVTTETEVIWAGALPAGTSAQRAELIALTQALKMAEGKRLNVYTDSRYAFATAHIHGEIYRRRGWLTSEGREIKNKSEILALLKALFLPKRLSIIHCLGHQKGDSAEARGNRLADQAAREAAIKTPPDTSTLLIAGKRTADGSEFEKRTADGSEFESPKKKAKVE

SEQ ID NO: 6250 - protein, 2092 aa, synthetic construct
MPAAKRVKLDGGDKKYSIGLDIGTNSVGWAVITDEYKVPSKKFKVLGNTDRHSIKKNLIGALLFDSGETAEATRLKRTARRRYTRRKNRICYLQEIFSNEMAKVDDSFFHRLEESFLVEEDKKHERHPIFGNIVDEVAYHEKYPTIYHLRKKLVDSTDKADLRLIYLALAHMIKFRGHFLIEGDLNPDNSDVDKLFIQLVQTYNQLFEENPINASGVDAKAILSARLSKSRRLENLIAQLPGEKKNGLFGNLIALSLGLTPNFKSNFDLAEDAKLQLSKDTYDDDLDNLLAQIGDQYADLFLAAKNLSDAILLSDILRVNTEITKAPLSASMIKRYDEHHQDLTLLKALVRQQLPEKYKEIFFDQSKNGYAGYIDGGASQEEFYKFIKPILEKMDGTEELLVKLNREDLLRKQRTFDNGSIPHQIHLGELHAILRRQEDFYPFLKDNREKIEKILTFRIPYYVGPLARGNSRFAWMTRKSEETITPWNFEEVVDKGASAQSFIERMTNFDKNLPNEKVLPKHSLLYEYFTVYNELTKVKYVTEGMRKPAFLSGEQKKAIVDLLFKTNRKVTVKQLKEDYFKKIECFDSVEISGVEDRFNASLGTYHDLLKIIKDKDFLDNEENEDILEDIVLTLTLFEDREMIEERLKTYAHLFDDKVMKQLKRRRYTGWGRLSRKLINGIRDKQSGKTILDFLKSDGFANRNFMQLIHDDSLTFKEDIQKAQVSGQGDSLHEHIANLAGSPAIKKGILQTVKVVDELVKVMGRHKPENIVIEMARENQTTQKGQKNSRERMKRIEEGIKELGSQILKEHPVENTQLQNEKLYLYYLQNGRDMYVDQELDINRLSDYDVDHIVPQSFLKDDSIDNKVLTRSDKARGKSDNVPSEEVVKKMKNYWRQLLNAKLITQRKFDNLTKAERGGLSELDKAGFIKRQLVETRQITKHVAQILDSRMNTKYDENDKLIREVKVITLKSKLVSDFRKDFQFYKVREINNYHHAHDAYLNAVVGTALIKKYPKLESEFVYGDYKVYDVRKMIAKSEQEIGKATAKYFFYSNIMNFFKTEITLANGEIRKRPLIETNGETGEIVWDKGRDFATVRKVLSMPQVNIVKKTEVQTGGFSKESILPKRNSDKLIARKKDWDPKKYGGFDSPTVAYSVLVVAKVEKGKSKKLKSVKELLGITIMERSSFEKNPIDFLEAKGYKEVKKDLIIKLPKYSLFELENGRKRMLASAGELQKGNELALPSKYVNFLYLASHYEKLKGSPEDNEQKQLFVEQHKHYLDEIIEQISEFSKRVILADANLDKVLSAYNKHRDKPIREQAENIIHLFTLTNLGAPAAFKYFDTTIDRKRYTSTKEVLDATLIHQSITGLYETRIDLSQLGGDGGGGGGGGGTAPLEEEYRLFLEAPIQNVTLLEQWKREIPKVWAEINPPGLASTQAPIHVQLLSTALPVRVRQYPITLEAKRSLRETIRKFRAAGILRPVHSPWNTPLLPVRKSGTSEYRMVQDLREVNKRVETIHPTVPNPYTLLSLLPPDRIWYSVLDLKDAFFCIPLAPESQLIFAFEWADAEEGESGQLTWTRLPQGFKNSPTLFNEALNRDLQGFRLDHPSVSLLQYVDDLLIAADTQAACLSATRDLLMTLAELGYRVSGKKAQLCQEEVTYLGFKIHKGSRSLSNSRTQAILQIPVPKTKRQVREFLGTIGYCRLWIPGFAELAQPLYAATRPGNDPLVWGEKEEEAFQSLKLALTQPPALALPSLDKPFQLFVEETSGAAKGVLTQALGPWKRPVAYLSKRLDPVAAGWPRCLRAIAAAALLTREASKLTFGQDIEITSSHNLESLLRSPPDKWLTNARITQYQVLLLDPPRVRFKQTAALNPATLLPETDDTLPIHHCLDTLDSLTSTRPDLTDQPLAQAEATLFTDGSSYIRDGKRYAGAAVVTLDSVIWAEPLPIGTSAQKAELIALTKALEWSKDKSVNIYTDSRYAFATLHVHGMIYRERGWLTAGGKAIKNAPEILALLTAVWLPKRVAVMHCKGHQKDDAPTSTGNRRADEVAREVAIRPLSTQATISAGKRTADGSEFEKRTADGSEFESPKKKAKVE

SEQ ID NO: 6251 - protein, 2212 aa, synthetic construct
MPAAKRVKLDGGDKKYSIGLDIGTNSVGWAVITDEYKVPSKKFKVLGNTDRHSIKKNLIGALLFDSGETAEATRLKRTARRRYTRRKNRICYLQEIFSNEMAKVDDSFFHRLEESFLVEEDKKHERHPIFGNIVDEVAYHEKYPTIYHLRKKLVDSTDKADLRLIYLALAHMIKFRGHFLIEGDLNPDNSDVDKLFIQLVQTYNQLFEENPINASGVDAKAILSARLSKSRRLENLIAQLPGEKKNGLFGNLIALSLGLTPNFKSNFDLAEDAKLQLSKDTYDDDLDNLLAQIGDQYADLFLAAKNLSDAILLSDILRVNTEITKAPLSASMIKRYDEHHQDLTLLKALVRQQLPEKYKEIFFDQSKNGYAGYIDGGASQEEFYKFIKPILEKMDGTEELLVKLNREDLLRKQRTFDNGSIPHQIHLGELHAILRRQEDFYPFLKDNREKIEKILTFRIPYYVGPLARGNSRFAWMTRKSEETITPWNFEEVVDKGASAQSFIERMTNFDKNLPNEKVLPKHSLLYEYFTVYNELTKVKYVTEGMRKPAFLSGEQKKAIVDLLFKTNRKVTVKQLKEDYFKKIECFDSVEISGVEDRFNASLGTYHDLLKIIKDKDFLDNEENEDILEDIVLTLTLFEDREMIEERLKTYAHLFDDKVMKQLKRRRYTGWGRLSRKLINGIRDKQSGKTILDFLKSDGFANRNFMQLIHDDSLTFKEDIQKAQVSGQGDSLHEHIANLAGSPAIKKGILQTVKVVDELVKVMGRHKPENIVIEMARENQTTQKGQKNSRERMKRIEEGIKELGSQILKEHPVENTQLQNEKLYLYYLQNGRDMYVDQELDINRLSDYDVDHIVPQSFLKDDSIDNKVLTRSDKARGKSDNVPSEEVVKKMKNYWRQLLNAKLITQRKFDNLTKAERGGLSELDKAGFIKRQLVETRQITKHVAQILDSRMNTKYDENDKLIREVKVITLKSKLVSDFRKDFQFYKVREINNYHHAHDAYLNAVVGTALIKKYPKLESEFVYGDYKVYDVRKMIAKSEQEIGKATAKYFFYSNIMNFFKTEITLANGEIRKRPLIETNGETGEIVWDKGRDFATVRKVLSMPQVNIVKKTEVQTGGFSKESILPKRNSDKLIARKKDWDPKKYGGFDSPTVAYSVLVVAKVEKGKSKKLKSVKELLGITIMERSSFEKNPIDFLEAKGYKEVKKDLIIKLPKYSLFELENGRKRMLASAGELQKGNELALPSKYVNFLYLASHYEKLKGSPEDNEQKQLFVEQHKHYLDEIIEQISEFSKRVILADANLDKVLSAYNKHRDKPIREQAENIIHLFTLTNLGAPAAFKYFDTTIDRKRYTSTKEVLDATLIHQSITGLYETRIDLSQLGGDGGGGGGGGGTLGDQGSRGSDPLPEPRVTLTVEGIPTEFLVNTGAEHSVLTKPMGKMGSKRTVVAGATGSKVYPWTTKRLLKIGQKQVTHSFLVIPECPAPLLGRDLLTKLKAQIQFSTEGPQVTWEDRPAMCLVLNLEEEYRLHEKPVPPSIDPSWLQLFPMVWAEKAGMGLANQVPPVVVELKSDASPVAVRQYPMSKEAREGIRPHIQRFLDLGILVPCQSPWNTPLLPVKKPGTNDYRPVQDLREVNKRVQDIHPTVPNPYNLLSSLPPSHTWYSVLDLKDAFFCLKLHPNSQPLFAFEWRDPEKGNTGQLTWTRLPQGFKNSPTLFNEALHRDLASFRALNPQVVMLQYVDDLLVAAPTYRDCKEGTRRLLQELSKLGYRVSAKKAQLCREEVTYLGYLLKGGKRWLTPARKATVMKIPTPTTPRQVREFLGTAGFCRLWIPGFASLAAPLYPLTRPKVPFTWTEAHQEAFGRIKEALLSAPALALPDLTKPFALYVDEKEGVARGVLTQTLGPWRRPVAYLSKKLDPVASGWPTCLKAIAAVALLLKDADKLTLGQNVLVIAPHNLESIVRQPPDRWMTNARMTHYQSLLLNERVSFAPPAILNPATLLPVESDDTPIHICSEILAEETGTRPDLRDQPLPGVPAWYTDGSSFIMDGRRQAGAAIVDNKRTVWASNLPEGTSAQKAELIALTQALRLAEGKSINIYTDSRYAFATAHVHGAIYKQRGWLTSAGKDIKNKEEILALLEAIHLPKRVAIIHCPGHQRGTDPVATGNRKADEAAKQAAQSTRILTETTKNAGKRTADGSEFEKRTADGSEFESPKKKAKVE

SEQ ID NO: 6252 - protein, 2088 aa, synthetic construct
MPAAKRVKLDGGDKKYSIGLDIGTNSVGWAVITDEYKVPSKKFKVLGNTDRHSIKKNLIGALLFDSGETAEATRLKRTARRRYTRRKNRICYLQEIFSNEMAKVDDSFFHRLEESFLVEEDKKHERHPIFGNIVDEVAYHEKYPTIYHLRKKLVDSTDKADLRLIYLALAHMIKFRGHFLIEGDLNPDNSDVDKLFIQLVQTYNQLFEENPINASGVDAKAILSARLSKSRRLENLIAQLPGEKKNGLFGNLIALSLGLTPNFKSNFDLAEDAKLQLSKDTYDDDLDNLLAQIGDQYADLFLAAKNLSDAILLSDILRVNTEITKAPLSASMIKRYDEHHQDLTLLKALVRQQLPEKYKEIFFDQSKNGYAGYIDGGASQEEFYKFIKPILEKMDGTEELLVKLNREDLLRKQRTFDNGSIPHQIHLGELHAILRRQEDFYPFLKDNREKIEKILTFRIPYYVGPLARGNSRFAWMTRKSEETITPWNFEEVVDKGASAQSFIERMTNFDKNLPNEKVLPKHSLLYEYFTVYNELTKVKYVTEGMRKPAFLSGEQKKAIVDLLFKTNRKVTVKQLKEDYFKKIECFDSVEISGVEDRFNASLGTYHDLLKIIKDKDFLDNEENEDILEDIVLTLTLFEDREMIEERLKTYAHLFDDKVMKQLKRRRYTGWGRLSRKLINGIRDKQSGKTILDFLKSDGFANRNFMQLIHDDSLTFKEDIQKAQVSGQGDSLHEHIANLAGSPAIKKGILQTVKVVDELVKVMGRHKPENIVIEMARENQTTQKGQKNSRERMKRIEEGIKELGSQILKEHPVENTQLQNEKLYLYYLQNGRDMYVDQELDINRLSDYDVDHIVPQSFLKDDSIDNKVLTRSDKARGKSDNVPSEEVVKKMKNYWRQLLNAKLITQRKFDNLTKAERGGLSELDKAGFIKRQLVETRQITKHVAQILDSRMNTKYDENDKLIREVKVITLKSKLVSDFRKDFQFYKVREINNYHHAHDAYLNAVVGTALIKKYPKLESEFVYGDYKVYDVRKMIAKSEQEIGKATAKYFFYSNIMNFFKTEITLANGEIRKRPLIETNGETGEIVWDKGRDFATVRKVLSMPQVNIVKKTEVQTGGFSKESILPKRNSDKLIARKKDWDPKKYGGFDSPTVAYSVLVVAKVEKGKSKKLKSVKELLGITIMERSSFEKNPIDFLEAKGYKEVKKDLIIKLPKYSLFELENGRKRMLASAGELQKGNELALPSKYVNFLYLASHYEKLKGSPEDNEQKQLFVEQHKHYLDEIIEQISEFSKRVILADANLDKVLSAYNKHRDKPIREQAENIIHLFTLTNLGAPAAFKYFDTTIDRKRYTSTKEVLDATLIHQSITGLYETRIDLSQLGGDGGGGGGGGGVLNLEEEYRLHEKPVPSSIDPSWLQLFPTVWAERAGMGLANQVPPVVVELRSGASPVAVRQYPMSKEAREGIRPHIQRFLDLGVLVPCQSPWNTPLLPVKKPGTNDYRPVQDLREINKRVQDIHPTVPNPYNLLSSLPPSHTWYSVLDLKDAFFCLKLHPNSQPLFAFEWRDPEKGNTGQLTWTRLPQGFKNSPTLFDEALHRDLAPFRALNPQVVLLQYVDDLLVAAPTYRDCKEGTQKLLQELSKLGYRVSAKKAQLCQKEVTYLGYLLKEGKRWLTPARKATVMKIPPPTTPRQVREFLGTAGFCRLWIPGFASLAAPLYPLTKESIPFIWTEEHQKAFDRIKEALLSAPALALPDLTKPFTLYVDERAGVARGVLTQTLGPWRRPVAYLSKKLDPVASGWPTCLKAVAAVALLLKDADKLTLGQNVTVIASHSLESIVRQPPDRWMTNARMTHYQSLLLNERVSFAPPAVLNPATLLPVESEATPVHRCSEILAEETGTRRDLKDQPLPGVPAWYTDGSSFIAEGKRRAGAAIVDGKRTVWASSLPEGTSAQKAELVALTQALRLAEGKDINIYTDSRYAFATAHIHGAIYKQRGLLTSAGKDIKNKEEILALLEAIHLPKRVAIIHCPGHQKGNDPVATGNRRADEAAKQAALSTRVLAETTKPAGKRTADGSEFEKRTADGSEFESPKKKAKVE

SEQ ID NO: 6253 - protein, 2090 aa, synthetic construct
MPAAKRVKLDGGDKKYSIGLDIGTNSVGWAVITDEYKVPSKKFKVLGNTDRHSIKKNLIGALLFDSGETAEATRLKRTARRRYTRRKNRICYLQEIFSNEMAKVDDSFFHRLEESFLVEEDKKHERHPIFGNIVDEVAYHEKYPTIYHLRKKLVDSTDKADLRLIYLALAHMIKFRGHFLIEGDLNPDNSDVDKLFIQLVQTYNQLFEENPINASGVDAKAILSARLSKSRRLENLIAQLPGEKKNGLFGNLIALSLGLTPNFKSNFDLAEDAKLQLSKDTYDDDLDNLLAQIGDQYADLFLAAKNLSDAILLSDILRVNTEITKAPLSASMIKRYDEHHQDLTLLKALVRQQLPEKYKEIFFDQSKNGYAGYIDGGASQEEFYKFIKPILEKMDGTEELLVKLNREDLLRKQRTFDNGSIPHQIHLGELHAILRRQEDFYPFLKDNREKIEKILTFRIPYYVGPLARGNSRFAWMTRKSEETITPWNFEEVVDKGASAQSFIERMTNFDKNLPNEKVLPKHSLLYEYFTVYNELTKVKYVTEGMRKPAFLSGEQKKAIVDLLFKTNRKVTVKQLKEDYFKKIECFDSVEISGVEDRFNASLGTYHDLLKIIKDKDFLDNEENEDILEDIVLTLTLFEDREMIEERLKTYAHLFDDKVMKQLKRRRYTGWGRLSRKLINGIRDKQSGKTILDFLKSDGFANRNFMQLIHDDSLTFKEDIQKAQVSGQGDSLHEHIANLAGSPAIKKGILQTVKVVDELVKVMGRHKPENIVIEMARENQTTQKGQKNSRERMKRIEEGIKELGSQILKEHPVENTQLQNEKLYLYYLQNGRDMYVDQELDINRLSDYDVDHIVPQSFLKDDSIDNKVLTRSDKARGKSDNVPSEEVVKKMKNYWRQLLNAKLITQRKFDNLTKAERGGLSELDKAGFIKRQLVETRQITKHVAQILDSRMNTKYDENDKLIREVKVITLKSKLVSDFRKDFQFYKVREINNYHHAHDAYLNAVVGTALIKKYPKLESEFVYGDYKVYDVRKMIAKSEQEIGKATAKYFFYSNIMNFFKTEITLANGEIRKRPLIETNGETGEIVWDKGRDFATVRKVLSMPQVNIVKKTEVQTGGFSKESILPKRNSDKLIARKKDWDPKKYGGFDSPTVAYSVLVVAKVEKGKSKKLKSVKELLGITIMERSSFEKNPIDFLEAKGYKEVKKDLIIKLPKYSLFELENGRKRMLASAGELQKGNELALPSKYVNFLYLASHYEKLKGSPEDNEQKQLFVEQHKHYLDEIIEQISEFSKRVILADANLDKVLSAYNKHRDKPIREQAENIIHLFTLTNLGAPAAFKYFDTTIDRKRYTSTKEVLDATLIHQSITGLYETRIDLSQLGGDGGGGGGGGGTLNIEDEYRLHETSKEPDVPLGSTWLSDFPQAWAETGGMGLAVRQAPLIIPLKATSTPVSIKQYPMSQEARLGIKPHIQRLLDQGILVPCQSPWNTPLLPVKKPGTNDYRPVQDLREVNKRVEDIHPTVPNPYNLLSGLPPSHQWYTVLDLKDAFFCLRLHPTSQPLFAFEWRDPEMGISGQLTWTRLPQGFKNSPTLFNEALHRDLADFRIQHPDLILLQYVDDLLLAATSEQDCQRGTRALLQTLGNLGYRASAKKAQICQKQVKYLGYLLKEGQRWLTEARKETVMGQPTPKTPRQLREFLGKAGFCRLFIPGFAEMAAPLYPLTKPGTLFNWGPDQQKAYQEIKQALLTAPALGLPDLTKPFELFVDEKQGYAKGVLTQKLGPWRRPVAYLSKKLDPVAAGWPPCLRMVAAIAVLTKDAGKLTMGQPLVILAPHAVEALVKQPPDRWLSNARMTHYQAMLLDTDRVQFGPVVALNPATLLPLPEKEAPHDCLEILAETHGTRPDLTDQPIPDADYTWYTDGSSFLQEGQRRAGAAVTTETEVIWARALPAGTSAQRAELIALTQALKMAEGKKLNVYTDSRYAFATAHVHGEIYRRRGWLTSEGREIKNKNEILALLKALFLPKRLSIIHCPGHQKGNSAEARGNRMADQAAREAAMKAVLETSTLLAGKRTADGSEFEKRTADGSEFESPKKKAKVE

SEQ ID NO: 6254 - protein, 2093 aa, synthetic construct
MPAAKRVKLDGGDKKYSIGLDIGTNSVGWAVITDEYKVPSKKFKVLGNTDRHSIKKNLIGALLFDSGETAEATRLKRTARRRYTRRKNRICYLQEIFSNEMAKVDDSFFHRLEESFLVEEDKKHERHPIFGNIVDEVAYHEKYPTIYHLRKKLVDSTDKADLRLIYLALAHMIKFRGHFLIEGDLNPDNSDVDKLFIQLVQTYNQLFEENPINASGVDAKAILSARLSKSRRLENLIAQLPGEKKNGLFGNLIALSLGLTPNFKSNFDLAEDAKLQLSKDTYDDDLDNLLAQIGDQYADLFLAAKNLSDAILLSDILRVNTEITKAPLSASMIKRYDEHHQDLTLLKALVRQQLPEKYKEIFFDQSKNGYAGYIDGGASQEEFYKFIKPILEKMDGTEELLVKLNREDLLRKQRTFDNGSIPHQIHLGELHAILRRQEDFYPFLKDNREKIEKILTFRIPYYVGPLARGNSRFAWMTRKSEETITPWNFEEVVDKGASAQSFIERMTNFDKNLPNEKVLPKHSLLYEYFTVYNELTKVKYVTEGMRKPAFLSGEQKKAIVDLLFKTNRKVTVKQLKEDYFKKIECFDSVEISGVEDRFNASLGTYHDLLKIIKDKDFLDNEENEDILEDIVLTLTLFEDREMIEERLKTYAHLFDDKVMKQLKRRRYTGWGRLSRKLINGIRDKQSGKTILDFLKSDGFANRNFMQLIHDDSLTFKEDIQKAQVSGQGDSLHEHIANLAGSPAIKKGILQTVKVVDELVKVMGRHKPENIVIEMARENQTTQKGQKNSRERMKRIEEGIKELGSQILKEHPVENTQLQNEKLYLYYLQNGRDMYVDQELDINRLSDYDVDHIVPQSFLKDDSIDNKVLTRSDKARGKSDNVPSEEVVKKMKNYWRQLLNAKLITQRKFDNLTKAERGGLSELDKAGFIKRQLVETRQITKHVAQILDSRMNTKYDENDKLIREVKVITLKSKLVSDFRKDFQFYKVREINNYHHAHDAYLNAVVGTALIKKYPKLESEFVYGDYKVYDVRKMIAKSEQEIGKATAKYFFYSNIMNFFKTEITLANGEIRKRPLIETNGETGEIVWDKGRDFATVRKVLSMPQVNIVKKTEVQTGGFSKESILPKRNSDKLIARKKDWDPKKYGGFDSPTVAYSVLVVAKVEKGKSKKLKSVKELLGITIMERSSFEKNPIDFLEAKGYKEVKKDLIIKLPKYSLFELENGRKRMLASAGELQKGNELALPSKYVNFLYLASHYEKLKGSPEDNEQKQLFVEQHKHYLDEIIEQISEFSKRVILADANLDKVLSAYNKHRDKPIREQAENIIHLFTLTNLGAPAAFKYFDTTIDRKRYTSTKEVLDATLIHQSITGLYETRIDLSQLGGDGGGGGGGGGGTAPLEEEYRLFLEAPIQNVTLLEQWKREIPKVWAEINPPGLASTQAPIHVQLLSTALPVRVRQYPITLEAKRSLRETIRKFRAAGILRPVHSPWNTPLLPVRKSGTSEYRMVQDLREVNKRVETIHPTVPNPYTLLSLLPPDRIWYSVLDLKDAFFCIPLAPESQLIFAFEWADAEEGESGQLTWTRLPQGFKNSPTLFDEALNRDLQGFRLDHPSVSLLQYVDDLLIAADTQAACLSATRDLLMTLAELGYRVSGKKAQLCQEEVTYLGFKIHKGSRSLSNSRTQAILQIPVPKTKRQVREFLGTIGYCRLWIPGFAELAQPLYAATRGGNDPLVWGEKEEEAFQSLKLALTQPPALALPSLDKPFQLFVEETSGAAKGVLTQALGPWKRPVAYLSKRLDPVAAGWPRCLRAIAAAALLTREASKLTFGQDIEITSSHNLESLLRSPPDKWLTNARITQYQVLLLDPPRVRFKQTAALNPATLLPETDDTLPIHHCLDTLDSLTSTRPDLTDQPLAQAEATLFTDGSSYIRDGKRYAGAAVVTLDSVIWAEPLPIGTSAQKAELIALTKALEWSKDKSVNIYTDSRYAFATLHVHGMIYRERGLLTAGGKAIKNAPEILALLTAVWLPKRVAVMHCKGHQKDDAPTSTGNRRADEVAREVAIRPLSTQATISAGKRTADGSEFEKRTADGSEFESPKKKAKVE

SEQ ID NO: 6255 - protein, 1996 aa, synthetic construct
MPAAKRVKLDGGDKKYSIGLDIGTNSVGWAVITDEYKVPSKKFKVLGNTDRHSIKKNLIGALLFDSGETAEATRLKRTARRRYTRRKNRICYLQEIFSNEMAKVDDSFFHRLEESFLVEEDKKHERHPIFGNIVDEVAYHEKYPTIYHLRKKLVDSTDKADLRLIYLALAHMIKFRGHFLIEGDLNPDNSDVDKLFIQLVQTYNQLFEENPINASGVDAKAILSARLSKSRRLENLIAQLPGEKKNGLFGNLIALSLGLTPNFKSNFDLAEDAKLQLSKDTYDDDLDNLLAQIGDQYADLFLAAKNLSDAILLSDILRVNTEITKAPLSASMIKRYDEHHQDLTLLKALVRQQLPEKYKEIFFDQSKNGYAGYIDGGASQEEFYKFIKPILEKMDGTEELLVKLNREDLLRKQRTFDNGSIPHQIHLGELHAILRRQEDFYPFLKDNREKIEKILTFRIPYYVGPLARGNSRFAWMTRKSEETITPWNFEEVVDKGASAQSFIERMTNFDKNLPNEKVLPKHSLLYEYFTVYNELTKVKYVTEGMRKPAFLSGEQKKAIVDLLFKTNRKVTVKQLKEDYFKKIECFDSVEISGVEDRFNASLGTYHDLLKIIKDKDFLDNEENEDILEDIVLTLTLFEDREMIEERLKTYAHLFDDKVMKQLKRRRYTGWGRLSRKLINGIRDKQSGKTILDFLKSDGFANRNFMQLIHDDSLTFKEDIQKAQVSGQGDSLHEHIANLAGSPAIKKGILQTVKVVDELVKVMGRHKPENIVIEMARENQTTQKGQKNSRERMKRIEEGIKELGSQILKEHPVENTQLQNEKLYLYYLQNGRDMYVDQELDINRLSDYDVDHIVPQSFLKDDSIDNKVLTRSDKARGKSDNVPSEEVVKKMKNYWRQLLNAKLITQRKFDNLTKAERGGLSELDKAGFIKRQLVETRQITKHVAQILDSRMNTKYDENDKLIREVKVITLKSKLVSDFRKDFQFYKVREINNYHHAHDAYLNAVVGTALIKKYPKLESEFVYGDYKVYDVRKMIAKSEQEIGKATAKYFFYSNIMNFFKTEITLANGEIRKRPLIETNGETGEIVWDKGRDFATVRKVLSMPQVNIVKKTEVQTGGFSKESILPKRNSDKLIARKKDWDPKKYGGFDSPTVAYSVLVVAKVEKGKSKKLKSVKELLGITIMERSSFEKNPIDFLEAKGYKEVKKDLIIKLPKYSLFELENGRKRMLASAGELQKGNELALPSKYVNFLYLASHYEKLKGSPEDNEQKQLFVEQHKHYLDEIIEQISEFSKRVILADANLDKVLSAYNKHRDKPIREQAENIIHLFTLTNLGAPAAFKYFDTTIDRKRYTSTKEVLDATLIHQSITGLYETRIDLSQLGGDGGGGGGGGGGGVLDTPPSHIGLEHLPPPPEVPQFPLNLERLQALQDLVHRSLEAGYISPWDGPGNNPVFPVRKPNGAWRFVHDLRATNALTKPIPALSPGPPDLTAPPTHPPHIICLDLKDAFFQIPVEDRFRFYLSFTLPSPGGLQPHRRFAWRVLPQGFINSPALFQRALQEPLRQVSAAFSQSLLVSYMDDILYASPTEEQRSQCYQALAARLRDLGFQVASEKTSQTPSPVPFLGQMVHEQIVTYQSLPTLQISSPISLHQLQAVLGDLQWVSRGTPTTRRPLQLLYSSLKRHHDPRAIIQLSPEQLQGIAELRQALSHNARSRYNEQEPLLAYVHLTRAGSTLVLFQKGAQFPLAYFQTPLTDNQASPWGLLLLLGCQYLQTQALSSYAKPILKYYHNLPKTSLDNWIQSSEDPRVQELLQLWPQISSQGIQPPGPWKTLITRAEVFLTPQFSPDPIPAALCLFSDGATGRGAYCLWKDHLLDFQAVPAPESAQKGELAGLLAGLAAAPPEPVNIWVDSKYLYSLLRTWVLGAWLQPDPVPSYALLYKSLLRHPAIVVGHVRSHSSASHPIASLNNYVDQLAGKRTADGSEFEKRTADGSEFESPKKKAKVE

SEQ ID NO: 6256 - protein, 2089 aa, synthetic construct
MPAAKRVKLDGGDKKYSIGLDIGTNSVGWAVITDEYKVPSKKFKVLGNTDRHSIKKNLIGALLFDSGETAEATRLKRTARRRYTRRKNRICYLQEIFSNEMAKVDDSFFHRLEESFLVEEDKKHERHPIFGNIVDEVAYHEKYPTIYHLRKKLVDSTDKADLRLIYLALAHMIKFRGHFLIEGDLNPDNSDVDKLFIQLVQTYNQLFEENPINASGVDAKAILSARLSKSRRLENLIAQLPGEKKNGLFGNLIALSLGLTPNFKSNFDLAEDAKLQLSKDTYDDDLDNLLAQIGDQYADLFLAAKNLSDAILLSDILRVNTEITKAPLSASMIKRYDEHHQDLTLLKALVRQQLPEKYKEIFFDQSKNGYAGYIDGGASQEEFYKFIKPILEKMDGTEELLVKLNREDLLRKQRTFDNGSIPHQIHLGELHAILRRQEDFYPFLKDNREKIEKILTFRIPYYVGPLARGNSRFAWMTRKSEETITPWNFEEVVDKGASAQSFIERMTNFDKNLPNEKVLPKHSLLYEYFTVYNELTKVKYVTEGMRKPAFLSGEQKKAIVDLLFKTNRKVTVKQLKEDYFKKIECFDSVEISGVEDRFNASLGTYHDLLKIIKDKDFLDNEENEDILEDIVLTLTLFEDREMIEERLKTYAHLFDDKVMKQLKRRRYTGWGRLSRKLINGIRDKQSGKTILDFLKSDGFANRNFMQLIHDDSLTFKEDIQKAQVSGQGDSLHEHIANLAGSPAIKKGILQTVKVVDELVKVMGRHKPENIVIEMARENQTTQKGQKNSRERMKRIEEGIKELGSQILKEHPVENTQLQNEKLYLYYLQNGRDMYVDQELDINRLSDYDVDHIVPQSFLKDDSIDNKVLTRSDKARGKSDNVPSEEVVKKMKNYWRQLLNAKLITQRKFDNLTKAERGGLSELDKAGFIKRQLVETRQITKHVAQILDSRMNTKYDENDKLIREVKVITLKSKLVSDFRKDFQFYKVREINNYHHAHDAYLNAVVGTALIKKYPKLESEFVYGDYKVYDVRKMIAKSEQEIGKATAKYFFYSNIMNFFKTEITLANGEIRKRPLIETNGETGEIVWDKGRDFATVRKVLSMPQVNIVKKTEVQTGGFSKESILPKRNSDKLIARKKDWDPKKYGGFDSPTVAYSVLVVAKVEKGKSKKLKSVKELLGITIMERSSFEKNPIDFLEAKGYKEVKKDLIIKLPKYSLFELENGRKRMLASAGELQKGNELALPSKYVNFLYLASHYEKLKGSPEDNEQKQLFVEQHKHYLDEIIEQISEFSKRVILADANLDKVLSAYNKHRDKPIREQAENIIHLFTLTNLGAPAAFKYFDTTIDRKRYTSTKEVLDATLIHQSITGLYETRIDLSQLGGDGGGGGGGGGGVLNLEEEYRLHEKPVPSSIDPSWLQLFPTVWAERAGMGLANQVPPVVVELRSGASPVAVRQYPMSKEAREGIRPHIQKFLDLGVLVPCRSPWNTPLLPVKKPGTNDYRPVQDLREINKRVQDIHPTVPNPYNLLSSLPPSYTWYSVLDLKDAFFCLRLHPNSQPLFAFEWKDPEKGNTGQLTWTRLPQGFKNSPTLFNEALHRDLAPFRALNPQVVLLQYVDDLLVAAPTYEDCKKGTQKLLQELSKLGYRVSAKKAQLCQREVTYLGYLLKEGKRWLTPARKATVMKIPVPTTPRQVREFLGKAGFCRLFIPGFASLAAPLYPLTKPSIPFIWTEEHQQAFDHIKKALLSAPALALPDLTKPFTLYIDERAGVARGVLTQTLGPWRRPVAYLSKKLDPVASGWPTCLKAVAAVALLLKDADKLTLGQNVTVIASHSLESIVRQPPDRWMTNARMTHYQSLLLNERVSFAPPAVLNPATLLPVESEATPVHRCSEILAEETGTRRDLEDQPLPGVPTWYTDGSSFITEGKRRAGAPIVDGKRTVWASSLPEGTSAQKAELVALTQALRLAEGKNINIYTDSRYAFATAHIHGAIYKQRGWLTSAGKDIKNKEEILALLEAIHLPRRVAIIHCPGHQRGSNPVATGNRRADEAAKQAALSTRVLAGTTKPAGKRTADGSEFEKRTADGSEFESPKKKAKVE

SEQ ID NO: 6257 - protein, 2213 aa, synthetic construct
MPAAKRVKLDGGDKKYSIGLDIGTNSVGWAVITDEYKVPSKKFKVLGNTDRHSIKKNLIGALLFDSGETAEATRLKRTARRRYTRRKNRICYLQEIFSNEMAKVDDSFFHRLEESFLVEEDKKHERHPIFGNIVDEVAYHEKYPTIYHLRKKLVDSTDKADLRLIYLALAHMIKFRGHFLIEGDLNPDNSDVDKLFIQLVQTYNQLFEENPINASGVDAKAILSARLSKSRRLENLIAQLPGEKKNGLFGNLIALSLGLTPNFKSNFDLAEDAKLQLSKDTYDDDLDNLLAQIGDQYADLFLAAKNLSDAILLSDILRVNTEITKAPLSASMIKRYDEHHQDLTLLKALVRQQLPEKYKEIFFDQSKNGYAGYIDGGASQEEFYKFIKPILEKMDGTEELLVKLNREDLLRKQRTFDNGSIPHQIHLGELHAILRRQEDFYPFLKDNREKIEKILTFRIPYYVGPLARGNSRFAWMTRKSEETITPWNFEEVVDKGASAQSFIERMTNFDKNLPNEKVLPKHSLLYEYFTVYNELTKVKYVTEGMRKPAFLSGEQKKAIVDLLFKTNRKVTVKQLKEDYFKKIECFDSVEISGVEDRFNASLGTYHDLLKIIKDKDFLDNEENEDILEDIVLTLTLFEDREMIEERLKTYAHLFDDKVMKQLKRRRYTGWGRLSRKLINGIRDKQSGKTILDFLKSDGFANRNFMQLIHDDSLTFKEDIQKAQVSGQGDSLHEHIANLAGSPAIKKGILQTVKVVDELVKVMGRHKPENIVIEMARENQTTQKGQKNSRERMKRIEEGIKELGSQILKEHPVENTQLQNEKLYLYYLQNGRDMYVDQELDINRLSDYDVDHIVPQSFLKDDSIDNKVLTRSDKARGKSDNVPSEEVVKKMKNYWRQLLNAKLITQRKFDNLTKAERGGLSELDKAGFIKRQLVETRQITKHVAQILDSRMNTKYDENDKLIREVKVITLKSKLVSDFRKDFQFYKVREINNYHHAHDAYLNAVVGTALIKKYPKLESEFVYGDYKVYDVRKMIAKSEQEIGKATAKYFFYSNIMNFFKTEITLANGEIRKRPLIETNGETGEIVWDKGRDFATVRKVLSMPQVNIVKKTEVQTGGFSKESILPKRNSDKLIARKKDWDPKKYGGFDSPTVAYSVLVVAKVEKGKSKKLKSVKELLGITIMERSSFEKNPIDFLEAKGYKEVKKDLIIKLPKYSLFELENGRKRMLASAGELQKGNELALPSKYVNFLYLASHYEKLKGSPEDNEQKQLFVEQHKHYLDEIIEQISEFSKRVILADANLDKVLSAYNKHRDKPIREQAENIIHLFTLTNLGAPAAFKYFDTTIDRKRYTSTKEVLDATLIHQSITGLYETRIDLSQLGGDGGGGGGGGGGTLGDQGSRGSDPLPEPRVTLTVEGIPTEFLVNTGAEHSVLTKPMGKMGSKRTVVAGATGSKVYPWTTKRLLKIGQKQVTHSFLVIPECPAPLLGRDLLTKLKAQIQFSTEGPQVTWEDRPAMCLVLNLEEEYRLHEKPVPPSIDPSWLQLFPMVWAEKAGMGLANQVPPVVVELKSDASPVAVRQYPMSKEAREGIRPHIQRFLDLGILVPCQSPWNTPLLPVKKPGTNDYRPVQDLREVNKRVQDIHPTVPNPYNLLSSLPPSHTWYSVLDLKDAFFCLKLHPNSQPLFAFEWRDPEKGNTGQLTWTRLPQGFKNSPTLFNEALHRDLASFRALNPQVVMLQYVDDLLVAAPTYRDCKEGTRRLLQELSKLGYRVSAKKAQLCREEVTYLGYLLKGGKRWLTPARKATVMKIPTPTTPRQVREFLGTAGFCRLWIPGFASLAAPLYPLTRPKVPFTWTEAHQEAFGRIKEALLSAPALALPDLTKPFALYVDEKEGVARGVLTQTLGPWRRPVAYLSKKLDPVASGWPTCLKAIAAVALLLKDADKLTLGQNVLVIAPHNLESIVRQPPDRWMTNARMTHYQSLLLNERVSFAPPAILNPATLLPVESDDTPIHICSEILAEETGTRPDLRDQPLPGVPAWYTDGSSFIMDGRRQAGAAIVDNKRTVWASNLPEGTSAQKAELIALTQALRLAEGKSINIYTDSRYAFATAHVHGAIYKQRGWLTSAGKDIKNKEEILALLEAIHLPKRVAIIHCPGHQRGTDPVATGNRKADEAAKQAAQSTRILTETTKNAGKRTADGSEFEKRTADGSEFESPKKKAKVE

SEQ ID NO: 6258 - protein, 2213 aa, synthetic construct
MPAAKRVKLDGGDKKYSIGLDIGTNSVGWAVITDEYKVPSKKFKVLGNTDRHSIKKNLIGALLFDSGETAEATRLKRTARRRYTRRKNRICYLQEIFSNEMAKVDDSFFHRLEESFLVEEDKKHERHPIFGNIVDEVAYHEKYPTIYHLRKKLVDSTDKADLRLIYLALAHMIKFRGHFLIEGDLNPDNSDVDKLFIQLVQTYNQLFEENPINASGVDAKAILSARLSKSRRLENLIAQLPGEKKNGLFGNLIALSLGLTPNFKSNFDLAEDAKLQLSKDTYDDDLDNLLAQIGDQYADLFLAAKNLSDAILLSDILRVNTEITKAPLSASMIKRYDEHHQDLTLLKALVRQQLPEKYKEIFFDQSKNGYAGYIDGGASQEEFYKFIKPILEKMDGTEELLVKLNREDLLRKQRTFDNGSIPHQIHLGELHAILRRQEDFYPFLKDNREKIEKILTFRIPYYVGPLARGNSRFAWMTRKSEETITPWNFEEVVDKGASAQSFIERMTNFDKNLPNEKVLPKHSLLYEYFTVYNELTKVKYVTEGMRKPAFLSGEQKKAIVDLLFKTNRKVTVKQLKEDYFKKIECFDSVEISGVEDRFNASLGTYHDLLKIIKDKDFLDNEENEDILEDIVLTLTLFEDREMIEERLKTYAHLFDDKVMKQLKRRRYTGWGRLSRKLINGIRDKQSGKTILDFLKSDGFANRNFMQLIHDDSLTFKEDIQKAQVSGQGDSLHEHIANLAGSPAIKKGILQTVKVVDELVKVMGRHKPENIVIEMARENQTTQKGQKNSRERMKRIEEGIKELGSQILKEHPVENTQLQNEKLYLYYLQNGRDMYVDQELDINRLSDYDVDHIVPQSFLKDDSIDNKVLTRSDKARGKSDNVPSEEVVKKMKNYWRQLLNAKLITQRKFDNLTKAERGGLSELDKAGFIKRQLVETRQITKHVAQILDSRMNTKYDENDKLIREVKVITLKSKLVSDFRKDFQFYKVREINNYHHAHDAYLNAVVGTALIKKYPKLESEFVYGDYKVYDVRKMIAKSEQEIGKATAKYFFYSNIMNFFKTEITLANGEIRKRPLIETNGETGEIVWDKGRDFATVRKVLSMPQVNIVKKTEVQTGGFSKESILPKRNSDKLIARKKDWDPKKYGGFDSPTVAYSVLVVAKVEKGKSKKLKSVKELLGITIMERSSFEKNPIDFLEAKGYKEVKKDLIIKLPKYSLFELENGRKRMLASAGELQKGNELALPSKYVNFLYLASHYEKLKGSPEDNEQKQLFVEQHKHYLDEIIEQISEFSKRVILADANLDKVLSAYNKHRDKPIREQAENIIHLFTLTNLGAPAAFKYFDTTIDRKRYTSTKEVLDATLIHQSITGLYETRIDLSQLGGDGGGGGGGGGGTLGDQGSRGSDPLPEPRVTLTVEGIPTEFLVNTGAEHSVLTKPMGKMGSKRTVVAGATGSKVYPWTTKRLLKIGQKQVTHSFLVIPECPAPLLGRDLLTKLKAQIQFSTEGPQVTWEDRPAMCLVLNLEEEYRLHEKPVPPSIDPSWLQLFPMVWAEKAGMGLANQVPPVVVELKSDASPVAVRQYPMSKEAREGIRPHIQRFLDLGILVPCQSPWNTPLLPVKKPGTNDYRPVQDLREVNKRVQDIHPTVPNPYNLLSSLPPSHTWYSVLDLKDAFFCLKLHPNSQPLFAFEWRDPEKGNTGQLTWTRLPQGFKNSPTLFNEALHRDLASFRALNPQVVMLQYVDDLLVAAPTYRDCKEGTRRLLQELSKLGYRVSAKKAQLCREEVTYLGYLLKGGKRWLTPARKATVMKIPTPTTPRQVREFLGKAGFCRLFIPGFASLAAPLYPLTRPKVPFTWTEAHQEAFGRIKEALLSAPALALPDLTKPFALYVDEKEGVARGVLTQTLGPWRRPVAYLSKKLDPVASGWPTCLKAIAAVALLLKDADKLTLGQNVLVIAPHNLESIVRQPPDRWMTNARMTHYQSLLLNERVSFAPPAILNPATLLPVESDDTPIHICSEILAEETGTRPDLRDQPLPGVPAWYTDGSSFIMDGRRQAGAAIVDNKRTVWASNLPEGTSAQKAELIALTQALRLAEGKSINIYTDSRYAFATAHVHGAIYKQRGWLTSAGKDIKNKEEILALLEAIHLPKRVAIIHCPGHQRGTDPVATGNRKADEAAKQAAQSTRILTETTKNAGKRTADGSEFEKRTADGSEFESPKKKAKVE

SEQ ID NO: 6259 - protein, 2091 aa, synthetic construct
MPAAKRVKLDGGDKKYSIGLDIGTNSVGWAVITDEYKVPSKKFKVLGNTDRHSIKKNLIGALLFDSGETAEATRLKRTARRRYTRRKNRICYLQEIFSNEMAKVDDSFFHRLEESFLVEEDKKHERHPIFGNIVDEVAYHEKYPTIYHLRKKLVDSTDKADLRLIYLALAHMIKFRGHFLIEGDLNPDNSDVDKLFIQLVQTYNQLFEENPINASGVDAKAILSARLSKSRRLENLIAQLPGEKKNGLFGNLIALSLGLTPNFKSNFDLAEDAKLQLSKDTYDDDLDNLLAQIGDQYADLFLAAKNLSDAILLSDILRVNTEITKAPLSASMIKRYDEHHQDLTLLKALVRQQLPEKYKEIFFDQSKNGYAGYIDGGASQEEFYKFIKPILEKMDGTEELLVKLNREDLLRKQRTFDNGSIPHQIHLGELHAILRRQEDFYPFLKDNREKIEKILTFRIPYYVGPLARGNSRFAWMTRKSEETITPWNFEEVVDKGASAQSFIERMTNFDKNLPNEKVLPKHSLLYEYFTVYNELTKVKYVTEGMRKPAFLSGEQKKAIVDLLFKTNRKVTVKQLKEDYFKKIECFDSVEISGVEDRFNASLGTYHDLLKIIKDKDFLDNEENEDILEDIVLTLTLFEDREMIEERLKTYAHLFDDKVMKQLKRRRYTGWGRLSRKLINGIRDKQSGKTILDFLKSDGFANRNFMQLIHDDSLTFKEDIQKAQVSGQGDSLHEHIANLAGSPAIKKGILQTVKVVDELVKVMGRHKPENIVIEMARENQTTQKGQKNSRERMKRIEEGIKELGSQILKEHPVENTQLQNEKLYLYYLQNGRDMYVDQELDINRLSDYDVDHIVPQSFLKDDSIDNKVLTRSDKARGKSDNVPSEEVVKKMKNYWRQLLNAKLITQRKFDNLTKAERGGLSELDKAGFIKRQLVETRQITKHVAQILDSRMNTKYDENDKLIREVKVITLKSKLVSDFRKDFQFYKVREINNYHHAHDAYLNAVVGTALIKKYPKLESEFVYGDYKVYDVRKMIAKSEQEIGKATAKYFFYSNIMNFFKTEITLANGEIRKRPLIETNGETGEIVWDKGRDFATVRKVLSMPQVNIVKKTEVQTGGFSKESILPKRNSDKLIARKKDWDPKKYGGFDSPTVAYSVLVVAKVEKGKSKKLKSVKELLGITIMERSSFEKNPIDFLEAKGYKEVKKDLIIKLPKYSLFELENGRKRMLASAGELQKGNELALPSKYVNFLYLASHYEKLKGSPEDNEQKQLFVEQHKHYLDEIIEQISEFSKRVILADANLDKVLSAYNKHRDKPIREQAENIIHLFTLTNLGAPAAFKYFDTTIDRKRYTSTKEVLDATLIHQSITGLYETRIDLSQLGGDGGGGGGGGGGTLNLEDEYRLYETSAEPEVSPGSTWLSDFPQAWAETGGMGLAVRQAPLIIPLKATSTPVSIKQYPMSQEAKLGIKPHIQRLLDQGILVPCQSPWNTPLLPVKKPGTNDYRPVQDLREVNKRVEDIHPTVPNPYNLLSGLPPSHRWYTVLDLKDAFFCLRLHPTSQPLFAFEWRDPGMGISGQLTWTRLPQGFKNSPTLFNEALHRDLADFRIQHPDLILLQYVDDILLAATSELDCQQGTRALLLTLGNLGYRASAKKAQLCQKQVKYLGYLLKEGQRWLTEARKETVMGQPTPKTPRQLREFLGTAGFCRLWIPGFAEMAAPLYPLTKPGTLFNWGPDQQKAYQEIKQALLTAPALGLPDLTKPFELFVDEKQGYAKGVLTQKLGPWRRPVAYLSKKLDPVAAGWPPCLRMVAAIAVLRKDAGKLTMGQPLVILAPHAVEALVKQPPDRWLSNARMTHYQAMLLDTDRVQFGPVVALNPATLLPLPEEGAPHDCLEILAETHGTRPDLTDQPIPDADHTWYTDGSSFLQEGQRKAGAAVTTETEVIWARALPAGTSAQRAELIALTQALKMAEGKRLNVYTDSRYAFATAHIHGEIYRRRGWLTSEGREIKNKSEILALLKALFLPKRLSIIHCLGHQKGDSAEARGNRLADQAAREAAIKTPPDTSTLLAGKRTADGSEFEKRTADGSEFESPKKKAKVE

SEQ ID NO: 6260 - protein, 2091 aa, synthetic construct
MPAAKRVKLDGGDKKYSIGLDIGTNSVGWAVITDEYKVPSKKFKVLGNTDRHSIKKNLIGALLFDSGETAEATRLKRTARRRYTRRKNRICYLQEIFSNEMAKVDDSFFHRLEESFLVEEDKKHERHPIFGNIVDEVAYHEKYPTIYHLRKKLVDSTDKADLRLIYLALAHMIKFRGHFLIEGDLNPDNSDVDKLFIQLVQTYNQLFEENPINASGVDAKAILSARLSKSRRLENLIAQLPGEKKNGLFGNLIALSLGLTPNFKSNFDLAEDAKLQLSKDTYDDDLDNLLAQIGDQYADLFLAAKNLSDAILLSDILRVNTEITKAPLSASMIKRYDEHHQDLTLLKALVRQQLPEKYKEIFFDQSKNGYAGYIDGGASQEEFYKFIKPILEKMDGTEELLVKLNREDLLRKQRTFDNGSIPHQIHLGELHAILRRQEDFYPFLKDNREKIEKILTFRIPYYVGPLARGNSRFAWMTRKSEETITPWNFEEVVDKGASAQSFIERMTNFDKNLPNEKVLPKHSLLYEYFTVYNELTKVKYVTEGMRKPAFLSGEQKKAIVDLLFKTNRKVTVKQLKEDYFKKIECFDSVEISGVEDRFNASLGTYHDLLKIIKDKDFLDNEENEDILEDIVLTLTLFEDREMIEERLKTYAHLFDDKVMKQLKRRRYTGWGRLSRKLINGIRDKQSGKTILDFLKSDGFANRNFMQLIHDDSLTFKEDIQKAQVSGQGDSLHEHIANLAGSPAIKKGILQTVKVVDELVKVMGRHKPENIVIEMARENQTTQKGQKNSRERMKRIEEGIKELGSQILKEHPVENTQLQNEKLYLYYLQNGRDMYVDQELDINRLSDYDVDHIVPQSFLKDDSIDNKVLTRSDKARGKSDNVPSEEVVKKMKNYWRQLLNAKLITQRKFDNLTKAERGGLSELDKAGFIKRQLVETRQITKHVAQILDSRMNTKYDENDKLIREVKVITLKSKLVSDFRKDFQFYKVREINNYHHAHDAYLNAVVGTALIKKYPKLESEFVYGDYKVYDVRKMIAKSEQEIGKATAKYFFYSNIMNFFKTEITLANGEIRKRPLIETNGETGEIVWDKGRDFATVRKVLSMPQVNIVKKTEVQTGGFSKESILPKRNSDKLIARKKDWDPKKYGGFDSPTVAYSVLVVAKVEKGKSKKLKSVKELLGITIMERSSFEKNPIDFLEAKGYKEVKKDLIIKLPKYSLFELENGRKRMLASAGELQKGNELALPSKYVNFLYLASHYEKLKGSPEDNEQKQLFVEQHKHYLDEIIEQISEFSKRVILADANLDKVLSAYNKHRDKPIREQAENIIHLFTLTNLGAPAAFKYFDTTIDRKRYTSTKEVLDATLIHQSITGLYETRIDLSQLGGDGGGGGGGGGGTLNIEDEYRLHETSKEPDVSLGSTWLSDFPQAWAETGGMGLAVRQAPLIIPLKATSTPVSIKQYPMSQEARLGIKPHIQRLLDQGILVPCQSPWNTPLLPVKKPGTNDYRPVQDLREVNKRVEDIHPTVPNPYNLLSGLPPSHQWYTVLDLKDAFFCLRLHPTSQPLFAFEWRDPEMGISGQLTWTRLPQGFKNSPTLFNEALHRDLAGFRIQHPDLILLQYVDDLLLAATSELDCQQGTRALLQTLGDLGYRASAKKAQICQKQVKYLGYLLKEGQRWLTEARKETVMGQPIPKTPRQLREFLGTAGFCRLWIPGFAEMAAPLYPLTKPGTLFNWGPDQQKAFQEIKQALLTAPALGLPDLTKPFELFVDEKQGYAKGVLTQKLGPWRRPVAYLSKKLDPVAAGWPPCLRMVAAIAVLTKDAGKLTMGQPLVILAPHAVEALVKQPPDRWLSNARMTHYQALLLDTDRVQFGPVVALNPATLLPLPEEGLQHDCLDILAEAHGTRSDLMDQPLPDADHTWYTDGSSFLQEGQRKAGAAVTTETEVIWARALPAGTSAQRAELIALTQALKMAEGKKLNVYTDSRYAFATAHIHGEIYRRRGWLTSEGKEIKNKDEILALLKALFLPKRLSIIHCPGHQKGNSAEARGNRMADQAAREVATRETPETSTLLAGKRTADGSEFEKRTADGSEFESPKKKAKVE

SEQ ID NO: 6261 - protein, 2082 aa, synthetic construct
MPAAKRVKLDGGDKKYSIGLDIGTNSVGWAVITDEYKVPSKKFKVLGNTDRHSIKKNLIGALLFDSGETAEATRLKRTARRRYTRRKNRICYLQEIFSNEMAKVDDSFFHRLEESFLVEEDKKHERHPIFGNIVDEVAYHEKYPTIYHLRKKLVDSTDKADLRLIYLALAHMIKFRGHFLIEGDLNPDNSDVDKLFIQLVQTYNQLFEENPINASGVDAKAILSARLSKSRRLENLIAQLPGEKKNGLFGNLIALSLGLTPNFKSNFDLAEDAKLQLSKDTYDDDLDNLLAQIGDQYADLFLAAKNLSDAILLSDILRVNTEITKAPLSASMIKRYDEHHQDLTLLKALVRQQLPEKYKEIFFDQSKNGYAGYIDGGASQEEFYKFIKPILEKMDGTEELLVKLNREDLLRKQRTFDNGSIPHQIHLGELHAILRRQEDFYPFLKDNREKIEKILTFRIPYYVGPLARGNSRFAWMTRKSEETITPWNFEEVVDKGASAQSFIERMTNFDKNLPNEKVLPKHSLLYEYFTVYNELTKVKYVTEGMRKPAFLSGEQKKAIVDLLFKTNRKVTVKQLKEDYFKKIECFDSVEISGVEDRFNASLGTYHDLLKIIKDKDFLDNEENEDILEDIVLTLTLFEDREMIEERLKTYAHLFDDKVMKQLKRRRYTGWGRLSRKLINGIRDKQSGKTILDFLKSDGFANRNFMQLIHDDSLTFKEDIQKAQVSGQGDSLHEHIANLAGSPAIKKGILQTVKVVDELVKVMGRHKPENIVIEMARENQTTQKGQKNSRERMKRIEEGIKELGSQILKEHPVENTQLQNEKLYLYYLQNGRDMYVDQELDINRLSDYDVDHIVPQSFLKDDSIDNKVLTRSDKARGKSDNVPSEEVVKKMKNYWRQLLNAKLITQRKFDNLTKAERGGLSELDKAGFIKRQLVETRQITKHVAQILDSRMNTKYDENDKLIREVKVITLKSKLVSDFRKDFQFYKVREINNYHHAHDAYLNAVVGTALIKKYPKLESEFVYGDYKVYDVRKMIAKSEQEIGKATAKYFFYSNIMNFFKTEITLANGEIRKRPLIETNGETGEIVWDKGRDFATVRKVLSMPQVNIVKKTEVQTGGFSKESILPKRNSDKLIARKKDWDPKKYGGFDSPTVAYSVLVVAKVEKGKSKKLKSVKELLGITIMERSSFEKNPIDFLEAKGYKEVKKDLIIKLPKYSLFELENGRKRMLASAGELQKGNELALPSKYVNFLYLASHYEKLKGSPEDNEQKQLFVEQHKHYLDEIIEQISEFSKRVILADANLDKVLSAYNKHRDKPIREQAENIIHLFTLTNLGAPAAFKYFDTTIDRKRYTSTKEVLDATLIHQSITGLYETRIDLSQLGGDGGGGGGGGGGIPWLMKKPLQLTTLVPLQEYEERLLKQTMLTGSYKEKLQSLFLKYDALWQHWENQVGHRRIKPHHIATGTVNPRPQKQYPINPKAKASIQTVINDLLKQGVLIQQNSIMNTPVYPVPKPDGKWRMVLDYREVNKTIPLIAAQNQHSAGILSSIFRGKYKTTLDLSNGFWAHSITPESYWLTAFTWLGQQYCWTRLPQGFLNSPALFNADVVDLLKEVPNVQVYVDDIYISHDDPREHLEQLEKVFSLLLNAGYVVSLKKSEIAQHEVEFLGFNITKEGRGLTETFKQKLLNITPPRDLKQLQSILGLLNFARNFIPNFSELVKPLYNIIATAPGKYITWTTDNSQQLQNIISMLNSAENLEERNPEVRLIMKVNTSPSAGYIRFYNEFAKRPIMYLNYVYTKAEVKFTNTEKLLTTIHKGLIKALDLGMGQEILVYSPIVSMTKIQKTPLPERKALPIRWITWMSYLEDPRIQFHYDKTLPELQQVPTVTDDIIAKIKHPSEFSMVFYTDGSAIKHPNVNKSHNAGMGIAQVQFKPEFTVINTWSIPLGDHTAQLAEVAAVEFACKKALKIDGPVLIVTDSFYVAESVNKELPYWQSNGFFNNKKKPLKHVSKWKSIADCIQLKPDIIIIHEKGHQPTASTFHTEGNNLADKLATQGSYVVNAGKRTADGSEFEKRTADGSEFESPKKKAKVE

SEQ ID NO: 6262 - protein, 2091 aa, synthetic construct
MPAAKRVKLDGGDKKYSIGLDIGTNSVGWAVITDEYKVPSKKFKVLGNTDRHSIKKNLIGALLFDSGETAEATRLKRTARRRYTRRKNRICYLQEIFSNEMAKVDDSFFHRLEESFLVEEDKKHERHPIFGNIVDEVAYHEKYPTIYHLRKKLVDSTDKADLRLIYLALAHMIKFRGHFLIEGDLNPDNSDVDKLFIQLVQTYNQLFEENPINASGVDAKAILSARLSKSRRLENLIAQLPGEKKNGLFGNLIALSLGLTPNFKSNFDLAEDAKLQLSKDTYDDDLDNLLAQIGDQYADLFLAAKNLSDAILLSDILRVNTEITKAPLSASMIKRYDEHHQDLTLLKALVRQQLPEKYKEIFFDQSKNGYAGYIDGGASQEEFYKFIKPILEKMDGTEELLVKLNREDLLRKQRTFDNGSIPHQIHLGELHAILRRQEDFYPFLKDNREKIEKILTFRIPYYVGPLARGNSRFAWMTRKSEETITPWNFEEVVDKGASAQSFIERMTNFDKNLPNEKVLPKHSLLYEYFTVYNELTKVKYVTEGMRKPAFLSGEQKKAIVDLLFKTNRKVTVKQLKEDYFKKIECFDSVEISGVEDRFNASLGTYHDLLKIIKDKDFLDNEENEDILEDIVLTLTLFEDREMIEERLKTYAHLFDDKVMKQLKRRRYTGWGRLSRKLINGIRDKQSGKTILDFLKSDGFANRNFMQLIHDDSLTFKEDIQKAQVSGQGDSLHEHIANLAGSPAIKKGILQTVKVVDELVKVMGRHKPENIVIEMARENQTTQKGQKNSRERMKRIEEGIKELGSQILKEHPVENTQLQNEKLYLYYLQNGRDMYVDQELDINRLSDYDVDHIVPQSFLKDDSIDNKVLTRSDKARGKSDNVPSEEVVKKMKNYWRQLLNAKLITQRKFDNLTKAERGGLSELDKAGFIKRQLVETRQITKHVAQILDSRMNTKYDENDKLIREVKVITLKSKLVSDFRKDFQFYKVREINNYHHAHDAYLNAVVGTALIKKYPKLESEFVYGDYKVYDVRKMIAKSEQEIGKATAKYFFYSNIMNFFKTEITLANGEIRKRPLIETNGETGEIVWDKGRDFATVRKVLSMPQVNIVKKTEVQTGGFSKESILPKRNSDKLIARKKDWDPKKYGGFDSPTVAYSVLVVAKVEKGKSKKLKSVKELLGITIMERSSFEKNPIDFLEAKGYKEVKKDLIIKLPKYSLFELENGRKRMLASAGELQKGNELALPSKYVNFLYLASHYEKLKGSPEDNEQKQLFVEQHKHYLDEIIEQISEFSKRVILADANLDKVLSAYNKHRDKPIREQAENIIHLFTLTNLGAPAAFKYFDTTIDRKRYTSTKEVLDATLIHQSITGLYETRIDLSQLGGDGGGGGGGGGGTLNIEDEYRLHETSKEPDVPLGSTWLSDFPQAWAETGGMGLAVRQAPLIIPLKATSTPVSIKQYPMSQEARLGIKPHIQRLLDQGILVPCQSPWNTPLLPVKKPGTNDYRPVQDLREVNKRVEDIHPTVPNPYNLLSGLPPSHQWYTVLDLKDAFFCLRLHPTSQPLFAFEWRDPEMGISGQLTWTRLPQGFKNSPTLFNEALHRDLADFRIQHPDLILLQYVDDLLLAATSEQDCQRGTRALLQTLGNLGYRASAKKAQICQKQVKYLGYLLKEGQRWLTEARKETVMGQPTPKTPRQLREFLGTAGFCRLWIPGFAEMAAPLYPLTKPGTLFNWGPDQQKAYQEIKQALLTAPALGLPDLTKPFELFVDEKQGYAKGVLTQKLGPWRRPVAYLSKKLDPVAAGWPPCLRMVAAIAVLTKDAGKLTMGQPLVILAPHAVEALVKQPPDRWLSNARMTHYQAMLLDTDRVQFGPVVALNPATLLPLPEKEAPHDCLEILAETHGTRPDLTDQPIPDADYTWYTDGSSFLQEGQRRAGAAVTTETEVIWARALPAGTSAQRAELIALTQALKMAEGKKLNVYTDSRYAFATAHVHGEIYRRRGWLTSEGREIKNKNEILALLKALFLPKRLSIIHCPGHQKGNSAEARGNRMADQAAREAAMKAVLETSTLLAGKRTADGSEFEKRTADGSEFESPKKKAKVE

SEQ ID NO: 6263 - protein, 2091 aa, synthetic construct
MPAAKRVKLDGGDKKYSIGLDIGTNSVGWAVITDEYKVPSKKFKVLGNTDRHSIKKNLIGALLFDSGETAEATRLKRTARRRYTRRKNRICYLQEIFSNEMAKVDDSFFHRLEESFLVEEDKKHERHPIFGNIVDEVAYHEKYPTIYHLRKKLVDSTDKADLRLIYLALAHMIKFRGHFLIEGDLNPDNSDVDKLFIQLVQTYNQLFEENPINASGVDAKAILSARLSKSRRLENLIAQLPGEKKNGLFGNLIALSLGLTPNFKSNFDLAEDAKLQLSKDTYDDDLDNLLAQIGDQYADLFLAAKNLSDAILLSDILRVNTEITKAPLSASMIKRYDEHHQDLTLLKALVRQQLPEKYKEIFFDQSKNGYAGYIDGGASQEEFYKFIKPILEKMDGTEELLVKLNREDLLRKQRTFDNGSIPHQIHLGELHAILRRQEDFYPFLKDNREKIEKILTFRIPYYVGPLARGNSRFAWMTRKSEETITPWNFEEVVDKGASAQSFIERMTNFDKNLPNEKVLPKHSLLYEYFTVYNELTKVKYVTEGMRKPAFLSGEQKKAIVDLLFKTNRKVTVKQLKEDYFKKIECFDSVEISGVEDRFNASLGTYHDLLKIIKDKDFLDNEENEDILEDIVLTLTLFEDREMIEERLKTYAHLFDDKVMKQLKRRRYTGWGRLSRKLINGIRDKQSGKTILDFLKSDGFANRNFMQLIHDDSLTFKEDIQKAQVSGQGDSLHEHIANLAGSPAIKKGILQTVKVVDELVKVMGRHKPENIVIEMARENQTTQKGQKNSRERMKRIEEGIKELGSQILKEHPVENTQLQNEKLYLYYLQNGRDMYVDQELDINRLSDYDVDHIVPQSFLKDDSIDNKVLTRSDKARGKSDNVPSEEVVKKMKNYWRQLLNAKLITQRKFDNLTKAERGGLSELDKAGFIKRQLVETRQITKHVAQILDSRMNTKYDENDKLIREVKVITLKSKLVSDFRKDFQFYKVREINNYHHAHDAYLNAVVGTALIKKYPKLESEFVYGDYKVYDVRKMIAKSEQEIGKATAKYFFYSNIMNFFKTEITLANGEIRKRPLIETNGETGEIVWDKGRDFATVRKVLSMPQVNIVKKTEVQTGGFSKESILPKRNSDKLIARKKDWDPKKYGGFDSPTVAYSVLVVAKVEKGKSKKLKSVKELLGITIMERSSFEKNPIDFLEAKGYKEVKKDLIIKLPKYSLFELENGRKRMLASAGELQKGNELALPSKYVNFLYLASHYEKLKGSPEDNEQKQLFVEQHKHYLDEIIEQISEFSKRVILADANLDKVLSAYNKHRDKPIREQAENIIHLFTLTNLGAPAAFKYFDTTIDRKRYTSTKEVLDATLIHQSITGLYETRIDLSQLGGDGGGGGGGGGGTLNIEDEYRLHETSKEPDVPLGSTWLSDFPQAWAETGGMGLAVRQAPLIIPLKATSTPVSIKQYPMSQEARLGIKPHIQRLLDQGILVPCQSPWNTPLLPVKKPGTNDYRPVQDLREVNKRVEDIHPTVPNPYNLLSGLPPSHQWYTVLDLKDAFFCLRLHPTSQPLFAFEWRDPEMGISGQLTWTRLPQGFKNSPTLFNEALHRDLADFRIQHPDLILLQYVDDLLLAATSEQDCQRGTRALLQTLGNLGYRASAKKAQICQKQVKYLGYLLKEGQRWLTEARKETVMGQPTPKTPRQLREFLGKAGFCRLFIPGFAEMAAPLYPLTKPGTLFNWGPDQQKAYQEIKQALLTAPALGLPDLTKPFELFVDEKQGYAKGVLTQKLGPWRRPVAYLSKKLDPVAAGWPPCLRMVAAIAVLTKDAGKLTMGQPLVILAPHAVEALVKQPPDRWLSNARMTHYQAMLLDTDRVQFGPVVALNPATLLPLPEKEAPHDCLEILAETHGTRPDLTDQPIPDADYTWYTDGSSFLQEGQRRAGAAVTTETEVIWARALPAGTSAQRAELIALTQALKMAEGKKLNVYTDSRYAFATAHVHGEIYRRRGWLTSEGREIKNKNEILALLKALFLPKRLSIIHCPGHQKGNSAEARGNRMADQAAREAAMKAVLETSTLLAGKRTADGSEFEKRTADGSEFESPKKKAKVE

SEQ ID NO: 6264 - protein, 2094 aa, synthetic construct
MPAAKRVKLDGGDKKYSIGLDIGTNSVGWAVITDEYKVPSKKFKVLGNTDRHSIKKNLIGALLFDSGETAEATRLKRTARRRYTRRKNRICYLQEIFSNEMAKVDDSFFHRLEESFLVEEDKKHERHPIFGNIVDEVAYHEKYPTIYHLRKKLVDSTDKADLRLIYLALAHMIKFRGHFLIEGDLNPDNSDVDKLFIQLVQTYNQLFEENPINASGVDAKAILSARLSKSRRLENLIAQLPGEKKNGLFGNLIALSLGLTPNFKSNFDLAEDAKLQLSKDTYDDDLDNLLAQIGDQYADLFLAAKNLSDAILLSDILRVNTEITKAPLSASMIKRYDEHHQDLTLLKALVRQQLPEKYKEIFFDQSKNGYAGYIDGGASQEEFYKFIKPILEKMDGTEELLVKLNREDLLRKQRTFDNGSIPHQIHLGELHAILRRQEDFYPFLKDNREKIEKILTFRIPYYVGPLARGNSRFAWMTRKSEETITPWNFEEVVDKGASAQSFIERMTNFDKNLPNEKVLPKHSLLYEYFTVYNELTKVKYVTEGMRKPAFLSGEQKKAIVDLLFKTNRKVTVKQLKEDYFKKIECFDSVEISGVEDRFNASLGTYHDLLKIIKDKDFLDNEENEDILEDIVLTLTLFEDREMIEERLKTYAHLFDDKVMKQLKRRRYTGWGRLSRKLINGIRDKQSGKTILDFLKSDGFANRNFMQLIHDDSLTFKEDIQKAQVSGQGDSLHEHIANLAGSPAIKKGILQTVKVVDELVKVMGRHKPENIVIEMARENQTTQKGQKNSRERMKRIEEGIKELGSQILKEHPVENTQLQNEKLYLYYLQNGRDMYVDQELDINRLSDYDVDHIVPQSFLKDDSIDNKVLTRSDKARGKSDNVPSEEVVKKMKNYWRQLLNAKLITQRKFDNLTKAERGGLSELDKAGFIKRQLVETRQITKHVAQILDSRMNTKYDENDKLIREVKVITLKSKLVSDFRKDFQFYKVREINNYHHAHDAYLNAVVGTALIKKYPKLESEFVYGDYKVYDVRKMIAKSEQEIGKATAKYFFYSNIMNFFKTEITLANGEIRKRPLIETNGETGEIVWDKGRDFATVRKVLSMPQVNIVKKTEVQTGGFSKESILPKRNSDKLIARKKDWDPKKYGGFDSPTVAYSVLVVAKVEKGKSKKLKSVKELLGITIMERSSFEKNPIDFLEAKGYKEVKKDLIIKLPKYSLFELENGRKRMLASAGELQKGNELALPSKYVNFLYLASHYEKLKGSPEDNEQKQLFVEQHKHYLDEIIEQISEFSKRVILADANLDKVLSAYNKHRDKPIREQAENIIHLFTLTNLGAPAAFKYFDTTIDRKRYTSTKEVLDATLIHQSITGLYETRIDLSQLGGDGGGGGGGGGGGTAPLEEEYRLFLEAPIQNVTLLEQWKREIPKVWAEINPPGLASTQAPIHVQLLSTALPVRVRQYPITLEAKRSLRETIRKFRAAGILRPVHSPWNTPLLPVRKSGTSEYRMVQDLREVNKRVETIHPTVPNPYTLLSLLPPDRIWYSVLDLKDAFFCIPLAPESQLIFAFEWADAEEGESGQLTWTRLPQGFKNSPTLFNEALNRDLQGFRLDHPSVSLLQYVDDLLIAADTQAACLSATRDLLMTLAELGYRVSGKKAQLCQEEVTYLGFKIHKGSRSLSNSRTQAILQIPVPKTKRQVREFLGTIGYCRLWIPGFAELAQPLYAATRPGNDPLVWGEKEEEAFQSLKLALTQPPALALPSLDKPFQLFVEETSGAAKGVLTQALGPWKRPVAYLSKRLDPVAAGWPRCLRAIAAAALLTREASKLTFGQDIEITSSHNLESLLRSPPDKWLTNARITQYQVLLLDPPRVRFKQTAALNPATLLPETDDTLPIHHCLDTLDSLTSTRPDLTDQPLAQAEATLFTDGSSYIRDGKRYAGAAVVTLDSVIWAEPLPIGTSAQKAELIALTKALEWSKDKSVNIYTDSRYAFATLHVHGMIYRERGWLTAGGKAIKNAPEILALLTAVWLPKRVAVMHCKGHQKDDAPTSTGNRRADEVAREVAIRPLSTQATISAGKRTADGSEFEKRTADGSEFESPKKKAKVE

SEQ ID NO: 6265 - protein, 2094 aa, synthetic construct
MPAAKRVKLDGGDKKYSIGLDIGTNSVGWAVITDEYKVPSKKFKVLGNTDRHSIKKNLIGALLFDSGETAEATRLKRTARRRYTRRKNRICYLQEIFSNEMAKVDDSFFHRLEESFLVEEDKKHERHPIFGNIVDEVAYHEKYPTIYHLRKKLVDSTDKADLRLIYLALAHMIKFRGHFLIEGDLNPDNSDVDKLFIQLVQTYNQLFEENPINASGVDAKAILSARLSKSRRLENLIAQLPGEKKNGLFGNLIALSLGLTPNFKSNFDLAEDAKLQLSKDTYDDDLDNLLAQIGDQYADLFLAAKNLSDAILLSDILRVNTEITKAPLSASMIKRYDEHHQDLTLLKALVRQQLPEKYKEIFFDQSKNGYAGYIDGGASQEEFYKFIKPILEKMDGTEELLVKLNREDLLRKQRTFDNGSIPHQIHLGELHAILRRQEDFYPFLKDNREKIEKILTFRIPYYVGPLARGNSRFAWMTRKSEETITPWNFEEVVDKGASAQSFIERMTNFDKNLPNEKVLPKHSLLYEYFTVYNELTKVKYVTEGMRKPAFLSGEQKKAIVDLLFKTNRKVTVKQLKEDYFKKIECFDSVEISGVEDRFNASLGTYHDLLKIIKDKDFLDNEENEDILEDIVLTLTLFEDREMIEERLKTYAHLFDDKVMKQLKRRRYTGWGRLSRKLINGIRDKQSGKTILDFLKSDGFANRNFMQLIHDDSLTFKEDIQKAQVSGQGDSLHEHIANLAGSPAIKKGILQTVKVVDELVKVMGRHKPENIVIEMARENQTTQKGQKNSRERMKRIEEGIKELGSQILKEHPVENTQLQNEKLYLYYLQNGRDMYVDQELDINRLSDYDVDHIVPQSFLKDDSIDNKVLTRSDKARGKSDNVPSEEVVKKMKNYWRQLLNAKLITQRKFDNLTKAERGGLSELDKAGFIKRQLVETRQITKHVAQILDSRMNTKYDENDKLIREVKVITLKSKLVSDFRKDFQFYKVREINNYHHAHDAYLNAVVGTALIKKYPKLESEFVYGDYKVYDVRKMIAKSEQEIGKATAKYFFYSNIMNFFKTEITLANGEIRKRPLIETNGETGEIVWDKGRDFATVRKVLSMPQVNIVKKTEVQTGGFSKESILPKRNSDKLIARKKDWDPKKYGGFDSPTVAYSVLVVAKVEKGKSKKLKSVKELLGITIMERSSFEKNPIDFLEAKGYKEVKKDLIIKLPKYSLFELENGRKRMLASAGELQKGNELALPSKYVNFLYLASHYEKLKGSPEDNEQKQLFVEQHKHYLDEIIEQISEFSKRVILADANLDKVLSAYNKHRDKPIREQAENIIHLFTLTNLGAPAAFKYFDTTIDRKRYTSTKEVLDATLIHQSITGLYETRIDLSQLGGDGGGGGGGGGGGTAPLEEEYRLFLEAPIQNVTLLEQWKREIPKVWAEINPPGLASTQAPIHVQLLSTALPVRVRQYPITLEAKRSLRETIRKFRAAGILRPVHSPWNTPLLPVRKSGTSEYRMVQDLREVNKRVETIHPTVPNPYTLLSLLPPDRIWYSVLDLKDAFFCIPLAPESQLIFAFEWADAEEGESGQLTWTRLPQGFKNSPTLFNEALNRDLQGFRLDHPSVSLLQYVDDLLIAADTQAACLSATRDLLMTLAELGYRVSGKKAQLCQEEVTYLGFKIHKGSRSLSNSRTQAILQIPVPKTKRQVREFLGKIGYCRLFIPGFAELAQPLYAATRPGNDPLVWGEKEEEAFQSLKLALTQPPALALPSLDKPFQLFVEETSGAAKGVLTQALGPWKRPVAYLSKRLDPVAAGWPRCLRAIAAAALLTREASKLTFGQDIEITSSHNLESLLRSPPDKWLTNARITQYQVLLLDPPRVRFKQTAALNPATLLPETDDTLPIHHCLDTLDSLTSTRPDLTDQPLAQAEATLFTDGSSYIRDGKRYAGAAVVTLDSVIWAEPLPIGTSAQKAELIALTKALEWSKDKSVNIYTDSRYAFATLHVHGMIYRERGWLTAGGKAIKNAPEILALLTAVWLPKRVAVMHCKGHQKDDAPTSTGNRRADEVAREVAIRPLSTQATISAGKRTADGSEFEKRTADGSEFESPKKKAKVE

SEQ ID NO: 6266 - protein, 2098 aa, synthetic construct
MPAAKRVKLDGGDKKYSIGLDIGTNSVGWAVITDEYKVPSKKFKVLGNTDRHSIKKNLIGALLFDSGETAEATRLKRTARRRYTRRKNRICYLQEIFSNEMAKVDDSFFHRLEESFLVEEDKKHERHPIFGNIVDEVAYHEKYPTIYHLRKKLVDSTDKADLRLIYLALAHMIKFRGHFLIEGDLNPDNSDVDKLFIQLVQTYNQLFEENPINASGVDAKAILSARLSKSRRLENLIAQLPGEKKNGLFGNLIALSLGLTPNFKSNFDLAEDAKLQLSKDTYDDDLDNLLAQIGDQYADLFLAAKNLSDAILLSDILRVNTEITKAPLSASMIKRYDEHHQDLTLLKALVRQQLPEKYKEIFFDQSKNGYAGYIDGGASQEEFYKFIKPILEKMDGTEELLVKLNREDLLRKQRTFDNGSIPHQIHLGELHAILRRQEDFYPFLKDNREKIEKILTFRIPYYVGPLARGNSRFAWMTRKSEETITPWNFEEVVDKGASAQSFIERMTNFDKNLPNEKVLPKHSLLYEYFTVYNELTKVKYVTEGMRKPAFLSGEQKKAIVDLLFKTNRKVTVKQLKEDYFKKIECFDSVEISGVEDRFNASLGTYHDLLKIIKDKDFLDNEENEDILEDIVLTLTLFEDREMIEERLKTYAHLFDDKVMKQLKRRRYTGWGRLSRKLINGIRDKQSGKTILDFLKSDGFANRNFMQLIHDDSLTFKEDIQKAQVSGQGDSLHEHIANLAGSPAIKKGILQTVKVVDELVKVMGRHKPENIVIEMARENQTTQKGQKNSRERMKRIEEGIKELGSQILKEHPVENTQLQNEKLYLYYLQNGRDMYVDQELDINRLSDYDVDHIVPQSFLKDDSIDNKVLTRSDKARGKSDNVPSEEVVKKMKNYWRQLLNAKLITQRKFDNLTKAERGGLSELDKAGFIKRQLVETRQITKHVAQILDSRMNTKYDENDKLIREVKVITLKSKLVSDFRKDFQFYKVREINNYHHAHDAYLNAVVGTALIKKYPKLESEFVYGDYKVYDVRKMIAKSEQEIGKATAKYFFYSNIMNFFKTEITLANGEIRKRPLIETNGETGEIVWDKGRDFATVRKVLSMPQVNIVKKTEVQTGGFSKESILPKRNSDKLIARKKDWDPKKYGGFDSPTVAYSVLVVAKVEKGKSKKLKSVKELLGITIMERSSFEKNPIDFLEAKGYKEVKKDLIIKLPKYSLFELENGRKRMLASAGELQKGNELALPSKYVNFLYLASHYEKLKGSPEDNEQKQLFVEQHKHYLDEIIEQISEFSKRVILADANLDKVLSAYNKHRDKPIREQAENIIHLFTLTNLGAPAAFKYFDTTIDRKRYTSTKEVLDATLIHQSITGLYETRIDLSQLGGDGGGGGGGGGGGTVSLQDEHRLFDIPVTTSLPDVWLQDFPQAWAETGGLGRAKCQAPIIIDLKPTAVPVSIKQYPMSLEAHMGIRQHIIKFLELGVLRPCRSPWNTPLLPVKKPGTQDYRPVQDLREINKRTVDIHPTVPNPYNLLSTLKPDYSWYTVLDLKDAFFCLPLAPQSQELFAFEWKDPERGISGQLTWTRLPQGFKNSPTLFNEALHRDLTDFRTQHPEVTLLQYVDDLLLAAPTKKACTQGTRHLLQELGEKGYRASAKKAQICQTKVTYLGYILSEGKRWLTPGRIETVARIPPPRNPREVREFLGKAGFCRLFIPGFAELAAPLYALTKPSTPFTWQTEHQLAFEALKKALLSAPALGLPDTSKPFTLFLDERQGIAKGVLTQKLGPWKRPVAYLSKKLDPVAAGWPPCLRIMAATAMLVKDSAKLTLGQPLTVITPHTLEAIVRQPPDRWITNARLTHYQALLLDTDRVQFGPPVTLNPATLLPVPENQPSPHDCRQVLAETHGTREDLKDQELPDADHTWYTDGSSYLDSGTRRAGAAVVDGHNTIWAQSLPPGTSAQKAELIALTKALELSKGKKANIYTDSRYAFATAHTHGSIYERRGWLTSEGKEIKNKAEIIALLKALFLPQEVAIIHCPGHQKGQDPVAVGNRQADRVARQAAMAEVLTLATEPDNTSHITAGKRTADGSEFEKRTADGSEFESPKKKAKVE

SEQ ID NO: 6267 - protein, 2091 aa, synthetic construct
MPAAKRVKLDGGDKKYSIGLDIGTNSVGWAVITDEYKVPSKKFKVLGNTDRHSIKKNLIGALLFDSGETAEATRLKRTARRRYTRRKNRICYLQEIFSNEMAKVDDSFFHRLEESFLVEEDKKHERHPIFGNIVDEVAYHEKYPTIYHLRKKLVDSTDKADLRLIYLALAHMIKFRGHFLIEGDLNPDNSDVDKLFIQLVQTYNQLFEENPINASGVDAKAILSARLSKSRRLENLIAQLPGEKKNGLFGNLIALSLGLTPNFKSNFDLAEDAKLQLSKDTYDDDLDNLLAQIGDQYADLFLAAKNLSDAILLSDILRVNTEITKAPLSASMIKRYDEHHQDLTLLKALVRQQLPEKYKEIFFDQSKNGYAGYIDGGASQEEFYKFIKPILEKMDGTEELLVKLNREDLLRKQRTFDNGSIPHQIHLGELHAILRRQEDFYPFLKDNREKIEKILTFRIPYYVGPLARGNSRFAWMTRKSEETITPWNFEEVVDKGASAQSFIERMTNFDKNLPNEKVLPKHSLLYEYFTVYNELTKVKYVTEGMRKPAFLSGEQKKAIVDLLFKTNRKVTVKQLKEDYFKKIECFDSVEISGVEDRFNASLGTYHDLLKIIKDKDFLDNEENEDILEDIVLTLTLFEDREMIEERLKTYAHLFDDKVMKQLKRRRYTGWGRLSRKLINGIRDKQSGKTILDFLKSDGFANRNFMQLIHDDSLTFKEDIQKAQVSGQGDSLHEHIANLAGSPAIKKGILQTVKVVDELVKVMGRHKPENIVIEMARENQTTQKGQKNSRERMKRIEEGIKELGSQILKEHPVENTQLQNEKLYLYYLQNGRDMYVDQELDINRLSDYDVDHIVPQSFLKDDSIDNKVLTRSDKARGKSDNVPSEEVVKKMKNYWRQLLNAKLITQRKFDNLTKAERGGLSELDKAGFIKRQLVETRQITKHVAQILDSRMNTKYDENDKLIREVKVITLKSKLVSDFRKDFQFYKVREINNYHHAHDAYLNAVVGTALIKKYPKLESEFVYGDYKVYDVRKMIAKSEQEIGKATAKYFFYSNIMNFFKTEITLANGEIRKRPLIETNGETGEIVWDKGRDFATVRKVLSMPQVNIVKKTEVQTGGFSKESILPKRNSDKLIARKKDWDPKKYGGFDSPTVAYSVLVVAKVEKGKSKKLKSVKELLGITIMERSSFEKNPIDFLEAKGYKEVKKDLIIKLPKYSLFELENGRKRMLASAGELQKGNELALPSKYVNFLYLASHYEKLKGSPEDNEQKQLFVEQHKHYLDEIIEQISEFSKRVILADANLDKVLSAYNKHRDKPIREQAENIIHLFTLTNLGAPAAFKYFDTTIDRKRYTSTKEVLDATLIHQSITGLYETRIDLSQLGGDGGGGGGGGGGGTLQLEEEYRLFEPESTQKQEMDIWLKNFPQAWAETGGMGTAHCQAPVLIQLKATATPISIRQYPMPHEAYQGIKPHIRRMLDQGILKPCQSPWNTPLLPVKKPGTEDYRPVQDLREVNKRVEDIHPTVPNPYNLLSTLPPSHPWYTVLDLKDAFFCLRLHSESQLLFAFEWRDPEIGLSGQLTWTRLPQGFKNSPTLFNEALHSDLADFRVRYPALVLLQYVDDLLLAAATRTECLEGTKALLETLGNKGYRASAKKAQICLQEVTYLGYSLKDGQRWLTKARKEAILSIPVPKNSRQVREFLGKAGYCRLFIPGFAELAAPLYPLTRPGTLFQWGTEQQLAFEDIKKALLSSPALGLPDITKPFELFIDENSGFAKGVLVQKLGPWKRPVAYLSKKLDTVASGWPPCLRMVAAIAILVKDAGKLTLGQPLTILTSHPVEALVRQPPNKWLSNARMTHYQAMLLDAERVHFGPTVSLNPATLLPLPSGGNHHDCLQILAETHGTRPDLTDQPLPDADLTWYTDGSSFIRNGEREAGAAVTTESEVIWAAPLPPGTSAQRAELIALTQALKMAEGKKLTVYTDSRYAFATTHVHGEIYRRRGWLTSEGKEIKNKNEILALLEALFLPKRLSIIHCPGHQKGDSPQAKGNRLADDTAKKAATETHSSLTVLPAGKRTADGSEFEKRTADGSEFESPKKKAKVE

SEQ ID NO: 6268 - protein, 2123 aa, synthetic construct
MPAAKRVKLDGGDKKYSIGLDIGTNSVGWAVITDEYKVPSKKFKVLGNTDRHSIKKNLIGALLFDSGETAEATRLKRTARRRYTRRKNRICYLQEIFSNEMAKVDDSFFHRLEESFLVEEDKKHERHPIFGNIVDEVAYHEKYPTIYHLRKKLVDSTDKADLRLIYLALAHMIKFRGHFLIEGDLNPDNSDVDKLFIQLVQTYNQLFEENPINASGVDAKAILSARLSKSRRLENLIAQLPGEKKNGLFGNLIALSLGLTPNFKSNFDLAEDAKLQLSKDTYDDDLDNLLAQIGDQYADLFLAAKNLSDAILLSDILRVNTEITKAPLSASMIKRYDEHHQDLTLLKALVRQQLPEKYKEIFFDQSKNGYAGYIDGGASQEEFYKFIKPILEKMDGTEELLVKLNREDLLRKQRTFDNGSIPHQIHLGELHAILRRQEDFYPFLKDNREKIEKILTFRIPYYVGPLARGNSRFAWMTRKSEETITPWNFEEVVDKGASAQSFIERMTNFDKNLPNEKVLPKHSLLYEYFTVYNELTKVKYVTEGMRKPAFLSGEQKKAIVDLLFKTNRKVTVKQLKEDYFKKIECFDSVEISGVEDRFNASLGTYHDLLKIIKDKDFLDNEENEDILEDIVLTLTLFEDREMIEERLKTYAHLFDDKVMKQLKRRRYTGWGRLSRKLINGIRDKQSGKTILDFLKSDGFANRNFMQLIHDDSLTFKEDIQKAQVSGQGDSLHEHIANLAGSPAIKKGILQTVKVVDELVKVMGRHKPENIVIEMARENQTTQKGQKNSRERMKRIEEGIKELGSQILKEHPVENTQLQNEKLYLYYLQNGRDMYVDQELDINRLSDYDVDHIVPQSFLKDDSIDNKVLTRSDKARGKSDNVPSEEVVKKMKNYWRQLLNAKLITQRKFDNLTKAERGGLSELDKAGFIKRQLVETRQITKHVAQILDSRMNTKYDENDKLIREVKVITLKSKLVSDFRKDFQFYKVREINNYHHAHDAYLNAVVGTALIKKYPKLESEFVYGDYKVYDVRKMIAKSEQEIGKATAKYFFYSNIMNFFKTEITLANGEIRKRPLIETNGETGEIVWDKGRDFATVRKVLSMPQVNIVKKTEVQTGGFSKESILPKRNSDKLIARKKDWDPKKYGGFDSPTVAYSVLVVAKVEKGKSKKLKSVKELLGITIMERSSFEKNPIDFLEAKGYKEVKKDLIIKLPKYSLFELENGRKRMLASAGELQKGNELALPSKYVNFLYLASHYEKLKGSPEDNEQKQLFVEQHKHYLDEIIEQISEFSKRVILADANLDKVLSAYNKHRDKPIREQAENIIHLFTLTNLGAPAAFKYFDTTIDRKRYTSTKEVLDATLIHQSITGLYETRIDLSQLGGDGGGGGGGGGGGLLGRDLLTKLKAQIQFSTEGPQVTWEDRPAMCLVLNLEEEYRLHEKPVPPSIDPSWLQLFPMVWAEKAGMGLANQVPPVVVELKSDASPVAVRQYPMSKEAREGIRPHIQRFLDLGILVPCQSPWNTPLLPVKKPGTNDYRPVQDLREVNKRVQDIHPTVPNPYNLLSSLPPSHTWYSVLDLKDAFFCLKLHPNSQPLFAFEWRDPEKGNTGQLTWTRLPQGFKNSPTLFNEALHRDLASFRALNPQVVMLQYVDDLLVAAPTYRDCKEGTRRLLQELSKLGYRVSAKKAQLCREEVTYLGYLLKGGKRWLTPARKATVMKIPTPTTPRQVREFLGTAGFCRLWIPGFASLAAPLYPLTRPKVPFTWTEAHQEAFGRIKEALLSAPALALPDLTKPFALYVDEKEGVARGVLTQTLGPWRRPVAYLSKKLDPVASGWPTCLKAIAAVALLLKDADKLTLGQNVLVIAPHNLESIVRQPPDRWMTNARMTHYQSLLLNERVSFAPPAILNPATLLPVESDDTPIHICSEILAEETGTRPDLRDQPLPGVPAWYTDGSSFIMDGRRQAGAAIVDNKRTVWASNLPEGTSAQKAELIALTQALRLAEGKSINIYTDSRYAFATAHVHGAIYKQRGWLTSAGKDIKNKEEILALLEAIHLPKRVAIIHCPGHQRGTDPVATGNRKADEAAKQAAQSTRILTETTKNAGKRTADGSEFEKRTADGSEFESPKKKAKVE

SEQ ID NO: 6269 - protein, 2123 aa, synthetic construct
MPAAKRVKLDGGDKKYSIGLDIGTNSVGWAVITDEYKVPSKKFKVLGNTDRHSIKKNLIGALLFDSGETAEATRLKRTARRRYTRRKNRICYLQEIFSNEMAKVDDSFFHRLEESFLVEEDKKHERHPIFGNIVDEVAYHEKYPTIYHLRKKLVDSTDKADLRLIYLALAHMIKFRGHFLIEGDLNPDNSDVDKLFIQLVQTYNQLFEENPINASGVDAKAILSARLSKSRRLENLIAQLPGEKKNGLFGNLIALSLGLTPNFKSNFDLAEDAKLQLSKDTYDDDLDNLLAQIGDQYADLFLAAKNLSDAILLSDILRVNTEITKAPLSASMIKRYDEHHQDLTLLKALVRQQLPEKYKEIFFDQSKNGYAGYIDGGASQEEFYKFIKPILEKMDGTEELLVKLNREDLLRKQRTFDNGSIPHQIHLGELHAILRRQEDFYPFLKDNREKIEKILTFRIPYYVGPLARGNSRFAWMTRKSEETITPWNFEEVVDKGASAQSFIERMTNFDKNLPNEKVLPKHSLLYEYFTVYNELTKVKYVTEGMRKPAFLSGEQKKAIVDLLFKTNRKVTVKQLKEDYFKKIECFDSVEISGVEDRFNASLGTYHDLLKIIKDKDFLDNEENEDILEDIVLTLTLFEDREMIEERLKTYAHLFDDKVMKQLKRRRYTGWGRLSRKLINGIRDKQSGKTILDFLKSDGFANRNFMQLIHDDSLTFKEDIQKAQVSGQGDSLHEHIANLAGSPAIKKGILQTVKVVDELVKVMGRHKPENIVIEMARENQTTQKGQKNSRERMKRIEEGIKELGSQILKEHPVENTQLQNEKLYLYYLQNGRDMYVDQELDINRLSDYDVDHIVPQSFLKDDSIDNKVLTRSDKARGKSDNVPSEEVVKKMKNYWRQLLNAKLITQRKFDNLTKAERGGLSELDKAGFIKRQLVETRQITKHVAQILDSRMNTKYDENDKLIREVKVITLKSKLVSDFRKDFQFYKVREINNYHHAHDAYLNAVVGTALIKKYPKLESEFVYGDYKVYDVRKMIAKSEQEIGKATAKYFFYSNIMNFFKTEITLANGEIRKRPLIETNGETGEIVWDKGRDFATVRKVLSMPQVNIVKKTEVQTGGFSKESILPKRNSDKLIARKKDWDPKKYGGFDSPTVAYSVLVVAKVEKGKSKKLKSVKELLGITIMERSSFEKNPIDFLEAKGYKEVKKDLIIKLPKYSLFELENGRKRMLASAGELQKGNELALPSKYVNFLYLASHYEKLKGSPEDNEQKQLFVEQHKHYLDEIIEQISEFSKRVILADANLDKVLSAYNKHRDKPIREQAENIIHLFTLTNLGAPAAFKYFDTTIDRKRYTSTKEVLDATLIHQSITGLYETRIDLSQLGGDGGGGGGGGGGGLLGRDLLTKLKAQIQFSTEGPQVTWEDRPAMCLVLNLEEEYRLHEKPVPPSIDPSWLQLFPMVWAEKAGMGLANQVPPVVVELKSDASPVAVRQYPMSKEAREGIRPHIQRFLDLGILVPCQSPWNTPLLPVKKPGTNDYRPVQDLREVNKRVQDIHPTVPNPYNLLSSLPPSHTWYSVLDLKDAFFCLKLHPNSQPLFAFEWRDPEKGNTGQLTWTRLPQGFKNSPTLFNEALHRDLASFRALNPQVVMLQYVDDLLVAAPTYRDCKEGTRRLLQELSKLGYRVSAKKAQLCREEVTYLGYLLKGGKRWLTPARKATVMKIPTPTTPRQVREFLGKAGFCRLFIPGFASLAAPLYPLTRPKVPFTWTEAHQEAFGRIKEALLSAPALALPDLTKPFALYVDEKEGVARGVLTQTLGPWRRPVAYLSKKLDPVASGWPTCLKAIAAVALLLKDADKLTLGQNVLVIAPHNLESIVRQPPDRWMTNARMTHYQSLLLNERVSFAPPAILNPATLLPVESDDTPIHICSEILAEETGTRPDLRDQPLPGVPAWYTDGSSFIMDGRRQAGAAIVDNKRTVWASNLPEGTSAQKAELIALTQALRLAEGKSINIYTDSRYAFATAHVHGAIYKQRGWLTSAGKDIKNKEEILALLEAIHLPKRVAIIHCPGHQRGTDPVATGNRKADEAAKQAAQSTRILTETTKNAGKRTADGSEFEKRTADGSEFESPKKKAKVE

SEQ ID NO: 6270 - protein, 2092 aa, synthetic construct
MPAAKRVKLDGGDKKYSIGLDIGTNSVGWAVITDEYKVPSKKFKVLGNTDRHSIKKNLIGALLFDSGETAEATRLKRTARRRYTRRKNRICYLQEIFSNEMAKVDDSFFHRLEESFLVEEDKKHERHPIFGNIVDEVAYHEKYPTIYHLRKKLVDSTDKADLRLIYLALAHMIKFRGHFLIEGDLNPDNSDVDKLFIQLVQTYNQLFEENPINASGVDAKAILSARLSKSRRLENLIAQLPGEKKNGLFGNLIALSLGLTPNFKSNFDLAEDAKLQLSKDTYDDDLDNLLAQIGDQYADLFLAAKNLSDAILLSDILRVNTEITKAPLSASMIKRYDEHHQDLTLLKALVRQQLPEKYKEIFFDQSKNGYAGYIDGGASQEEFYKFIKPILEKMDGTEELLVKLNREDLLRKQRTFDNGSIPHQIHLGELHAILRRQEDFYPFLKDNREKIEKILTFRIPYYVGPLARGNSRFAWMTRKSEETITPWNFEEVVDKGASAQSFIERMTNFDKNLPNEKVLPKHSLLYEYFTVYNELTKVKYVTEGMRKPAFLSGEQKKAIVDLLFKTNRKVTVKQLKEDYFKKIECFDSVEISGVEDRFNASLGTYHDLLKIIKDKDFLDNEENEDILEDIVLTLTLFEDREMIEERLKTYAHLFDDKVMKQLKRRRYTGWGRLSRKLINGIRDKQSGKTILDFLKSDGFANRNFMQLIHDDSLTFKEDIQKAQVSGQGDSLHEHIANLAGSPAIKKGILQTVKVVDELVKVMGRHKPENIVIEMARENQTTQKGQKNSRERMKRIEEGIKELGSQILKEHPVENTQLQNEKLYLYYLQNGRDMYVDQELDINRLSDYDVDHIVPQSFLKDDSIDNKVLTRSDKARGKSDNVPSEEVVKKMKNYWRQLLNAKLITQRKFDNLTKAERGGLSELDKAGFIKRQLVETRQITKHVAQILDSRMNTKYDENDKLIREVKVITLKSKLVSDFRKDFQFYKVREINNYHHAHDAYLNAVVGTALIKKYPKLESEFVYGDYKVYDVRKMIAKSEQEIGKATAKYFFYSNIMNFFKTEITLANGEIRKRPLIETNGETGEIVWDKGRDFATVRKVLSMPQVNIVKKTEVQTGGFSKESILPKRNSDKLIARKKDWDPKKYGGFDSPTVAYSVLVVAKVEKGKSKKLKSVKELLGITIMERSSFEKNPIDFLEAKGYKEVKKDLIIKLPKYSLFELENGRKRMLASAGELQKGNELALPSKYVNFLYLASHYEKLKGSPEDNEQKQLFVEQHKHYLDEIIEQISEFSKRVILADANLDKVLSAYNKHRDKPIREQAENIIHLFTLTNLGAPAAFKYFDTTIDRKRYTSTKEVLDATLIHQSITGLYETRIDLSQLGGDGGGGGGGGGGGTLNLEDEYRLYETSAEPEVSPGSTWLSDFPQAWAETGGMGLAVRQAPLIIPLKATSTPVSIKQYPMSQEAKLGIKPHIQRLLDQGILVPCQSPWNTPLLPVKKPGTNDYRPVQDLREVNKRVEDIHPTVPNPYNLLSGLPPSHRWYTVLDLKDAFFCLRLHPTSQPLFAFEWRDPGMGISGQLTWTRLPQGFKNSPTLFNEALHRDLADFRIQHPDLILLQYVDDILLAATSELDCQQGTRALLLTLGNLGYRASAKKAQLCQKQVKYLGYLLKEGQRWLTEARKETVMGQPTPKTPRQLREFLGTAGFCRLWIPGFAEMAAPLYPLTKPGTLFNWGPDQQKAYQEIKQALLTAPALGLPDLTKPFELFVDEKQGYAKGVLTQKLGPWRRPVAYLSKKLDPVAAGWPPCLRMVAAIAVLRKDAGKLTMGQPLVILAPHAVEALVKQPPDRWLSNARMTHYQAMLLDTDRVQFGPVVALNPATLLPLPEEGAPHDCLEILAETHGTRPDLTDQPIPDADHTWYTDGSSFLQEGQRKAGAAVTTETEVIWARALPAGTSAQRAELIALTQALKMAEGKRLNVYTDSRYAFATAHIHGEIYRRRGWLTSEGREIKNKSEILALLKALFLPKRLSIIHCLGHQKGDSAEARGNRLADQAAREAAIKTPPDTSTLLAGKRTADGSEFEKRTADGSEFESPKKKAKVE

SEQ ID NO: 6271 - protein, 2092 aa, synthetic construct
MPAAKRVKLDGGDKKYSIGLDIGTNSVGWAVITDEYKVPSKKFKVLGNTDRHSIKKNLIGALLFDSGETAEATRLKRTARRRYTRRKNRICYLQEIFSNEMAKVDDSFFHRLEESFLVEEDKKHERHPIFGNIVDEVAYHEKYPTIYHLRKKLVDSTDKADLRLIYLALAHMIKFRGHFLIEGDLNPDNSDVDKLFIQLVQTYNQLFEENPINASGVDAKAILSARLSKSRRLENLIAQLPGEKKNGLFGNLIALSLGLTPNFKSNFDLAEDAKLQLSKDTYDDDLDNLLAQIGDQYADLFLAAKNLSDAILLSDILRVNTEITKAPLSASMIKRYDEHHQDLTLLKALVRQQLPEKYKEIFFDQSKNGYAGYIDGGASQEEFYKFIKPILEKMDGTEELLVKLNREDLLRKQRTFDNGSIPHQIHLGELHAILRRQEDFYPFLKDNREKIEKILTFRIPYYVGPLARGNSRFAWMTRKSEETITPWNFEEVVDKGASAQSFIERMTNFDKNLPNEKVLPKHSLLYEYFTVYNELTKVKYVTEGMRKPAFLSGEQKKAIVDLLFKTNRKVTVKQLKEDYFKKIECFDSVEISGVEDRFNASLGTYHDLLKIIKDKDFLDNEENEDILEDIVLTLTLFEDREMIEERLKTYAHLFDDKVMKQLKRRRYTGWGRLSRKLINGIRDKQSGKTILDFLKSDGFANRNFMQLIHDDSLTFKEDIQKAQVSGQGDSLHEHIANLAGSPAIKKGILQTVKVVDELVKVMGRHKPENIVIEMARENQTTQKGQKNSRERMKRIEEGIKELGSQILKEHPVENTQLQNEKLYLYYLQNGRDMYVDQELDINRLSDYDVDHIVPQSFLKDDSIDNKVLTRSDKARGKSDNVPSEEVVKKMKNYWRQLLNAKLITQRKFDNLTKAERGGLSELDKAGFIKRQLVETRQITKHVAQILDSRMNTKYDENDKLIREVKVITLKSKLVSDFRKDFQFYKVREINNYHHAHDAYLNAVVGTALIKKYPKLESEFVYGDYKVYDVRKMIAKSEQEIGKATAKYFFYSNIMNFFKTEITLANGEIRKRPLIETNGETGEIVWDKGRDFATVRKVLSMPQVNIVKKTEVQTGGFSKESILPKRNSDKLIARKKDWDPKKYGGFDSPTVAYSVLVVAKVEKGKSKKLKSVKELLGITIMERSSFEKNPIDFLEAKGYKEVKKDLIIKLPKYSLFELENGRKRMLASAGELQKGNELALPSKYVNFLYLASHYEKLKGSPEDNEQKQLFVEQHKHYLDEIIEQISEFSKRVILADANLDKVLSAYNKHRDKPIREQAENIIHLFTLTNLGAPAAFKYFDTTIDRKRYTSTKEVLDATLIHQSITGLYETRIDLSQLGGDGGGGGGGGGGGTLNLEDEYRLYETSAEPEVSPGSTWLSDFPQAWAETGGMGLAVRQAPLIIPLKATSTPVSIKQYPMSQEAKLGIKPHIQRLLDQGILVPCQSPWNTPLLPVKKPGTNDYRPVQDLREVNKRVEDIHPTVPNPYNLLSGLPPSHRWYTVLDLKDAFFCLRLHPTSQPLFAFEWRDPGMGISGQLTWTRLPQGFKNSPTLFNEALHRDLADFRIQHPDLILLQYVDDILLAATSELDCQQGTRALLLTLGNLGYRASAKKAQLCQKQVKYLGYLLKEGQRWLTEARKETVMGQPTPKTPRQLREFLGKAGFCRLFIPGFAEMAAPLYPLTKPGTLFNWGPDQQKAYQEIKQALLTAPALGLPDLTKPFELFVDEKQGYAKGVLTQKLGPWRRPVAYLSKKLDPVAAGWPPCLRMVAAIAVLRKDAGKLTMGQPLVILAPHAVEALVKQPPDRWLSNARMTHYQAMLLDTDRVQFGPVVALNPATLLPLPEEGAPHDCLEILAETHGTRPDLTDQPIPDADHTWYTDGSSFLQEGQRKAGAAVTTETEVIWARALPAGTSAQRAELIALTQALKMAEGKRLNVYTDSRYAFATAHIHGEIYRRRGWLTSEGREIKNKSEILALLKALFLPKRLSIIHCLGHQKGDSAEARGNRLADQAAREAAIKTPPDTSTLLAGKRTADGSEFEKRTADGSEFESPKKKAKVE

SEQ ID NO: 6272 - protein, 2090 aa, synthetic construct
MPAAKRVKLDGGDKKYSIGLDIGTNSVGWAVITDEYKVPSKKFKVLGNTDRHSIKKNLIGALLFDSGETAEATRLKRTARRRYTRRKNRICYLQEIFSNEMAKVDDSFFHRLEESFLVEEDKKHERHPIFGNIVDEVAYHEKYPTIYHLRKKLVDSTDKADLRLIYLALAHMIKFRGHFLIEGDLNPDNSDVDKLFIQLVQTYNQLFEENPINASGVDAKAILSARLSKSRRLENLIAQLPGEKKNGLFGNLIALSLGLTPNFKSNFDLAEDAKLQLSKDTYDDDLDNLLAQIGDQYADLFLAAKNLSDAILLSDILRVNTEITKAPLSASMIKRYDEHHQDLTLLKALVRQQLPEKYKEIFFDQSKNGYAGYIDGGASQEEFYKFIKPILEKMDGTEELLVKLNREDLLRKQRTFDNGSIPHQIHLGELHAILRRQEDFYPFLKDNREKIEKILTFRIPYYVGPLARGNSRFAWMTRKSEETITPWNFEEVVDKGASAQSFIERMTNFDKNLPNEKVLPKHSLLYEYFTVYNELTKVKYVTEGMRKPAFLSGEQKKAIVDLLFKTNRKVTVKQLKEDYFKKIECFDSVEISGVEDRFNASLGTYHDLLKIIKDKDFLDNEENEDILEDIVLTLTLFEDREMIEERLKTYAHLFDDKVMKQLKRRRYTGWGRLSRKLINGIRDKQSGKTILDFLKSDGFANRNFMQLIHDDSLTFKEDIQKAQVSGQGDSLHEHIANLAGSPAIKKGILQTVKVVDELVKVMGRHKPENIVIEMARENQTTQKGQKNSRERMKRIEEGIKELGSQILKEHPVENTQLQNEKLYLYYLQNGRDMYVDQELDINRLSDYDVDHIVPQSFLKDDSIDNKVLTRSDKARGKSDNVPSEEVVKKMKNYWRQLLNAKLITQRKFDNLTKAERGGLSELDKAGFIKRQLVETRQITKHVAQILDSRMNTKYDENDKLIREVKVITLKSKLVSDFRKDFQFYKVREINNYHHAHDAYLNAVVGTALIKKYPKLESEFVYGDYKVYDVRKMIAKSEQEIGKATAKYFFYSNIMNFFKTEITLANGEIRKRPLIETNGETGEIVWDKGRDFATVRKVLSMPQVNIVKKTEVQTGGFSKESILPKRNSDKLIARKKDWDPKKYGGFDSPTVAYSVLVVAKVEKGKSKKLKSVKELLGITIMERSSFEKNPIDFLEAKGYKEVKKDLIIKLPKYSLFELENGRKRMLASAGELQKGNELALPSKYVNFLYLASHYEKLKGSPEDNEQKQLFVEQHKHYLDEIIEQISEFSKRVILADANLDKVLSAYNKHRDKPIREQAENIIHLFTLTNLGAPAAFKYFDTTIDRKRYTSTKEVLDATLIHQSITGLYETRIDLSQLGGDGGGGGGGGGGGVLNLEEEYRLHEKPVPSSIDPSWLQLFPTVWAERAGMGLANQVPPVVVELRSGASPVAVRQYPMSKEAREGIRPHIQRFLDLGVLVPCQSPWNTPLLPVKKPGTNDYRPVQDLREINKRVQDIHPTVPNPYNLLSSLPPSHTWYSVLDLKDAFFCLKLHPNSQPLFAFEWRDPEKGNTGQLTWTRLPQGFKNSPTLFNEALHRDLAPFRALNPQVVLLQYVDDLLVAAPTYRDCKEGTQKLLQELSKLGYRVSAKKAQLCQKEVTYLGYLLKEGKRWLTPARKATVMKIPPPTTPRQVREFLGKAGFCRLFIPGFASLAAPLYPLTKPSIPFIWTEEHQKAFDRIKEALLSAPALALPDLTKPFTLYVDERAGVARGVLTQTLGPWRRPVAYLSKKLDPVASGWPTCLKAVAAVALLLKDADKLTLGQNVTVIASHSLESIVRQPPDRWMTNARMTHYQSLLLNERVSFAPPAVLNPATLLPVESEATPVHRCSEILAEETGTRRDLKDQPLPGVPAWYTDGSSFIAEGKRRAGAAIVDGKRTVWASSLPEGTSAQKAELVALTQALRLAEGKDINIYTDSRYAFATAHIHGAIYKQRGWLTSAGKDIKNKEEILALLEAIHLPKRVAIIHCPGHQKGNDPVATGNRRADEAAKQAALSTRVLAETTKPAGKRTADGSEFEKRTADGSEFESPKKKAKVE

SEQ ID NO: 6273 - protein, 2092 aa, synthetic construct
MPAAKRVKLDGGDKKYSIGLDIGTNSVGWAVITDEYKVPSKKFKVLGNTDRHSIKKNLIGALLFDSGETAEATRLKRTARRRYTRRKNRICYLQEIFSNEMAKVDDSFFHRLEESFLVEEDKKHERHPIFGNIVDEVAYHEKYPTIYHLRKKLVDSTDKADLRLIYLALAHMIKFRGHFLIEGDLNPDNSDVDKLFIQLVQTYNQLFEENPINASGVDAKAILSARLSKSRRLENLIAQLPGEKKNGLFGNLIALSLGLTPNFKSNFDLAEDAKLQLSKDTYDDDLDNLLAQIGDQYADLFLAAKNLSDAILLSDILRVNTEITKAPLSASMIKRYDEHHQDLTLLKALVRQQLPEKYKEIFFDQSKNGYAGYIDGGASQEEFYKFIKPILEKMDGTEELLVKLNREDLLRKQRTFDNGSIPHQIHLGELHAILRRQEDFYPFLKDNREKIEKILTFRIPYYVGPLARGNSRFAWMTRKSEETITPWNFEEVVDKGASAQSFIERMTNFDKNLPNEKVLPKHSLLYEYFTVYNELTKVKYVTEGMRKPAFLSGEQKKAIVDLLFKTNRKVTVKQLKEDYFKKIECFDSVEISGVEDRFNASLGTYHDLLKIIKDKDFLDNEENEDILEDIVLTLTLFEDREMIEERLKTYAHLFDDKVMKQLKRRRYTGWGRLSRKLINGIRDKQSGKTILDFLKSDGFANRNFMQLIHDDSLTFKEDIQKAQVSGQGDSLHEHIANLAGSPAIKKGILQTVKVVDELVKVMGRHKPENIVIEMARENQTTQKGQKNSRERMKRIEEGIKELGSQILKEHPVENTQLQNEKLYLYYLQNGRDMYVDQELDINRLSDYDVDHIVPQSFLKDDSIDNKVLTRSDKARGKSDNVPSEEVVKKMKNYWRQLLNAKLITQRKFDNLTKAERGGLSELDKAGFIKRQLVETRQITKHVAQILDSRMNTKYDENDKLIREVKVITLKSKLVSDFRKDFQFYKVREINNYHHAHDAYLNAVVGTALIKKYPKLESEFVYGDYKVYDVRKMIAKSEQEIGKATAKYFFYSNIMNFFKTEITLANGEIRKRPLIETNGETGEIVWDKGRDFATVRKVLSMPQVNIVKKTEVQTGGFSKESILPKRNSDKLIARKKDWDPKKYGGFDSPTVAYSVLVVAKVEKGKSKKLKSVKELLGITIMERSSFEKNPIDFLEAKGYKEVKKDLIIKLPKYSLFELENGRKRMLASAGELQKGNELALPSKYVNFLYLASHYEKLKGSPEDNEQKQLFVEQHKHYLDEIIEQISEFSKRVILADANLDKVLSAYNKHRDKPIREQAENIIHLFTLTNLGAPAAFKYFDTTIDRKRYTSTKEVLDATLIHQSITGLYETRIDLSQLGGDGGGGGGGGGGGTLNIEDEYRLHETSKEPDVPLGSTWLSDFPQAWAETGGMGLAVRQAPLIIPLKATSTPVSIKQYPMSQEARLGIKPHIQRLLDQGILVPCQSPWNTPLLPVKKPGTNDYRPVQDLREVNKRVEDIHPTVPNPYNLLSGLPPSHQWYTVLDLKDAFFCLRLHPTSQPLFAFEWRDPEMGISGQLTWTRLPQGFKNSPTLFNEALHRDLADFRIQHPDLILLQYVDDLLLAATSEQDCQRGTRALLQTLGNLGYRASAKKAQICQKQVKYLGYLLKEGQRWLTEARKETVMGQPTPKTPRQLREFLGKAGFCRLFIPGFAEMAAPLYPLTKPGTLFNWGPDQQKAYQEIKQALLTAPALGLPDLTKPFELFVDEKQGYAKGVLTQKLGPWRRPVAYLSKKLDPVAAGWPPCLRMVAAIAVLTKDAGKLTMGQPLVILAPHAVEALVKQPPDRWLSNARMTHYQAMLLDTDRVQFGPVVALNPATLLPLPEKEAPHDCLEILAETHGTRPDLTDQPIPDADYTWYTDGSSFLQEGQRRAGAAVTTETEVIWARALPAGTSAQRAELIALTQALKMAEGKKLNVYTDSRYAFATAHVHGEIYRRRGWLTSEGREIKNKNEILALLKALFLPKRLSIIHCPGHQKGNSAEARGNRMADQAAREAAMKAVLETSTLLAGKRTADGSEFEKRTADGSEFESPKKKAKVE

SEQ ID NO: 6274 - protein, 2095 aa, synthetic construct
MPAAKRVKLDGGDKKYSIGLDIGTNSVGWAVITDEYKVPSKKFKVLGNTDRHSIKKNLIGALLFDSGETAEATRLKRTARRRYTRRKNRICYLQEIFSNEMAKVDDSFFHRLEESFLVEEDKKHERHPIFGNIVDEVAYHEKYPTIYHLRKKLVDSTDKADLRLIYLALAHMIKFRGHFLIEGDLNPDNSDVDKLFIQLVQTYNQLFEENPINASGVDAKAILSARLSKSRRLENLIAQLPGEKKNGLFGNLIALSLGLTPNFKSNFDLAEDAKLQLSKDTYDDDLDNLLAQIGDQYADLFLAAKNLSDAILLSDILRVNTEITKAPLSASMIKRYDEHHQDLTLLKALVRQQLPEKYKEIFFDQSKNGYAGYIDGGASQEEFYKFIKPILEKMDGTEELLVKLNREDLLRKQRTFDNGSIPHQIHLGELHAILRRQEDFYPFLKDNREKIEKILTFRIPYYVGPLARGNSRFAWMTRKSEETITPWNFEEVVDKGASAQSFIERMTNFDKNLPNEKVLPKHSLLYEYFTVYNELTKVKYVTEGMRKPAFLSGEQKKAIVDLLFKTNRKVTVKQLKEDYFKKIECFDSVEISGVEDRFNASLGTYHDLLKIIKDKDFLDNEENEDILEDIVLTLTLFEDREMIEERLKTYAHLFDDKVMKQLKRRRYTGWGRLSRKLINGIRDKQSGKTILDFLKSDGFANRNFMQLIHDDSLTFKEDIQKAQVSGQGDSLHEHIANLAGSPAIKKGILQTVKVVDELVKVMGRHKPENIVIEMARENQTTQKGQKNSRERMKRIEEGIKELGSQILKEHPVENTQLQNEKLYLYYLQNGRDMYVDQELDINRLSDYDVDHIVPQSFLKDDSIDNKVLTRSDKARGKSDNVPSEEVVKKMKNYWRQLLNAKLITQRKFDNLTKAERGGLSELDKAGFIKRQLVETRQITKHVAQILDSRMNTKYDENDKLIREVKVITLKSKLVSDFRKDFQFYKVREINNYHHAHDAYLNAVVGTALIKKYPKLESEFVYGDYKVYDVRKMIAKSEQEIGKATAKYFFYSNIMNFFKTEITLANGEIRKRPLIETNGETGEIVWDKGRDFATVRKVLSMPQVNIVKKTEVQTGGFSKESILPKRNSDKLIARKKDWDPKKYGGFDSPTVAYSVLVVAKVEKGKSKKLKSVKELLGITIMERSSFEKNPIDFLEAKGYKEVKKDLIIKLPKYSLFELENGRKRMLASAGELQKGNELALPSKYVNFLYLASHYEKLKGSPEDNEQKQLFVEQHKHYLDEIIEQISEFSKRVILADANLDKVLSAYNKHRDKPIREQAENIIHLFTLTNLGAPAAFKYFDTTIDRKRYTSTKEVLDATLIHQSITGLYETRIDLSQLGGDGGGGGGGGGGGGTAPLEEEYRLFLEAPIQNVTLLEQWKREIPKVWAEINPPGLASTQAPIHVQLLSTALPVRVRQYPITLEAKRSLRETIRKFRAAGILRPVHSPWNTPLLPVRKSGTSEYRMVQDLREVNKRVETIHPTVPNPYTLLSLLPPDRIWYSVLDLKDAFFCIPLAPESQLIFAFEWADAEEGESGQLTWTRLPQGFKNSPTLFDEALNRDLQGFRLDHPSVSLLQYVDDLLIAADTQAACLSATRDLLMTLAELGYRVSGKKAQLCQEEVTYLGFKIHKGSRSLSNSRTQAILQIPVPKTKRQVREFLGTIGYCRLWIPGFAELAQPLYAATRGGNDPLVWGEKEEEAFQSLKLALTQPPALALPSLDKPFQLFVEETSGAAKGVLTQALGPWKRPVAYLSKRLDPVAAGWPRCLRAIAAAALLTREASKLTFGQDIEITSSHNLESLLRSPPDKWLTNARITQYQVLLLDPPRVRFKQTAALNPATLLPETDDTLPIHHCLDTLDSLTSTRPDLTDQPLAQAEATLFTDGSSYIRDGKRYAGAAVVTLDSVIWAEPLPIGTSAQKAELIALTKALEWSKDKSVNIYTDSRYAFATLHVHGMIYRERGLLTAGGKAIKNAPEILALLTAVWLPKRVAVMHCKGHQKDDAPTSTGNRRADEVAREVAIRPLSTQATISAGKRTADGSEFEKRTADGSEFESPKKKAKVE

SEQ ID NO: 6275 - protein, 2095 aa, synthetic construct
MPAAKRVKLDGGDKKYSIGLDIGTNSVGWAVITDEYKVPSKKFKVLGNTDRHSIKKNLIGALLFDSGETAEATRLKRTARRRYTRRKNRICYLQEIFSNEMAKVDDSFFHRLEESFLVEEDKKHERHPIFGNIVDEVAYHEKYPTIYHLRKKLVDSTDKADLRLIYLALAHMIKFRGHFLIEGDLNPDNSDVDKLFIQLVQTYNQLFEENPINASGVDAKAILSARLSKSRRLENLIAQLPGEKKNGLFGNLIALSLGLTPNFKSNFDLAEDAKLQLSKDTYDDDLDNLLAQIGDQYADLFLAAKNLSDAILLSDILRVNTEITKAPLSASMIKRYDEHHQDLTLLKALVRQQLPEKYKEIFFDQSKNGYAGYIDGGASQEEFYKFIKPILEKMDGTEELLVKLNREDLLRKQRTFDNGSIPHQIHLGELHAILRRQEDFYPFLKDNREKIEKILTFRIPYYVGPLARGNSRFAWMTRKSEETITPWNFEEVVDKGASAQSFIERMTNFDKNLPNEKVLPKHSLLYEYFTVYNELTKVKYVTEGMRKPAFLSGEQKKAIVDLLFKTNRKVTVKQLKEDYFKKIECFDSVEISGVEDRFNASLGTYHDLLKIIKDKDFLDNEENEDILEDIVLTLTLFEDREMIEERLKTYAHLFDDKVMKQLKRRRYTGWGRLSRKLINGIRDKQSGKTILDFLKSDGFANRNFMQLIHDDSLTFKEDIQKAQVSGQGDSLHEHIANLAGSPAIKKGILQTVKVVDELVKVMGRHKPENIVIEMARENQTTQKGQKNSRERMKRIEEGIKELGSQILKEHPVENTQLQNEKLYLYYLQNGRDMYVDQELDINRLSDYDVDHIVPQSFLKDDSIDNKVLTRSDKARGKSDNVPSEEVVKKMKNYWRQLLNAKLITQRKFDNLTKAERGGLSELDKAGFIKRQLVETRQITKHVAQILDSRMNTKYDENDKLIREVKVITLKSKLVSDFRKDFQFYKVREINNYHHAHDAYLNAVVGTALIKKYPKLESEFVYGDYKVYDVRKMIAKSEQEIGKATAKYFFYSNIMNFFKTEITLANGEIRKRPLIETNGETGEIVWDKGRDFATVRKVLSMPQVNIVKKTEVQTGGFSKESILPKRNSDKLIARKKDWDPKKYGGFDSPTVAYSVLVVAKVEKGKSKKLKSVKELLGITIMERSSFEKNPIDFLEAKGYKEVKKDLIIKLPKYSLFELENGRKRMLASAGELQKGNELALPSKYVNFLYLASHYEKLKGSPEDNEQKQLFVEQHKHYLDEIIEQISEFSKRVILADANLDKVLSAYNKHRDKPIREQAENIIHLFTLTNLGAPAAFKYFDTTIDRKRYTSTKEVLDATLIHQSITGLYETRIDLSQLGGDGGGGGGGGGGGGTAPLEEEYRLFLEAPIQNVTLLEQWKREIPKVWAEINPPGLASTQAPIHVQLLSTALPVRVRQYPITLEAKRSLRETIRKFRAAGILRPVHSPWNTPLLPVRKSGTSEYRMVQDLREVNKRVETIHPTVPNPYTLLSLLPPDRIWYSVLDLKDAFFCIPLAPESQLIFAFEWADAEEGESGQLTWTRLPQGFKNSPTLFNEALNRDLQGFRLDHPSVSLLQYVDDLLIAADTQAACLSATRDLLMTLAELGYRVSGKKAQLCQEEVTYLGFKIHKGSRSLSNSRTQAILQIPVPKTKRQVREFLGKIGYCRLFIPGFAELAQPLYAATRPGNDPLVWGEKEEEAFQSLKLALTQPPALALPSLDKPFQLFVEETSGAAKGVLTQALGPWKRPVAYLSKRLDPVAAGWPRCLRAIAAAALLTREASKLTFGQDIEITSSHNLESLLRSPPDKWLTNARITQYQVLLLDPPRVRFKQTAALNPATLLPETDDTLPIHHCLDTLDSLTSTRPDLTDQPLAQAEATLFTDGSSYIRDGKRYAGAAVVTLDSVIWAEPLPIGTSAQKAELIALTKALEWSKDKSVNIYTDSRYAFATLHVHGMIYRERGWLTAGGKAIKNAPEILALLTAVWLPKRVAVMHCKGHQKDDAPTSTGNRRADEVAREVAIRPLSTQATISAGKRTADGSEFEKRTADGSEFESPKKKAKVE

SEQ ID NO: 6276 - protein, 2099 aa, synthetic construct
MPAAKRVKLDGGDKKYSIGLDIGTNSVGWAVITDEYKVPSKKFKVLGNTDRHSIKKNLIGALLFDSGETAEATRLKRTARRRYTRRKNRICYLQEIFSNEMAKVDDSFFHRLEESFLVEEDKKHERHPIFGNIVDEVAYHEKYPTIYHLRKKLVDSTDKADLRLIYLALAHMIKFRGHFLIEGDLNPDNSDVDKLFIQLVQTYNQLFEENPINASGVDAKAILSARLSKSRRLENLIAQLPGEKKNGLFGNLIALSLGLTPNFKSNFDLAEDAKLQLSKDTYDDDLDNLLAQIGDQYADLFLAAKNLSDAILLSDILRVNTEITKAPLSASMIKRYDEHHQDLTLLKALVRQQLPEKYKEIFFDQSKNGYAGYIDGGASQEEFYKFIKPILEKMDGTEELLVKLNREDLLRKQRTFDNGSIPHQIHLGELHAILRRQEDFYPFLKDNREKIEKILTFRIPYYVGPLARGNSRFAWMTRKSEETITPWNFEEVVDKGASAQSFIERMTNFDKNLPNEKVLPKHSLLYEYFTVYNELTKVKYVTEGMRKPAFLSGEQKKAIVDLLFKTNRKVTVKQLKEDYFKKIECFDSVEISGVEDRFNASLGTYHDLLKIIKDKDFLDNEENEDILEDIVLTLTLFEDREMIEERLKTYAHLFDDKVMKQLKRRRYTGWGRLSRKLINGIRDKQSGKTILDFLKSDGFANRNFMQLIHDDSLTFKEDIQKAQVSGQGDSLHEHIANLAGSPAIKKGILQTVKVVDELVKVMGRHKPENIVIEMARENQTTQKGQKNSRERMKRIEEGIKELGSQILKEHPVENTQLQNEKLYLYYLQNGRDMYVDQELDINRLSDYDVDHIVPQSFLKDDSIDNKVLTRSDKARGKSDNVPSEEVVKKMKNYWRQLLNAKLITQRKFDNLTKAERGGLSELDKAGFIKRQLVETRQITKHVAQILDSRMNTKYDENDKLIREVKVITLKSKLVSDFRKDFQFYKVREINNYHHAHDAYLNAVVGTALIKKYPKLESEFVYGDYKVYDVRKMIAKSEQEIGKATAKYFFYSNIMNFFKTEITLANGEIRKRPLIETNGETGEIVWDKGRDFATVRKVLSMPQVNIVKKTEVQTGGFSKESILPKRNSDKLIARKKDWDPKKYGGFDSPTVAYSVLVVAKVEKGKSKKLKSVKELLGITIMERSSFEKNPIDFLEAKGYKEVKKDLIIKLPKYSLFELENGRKRMLASAGELQKGNELALPSKYVNFLYLASHYEKLKGSPEDNEQKQLFVEQHKHYLDEIIEQISEFSKRVILADANLDKVLSAYNKHRDKPIREQAENIIHLFTLTNLGAPAAFKYFDTTIDRKRYTSTKEVLDATLIHQSITGLYETRIDLSQLGGDGGGGGGGGGGGGTVSLQDEHRLFDIPVTTSLPDVWLQDFPQAWAETGGLGRAKCQAPIIIDLKPTAVPVSIKQYPMSLEAHMGIRQHIIKFLELGVLRPCRSPWNTPLLPVKKPGTQDYRPVQDLREINKRTVDIHPTVPNPYNLLSTLKPDYSWYTVLDLKDAFFCLPLAPQSQELFAFEWKDPERGISGQLTWTRLPQGFKNSPTLFDEALHRDLTDFRTQHPEVTLLQYVDDLLLAAPTKKACTQGTRHLLQELGEKGYRASAKKAQICQTKVTYLGYILSEGKRWLTPGRIETVARIPPPRNPREVREFLGTAGFCRLWIPGFAELAAPLYALTKESTPFTWQTEHQLAFEALKKALLSAPALGLPDTSKPFTLFLDERQGIAKGVLTQKLGPWKRPVAYLSKKLDPVAAGWPPCLRIMAATAMLVKDSAKLTLGQPLTVITPHTLEAIVRQPPDRWITNARLTHYQALLLDTDRVQFGPPVTLNPATLLPVPENQPSPHDCRQVLAETHGTREDLKDQELPDADHTWYTDGSSYLDSGTRRAGAAVVDGHNTIWAQSLPPGTSAQKAELIALTKALELSKGKKANIYTDSRYAFATAHTHGSIYERRGLLTSEGKEIKNKAEIIALLKALFLPQEVAIIHCPGHQKGQDPVAVGNRQADRVARQAAMAEVLTLATEPDNTSHITAGKRTADGSEFEKRTADGSEFESPKKKAKVE

SEQ ID NO: 6277 - protein, 2091 aa, synthetic construct
MPAAKRVKLDGGDKKYSIGLDIGTNSVGWAVITDEYKVPSKKFKVLGNTDRHSIKKNLIGALLFDSGETAEATRLKRTARRRYTRRKNRICYLQEIFSNEMAKVDDSFFHRLEESFLVEEDKKHERHPIFGNIVDEVAYHEKYPTIYHLRKKLVDSTDKADLRLIYLALAHMIKFRGHFLIEGDLNPDNSDVDKLFIQLVQTYNQLFEENPINASGVDAKAILSARLSKSRRLENLIAQLPGEKKNGLFGNLIALSLGLTPNFKSNFDLAEDAKLQLSKDTYDDDLDNLLAQIGDQYADLFLAAKNLSDAILLSDILRVNTEITKAPLSASMIKRYDEHHQDLTLLKALVRQQLPEKYKEIFFDQSKNGYAGYIDGGASQEEFYKFIKPILEKMDGTEELLVKLNREDLLRKQRTFDNGSIPHQIHLGELHAILRRQEDFYPFLKDNREKIEKILTFRIPYYVGPLARGNSRFAWMTRKSEETITPWNFEEVVDKGASAQSFIERMTNFDKNLPNEKVLPKHSLLYEYFTVYNELTKVKYVTEGMRKPAFLSGEQKKAIVDLLFKTNRKVTVKQLKEDYFKKIECFDSVEISGVEDRFNASLGTYHDLLKIIKDKDFLDNEENEDILEDIVLTLTLFEDREMIEERLKTYAHLFDDKVMKQLKRRRYTGWGRLSRKLINGIRDKQSGKTILDFLKSDGFANRNFMQLIHDDSLTFKEDIQKAQVSGQGDSLHEHIANLAGSPAIKKGILQTVKVVDELVKVMGRHKPENIVIEMARENQTTQKGQKNSRERMKRIEEGIKELGSQILKEHPVENTQLQNEKLYLYYLQNGRDMYVDQELDINRLSDYDVDHIVPQSFLKDDSIDNKVLTRSDKARGKSDNVPSEEVVKKMKNYWRQLLNAKLITQRKFDNLTKAERGGLSELDKAGFIKRQLVETRQITKHVAQILDSRMNTKYDENDKLIREVKVITLKSKLVSDFRKDFQFYKVREINNYHHAHDAYLNAVVGTALIKKYPKLESEFVYGDYKVYDVRKMIAKSEQEIGKATAKYFFYSNIMNFFKTEITLANGEIRKRPLIETNGETGEIVWDKGRDFATVRKVLSMPQVNIVKKTEVQTGGFSKESILPKRNSDKLIARKKDWDPKKYGGFDSPTVAYSVLVVAKVEKGKSKKLKSVKELLGITIMERSSFEKNPIDFLEAKGYKEVKKDLIIKLPKYSLFELENGRKRMLASAGELQKGNELALPSKYVNFLYLASHYEKLKGSPEDNEQKQLFVEQHKHYLDEIIEQISEFSKRVILADANLDKVLSAYNKHRDKPIREQAENIIHLFTLTNLGAPAAFKYFDTTIDRKRYTSTKEVLDATLIHQSITGLYETRIDLSQLGGDGGGGGGGGGGGGVLNLEEEYRLHEKPVPSSIDPSWLQLFPTVWAERAGMGLANQVPPVVVELRSGASPVAVRQYPMSKEAREGIRPHIQKFLDLGVLVPCRSPWNTPLLPVKKPGTNDYRPVQDLREINKRVQDIHPTVPNPYNLLSSLPPSYTWYSVLDLKDAFFCLRLHPNSQPLFAFEWKDPEKGNTGQLTWTRLPQGFKNSPTLFNEALHRDLAPFRALNPQVVLLQYVDDLLVAAPTYEDCKKGTQKLLQELSKLGYRVSAKKAQLCQREVTYLGYLLKEGKRWLTPARKATVMKIPVPTTPRQVREFLGTAGFCRLWIPGFASLAAPLYPLTKPSIPFIWTEEHQQAFDHIKKALLSAPALALPDLTKPFTLYIDERAGVARGVLTQTLGPWRRPVAYLSKKLDPVASGWPTCLKAVAAVALLLKDADKLTLGQNVTVIASHSLESIVRQPPDRWMTNARMTHYQSLLLNERVSFAPPAVLNPATLLPVESEATPVHRCSEILAEETGTRRDLEDQPLPGVPTWYTDGSSFITEGKRRAGAPIVDGKRTVWASSLPEGTSAQKAELVALTQALRLAEGKNINIYTDSRYAFATAHIHGAIYKQRGWLTSAGKDIKNKEEILALLEAIHLPRRVAIIHCPGHQRGSNPVATGNRRADEAAKQAALSTRVLAGTTKPAGKRTADGSEFEKRTADGSEFESPKKKAKVE

SEQ ID NO: 6278 - protein, 2124 aa, synthetic construct
MPAAKRVKLDGGDKKYSIGLDIGTNSVGWAVITDEYKVPSKKFKVLGNTDRHSIKKNLIGALLFDSGETAEATRLKRTARRRYTRRKNRICYLQEIFSNEMAKVDDSFFHRLEESFLVEEDKKHERHPIFGNIVDEVAYHEKYPTIYHLRKKLVDSTDKADLRLIYLALAHMIKFRGHFLIEGDLNPDNSDVDKLFIQLVQTYNQLFEENPINASGVDAKAILSARLSKSRRLENLIAQLPGEKKNGLFGNLIALSLGLTPNFKSNFDLAEDAKLQLSKDTYDDDLDNLLAQIGDQYADLFLAAKNLSDAILLSDILRVNTEITKAPLSASMIKRYDEHHQDLTLLKALVRQQLPEKYKEIFFDQSKNGYAGYIDGGASQEEFYKFIKPILEKMDGTEELLVKLNREDLLRKQRTFDNGSIPHQIHLGELHAILRRQEDFYPFLKDNREKIEKILTFRIPYYVGPLARGNSRFAWMTRKSEETITPWNFEEVVDKGASAQSFIERMTNFDKNLPNEKVLPKHSLLYEYFTVYNELTKVKYVTEGMRKPAFLSGEQKKAIVDLLFKTNRKVTVKQLKEDYFKKIECFDSVEISGVEDRFNASLGTYHDLLKIIKDKDFLDNEENEDILEDIVLTLTLFEDREMIEERLKTYAHLFDDKVMKQLKRRRYTGWGRLSRKLINGIRDKQSGKTILDFLKSDGFANRNFMQLIHDDSLTFKEDIQKAQVSGQGDSLHEHIANLAGSPAIKKGILQTVKVVDELVKVMGRHKPENIVIEMARENQTTQKGQKNSRERMKRIEEGIKELGSQILKEHPVENTQLQNEKLYLYYLQNGRDMYVDQELDINRLSDYDVDHIVPQSFLKDDSIDNKVLTRSDKARGKSDNVPSEEVVKKMKNYWRQLLNAKLITQRKFDNLTKAERGGLSELDKAGFIKRQLVETRQITKHVAQILDSRMNTKYDENDKLIREVKVITLKSKLVSDFRKDFQFYKVREINNYHHAHDAYLNAVVGTALIKKYPKLESEFVYGDYKVYDVRKMIAKSEQEIGKATAKYFFYSNIMNFFKTEITLANGEIRKRPLIETNGETGEIVWDKGRDFATVRKVLSMPQVNIVKKTEVQTGGFSKESILPKRNSDKLIARKKDWDPKKYGGFDSPTVAYSVLVVAKVEKGKSKKLKSVKELLGITIMERSSFEKNPIDFLEAKGYKEVKKDLIIKLPKYSLFELENGRKRMLASAGELQKGNELALPSKYVNFLYLASHYEKLKGSPEDNEQKQLFVEQHKHYLDEIIEQISEFSKRVILADANLDKVLSAYNKHRDKPIREQAENIIHLFTLTNLGAPAAFKYFDTTIDRKRYTSTKEVLDATLIHQSITGLYETRIDLSQLGGDGGGGGGGGGGGGLLGRDLLTKLKAQIQFSTEGPQVTWEDRPAMCLVLNLEEEYRLHEKPVPPSIDPSWLQLFPMVWAEKAGMGLANQVPPVVVELKSDASPVAVRQYPMSKEAREGIRPHIQRFLDLGILVPCQSPWNTPLLPVKKPGTNDYRPVQDLREVNKRVQDIHPTVPNPYNLLSSLPPSHTWYSVLDLKDAFFCLKLHPNSQPLFAFEWRDPEKGNTGQLTWTRLPQGFKNSPTLFNEALHRDLASFRALNPQVVMLQYVDDLLVAAPTYRDCKEGTRRLLQELSKLGYRVSAKKAQLCREEVTYLGYLLKGGKRWLTPARKATVMKIPTPTTPRQVREFLGTAGFCRLWIPGFASLAAPLYPLTRPKVPFTWTEAHQEAFGRIKEALLSAPALALPDLTKPFALYVDEKEGVARGVLTQTLGPWRRPVAYLSKKLDPVASGWPTCLKAIAAVALLLKDADKLTLGQNVLVIAPHNLESIVRQPPDRWMTNARMTHYQSLLLNERVSFAPPAILNPATLLPVESDDTPIHICSEILAEETGTRPDLRDQPLPGVPAWYTDGSSFIMDGRRQAGAAIVDNKRTVWASNLPEGTSAQKAELIALTQALRLAEGKSINIYTDSRYAFATAHVHGAIYKQRGWLTSAGKDIKNKEEILALLEAIHLPKRVAIIHCPGHQRGTDPVATGNRKADEAAKQAAQSTRILTETTKNAGKRTADGSEFEKRTADGSEFESPKKKAKVE

SEQ ID NO: 6279 - protein, 2124 aa, synthetic construct
MPAAKRVKLDGGDKKYSIGLDIGTNSVGWAVITDEYKVPSKKFKVLGNTDRHSIKKNLIGALLFDSGETAEATRLKRTARRRYTRRKNRICYLQEIFSNEMAKVDDSFFHRLEESFLVEEDKKHERHPIFGNIVDEVAYHEKYPTIYHLRKKLVDSTDKADLRLIYLALAHMIKFRGHFLIEGDLNPDNSDVDKLFIQLVQTYNQLFEENPINASGVDAKAILSARLSKSRRLENLIAQLPGEKKNGLFGNLIALSLGLTPNFKSNFDLAEDAKLQLSKDTYDDDLDNLLAQIGDQYADLFLAAKNLSDAILLSDILRVNTEITKAPLSASMIKRYDEHHQDLTLLKALVRQQLPEKYKEIFFDQSKNGYAGYIDGGASQEEFYKFIKPILEKMDGTEELLVKLNREDLLRKQRTFDNGSIPHQIHLGELHAILRRQEDFYPFLKDNREKIEKILTFRIPYYVGPLARGNSRFAWMTRKSEETITPWNFEEVVDKGASAQSFIERMTNFDKNLPNEKVLPKHSLLYEYFTVYNELTKVKYVTEGMRKPAFLSGEQKKAIVDLLFKTNRKVTVKQLKEDYFKKIECFDSVEISGVEDRFNASLGTYHDLLKIIKDKDFLDNEENEDILEDIVLTLTLFEDREMIEERLKTYAHLFDDKVMKQLKRRRYTGWGRLSRKLINGIRDKQSGKTILDFLKSDGFANRNFMQLIHDDSLTFKEDIQKAQVSGQGDSLHEHIANLAGSPAIKKGILQTVKVVDELVKVMGRHKPENIVIEMARENQTTQKGQKNSRERMKRIEEGIKELGSQILKEHPVENTQLQNEKLYLYYLQNGRDMYVDQELDINRLSDYDVDHIVPQSFLKDDSIDNKVLTRSDKARGKSDNVPSEEVVKKMKNYWRQLLNAKLITQRKFDNLTKAERGGLSELDKAGFIKRQLVETRQITKHVAQILDSRMNTKYDENDKLIREVKVITLKSKLVSDFRKDFQFYKVREINNYHHAHDAYLNAVVGTALIKKYPKLESEFVYGDYKVYDVRKMIAKSEQEIGKATAKYFFYSNIMNFFKTEITLANGEIRKRPLIETNGETGEIVWDKGRDFATVRKVLSMPQVNIVKKTEVQTGGFSKESILPKRNSDKLIARKKDWDPKKYGGFDSPTVAYSVLVVAKVEKGKSKKLKSVKELLGITIMERSSFEKNPIDFLEAKGYKEVKKDLIIKLPKYSLFELENGRKRMLASAGELQKGNELALPSKYVNFLYLASHYEKLKGSPEDNEQKQLFVEQHKHYLDEIIEQISEFSKRVILADANLDKVLSAYNKHRDKPIREQAENIIHLFTLTNLGAPAAFKYFDTTIDRKRYTSTKEVLDATLIHQSITGLYETRIDLSQLGGDGGGGGGGGGGGGLLGRDLLTKLKAQIQFSTEGPQVTWEDRPAMCLVLNLEEEYRLHEKPVPPSIDPSWLQLFPMVWAEKAGMGLANQVPPVVVELKSDASPVAVRQYPMSKEAREGIRPHIQRFLDLGILVPCQSPWNTPLLPVKKPGTNDYRPVQDLREVNKRVQDIHPTVPNPYNLLSSLPPSHTWYSVLDLKDAFFCLKLHPNSQPLFAFEWRDPEKGNTGQLTWTRLPQGFKNSPTLFNEALHRDLASFRALNPQVVMLQYVDDLLVAAPTYRDCKEGTRRLLQELSKLGYRVSAKKAQLCREEVTYLGYLLKGGKRWLTPARKATVMKIPTPTTPRQVREFLGKAGFCRLFIPGFASLAAPLYPLTRPKVPFTWTEAHQEAFGRIKEALLSAPALALPDLTKPFALYVDEKEGVARGVLTQTLGPWRRPVAYLSKKLDPVASGWPTCLKAIAAVALLLKDADKLTLGQNVLVIAPHNLESIVRQPPDRWMTNARMTHYQSLLLNERVSFAPPAILNPATLLPVESDDTPIHICSEILAEETGTRPDLRDQPLPGVPAWYTDGSSFIMDGRRQAGAAIVDNKRTVWASNLPEGTSAQKAELIALTQALRLAEGKSINIYTDSRYAFATAHVHGAIYKQRGWLTSAGKDIKNKEEILALLEAIHLPKRVAIIHCPGHQRGTDPVATGNRKADEAAKQAAQSTRILTETTKNAGKRTADGSEFEKRTADGSEFESPKKKAKVE

SEQ ID NO: 6280 - protein, 2093 aa, synthetic construct
MPAAKRVKLDGGDKKYSIGLDIGTNSVGWAVITDEYKVPSKKFKVLGNTDRHSIKKNLIGALLFDSGETAEATRLKRTARRRYTRRKNRICYLQEIFSNEMAKVDDSFFHRLEESFLVEEDKKHERHPIFGNIVDEVAYHEKYPTIYHLRKKLVDSTDKADLRLIYLALAHMIKFRGHFLIEGDLNPDNSDVDKLFIQLVQTYNQLFEENPINASGVDAKAILSARLSKSRRLENLIAQLPGEKKNGLFGNLIALSLGLTPNFKSNFDLAEDAKLQLSKDTYDDDLDNLLAQIGDQYADLFLAAKNLSDAILLSDILRVNTEITKAPLSASMIKRYDEHHQDLTLLKALVRQQLPEKYKEIFFDQSKNGYAGYIDGGASQEEFYKFIKPILEKMDGTEELLVKLNREDLLRKQRTFDNGSIPHQIHLGELHAILRRQEDFYPFLKDNREKIEKILTFRIPYYVGPLARGNSRFAWMTRKSEETITPWNFEEVVDKGASAQSFIERMTNFDKNLPNEKVLPKHSLLYEYFTVYNELTKVKYVTEGMRKPAFLSGEQKKAIVDLLFKTNRKVTVKQLKEDYFKKIECFDSVEISGVEDRFNASLGTYHDLLKIIKDKDFLDNEENEDILEDIVLTLTLFEDREMIEERLKTYAHLFDDKVMKQLKRRRYTGWGRLSRKLINGIRDKQSGKTILDFLKSDGFANRNFMQLIHDDSLTFKEDIQKAQVSGQGDSLHEHIANLAGSPAIKKGILQTVKVVDELVKVMGRHKPENIVIEMARENQTTQKGQKNSRERMKRIEEGIKELGSQILKEHPVENTQLQNEKLYLYYLQNGRDMYVDQELDINRLSDYDVDHIVPQSFLKDDSIDNKVLTRSDKARGKSDNVPSEEVVKKMKNYWRQLLNAKLITQRKFDNLTKAERGGLSELDKAGFIKRQLVETRQITKHVAQILDSRMNTKYDENDKLIREVKVITLKSKLVSDFRKDFQFYKVREINNYHHAHDAYLNAVVGTALIKKYPKLESEFVYGDYKVYDVRKMIAKSEQEIGKATAKYFFYSNIMNFFKTEITLANGEIRKRPLIETNGETGEIVWDKGRDFATVRKVLSMPQVNIVKKTEVQTGGFSKESILPKRNSDKLIARKKDWDPKKYGGFDSPTVAYSVLVVAKVEKGKSKKLKSVKELLGITIMERSSFEKNPIDFLEAKGYKEVKKDLIIKLPKYSLFELENGRKRMLASAGELQKGNELALPSKYVNFLYLASHYEKLKGSPEDNEQKQLFVEQHKHYLDEIIEQISEFSKRVILADANLDKVLSAYNKHRDKPIREQAENIIHLFTLTNLGAPAAFKYFDTTIDRKRYTSTKEVLDATLIHQSITGLYETRIDLSQLGGDGGGGGGGGGGGGTLNLEDEYRLYETSAEPEVSPGSTWLSDFPQAWAETGGMGLAVRQAPLIIPLKATSTPVSIKQYPMSQEAKLGIKPHIQRLLDQGILVPCQSPWNTPLLPVKKPGTNDYRPVQDLREVNKRVEDIHPTVPNPYNLLSGLPPSHRWYTVLDLKDAFFCLRLHPTSQPLFAFEWRDPGMGISGQLTWTRLPQGFKNSPTLFNEALHRDLADFRIQHPDLILLQYVDDILLAATSELDCQQGTRALLLTLGNLGYRASAKKAQLCQKQVKYLGYLLKEGQRWLTEARKETVMGQPTPKTPRQLREFLGKAGFCRLFIPGFAEMAAPLYPLTKPGTLFNWGPDQQKAYQEIKQALLTAPALGLPDLTKPFELFVDEKQGYAKGVLTQKLGPWRRPVAYLSKKLDPVAAGWPPCLRMVAAIAVLRKDAGKLTMGQPLVILAPHAVEALVKQPPDRWLSNARMTHYQAMLLDTDRVQFGPVVALNPATLLPLPEEGAPHDCLEILAETHGTRPDLTDQPIPDADHTWYTDGSSFLQEGQRKAGAAVTTETEVIWARALPAGTSAQRAELIALTQALKMAEGKRLNVYTDSRYAFATAHIHGEIYRRRGWLTSEGREIKNKSEILALLKALFLPKRLSIIHCLGHQKGDSAEARGNRLADQAAREAAIKTPPDTSTLLAGKRTADGSEFEKRTADGSEFESPKKKAKVE

SEQ ID NO: 6281 - protein, 2093 aa, synthetic construct
MPAAKRVKLDGGDKKYSIGLDIGTNSVGWAVITDEYKVPSKKFKVLGNTDRHSIKKNLIGALLFDSGETAEATRLKRTARRRYTRRKNRICYLQEIFSNEMAKVDDSFFHRLEESFLVEEDKKHERHPIFGNIVDEVAYHEKYPTIYHLRKKLVDSTDKADLRLIYLALAHMIKFRGHFLIEGDLNPDNSDVDKLFIQLVQTYNQLFEENPINASGVDAKAILSARLSKSRRLENLIAQLPGEKKNGLFGNLIALSLGLTPNFKSNFDLAEDAKLQLSKDTYDDDLDNLLAQIGDQYADLFLAAKNLSDAILLSDILRVNTEITKAPLSASMIKRYDEHHQDLTLLKALVRQQLPEKYKEIFFDQSKNGYAGYIDGGASQEEFYKFIKPILEKMDGTEELLVKLNREDLLRKQRTFDNGSIPHQIHLGELHAILRRQEDFYPFLKDNREKIEKILTFRIPYYVGPLARGNSRFAWMTRKSEETITPWNFEEVVDKGASAQSFIERMTNFDKNLPNEKVLPKHSLLYEYFTVYNELTKVKYVTEGMRKPAFLSGEQKKAIVDLLFKTNRKVTVKQLKEDYFKKIECFDSVEISGVEDRFNASLGTYHDLLKIIKDKDFLDNEENEDILEDIVLTLTLFEDREMIEERLKTYAHLFDDKVMKQLKRRRYTGWGRLSRKLINGIRDKQSGKTILDFLKSDGFANRNFMQLIHDDSLTFKEDIQKAQVSGQGDSLHEHIANLAGSPAIKKGILQTVKVVDELVKVMGRHKPENIVIEMARENQTTQKGQKNSRERMKRIEEGIKELGSQILKEHPVENTQLQNEKLYLYYLQNGRDMYVDQELDINRLSDYDVDHIVPQSFLKDDSIDNKVLTRSDKARGKSDNVPSEEVVKKMKNYWRQLLNAKLITQRKFDNLTKAERGGLSELDKAGFIKRQLVETRQITKHVAQILDSRMNTKYDENDKLIREVKVITLKSKLVSDFRKDFQFYKVREINNYHHAHDAYLNAVVGTALIKKYPKLESEFVYGDYKVYDVRKMIAKSEQEIGKATAKYFFYSNIMNFFKTEITLANGEIRKRPLIETNGETGEIVWDKGRDFATVRKVLSMPQVNIVKKTEVQTGGFSKESILPKRNSDKLIARKKDWDPKKYGGFDSPTVAYSVLVVAKVEKGKSKKLKSVKELLGITIMERSSFEKNPIDFLEAKGYKEVKKDLIIKLPKYSLFELENGRKRMLASAGELQKGNELALPSKYVNFLYLASHYEKLKGSPEDNEQKQLFVEQHKHYLDEIIEQISEFSKRVILADANLDKVLSAYNKHRDKPIREQAENIIHLFTLTNLGAPAAFKYFDTTIDRKRYTSTKEVLDATLIHQSITGLYETRIDLSQLGGDGGGGGGGGGGGGLGIEDEYRLHETSTEPDVSLGSTWLSDFPQAWAETGGMGLAVRQAPLIIPLKATSTPVSIQQYPMSHEARLGIKPHIQRLLDQGILVPCQSPWNTPLLPVKKPGTNDYRPVQDLREVNKRVEDIHPTVPNPYNLLSGLPPSHQWYTVLDLKDAFFCLRLHPTSQPLFAFEWRDPGMGISGQLTWTRLPQGFKNSPTLFNEALHRDLADFRIQHPDLILLQYVDDILLAATSELDCQQGTRALLQTLGDLGYRASAKKAQICQKQVKYLGYLLREGQRWLTEARKETVMGQPVPKTPRQLREFLGKAGFCRLFIPGFAEMAAPLYPLTKPGTLFSWGPDQQKAYQEIKQALLTAPALGLPDLTKPFELFVDEKQGYAKGVLTQKLGPWRRPVAYLSKKLDPVAAGWPPCLRMVAAIAVLTKDAGKLTMGQPLVILAPHAVEALVKQPPDRWLSNARMTHYQAMLLDTDRVQFGPVVALNPATLLPLPEEGAPHDCLEILAETHGTRPDLTDQPIPDADHTWYTDGSSFLQEGQRKAGAAVTTETEVIWAGALPAGTSAQRAELIALTQALKMAEGKRLNVYTDSRYAFATAHIHGEIYRRRGWLTSEGREIKNKSEILALLKALFLPKRLSIIHCLGHQKGDSAEARGNRLADQAAREAAIKTPPDTSTLLIAGKRTADGSEFEKRTADGSEFESPKKKAKVE

SEQ ID NO: 6282 - protein, 2093 aa, synthetic construct; identical to SEQ ID NO: 6281

SEQ ID NO: 6283 - protein, 2093 aa, synthetic construct
MPAAKRVKLDGGDKKYSIGLDIGTNSVGWAVITDEYKVPSKKFKVLGNTDRHSIKKNLIGALLFDSGETAEATRLKRTARRRYTRRKNRICYLQEIFSNEMAKVDDSFFHRLEESFLVEEDKKHERHPIFGNIVDEVAYHEKYPTIYHLRKKLVDSTDKADLRLIYLALAHMIKFRGHFLIEGDLNPDNSDVDKLFIQLVQTYNQLFEENPINASGVDAKAILSARLSKSRRLENLIAQLPGEKKNGLFGNLIALSLGLTPNFKSNFDLAEDAKLQLSKDTYDDDLDNLLAQIGDQYADLFLAAKNLSDAILLSDILRVNTEITKAPLSASMIKRYDEHHQDLTLLKALVRQQLPEKYKEIFFDQSKNGYAGYIDGGASQEEFYKFIKPILEKMDGTEELLVKLNREDLLRKQRTFDNGSIPHQIHLGELHAILRRQEDFYPFLKDNREKIEKILTFRIPYYVGPLARGNSRFAWMTRKSEETITPWNFEEVVDKGASAQSFIERMTNFDKNLPNEKVLPKHSLLYEYFTVYNELTKVKYVTEGMRKPAFLSGEQKKAIVDLLFKTNRKVTVKQLKEDYFKKIECFDSVEISGVEDRFNASLGTYHDLLKIIKDKDFLDNEENEDILEDIVLTLTLFEDREMIEERLKTYAHLFDDKVMKQLKRRRYTGWGRLSRKLINGIRDKQSGKTILDFLKSDGFANRNFMQLIHDDSLTFKEDIQKAQVSGQGDSLHEHIANLAGSPAIKKGILQTVKVVDELVKVMGRHKPENIVIEMARENQTTQKGQKNSRERMKRIEEGIKELGSQILKEHPVENTQLQNEKLYLYYLQNGRDMYVDQELDINRLSDYDVDHIVPQSFLKDDSIDNKVLTRSDKARGKSDNVPSEEVVKKMKNYWRQLLNAKLITQRKFDNLTKAERGGLSELDKAGFIKRQLVETRQITKHVAQILDSRMNTKYDENDKLIREVKVITLKSKLVSDFRKDFQFYKVREINNYHHAHDAYLNAVVGTALIKKYPKLESEFVYGDYKVYDVRKMIAKSEQEIGKATAKYFFYSNIMNFFKTEITLANGEIRKRPLIETNGETGEIVWDKGRDFATVRKVLSMPQVNIVKKTEVQTGGFSKESILPKRNSDKLIARKKDWDPKKYGGFDSPTVAYSVLVVAKVEKGKSKKLKSVKELLGITIMERSSFEKNPIDFLEAKGYKEVKKDLIIKLPKYSLFELENGRKRMLASAGELQKGNELALPSKYVNFLYLASHYEKLKGSPEDNEQKQLFVEQHKHYLDEIIEQISEFSKRVILADANLDKVLSAYNKHRDKPIREQAENIIHLFTLTNLGAPAAFKYFDTTIDRKRYTSTKEVLDATLIHQSITGLYETRIDLSQLGGDGGGGGGGGGGGGTLNIEDEYRLHETSKEPDVSLGSTWLSDFPQAWAETGGMGLAVRQAPLIIPLKATSTPVSIKQYPMSQEARLGIKPHIQRLLDQGILVPCQSPWNTPLLPVKKPGTNDYRPVQDLREVNKRVEDIHPTVPNPYNLLSGLPPSHQWYTVLDLKDAFFCLRLHPTSQPLFAFEWRDPEMGISGQLTWTRLPQGFKNSPTLFNEALHRDLAGFRIQHPDLILLQYVDDLLLAATSELDCQQGTRALLQTLGDLGYRASAKKAQICQKQVKYLGYLLKEGQRWLTEARKETVMGQPIPKTPRQLREFLGTAGFCRLWIPGFAEMAAPLYPLTKPGTLFNWGPDQQKAFQEIKQALLTAPALGLPDLTKPFELFVDEKQGYAKGVLTQKLGPWRRPVAYLSKKLDPVAAGWPPCLRMVAAIAVLTKDAGKLTMGQPLVILAPHAVEALVKQPPDRWLSNARMTHYQALLLDTDRVQFGPVVALNPATLLPLPEEGLQHDCLDILAEAHGTRSDLMDQPLPDADHTWYTDGSSFLQEGQRKAGAAVTTETEVIWARALPAGTSAQRAELIALTQALKMAEGKKLNVYTDSRYAFATAHIHGEIYRRRGWLTSEGKEIKNKDEILALLKALFLPKRLSIIHCPGHQKGNSAEARGNRMADQAAREVATRETPETSTLLAGKRTADGSEFEKRTADGSEFESPKKKAKVE

SEQ ID NO: 6284 - protein, 2093 aa, synthetic construct
MPAAKRVKLDGGDKKYSIGLDIGTNSVGWAVITDEYKVPSKKFKVLGNTDRHSIKKNLIGALLFDSGETAEATRLKRTARRRYTRRKNRICYLQEIFSNEMAKVDDSFFHRLEESFLVEEDKKHERHPIFGNIVDEVAYHEKYPTIYHLRKKLVDSTDKADLRLIYLALAHMIKFRGHFLIEGDLNPDNSDVDKLFIQLVQTYNQLFEENPINASGVDAKAILSARLSKSRRLENLIAQLPGEKKNGLFGNLIALSLGLTPNFKSNFDLAEDAKLQLSKDTYDDDLDNLLAQIGDQYADLFLAAKNLSDAILLSDILRVNTEITKAPLSASMIKRYDEHHQDLTLLKALVRQQLPEKYKEIFFDQSKNGYAGYIDGGASQEEFYKFIKPILEKMDGTEELLVKLNREDLLRKQRTFDNGSIPHQIHLGELHAILRRQEDFYPFLKDNREKIEKILTFRIPYYVGPLARGNSRFAWMTRKSEETITPWNFEEVVDKGASAQSFIERMTNFDKNLPNEKVLPKHSLLYEYFTVYNELTKVKYVTEGMRKPAFLSGEQKKAIVDLLFKTNRKVTVKQLKEDYFKKIECFDSVEISGVEDRFNASLGTYHDLLKIIKDKDFLDNEENEDILEDIVLTLTLFEDREMIEERLKTYAHLFDDKVMKQLKRRRYTGWGRLSRKLINGIRDKQSGKTILDFLKSDGFANRNFMQLIHDDSLTFKEDIQKAQVSGQGDSLHEHIANLAGSPAIKKGILQTVKVVDELVKVMGRHKPENIVIEMARENQTTQKGQKNSRERMKRIEEGIKELGSQILKEHPVENTQLQNEKLYLYYLQNGRDMYVDQELDINRLSDYDVDHIVPQSFLKDDSIDNKVLTRSDKARGKSDNVPSEEVVKKMKNYWRQLLNAKLITQRKFDNLTKAERGGLSELDKAGFIKRQLVETRQITKHVAQILDSRMNTKYDENDKLIREVKVITLKSKLVSDFRKDFQFYKVREINNYHHAHDAYLNAVVGTALIKKYPKLESEFVYGDYKVYDVRKMIAKSEQEIGKATAKYFFYSNIMNFFKTEITLANGEIRKRPLIETNGETGEIVWDKGRDFATVRKVLSMPQVNIVKKTEVQTGGFSKESILPKRNSDKLIARKKDWDPKKYGGFDSPTVAYSVLVVAKVEKGKSKKLKSVKELLGITIMERSSFEKNPIDFLEAKGYKEVKKDLIIKLPKYSLFELENGRKRMLASAGELQKGNELALPSKYVNFLYLASHYEKLKGSPEDNEQKQLFVEQHKHYLDEIIEQISEFSKRVILADANLDKVLSAYNKHRDKPIREQAENIIHLFTLTNLGAPAAFKYFDTTIDRKRYTSTKEVLDATLIHQSITGLYETRIDLSQLGGDGGGGGGGGGGGGTLNIEDEHRLHETSKEPDVSLGSTWLSDFPQAWAETGGMGLAVRQAPLIIPLKATSTPVSIKQYPMSQEARLGIKPHIQRLLDQGILVPCQSPWNTPLLPVKKPGTNDYRPVQDLREVNKRVEDIHPTVPNPYNLLSGLPPSHQWYTVLDLKDAFFCLRLHPTSQPLFAFEWRDPEMGISGQLTWTRLPQGFKNSPTLFNEALHRDLADFRIQHPDLILLQYVDDLLLAATSELDCQQGTRALLQTLGNLGYRASAKKAQICQKQVKYLGYLLKEGQRWLTEARKETVMGQPTPKTPRQLREFLGKAGFCRLFIPGFAEMAAPLYPLTKPGTLFNWGPDQQKAYQEIKQALLTAPALGLPDLTKPFELFVDEKQGYAKGVLTQKLGPWRRPVAYLSKKLDPVAAGWPPCLRMVAAIAVLTKDAGKLTMGQPLVILAPHAVEALVKQPPDRWLSNARMTHYQALLLDTDRVQFGPVVALNPATLLPLPEEGLQHNCLDILAEAHGTRPDLTDQPLPDADHTWYTDGSSLLQEGQRKAGAAVTTETEVIWAKALPAGTSAQRAELIALTQALKMAEGKKLNVYTDSRYAFATAHIHGEIYRRRGWLTSEGKEIKNKDEILALLKALFLPKRLSIIHCPGHQKGHSAEARGNRMADQAARKAAITETPDTSTLLAGKRTADGSEFEKRTADGSEFESPKKKAKVE

SEQ ID NO: 6285 - protein, 2093 aa, synthetic construct; identical to SEQ ID NO: 6284

SEQ ID NO: 6286 - protein, 2091 aa, synthetic construct
MPAAKRVKLDGGDKKYSIGLDIGTNSVGWAVITDEYKVPSKKFKVLGNTDRHSIKKNLIGALLFDSGETAEATRLKRTARRRYTRRKNRICYLQEIFSNEMAKVDDSFFHRLEESFLVEEDKKHERHPIFGNIVDEVAYHEKYPTIYHLRKKLVDSTDKADLRLIYLALAHMIKFRGHFLIEGDLNPDNSDVDKLFIQLVQTYNQLFEENPINASGVDAKAILSARLSKSRRLENLIAQLPGEKKNGLFGNLIALSLGLTPNFKSNFDLAEDAKLQLSKDTYDDDLDNLLAQIGDQYADLFLAAKNLSDAILLSDILRVNTEITKAPLSASMIKRYDEHHQDLTLLKALVRQQLPEKYKEIFFDQSKNGYAGYIDGGASQEEFYKFIKPILEKMDGTEELLVKLNREDLLRKQRTFDNGSIPHQIHLGELHAILRRQEDFYPFLKDNREKIEKILTFRIPYYVGPLARGNSRFAWMTRKSEETITPWNFEEVVDKGASAQSFIERMTNFDKNLPNEKVLPKHSLLYEYFTVYNELTKVKYVTEGMRKPAFLSGEQKKAIVDLLFKTNRKVTVKQLKEDYFKKIECFDSVEISGVEDRFNASLGTYHDLLKIIKDKDFLDNEENEDILEDIVLTLTLFEDREMIEERLKTYAHLFDDKVMKQLKRRRYTGWGRLSRKLINGIRDKQSGKTILDFLKSDGFANRNFMQLIHDDSLTFKEDIQKAQVSGQGDSLHEHIANLAGSPAIKKGILQTVKVVDELVKVMGRHKPENIVIEMARENQTTQKGQKNSRERMKRIEEGIKELGSQILKEHPVENTQLQNEKLYLYYLQNGRDMYVDQELDINRLSDYDVDHIVPQSFLKDDSIDNKVLTRSDKARGKSDNVPSEEVVKKMKNYWRQLLNAKLITQRKFDNLTKAERGGLSELDKAGFIKRQLVETRQITKHVAQILDSRMNTKYDENDKLIREVKVITLKSKLVSDFRKDFQFYKVREINNYHHAHDAYLNAVVGTALIKKYPKLESEFVYGDYKVYDVRKMIAKSEQEIGKATAKYFFYSNIMNFFKTEITLANGEIRKRPLIETNGETGEIVWDKGRDFATVRKVLSMPQVNIVKKTEVQTGGFSKESILPKRNSDKLIARKKDWDPKKYGGFDSPTVAYSVLVVAKVEKGKSKKLKSVKELLGITIMERSSFEKNPIDFLEAKGYKEVKKDLIIKLPKYSLFELENGRKRMLASAGELQKGNELALPSKYVNFLYLASHYEKLKGSPEDNEQKQLFVEQHKHYLDEIIEQISEFSKRVILADANLDKVLSAYNKHRDKPIREQAENIIHLFTLTNLGAPAAFKYFDTTIDRKRYTSTKEVLDATLIHQSITGLYETRIDLSQLGGDGGGGGGGGGGGGVLNLEEEYRLHEKPVPSSIDPSWLQLFPTVWAERAGMGLANQVPPVVVELRSGASPVAVRQYPMSKEAREGIRPHIQRFLDLGVLVPCQSPWNTPLLPVKKPGTNDYRPVQDLREINKRVQDIHPTVPNPYNLLSSLPPSHTWYSVLDLKDAFFCLKLHPNSQPLFAFEWRDPEKGNTGQLTWTRLPQGFKNSPTLFNEALHRDLAPFRALNPQVVLLQYVDDLLVAAPTYRDCKEGTQKLLQELSKLGYRVSAKKAQLCQKEVTYLGYLLKEGKRWLTPARKATVMKIPPPTTPRQVREFLGKAGFCRLFIPGFASLAAPLYPLTKPSIPFIWTEEHQKAFDRIKEALLSAPALALPDLTKPFTLYVDERAGVARGVLTQTLGPWRRPVAYLSKKLDPVASGWPTCLKAVAAVALLLKDADKLTLGQNVTVIASHSLESIVRQPPDRWMTNARMTHYQSLLLNERVSFAPPAVLNPATLLPVESEATPVHRCSEILAEETGTRRDLKDQPLPGVPAWYTDGSSFIAEGKRRAGAAIVDGKRTVWASSLPEGTSAQKAELVALTQALRLAEGKDINIYTDSRYAFATAHIHGAIYKQRGWLTSAGKDIKNKEEILALLEAIHLPKRVAIIHCPGHQKGNDPVATGNRRADEAAKQAALSTRVLAETTKPAGKRTADGSEFEKRTADGSEFESPKKKAKVE

SEQ ID NO: 6287 - protein, 2093 aa, synthetic construct
MPAAKRVKLDGGDKKYSIGLDIGTNSVGWAVITDEYKVPSKKFKVLGNTDRHSIKKNLIGALLFDSGETAEATRLKRTARRRYTRRKNRICYLQEIFSNEMAKVDDSFFHRLEESFLVEEDKKHERHPIFGNIVDEVAYHEKYPTIYHLRKKLVDSTDKADLRLIYLALAHMIKFRGHFLIEGDLNPDNSDVDKLFIQLVQTYNQLFEENPINASGVDAKAILSARLSKSRRLENLIAQLPGEKKNGLFGNLIALSLGLTPNFKSNFDLAEDAKLQLSKDTYDDDLDNLLAQIGDQYADLFLAAKNLSDAILLSDILRVNTEITKAPLSASMIKRYDEHHQDLTLLKALVRQQLPEKYKEIFFDQSKNGYAGYIDGGASQEEFYKFIKPILEKMDGTEELLVKLNREDLLRKQRTFDNGSIPHQIHLGELHAILRRQEDFYPFLKDNREKIEKILTFRIPYYVGPLARGNSRFAWMTRKSEETITPWNFEEVVDKGASAQSFIERMTNFDKNLPNEKVLPKHSLLYEYFTVYNELTKVKYVTEGMRKPAFLSGEQKKAIVDLLFKTNRKVTVKQLKEDYFKKIECFDSVEISGVEDRFNASLGTYHDLLKIIKDKDFLDNEENEDILEDIVLTLTLFEDREMIEERLKTYAHLFDDKVMKQLKRRRYTGWGRLSRKLINGIRDKQSGKTILDFLKSDGFANRNFMQLIHDDSLTFKEDIQKAQVSGQGDSLHEHIANLAGSPAIKKGILQTVKVVDELVKVMGRHKPENIVIEMARENQTTQKGQKNSRERMKRIEEGIKELGSQILKEHPVENTQLQNEKLYLYYLQNGRDMYVDQELDINRLSDYDVDHIVPQSFLKDDSIDNKVLTRSDKARGKSDNVPSEEVVKKMKNYWRQLLNAKLITQRKFDNLTKAERGGLSELDKAGFIKRQLVETRQITKHVAQILDSRMNTKYDENDKLIREVKVITLKSKLVSDFRKDFQFYKVREINNYHHAHDAYLNAVVGTALIKKYPKLESEFVYGDYKVYDVRKMIAKSEQEIGKATAKYFFYSNIMNFFKTEITLANGEIRKRPLIETNGETGEIVWDKGRDFATVRKVLSMPQVNIVKKTEVQTGGFSKESILPKRNSDKLIARKKDWDPKKYGGFDSPTVAYSVLVVAKVEKGKSKKLKSVKELLGITIMERSSFEKNPIDFLEAKGYKEVKKDLIIKLPKYSLFELENGRKRMLASAGELQKGNELALPSKYVNFLYLASHYEKLKGSPEDNEQKQLFVEQHKHYLDEIIEQISEFSKRVILADANLDKVLSAYNKHRDKPIREQAENIIHLFTLTNLGAPAAFKYFDTTIDRKRYTSTKEVLDATLIHQSITGLYETRIDLSQLGGDGGGGGGGGGGGGTLNIEDEYRLHETSKEPDVPLGSTWLSDFPQAWAETGGMGLAVRQAPLIIPLKATSTPVSIKQYPMSQEARLGIKPHIQRLLDQGILVPCQSPWNTPLLPVKKPGTNDYRPVQDLREVNKRVEDIHPTVPNPYNLLSGLPPSHQWYTVLDLKDAFFCLRLHPTSQPLFAFEWRDPEMGISGQLTWTRLPQGFKNSPTLFNEALHRDLADFRIQHPDLILLQYVDDLLLAATSEQDCQRGTRALLQTLGNLGYRASAKKAQICQKQVKYLGYLLKEGQRWLTEARKETVMGQPTPKTPRQLREFLGTAGFCRLWIPGFAEMAAPLYPLTKPGTLFNWGPDQQKAYQEIKQALLTAPALGLPDLTKPFELFVDEKQGYAKGVLTQKLGPWRRPVAYLSKKLDPVAAGWPPCLRMVAAIAVLTKDAGKLTMGQPLVILAPHAVEALVKQPPDRWLSNARMTHYQAMLLDTDRVQFGPVVALNPATLLPLPEKEAPHDCLEILAETHGTRPDLTDQPIPDADYTWYTDGSSFLQEGQRRAGAAVTTETEVIWARALPAGTSAQRAELIALTQALKMAEGKKLNVYTDSRYAFATAHVHGEIYRRRGWLTSEGREIKNKNEILALLKALFLPKRLSIIHCPGHQKGNSAEARGNRMADQAAREAAMKAVLETSTLLAGKRTADGSEFEKRTADGSEFESPKKKAKVE

SEQ ID NO: 6288 - protein, 2093 aa, synthetic construct
MPAAKRVKLDGGDKKYSIGLDIGTNSVGWAVITDEYKVPSKKFKVLGNTDRHSIKKNLIGALLFDSGETAEATRLKRTARRRYTRRKNRICYLQEIFSNEMAKVDDSFFHRLEESFLVEEDKKHERHPIFGNIVDEVAYHEKYPTIYHLRKKLVDSTDKADLRLIYLALAHMIKFRGHFLIEGDLNPDNSDVDKLFIQLVQTYNQLFEENPINASGVDAKAILSARLSKSRRLENLIAQLPGEKKNGLFGNLIALSLGLTPNFKSNFDLAEDAKLQLSKDTYDDDLDNLLAQIGDQYADLFLAAKNLSDAILLSDILRVNTEITKAPLSASMIKRYDEHHQDLTLLKALVRQQLPEKYKEIFFDQSKNGYAGYIDGGASQEEFYKFIKPILEKMDGTEELLVKLNREDLLRKQRTFDNGSIPHQIHLGELHAILRRQEDFYPFLKDNREKIEKILTFRIPYYVGPLARGNSRFAWMTRKSEETITPWNFEEVVDKGASAQSFIERMTNFDKNLPNEKVLPKHSLLYEYFTVYNELTKVKYVTEGMRKPAFLSGEQKKAIVDLLFKTNRKVTVKQLKEDYFKKIECFDSVEISGVEDRFNASLGTYHDLLKIIKDKDFLDNEENEDILEDIVLTLTLFEDREMIEERLKTYAHLFDDKVMKQLKRRRYTGWGRLSRKLINGIRDKQSGKTILDFLKSDGFANRNFMQLIHDDSLTFKEDIQKAQVSGQGDSLHEHIANLAGSPAIKKGILQTVKVVDELVKVMGRHKPENIVIEMARENQTTQKGQKNSRERMKRIEEGIKELGSQILKEHPVENTQLQNEKLYLYYLQNGRDMYVDQELDINRLSDYDVDHIVPQSFLKDDSIDNKVLTRSDKARGKSDNVPSEEVVKKMKNYWRQLLNAKLITQRKFDNLTKAERGGLSELDKAGFIKRQLVETRQITKHVAQILDSRMNTKYDENDKLIREVKVITLKSKLVSDFRKDFQFYKVREINNYHHAHDAYLNAVVGTALIKKYPKLESEFVYGDYKVYDVRKMIAKSEQEIGKATAKYFFYSNIMNFFKTEITLANGEIRKRPLIETNGETGEIVWDKGRDFATVRKVLSMPQVNIVKKTEVQTGGFSKESILPKRNSDKLIARKKDWDPKKYGGFDSPTVAYSVLVVAKVEKGKSKKLKSVKELLGITIMERSSFEKNPIDFLEAKGYKEVKKDLIIKLPKYSLFELENGRKRMLASAGELQKGNELALPSKYVNFLYLASHYEKLKGSPEDNEQKQLFVEQHKHYLDEIIEQISEFSKRVILADANLDKVLSAYNKHRDKPIREQAENIIHLFTLTNLGAPAAFKYFDTTIDRKRYTSTKEVLDATLIHQSITGLYETRIDLSQLGGDGGGGGGGGGGGGTLNIEDEYRLHETSKEPDVPLGSTWLSDFPQAWAETGGMGLAVRQAPLIIPLKATSTPVSIKQYPMSQEARLGIKPHIQRLLDQGILVPCQSPWNTPLLPVKKPGTNDYRPVQDLREVNKRVEDIHPTVPNPYNLLSGLPPSHQWYTVLDLKDAFFCLRLHPTSQPLFAFEWRDPEMGISGQLTWTRLPQGFKNSPTLFNEALHRDLADFRIQHPDLILLQYVDDLLLAATSEQDCQRGTRALLQTLGNLGYRASAKKAQICQKQVKYLGYLLKEGQRWLTEARKETVMGQPTPKTPRQLREFLGKAGFCRLFIPGFAEMAAPLYPLTKPGTLFNWGPDQQKAYQEIKQALLTAPALGLPDLTKPFELFVDEKQGYAKGVLTQKLGPWRRPVAYLSKKLDPVAAGWPPCLRMVAAIAVLTKDAGKLTMGQPLVILAPHAVEALVKQPPDRWLSNARMTHYQAMLLDTDRVQFGPVVALNPATLLPLPEKEAPHDCLEILAETHGTRPDLTDQPIPDADYTWYTDGSSFLQEGQRRAGAAVTTETEVIWARALPAGTSAQRAELIALTQALKMAEGKKLNVYTDSRYAFATAHVHGEIYRRRGWLTSEGREIKNKNEILALLKALFLPKRLSIIHCPGHQKGNSAEARGNRMADQAAREAAMKAVLETSTLLAGKRTADGSEFEKRTADGSEFESPKKKAKVE

SEQ ID NO: 6289 - protein, 2090 aa, synthetic construct
MPAAKRVKLDGGDKKYSIGLDIGTNSVGWAVITDEYKVPSKKFKVLGNTDRHSIKKNLIGALLFDSGETAEATRLKRTARRRYTRRKNRICYLQEIFSNEMAKVDDSFFHRLEESFLVEEDKKHERHPIFGNIVDEVAYHEKYPTIYHLRKKLVDSTDKADLRLIYLALAHMIKFRGHFLIEGDLNPDNSDVDKLFIQLVQTYNQLFEENPINASGVDAKAILSARLSKSRRLENLIAQLPGEKKNGLFGNLIALSLGLTPNFKSNFDLAEDAKLQLSKDTYDDDLDNLLAQIGDQYADLFLAAKNLSDAILLSDILRVNTEITKAPLSASMIKRYDEHHQDLTLLKALVRQQLPEKYKEIFFDQSKNGYAGYIDGGASQEEFYKFIKPILEKMDGTEELLVKLNREDLLRKQRTFDNGSIPHQIHLGELHAILRRQEDFYPFLKDNREKIEKILTFRIPYYVGPLARGNSRFAWMTRKSEETITPWNFEEVVDKGASAQSFIERMTNFDKNLPNEKVLPKHSLLYEYFTVYNELTKVKYVTEGMRKPAFLSGEQKKAIVDLLFKTNRKVTVKQLKEDYFKKIECFDSVEISGVEDRFNASLGTYHDLLKIIKDKDFLDNEENEDILEDIVLTLTLFEDREMIEERLKTYAHLFDDKVMKQLKRRRYTGWGRLSRKLINGIRDKQSGKTILDFLKSDGFANRNFMQLIHDDSLTFKEDIQKAQVSGQGDSLHEHIANLAGSPAIKKGILQTVKVVDELVKVMGRHKPENIVIEMARENQTTQKGQKNSRERMKRIEEGIKELGSQILKEHPVENTQLQNEKLYLYYLQNGRDMYVDQELDINRLSDYDVDHIVPQSFLKDDSIDNKVLTRSDKARGKSDNVPSEEVVKKMKNYWRQLLNAKLITQRKFDNLTKAERGGLSELDKAGFIKRQLVETRQITKHVAQILDSRMNTKYDENDKLIREVKVITLKSKLVSDFRKDFQFYKVREINNYHHAHDAYLNAVVGTALIKKYPKLESEFVYGDYKVYDVRKMIAKSEQEIGKATAKYFFYSNIMNFFKTEITLANGEIRKRPLIETNGETGEIVWDKGRDFATVRKVLSMPQVNIVKKTEVQTGGFSKESILPKRNSDKLIARKKDWDPKKYGGFDSPTVAYSVLVVAKVEKGKSKKLKSVKELLGITIMERSSFEKNPIDFLEAKGYKEVKKDLIIKLPKYSLFELENGRKRMLASAGELQKGNELALPSKYVNFLYLASHYEKLKGSPEDNEQKQLFVEQHKHYLDEIIEQISEFSKRVILADANLDKVLSAYNKHRDKPIREQAENIIHLFTLTNLGAPAAFKYFDTTIDRKRYTSTKEVLDATLIHQSITGLYETRIDLSQLGGDGGGSSGGTAPLEEEYRLFLEAPIQNVTLLEQWKREIPKVWAEINPPGLASTQAPIHVQLLSTALPVRVRQYPITLEAKRSLRETIRKFRAAGILRPVHSPWNTPLLPVRKSGTSEYRMVQDLREVNKRVETIHPTVPNPYTLLSLLPPDRIWYSVLDLKDAFFCIPLAPESQLIFAFEWADAEEGESGQLTWTRLPQGFKNSPTLFNEALNRDLQGFRLDHPSVSLLQYVDDLLIAADTQAACLSATRDLLMTLAELGYRVSGKKAQLCQEEVTYLGFKIHKGSRSLSNSRTQAILQIPVPKTKRQVREFLGTIGYCRLWIPGFAELAQPLYAATRPGNDPLVWGEKEEEAFQSLKLALTQPPALALPSLDKPFQLFVEETSGAAKGVLTQALGPWKRPVAYLSKRLDPVAAGWPRCLRAIAAAALLTREASKLTFGQDIEITSSHNLESLLRSPPDKWLTNARITQYQVLLLDPPRVRFKQTAALNPATLLPETDDTLPIHHCLDTLDSLTSTRPDLTDQPLAQAEATLFTDGSSYIRDGKRYAGAAVVTLDSVIWAEPLPIGTSAQKAELIALTKALEWSKDKSVNIYTDSRYAFATLHVHGMIYRERGWLTAGGKAIKNAPEILALLTAVWLPKRVAVMHCKGHQKDDAPTSTGNRRADEVAREVAIRPLSTQATISAGKRTADGSEFEKRTADGSEFESPKKKAKVE

SEQ ID NO: 6290 - protein, 2210 aa, synthetic construct
MPAAKRVKLDGGDKKYSIGLDIGTNSVGWAVITDEYKVPSKKFKVLGNTDRHSIKKNLIGALLFDSGETAEATRLKRTARRRYTRRKNRICYLQEIFSNEMAKVDDSFFHRLEESFLVEEDKKHERHPIFGNIVDEVAYHEKYPTIYHLRKKLVDSTDKADLRLIYLALAHMIKFRGHFLIEGDLNPDNSDVDKLFIQLVQTYNQLFEENPINASGVDAKAILSARLSKSRRLENLIAQLPGEKKNGLFGNLIALSLGLTPNFKSNFDLAEDAKLQLSKDTYDDDLDNLLAQIGDQYADLFLAAKNLSDAILLSDILRVNTEITKAPLSASMIKRYDEHHQDLTLLKALVRQQLPEKYKEIFFDQSKNGYAGYIDGGASQEEFYKFIKPILEKMDGTEELLVKLNREDLLRKQRTFDNGSIPHQIHLGELHAILRRQEDFYPFLKDNREKIEKILTFRIPYYVGPLARGNSRFAWMTRKSEETITPWNFEEVVDKGASAQSFIERMTNFDKNLPNEKVLPKHSLLYEYFTVYNELTKVKYVTEGMRKPAFLSGEQKKAIVDLLFKTNRKVTVKQLKEDYFKKIECFDSVEISGVEDRFNASLGTYHDLLKIIKDKDFLDNEENEDILEDIVLTLTLFEDREMIEERLKTYAHLFDDKVMKQLKRRRYTGWGRLSRKLINGIRDKQSGKTILDFLKSDGFANRNFMQLIHDDSLTFKEDIQKAQVSGQGDSLHEHIANLAGSPAIKKGILQTVKVVDELVKVMGRHKPENIVIEMARENQTTQKGQKNSRERMKRIEEGIKELGSQILKEHPVENTQLQNEKLYLYYLQNGRDMYVDQELDINRLSDYDVDHIVPQSFLKDDSIDNKVLTRSDKARGKSDNVPSEEVVKKMKNYWRQLLNAKLITQRKFDNLTKAERGGLSELDKAGFIKRQLVETRQITKHVAQILDSRMNTKYDENDKLIREVKVITLKSKLVSDFRKDFQFYKVREINNYHHAHDAYLNAVVGTALIKKYPKLESEFVYGDYKVYDVRKMIAKSEQEIGKATAKYFFYSNIMNFFKTEITLANGEIRKRPLIETNGETGEIVWDKGRDFATVRKVLSMPQVNIVKKTEVQTGGFSKESILPKRNSDKLIARKKDWDPKKYGGFDSPTVAYSVLVVAKVEKGKSKKLKSVKELLGITIMERSSFEKNPIDFLEAKGYKEVKKDLIIKLPKYSLFELENGRKRMLASAGELQKGNELALPSKYVNFLYLASHYEKLKGSPEDNEQKQLFVEQHKHYLDEIIEQISEFSKRVILADANLDKVLSAYNKHRDKPIREQAENIIHLFTLTNLGAPAAFKYFDTTIDRKRYTSTKEVLDATLIHQSITGLYETRIDLSQLGGDGGGSSGGTLGDQGSRGSDPLPEPRVTLTVEGIPTEFLVNTGAEHSVLTKPMGKMGSKRTVVAGATGSKVYPWTTKRLLKIGQKQVTHSFLVIPECPAPLLGRDLLTKLKAQIQFSTEGPQVTWEDRPAMCLVLNLEEEYRLHEKPVPPSIDPSWLQLFPMVWAEKAGMGLANQVPPVVVELKSDASPVAVRQYPMSKEAREGIRPHIQRFLDLGILVPCQSPWNTPLLPVKKPGTNDYRPVQDLREVNKRVQDIHPTVPNPYNLLSSLPPSHTWYSVLDLKDAFFCLKLHPNSQPLFAFEWRDPEKGNTGQLTWTRLPQGFKNSPTLFNEALHRDLASFRALNPQVVMLQYVDDLLVAAPTYRDCKEGTRRLLQELSKLGYRVSAKKAQLCREEVTYLGYLLKGGKRWLTPARKATVMKIPTPTTPRQVREFLGTAGFCRLWIPGFASLAAPLYPLTRPKVPFTWTEAHQEAFGRIKEALLSAPALALPDLTKPFALYVDEKEGVARGVLTQTLGPWRRPVAYLSKKLDPVASGWPTCLKAIAAVALLLKDADKLTLGQNVLVIAPHNLESIVRQPPDRWMTNARMTHYQSLLLNERVSFAPPAILNPATLLPVESDDTPIHICSEILAEETGTRPDLRDQPLPGVPAWYTDGSSFIMDGRRQAGAAIVDNKRTVWASNLPEGTSAQKAELIALTQALRLAEGKSINIYTDSRYAFATAHVHGAIYKQRGWLTSAGKDIKNKEEILALLEAIHLPKRVAIIHCPGHQRGTDPVATGNRKADEAAKQAAQSTRILTETTKNAGKRTADGSEFEKRTADGSEFESPKKKAKVE

SEQ ID NO: 6291 - protein, 2088 aa, synthetic construct
MPAAKRVKLDGGDKKYSIGLDIGTNSVGWAVITDEYKVPSKKFKVLGNTDRHSIKKNLIGALLFDSGETAEATRLKRTARRRYTRRKNRICYLQEIFSNEMAKVDDSFFHRLEESFLVEEDKKHERHPIFGNIVDEVAYHEKYPTIYHLRKKLVDSTDKADLRLIYLALAHMIKFRGHFLIEGDLNPDNSDVDKLFIQLVQTYNQLFEENPINASGVDAKAILSARLSKSRRLENLIAQLPGEKKNGLFGNLIALSLGLTPNFKSNFDLAEDAKLQLSKDTYDDDLDNLLAQIGDQYADLFLAAKNLSDAILLSDILRVNTEITKAPLSASMIKRYDEHHQDLTLLKALVRQQLPEKYKEIFFDQSKNGYAGYIDGGASQEEFYKFIKPILEKMDGTEELLVKLNREDLLRKQRTFDNGSIPHQIHLGELHAILRRQEDFYPFLKDNREKIEKILTFRIPYYVGPLARGNSRFAWMTRKSEETITPWNFEEVVDKGASAQSFIERMTNFDKNLPNEKVLPKHSLLYEYFTVYNELTKVKYVTEGMRKPAFLSGEQKKAIVDLLFKTNRKVTVKQLKEDYFKKIECFDSVEISGVEDRFNASLGTYHDLLKIIKDKDFLDNEENEDILEDIVLTLTLFEDREMIEERLKTYAHLFDDKVMKQLKRRRYTGWGRLSRKLINGIRDKQSGKTILDFLKSDGFANRNFMQLIHDDSLTFKEDIQKAQVSGQGDSLHEHIANLAGSPAIKKGILQTVKVVDELVKVMGRHKPENIVIEMARENQTTQKGQKNSRERMKRIEEGIKELGSQILKEHPVENTQLQNEKLYLYYLQNGRDMYVDQELDINRLSDYDVDHIVPQSFLKDDSIDNKVLTRSDKARGKSDNVPSEEVVKKMKNYWRQLLNAKLITQRKFDNLTKAERGGLSELDKAGFIKRQLVETRQITKHVAQILDSRMNTKYDENDKLIREVKVITLKSKLVSDFRKDFQFYKVREINNYHHAHDAYLNAVVGTALIKKYPKLESEFVYGDYKVYDVRKMIAKSEQEIGKATAKYFFYSNIMNFFKTEITLANGEIRKRPLIETNGETGEIVWDKGRDFATVRKVLSMPQVNIVKKTEVQTGGFSKESILPKRNSDKLIARKKDWDPKKYGGFDSPTVAYSVLVVAKVEKGKSKKLKSVKELLGITIMERSSFEKNPIDFLEAKGYKEVKKDLIIKLPKYSLFELENGRKRMLASAGELQKGNELALPSKYVNFLYLASHYEKLKGSPEDNEQKQLFVEQHKHYLDEIIEQISEFSKRVILADANLDKVLSAYNKHRDKPIREQAENIIHLFTLTNLGAPAAFKYFDTTIDRKRYTSTKEVLDATLIHQSITGLYETRIDLSQLGGDGGGSSGGTLNLEDEYRLYETSAEPEVSPGSTWLSDFPQAWAETGGMGLAVRQAPLIIPLKATSTPVSIKQYPMSQEAKLGIKPHIQRLLDQGILVPCQSPWNTPLLPVKKPGTNDYRPVQDLREVNKRVEDIHPTVPNPYNLLSGLPPSHRWYTVLDLKDAFFCLRLHPTSQPLFAFEWRDPGMGISGQLTWTRLPQGFKNSPTLFNEALHRDLADFRIQHPDLILLQYVDDILLAATSELDCQQGTRALLLTLGNLGYRASAKKAQLCQKQVKYLGYLLKEGQRWLTEARKETVMGQPTPKTPRQLREFLGKAGFCRLFIPGFAEMAAPLYPLTKPGTLFNWGPDQQKAYQEIKQALLTAPALGLPDLTKPFELFVDEKQGYAKGVLTQKLGPWRRPVAYLSKKLDPVAAGWPPCLRMVAAIAVLRKDAGKLTMGQPLVILAPHAVEALVKQPPDRWLSNARMTHYQAMLLDTDRVQFGPVVALNPATLLPLPEEGAPHDCLEILAETHGTRPDLTDQPIPDADHTWYTDGSSFLQEGQRKAGAAVTTETEVIWARALPAGTSAQRAELIALTQALKMAEGKRLNVYTDSRYAFATAHIHGEIYRRRGWLTSEGREIKNKSEILALLKALFLPKRLSIIHCLGHQKGDSAEARGNRLADQAAREAAIKTPPDTSTLLAGKRTADGSEFEKRTADGSEFESPKKKAKVE

SEQ ID NO: 6292 - protein, 2088 aa, synthetic construct
MPAAKRVKLDGGDKKYSIGLDIGTNSVGWAVITDEYKVPSKKFKVLGNTDRHSIKKNLIGALLFDSGETAEATRLKRTARRRYTRRKNRICYLQEIFSNEMAKVDDSFFHRLEESFLVEEDKKHERHPIFGNIVDEVAYHEKYPTIYHLRKKLVDSTDKADLRLIYLALAHMIKFRGHFLIEGDLNPDNSDVDKLFIQLVQTYNQLFEENPINASGVDAKAILSARLSKSRRLENLIAQLPGEKKNGLFGNLIALSLGLTPNFKSNFDLAEDAKLQLSKDTYDDDLDNLLAQIGDQYADLFLAAKNLSDAILLSDILRVNTEITKAPLSASMIKRYDEHHQDLTLLKALVRQQLPEKYKEIFFDQSKNGYAGYIDGGASQEEFYKFIKPILEKMDGTEELLVKLNREDLLRKQRTFDNGSIPHQIHLGELHAILRRQEDFYPFLKDNREKIEKILTFRIPYYVGPLARGNSRFAWMTRKSEETITPWNFEEVVDKGASAQSFIERMTNFDKNLPNEKVLPKHSLLYEYFTVYNELTKVKYVTEGMRKPAFLSGEQKKAIVDLLFKTNRKVTVKQLKEDYFKKIECFDSVEISGVEDRFNASLGTYHDLLKIIKDKDFLDNEENEDILEDIVLTLTLFEDREMIEERLKTYAHLFDDKVMKQLKRRRYTGWGRLSRKLINGIRDKQSGKTILDFLKSDGFANRNFMQLIHDDSLTFKEDIQKAQVSGQGDSLHEHIANLAGSPAIKKGILQTVKVVDELVKVMGRHKPENIVIEMARENQTTQKGQKNSRERMKRIEEGIKELGSQILKEHPVENTQLQNEKLYLYYLQNGRDMYVDQELDINRLSDYDVDHIVPQSFLKDDSIDNKVLTRSDKARGKSDNVPSEEVVKKMKNYWRQLLNAKLITQRKFDNLTKAERGGLSELDKAGFIKRQLVETRQITKHVAQILDSRMNTKYDENDKLIREVKVITLKSKLVSDFRKDFQFYKVREINNYHHAHDAYLNAVVGTALIKKYPKLESEFVYGDYKVYDVRKMIAKSEQEIGKATAKYFFYSNIMNFFKTEITLANGEIRKRPLIETNGETGEIVWDKGRDFATVRKVLSMPQVNIVKKTEVQTGGFSKESILPKRNSDKLIARKKDWDPKKYGGFDSPTVAYSVLVVAKVEKGKSKKLKSVKELLGITIMERSSFEKNPIDFLEAKGYKEVKKDLIIKLPKYSLFELENGRKRMLASAGELQKGNELALPSKYVNFLYLASHYEKLKGSPEDNEQKQLFVEQHKHYLDEIIEQISEFSKRVILADANLDKVLSAYNKHRDKPIREQAENIIHLFTLTNLGAPAAFKYFDTTIDRKRYTSTKEVLDATLIHQSITGLYETRIDLSQLGGDGGGSSGGTLGIEDEYRLHETSTEPDVSLGSTWLSDFPQAWAETGGMGLAVRQAPLIIPLKATSTPVSIQQYPMSHEARLGIKPHIQRLLDQGILVPCQSPWNTPLLPVKKPGTNDYRPVQDLREVNKRVEDIHPTVPNPYNLLSGLPPSHQWYTVLDLKDAFFCLRLHPTSQPLFAFEWRDPGMGISGQLTWTRLPQGFKNSPTLFNEALHRDLADFRIQHPDLILLQYVDDILLAATSELDCQQGTRALLQTLGDLGYRASAKKAQICQKQVKYLGYLLREGQRWLTEARKETVMGQPVPKTPRQLREFLGTAGFCRLWIPGFAEMAAPLYPLTKPGTLFSWGPDQQKAYQEIKQALLTAPALGLPDLTKPFELFVDEKQGYAKGVLTQKLGPWRRPVAYLSKKLDPVAAGWPPCLRMVAAIAVLTKDAGKLTMGQPLVILAPHAVEALVKQPPDRWLSNARMTHYQAMLLDTDRVQFGPVVALNPATLLPLPEEGAPHDCLEILAETHGTRPDLTDQPIPDADHTWYTDGSSFLQEGQRKAGAAVTTETEVIWAGALPAGTSAQRAELIALTQALKMAEGKRLNVYTDSRYAFATAHIHGEIYRRRGWLTSEGREIKNKSEILALLKALFLPKRLSIIHCLGHQKGDSAEARGNRLADQAAREAAIKTPPDTSTLLAGKRTADGSEFEKRTADGSEFESPKKKAKVE

SEQ ID NO: 6293 - protein, 2080 aa, synthetic construct
MPAAKRVKLDGGDKKYSIGLDIGTNSVGWAVITDEYKVPSKKFKVLGNTDRHSIKKNLIGALLFDSGETAEATRLKRTARRRYTRRKNRICYLQEIFSNEMAKVDDSFFHRLEESFLVEEDKKHERHPIFGNIVDEVAYHEKYPTIYHLRKKLVDSTDKADLRLIYLALAHMIKFRGHFLIEGDLNPDNSDVDKLFIQLVQTYNQLFEENPINASGVDAKAILSARLSKSRRLENLIAQLPGEKKNGLFGNLIALSLGLTPNFKSNFDLAEDAKLQLSKDTYDDDLDNLLAQIGDQYADLFLAAKNLSDAILLSDILRVNTEITKAPLSASMIKRYDEHHQDLTLLKALVRQQLPEKYKEIFFDQSKNGYAGYIDGGASQEEFYKFIKPILEKMDGTEELLVKLNREDLLRKQRTFDNGSIPHQIHLGELHAILRRQEDFYPFLKDNREKIEKILTFRIPYYVGPLARGNSRFAWMTRKSEETITPWNFEEVVDKGASAQSFIERMTNFDKNLPNEKVLPKHSLLYEYFTVYNELTKVKYVTEGMRKPAFLSGEQKKAIVDLLFKTNRKVTVKQLKEDYFKKIECFDSVEISGVEDRFNASLGTYHDLLKIIKDKDFLDNEENEDILEDIVLTLTLFEDREMIEERLKTYAHLFDDKVMKQLKRRRYTGWGRLSRKLINGIRDKQSGKTILDFLKSDGFANRNFMQLIHDDSLTFKEDIQKAQVSGQGDSLHEHIANLAGSPAIKKGILQTVKVVDELVKVMGRHKPENIVIEMARENQTTQKGQKNSRERMKRIEEGIKELGSQILKEHPVENTQLQNEKLYLYYLQNGRDMYVDQELDINRLSDYDVDHIVPQSFLKDDSIDNKVLTRSDKARGKSDNVPSEEVVKKMKNYWRQLLNAKLITQRKFDNLTKAERGGLSELDKAGFIKRQLVETRQITKHVAQILDSRMNTKYDENDKLIREVKVITLKSKLVSDFRKDFQFYKVREINNYHHAHDAYLNAVVGTALIKKYPKLESEFVYGDYKVYDVRKMIAKSEQEIGKATAKYFFYSNIMNFFKTEITLANGEIRKRPLIETNGETGEIVWDKGRDFATVRKVLSMPQVNIVKKTEVQTGGFSKESILPKRNSDKLIARKKDWDPKKYGGFDSPTVAYSVLVVAKVEKGKSKKLKSVKELLGITIMERSSFEKNPIDFLEAKGYKEVKKDLIIKLPKYSLFELENGRKRMLASAGELQKGNELALPSKYVNFLYLASHYEKLKGSPEDNEQKQLFVEQHKHYLDEIIEQISEFSKRVILADANLDKVLSAYNKHRDKPIREQAENIIHLFTLTNLGAPAAFKYFDTTIDRKRYTSTKEVLDATLIHQSITGLYETRIDLSQLGGDGGGSSGGLDDEYRLYSPLVKPDQNIQFWLEQFPQAWAETAGMGLAKQVPPQVIQLKASATPVSVRQYPLSKEAQEGIRPHVQRLIQQGILVPVQSPWNTPLLPVRKPGTNDYRPVQDLREVNKRVQDIHPTVPNPYNLLCALPPQRSWYTVLDLKDAFFCLRLHPTSQPLFAFEWRDPGTGRTGQLTWTRLPQGFKNSPTIFNEALHRDLANFRIQHPQVTLLQYVDDLLLAGATKQDCLEGTKALLLELSDLGYRASAKKAQICRREVTYLGYSLRDGQRWLTEARKKTVVQIPAPTTAKQVREFLGKAGFCRLFIPGFATLAAPLYPLTKPKGEFSWAPEHQKAFDAIKKALLSAPALALPDVTKPFTLYVDERKGVARGVLTQTLGPWRRPVAYLSKKLDPVASGWPVCLKAIAAVAILVKDADKLTLGQNITVIAPHALENIVRQPPDRWMTNARMTHYQSLLLTERVTFAPPAALNPATLLPEETDEPVTHDCHQLLIEETGVRKDLTDIPLTGEVLTWFTDGSSYVVEGKRMAGAAVVDGTRTIWASSLPEGTSAQKAELMALTQALRLAEGKSINIYTDSRYAFATAHVHGAIYKQRGWLTSAGREIKNKEEILSLLEALHLPKRLAIIHCPGHQKAKDPISRGNQMADRVAKQAAQGVNLLPAGKRTADGSEFEKRTADGSEFESPKKKAKVE

SEQ ID NO: 6294 - protein, 2080 aa, synthetic construct; identical to SEQ ID NO: 6293

SEQ ID NO: 6295 - protein, 2168 aa, synthetic construct
MPAAKRVKLDGGDKKYSIGLDIGTNSVGWAVITDEYKVPSKKFKVLGNTDRHSIKKNLIGALLFDSGETAEATRLKRTARRRYTRRKNRICYLQEIFSNEMAKVDDSFFHRLEESFLVEEDKKHERHPIFGNIVDEVAYHEKYPTIYHLRKKLVDSTDKADLRLIYLALAHMIKFRGHFLIEGDLNPDNSDVDKLFIQLVQTYNQLFEENPINASGVDAKAILSARLSKSRRLENLIAQLPGEKKNGLFGNLIALSLGLTPNFKSNFDLAEDAKLQLSKDTYDDDLDNLLAQIGDQYADLFLAAKNLSDAILLSDILRVNTEITKAPLSASMIKRYDEHHQDLTLLKALVRQQLPEKYKEIFFDQSKNGYAGYIDGGASQEEFYKFIKPILEKMDGTEELLVKLNREDLLRKQRTFDNGSIPHQIHLGELHAILRRQEDFYPFLKDNREKIEKILTFRIPYYVGPLARGNSRFAWMTRKSEETITPWNFEEVVDKGASAQSFIERMTNFDKNLPNEKVLPKHSLLYEYFTVYNELTKVKYVTEGMRKPAFLSGEQKKAIVDLLFKTNRKVTVKQLKEDYFKKIECFDSVEISGVEDRFNASLGTYHDLLKIIKDKDFLDNEENEDILEDIVLTLTLFEDREMIEERLKTYAHLFDDKVMKQLKRRRYTGWGRLSRKLINGIRDKQSGKTILDFLKSDGFANRNFMQLIHDDSLTFKEDIQKAQVSGQGDSLHEHIANLAGSPAIKKGILQTVKVVDELVKVMGRHKPENIVIEMARENQTTQKGQKNSRERMKRIEEGIKELGSQILKEHPVENTQLQNEKLYLYYLQNGRDMYVDQELDINRLSDYDVDHIVPQSFLKDDSIDNKVLTRSDKARGKSDNVPSEEVVKKMKNYWRQLLNAKLITQRKFDNLTKAERGGLSELDKAGFIKRQLVETRQITKHVAQILDSRMNTKYDENDKLIREVKVITLKSKLVSDFRKDFQFYKVREINNYHHAHDAYLNAVVGTALIKKYPKLESEFVYGDYKVYDVRKMIAKSEQEIGKATAKYFFYSNIMNFFKTEITLANGEIRKRPLIETNGETGEIVWDKGRDFATVRKVLSMPQVNIVKKTEVQTGGFSKESILPKRNSDKLIARKKDWDPKKYGGFDSPTVAYSVLVVAKVEKGKSKKLKSVKELLGITIMERSSFEKNPIDFLEAKGYKEVKKDLIIKLPKYSLFELENGRKRMLASAGELQKGNELALPSKYVNFLYLASHYEKLKGSPEDNEQKQLFVEQHKHYLDEIIEQISEFSKRVILADANLDKVLSAYNKHRDKPIREQAENIIHLFTLTNLGAPAAFKYFDTTIDRKRYTSTKEVLDATLIHQSITGLYETRIDLSQLGGDGGGSSGGMDPLQLLQPLEAEIKGTKLKAHWNSGATITCVPQAFLEEEVPIKNIWIKTIHGEKEQPVYYLTFKIQGRKVEAEVISSPYDYILVSPSDIPWLMKKPLQLTTLVPLQEYEERLLKQTMLTGSYKEKLQSLFLKYDALWQHWENQVGHRRIKPHHIATGTVNPRPQKQYPINPKAKASIQTVINDLLKQGVLIQQNSIMNTPVYPVPKPDGKWRMVLDYREVNKTIPLIAAQNQHSAGILSSIFRGKYKTTLDLSNGFWAHSITPESYWLTAFTWLGQQYCWTRLPQGFLNSPALFNADVVDLLKEVPNVQVYVDDIYISHDDPREHLEQLEKVFSLLLNAGYVVSLKKSEIAQHEVEFLGFNITKEGRGLTETFKQKLLNITPPRDLKQLQSILGLLNFARNFIPNFSELVKPLYNIIATAPGKYITWTTDNSQQLQNIISMLNSAENLEERNPEVRLIMKVNTSPSAGYIRFYNEFAKRPIMYLNYVYTKAEVKFTNTEKLLTTIHKGLIKALDLGMGQEILVYSPIVSMTKIQKTPLPERKALPIRWITWMSYLEDPRIQFHYDKTLPELQQVPTVTDDIIAKIKHPSEFSMVFYTDGSAIKHPNVNKSHNAGMGIAQVQFKPEFTVINTWSIPLGDHTAQLAEVAAVEFACKKALKIDGPVLIVTDSFYVAESVNKELPYWQSNGFFNNKKKPLKHVSKWKSIADCIQLKPDIIIIHEKGHQPTASTFHTEGNNLADKLATQGSYVVNAGKRTADGSEFEKRTADGSEFESPKKKAKVE

SEQ ID NO: 6296 - protein, 2079 aa, synthetic construct
MPAAKRVKLDGGDKKYSIGLDIGTNSVGWAVITDEYKVPSKKFKVLGNTDRHSIKKNLIGALLFDSGETAEATRLKRTARRRYTRRKNRICYLQEIFSNEMAKVDDSFFHRLEESFLVEEDKKHERHPIFGNIVDEVAYHEKYPTIYHLRKKLVDSTDKADLRLIYLALAHMIKFRGHFLIEGDLNPDNSDVDKLFIQLVQTYNQLFEENPINASGVDAKAILSARLSKSRRLENLIAQLPGEKKNGLFGNLIALSLGLTPNFKSNFDLAEDAKLQLSKDTYDDDLDNLLAQIGDQYADLFLAAKNLSDAILLSDILRVNTEITKAPLSASMIKRYDEHHQDLTLLKALVRQQLPEKYKEIFFDQSKNGYAGYIDGGASQEEFYKFIKPILEKMDGTEELLVKLNREDLLRKQRTFDNGSIPHQIHLGELHAILRRQEDFYPFLKDNREKIEKILTFRIPYYVGPLARGNSRFAWMTRKSEETITPWNFEEVVDKGASAQSFIERMTNFDKNLPNEKVLPKHSLLYEYFTVYNELTKVKYVTEGMRKPAFLSGEQKKAIVDLLFKTNRKVTVKQLKEDYFKKIECFDSVEISGVEDRFNASLGTYHDLLKIIKDKDFLDNEENEDILEDIVLTLTLFEDREMIEERLKTYAHLFDDKVMKQLKRRRYTGWGRLSRKLINGIRDKQSGKTILDFLKSDGFANRNFMQLIHDDSLTFKEDIQKAQVSGQGDSLHEHIANLAGSPAIKKGILQTVKVVDELVKVMGRHKPENIVIEMARENQTTQKGQKNSRERMKRIEEGIKELGSQILKEHPVENTQLQNEKLYLYYLQNGRDMYVDQELDINRLSDYDVDHIVPQSFLKDDSIDNKVLTRSDKARGKSDNVPSEEVVKKMKNYWRQLLNAKLITQRKFDNLTKAERGGLSELDKAGFIKRQLVETRQITKHVAQILDSRMNTKYDENDKLIREVKVITLKSKLVSDFRKDFQFYKVREINNYHHAHDAYLNAVVGTALIKKYPKLESEFVYGDYKVYDVRKMIAKSEQEIGKATAKYFFYSNIMNFFKTEITLANGEIRKRPLIETNGETGEIVWDKGRDFATVRKVLSMPQVNIVKKTEVQTGGFSKESILPKRNSDKLIARKKDWDPKKYGGFDSPTVAYSVLVVAKVEKGKSKKLKSVKELLGITIMERSSFEKNPIDFLEAKGYKEVKKDLIIKLPKYSLFELENGRKRMLASAGELQKGNELALPSKYVNFLYLASHYEKLKGSPEDNEQKQLFVEQHKHYLDEIIEQISEFSKRVILADANLDKVLSAYNKHRDKPIREQAENIIHLFTLTNLGAPAAFKYFDTTIDRKRYTSTKEVLDATLIHQSITGLYETRIDLSQLGGDGGGSSGGVPWLTQQPLQLTILVPLQEYQDRILNKTALPEEQKQQLKALFTKYDNLWQHWENQVGHRKIRPHNIATGDYPPRPQKQYPINPKAKPSIQIVIDDLLKQGVLTPQNSTMNTPVYPVPKPDGRWRMVLDYREVNKTIPLTAAQNQHSAGILATIVRQKYKTTLDLANGFWAHPITPDSYWLTAFTWQGKQYCWTRLPQGFLNSPALFTADAVDLLKEVPNVQVYVDDIYLSHDNPHEHIQQLEKVFQILLQAGYVVSLKKSEIGQRTVEFLGFNITKEGRGLTDTFKTKLLNVTPPKDLKQLQSILGLLNFARNFIPNFAELVQTLYNLIASSKGKYIEWTEDNTKQLNKVIEALNTASNLEERLPDQRLVIKVNTSPSAGYVRYYNESGKKPIMYLNYVFSKAELKFSMLEKLLTTMHKALIKAMDLAMGQEILVYSPIVSMTKIQKTPLPERKALPIRWITWMTYLEDPRIQFHYDKTLPELKHIPDVYTSSIPPLKHPSQYEGVFCTDGSAIKSPDPTKSNNAGMGIVHAIYNPEYKILNQWSIPLGHHTAQMAEIAAVEFACKKALKVPGPVLVITDSFYVAESANKELPYWKSNGFVNNKKEPLKHISKWKSIAECLSIKPDITIQHEKGHQPINTSIHTEGNALADKLATQGSYVVNAGKRTADGSEFEKRTADGSEFESPKKKAKVE

SEQ ID NO: 6297 - protein, 2088 aa, synthetic construct
MPAAKRVKLDGGDKKYSIGLDIGTNSVGWAVITDEYKVPSKKFKVLGNTDRHSIKKNLIGALLFDSGETAEATRLKRTARRRYTRRKNRICYLQEIFSNEMAKVDDSFFHRLEESFLVEEDKKHERHPIFGNIVDEVAYHEKYPTIYHLRKKLVDSTDKADLRLIYLALAHMIKFRGHFLIEGDLNPDNSDVDKLFIQLVQTYNQLFEENPINASGVDAKAILSARLSKSRRLENLIAQLPGEKKNGLFGNLIALSLGLTPNFKSNFDLAEDAKLQLSKDTYDDDLDNLLAQIGDQYADLFLAAKNLSDAILLSDILRVNTEITKAPLSASMIKRYDEHHQDLTLLKALVRQQLPEKYKEIFFDQSKNGYAGYIDGGASQEEFYKFIKPILEKMDGTEELLVKLNREDLLRKQRTFDNGSIPHQIHLGELHAILRRQEDFYPFLKDNREKIEKILTFRIPYYVGPLARGNSRFAWMTRKSEETITPWNFEEVVDKGASAQSFIERMTNFDKNLPNEKVLPKHSLLYEYFTVYNELTKVKYVTEGMRKPAFLSGEQKKAIVDLLFKTNRKVTVKQLKEDYFKKIECFDSVEISGVEDRFNASLGTYHDLLKIIKDKDFLDNEENEDILEDIVLTLTLFEDREMIEERLKTYAHLFDDKVMKQLKRRRYTGWGRLSRKLINGIRDKQSGKTILDFLKSDGFANRNFMQLIHDDSLTFKEDIQKAQVSGQGDSLHEHIANLAGSPAIKKGILQTVKVVDELVKVMGRHKPENIVIEMARENQTTQKGQKNSRERMKRIEEGIKELGSQILKEHPVENTQLQNEKLYLYYLQNGRDMYVDQELDINRLSDYDVDHIVPQSFLKDDSIDNKVLTRSDKARGKSDNVPSEEVVKKMKNYWRQLLNAKLITQRKFDNLTKAERGGLSELDKAGFIKRQLVETRQITKHVAQILDSRMNTKYDENDKLIREVKVITLKSKLVSDFRKDFQFYKVREINNYHHAHDAYLNAVVGTALIKKYPKLESEFVYGDYKVYDVRKMIAKSEQEIGKATAKYFFYSNIMNFFKTEITLANGEIRKRPLIETNGETGEIVWDKGRDFATVRKVLSMPQVNIVKKTEVQTGGFSKESILPKRNSDKLIARKKDWDPKKYGGFDSPTVAYSVLVVAKVEKGKSKKLKSVKELLGITIMERSSFEKNPIDFLEAKGYKEVKKDLIIKLPKYSLFELENGRKRMLASAGELQKGNELALPSKYVNFLYLASHYEKLKGSPEDNEQKQLFVEQHKHYLDEIIEQISEFSKRVILADANLDKVLSAYNKHRDKPIREQAENIIHLFTLTNLGAPAAFKYFDTTIDRKRYTSTKEVLDATLIHQSITGLYETRIDLSQLGGDGGGSSGGTLNIEDEYRLHETSKEPDVPLGSTWLSDFPQAWAETGGMGLAVRQAPLIIPLKATSTPVSIKQYPMSQEARLGIKPHIQRLLDQGILVPCQSPWNTPLLPVKKPGTNDYRPVQDLREVNKRVEDIHPTVPNPYNLLSGLPPSHQWYTVLDLKDAFFCLRLHPTSQPLFAFEWRDPEMGISGQLTWTRLPQGFKNSPTLFNEALHRDLADFRIQHPDLILLQYVDDLLLAATSEQDCQRGTRALLQTLGNLGYRASAKKAQICQKQVKYLGYLLKEGQRWLTEARKETVMGQPTPKTPRQLREFLGTAGFCRLWIPGFAEMAAPLYPLTKPGTLFNWGPDQQKAYQEIKQALLTAPALGLPDLTKPFELFVDEKQGYAKGVLTQKLGPWRRPVAYLSKKLDPVAAGWPPCLRMVAAIAVLTKDAGKLTMGQPLVILAPHAVEALVKQPPDRWLSNARMTHYQAMLLDTDRVQFGPVVALNPATLLPLPEKEAPHDCLEILAETHGTRPDLTDQPIPDADYTWYTDGSSFLQEGQRRAGAAVTTETEVIWARALPAGTSAQRAELIALTQALKMAEGKKLNVYTDSRYAFATAHVHGEIYRRRGWLTSEGREIKNKNEILALLKALFLPKRLSIIHCPGHQKGNSAEARGNRMADQAAREAAMKAVLETSTLLAGKRTADGSEFEKRTADGSEFESPKKKAKVE

SEQ ID NO: 6298 - protein, 2089 aa, synthetic construct
MPAAKRVKLDGGDKKYSIGLDIGTNSVGWAVITDEYKVPSKKFKVLGNTDRHSIKKNLIGALLFDSGETAEATRLKRTARRRYTRRKNRICYLQEIFSNEMAKVDDSFFHRLEESFLVEEDKKHERHPIFGNIVDEVAYHEKYPTIYHLRKKLVDSTDKADLRLIYLALAHMIKFRGHFLIEGDLNPDNSDVDKLFIQLVQTYNQLFEENPINASGVDAKAILSARLSKSRRLENLIAQLPGEKKNGLFGNLIALSLGLTPNFKSNFDLAEDAKLQLSKDTYDDDLDNLLAQIGDQYADLFLAAKNLSDAILLSDILRVNTEITKAPLSASMIKRYDEHHQDLTLLKALVRQQLPEKYKEIFFDQSKNGYAGYIDGGASQEEFYKFIKPILEKMDGTEELLVKLNREDLLRKQRTFDNGSIPHQIHLGELHAILRRQEDFYPFLKDNREKIEKILTFRIPYYVGPLARGNSRFAWMTRKSEETITPWNFEEVVDKGASAQSFIERMTNFDKNLPNEKVLPKHSLLYEYFTVYNELTKVKYVTEGMRKPAFLSGEQKKAIVDLLFKTNRKVTVKQLKEDYFKKIECFDSVEISGVEDRFNASLGTYHDLLKIIKDKDFLDNEENEDILEDIVLTLTLFEDREMIEERLKTYAHLFDDKVMKQLKRRRYTGWGRLSRKLINGIRDKQSGKTILDFLKSDGFANRNFMQLIHDDSLTFKEDIQKAQVSGQGDSLHEHIANLAGSPAIKKGILQTVKVVDELVKVMGRHKPENIVIEMARENQTTQKGQKNSRERMKRIEEGIKELGSQILKEHPVENTQLQNEKLYLYYLQNGRDMYVDQELDINRLSDYDVDHIVPQSFLKDDSIDNKVLTRSDKARGKSDNVPSEEVVKKMKNYWRQLLNAKLITQRKFDNLTKAERGGLSELDKAGFIKRQLVETRQITKHVAQILDSRMNTKYDENDKLIREVKVITLKSKLVSDFRKDFQFYKVREINNYHHAHDAYLNAVVGTALIKKYPKLESEFVYGDYKVYDVRKMIAKSEQEIGKATAKYFFYSNIMNFFKTEITLANGEIRKRPLIETNGETGEIVWDKGRDFATVRKVLSMPQVNIVKKTEVQTGGFSKESILPKRNSDKLIARKKDWDPKKYGGFDSPTVAYSVLVVAKVEKGKSKKLKSVKELLGITIMERSSFEKNPIDFLEAKGYKEVKKDLIIKLPKYSLFELENGRKRMLASAGELQKGNELALPSKYVNFLYLASHYEKLKGSPEDNEQKQLFVEQHKHYLDEIIEQISEFSKRVILADANLDKVLSAYNKHRDKPIREQAENIIHLFTLTNLGAPAAFKYFDTTIDRKRYTSTKEVLDATLIHQSITGLYETRIDLSQLGGDGGGSSGSSGGVLNLEEEYRLHEKPVPSSIDPSWLQLFPTVWAERAGMGLANQVPPVVVELRSGASPVAVRQYPMSKEAREGIRPHIQKFLDLGVLVPCRSPWNTPLLPVKKPGTNDYRPVQDLREINKRVQDIHPTVPNPYNLLSSLPPSYTWYSVLDLKDAFFCLRLHPNSQPLFAFEWKDPEKGNTGQLTWTRLPQGFKNSPTLFDEALHRDLAPFRALNPQVVLLQYVDDLLVAAPTYEDCKKGTQKLLQELSKLGYRVSAKKAQLCQREVTYLGYLLKEGKRWLTPARKATVMKIPVPTTPRQVREFLGTAGFCRLWIPGFASLAAPLYPLTKESIPFIWTEEHQQAFDHIKKALLSAPALALPDLTKPFTLYIDERAGVARGVLTQTLGPWRRPVAYLSKKLDPVASGWPTCLKAVAAVALLLKDADKLTLGQNVTVIASHSLESIVRQPPDRWMTNARMTHYQSLLLNERVSFAPPAVLNPATLLPVESEATPVHRCSEILAEETGTRRDLEDQPLPGVPTWYTDGSSFITEGKRRAGAPIVDGKRTVWASSLPEGTSAQKAELVALTQALRLAEGKNINIYTDSRYAFATAHIHGAIYKQRGLLTSAGKDIKNKEEILALLEAIHLPRRVAIIHCPGHQRGSNPVATGNRRADEAAKQAALSTRVLAGTTKPAGKRTADGSEFEKRTADGSEFESPKKKAKVE

SEQ ID NO: 6299 - protein, 2213 aa, synthetic construct
MPAAKRVKLDGGDKKYSIGLDIGTNSVGWAVITDEYKVPSKKFKVLGNTDRHSIKKNLIGALLFDSGETAEATRLKRTARRRYTRRKNRICYLQEIFSNEMAKVDDSFFHRLEESFLVEEDKKHERHPIFGNIVDEVAYHEKYPTIYHLRKKLVDSTDKADLRLIYLALAHMIKFRGHFLIEGDLNPDNSDVDKLFIQLVQTYNQLFEENPINASGVDAKAILSARLSKSRRLENLIAQLPGEKKNGLFGNLIALSLGLTPNFKSNFDLAEDAKLQLSKDTYDDDLDNLLAQIGDQYADLFLAAKNLSDAILLSDILRVNTEITKAPLSASMIKRYDEHHQDLTLLKALVRQQLPEKYKEIFFDQSKNGYAGYIDGGASQEEFYKFIKPILEKMDGTEELLVKLNREDLLRKQRTFDNGSIPHQIHLGELHAILRRQEDFYPFLKDNREKIEKILTFRIPYYVGPLARGNSRFAWMTRKSEETITPWNFEEVVDKGASAQSFIERMTNFDKNLPNEKVLPKHSLLYEYFTVYNELTKVKYVTEGMRKPAFLSGEQKKAIVDLLFKTNRKVTVKQLKEDYFKKIECFDSVEISGVEDRFNASLGTYHDLLKIIKDKDFLDNEENEDILEDIVLTLTLFEDREMIEERLKTYAHLFDDKVMKQLKRRRYTGWGRLSRKLINGIRDKQSGKTILDFLKSDGFANRNFMQLIHDDSLTFKEDIQKAQVSGQGDSLHEHIANLAGSPAIKKGILQTVKVVDELVKVMGRHKPENIVIEMARENQTTQKGQKNSRERMKRIEEGIKELGSQILKEHPVENTQLQNEKLYLYYLQNGRDMYVDQELDINRLSDYDVDHIVPQSFLKDDSIDNKVLTRSDKARGKSDNVPSEEVVKKMKNYWRQLLNAKLITQRKFDNLTKAERGGLSELDKAGFIKRQLVETRQITKHVAQILDSRMNTKYDENDKLIREVKVITLKSKLVSDFRKDFQFYKVREINNYHHAHDAYLNAVVGTALIKKYPKLESEFVYGDYKVYDVRKMIAKSEQEIGKATAKYFFYSNIMNFFKTEITLANGEIRKRPLIETNGETGEIVWDKGRDFATVRKVLSMPQVNIVKKTEVQTGGFSKESILPKRNSDKLIARKKDWDPKKYGGFDSPTVAYSVLVVAKVEKGKSKKLKSVKELLGITIMERSSFEKNPIDFLEAKGYKEVKKDLIIKLPKYSLFELENGRKRMLASAGELQKGNELALPSKYVNFLYLASHYEKLKGSPEDNEQKQLFVEQHKHYLDEIIEQISEFSKRVILADANLDKVLSAYNKHRDKPIREQAENIIHLFTLTNLGAPAAFKYFDTTIDRKRYTSTKEVLDATLIHQSITGLYETRIDLSQLGGDGGGSSGSSGGTLGDQGSRGSDPLPEPRVTLTVEGIPTEFLVNTGAEHSVLTKPMGKMGSKRTVVAGATGSKVYPWTTKRLLKIGQKQVTHSFLVIPECPAPLLGRDLLTKLKAQIQFSTEGPQVTWEDRPAMCLVLNLEEEYRLHEKPVPPSIDPSWLQLFPMVWAEKAGMGLANQVPPVVVELKSDASPVAVRQYPMSKEAREGIRPHIQRFLDLGILVPCQSPWNTPLLPVKKPGTNDYRPVQDLREVNKRVQDIHPTVPNPYNLLSSLPPSHTWYSVLDLKDAFFCLKLHPNSQPLFAFEWRDPEKGNTGQLTWTRLPQGFKNSPTLFNEALHRDLASFRALNPQVVMLQYVDDLLVAAPTYRDCKEGTRRLLQELSKLGYRVSAKKAQLCREEVTYLGYLLKGGKRWLTPARKATVMKIPTPTTPRQVREFLGTAGFCRLWIPGFASLAAPLYPLTRPKVPFTWTEAHQEAFGRIKEALLSAPALALPDLTKPFALYVDEKEGVARGVLTQTLGPWRRPVAYLSKKLDPVASGWPTCLKAIAAVALLLKDADKLTLGQNVLVIAPHNLESIVRQPPDRWMTNARMTHYQSLLLNERVSFAPPAILNPATLLPVESDDTPIHICSEILAEETGTRPDLRDQPLPGVPAWYTDGSSFIMDGRRQAGAAIVDNKRTVWASNLPEGTSAQKAELIALTQALRLAEGKSINIYTDSRYAFATAHVHGAIYKQRGWLTSAGKDIKNKEEILALLEAIHLPKRVAIIHCPGHQRGTDPVATGNRKADEAAKQAAQSTRILTETTKNAGKRTADGSEFEKRTADGSEFESPKKKAKVE

SEQ ID NO: 6300 - protein, 2091 aa, synthetic construct
MPAAKRVKLDGGDKKYSIGLDIGTNSVGWAVITDEYKVPSKKFKVLGNTDRHSIKKNLIGALLFDSGETAEATRLKRTARRRYTRRKNRICYLQEIFSNEMAKVDDSFFHRLEESFLVEEDKKHERHPIFGNIVDEVAYHEKYPTIYHLRKKLVDSTDKADLRLIYLALAHMIKFRGHFLIEGDLNPDNSDVDKLFIQLVQTYNQLFEENPINASGVDAKAILSARLSKSRRLENLIAQLPGEKKNGLFGNLIALSLGLTPNFKSNFDLAEDAKLQLSKDTYDDDLDNLLAQIGDQYADLFLAAKNLSDAILLSDILRVNTEITKAPLSASMIKRYDEHHQDLTLLKALVRQQLPEKYKEIFFDQSKNGYAGYIDGGASQEEFYKFIKPILEKMDGTEELLVKLNREDLLRKQRTFDNGSIPHQIHLGELHAILRRQEDFYPFLKDNREKIEKILTFRIPYYVGPLARGNSRFAWMTRKSEETITPWNFEEVVDKGASAQSFIERMTNFDKNLPNEKVLPKHSLLYEYFTVYNELTKVKYVTEGMRKPAFLSGEQKKAIVDLLFKTNRKVTVKQLKEDYFKKIECFDSVEISGVEDRFNASLGTYHDLLKIIKDKDFLDNEENEDILEDIVLTLTLFEDREMIEERLKTYAHLFDDKVMKQLKRRRYTGWGRLSRKLINGIRDKQSGKTILDFLKSDGFANRNFMQLIHDDSLTFKEDIQKAQVSGQGDSLHEHIANLAGSPAIKKGILQTVKVVDELVKVMGRHKPENIVIEMARENQTTQKGQKNSRERMKRIEEGIKELGSQILKEHPVENTQLQNEKLYLYYLQNGRDMYVDQELDINRLSDYDVDHIVPQSFLKDDSIDNKVLTRSDKARGKSDNVPSEEVVKKMKNYWRQLLNAKLITQRKFDNLTKAERGGLSELDKAGFIKRQLVETRQITKHVAQILDSRMNTKYDENDKLIREVKVITLKSKLVSDFRKDFQFYKVREINNYHHAHDAYLNAVVGTALIKKYPKLESEFVYGDYKVYDVRKMIAKSEQEIGKATAKYFFYSNIMNFFKTEITLANGEIRKRPLIETNGETGEIVWDKGRDFATVRKVLSMPQVNIVKKTEVQTGGFSKESILPKRNSDKLIARKKDWDPKKYGGFDSPTVAYSVLVVAKVEKGKSKKLKSVKELLGITIMERSSFEKNPIDFLEAKGYKEVKKDLIIKLPKYSLFELENGRKRMLASAGELQKGNELALPSKYVNFLYLASHYEKLKGSPEDNEQKQLFVEQHKHYLDEIIEQISEFSKRVILADANLDKVLSAYNKHRDKPIREQAENIIHLFTLTNLGAPAAFKYFDTTIDRKRYTSTKEVLDATLIHQSITGLYETRIDLSQLGGDGGGSSGSSGGTLGIEDEYRLHETSTEPDVSLGSTWLSDFPQAWAETGGMGLAVRQAPLIIPLKATSTPVSIQQYPMSHEARLGIKPHIQRLLDQGILVPCQSPWNTPLLPVKKPGTNDYRPVQDLREVNKRVEDIHPTVPNPYNLLSGLPPSHQWYTVLDLKDAFFCLRLHPTSQPLFAFEWRDPGMGISGQLTWTRLPQGFKNSPTLFNEALHRDLADFRIQHPDLILLQYVDDILLAATSELDCQQGTRALLQTLGDLGYRASAKKAQICQKQVKYLGYLLREGQRWLTEARKETVMGQPVPKTPRQLREFLGTAGFCRLWIPGFAEMAAPLYPLTKPGTLFSWGPDQQKAYQEIKQALLTAPALGLPDLTKPFELFVDEKQGYAKGVLTQKLGPWRRPVAYLSKKLDPVAAGWPPCLRMVAAIAVLTKDAGKLTMGQPLVILAPHAVEALVKQPPDRWLSNARMTHYQAMLLDTDRVQFGPVVALNPATLLPLPEEGAPHDCLEILAETHGTRPDLTDQPIPDADHTWYTDGSSFLQEGQRKAGAAVTTETEVIWAGALPAGTSAQRAELIALTQALKMAEGKRLNVYTDSRYAFATAHIHGEIYRRRGWLTSEGREIKNKSEILALLKALFLPKRLSIIHCLGHQKGDSAEARGNRLADQAAREAAIKTPPDTSTLLAGKRTADGSEFEKRTADGSEFESPKKKAKVE

SEQ ID NO: 6301 - protein, 2091 aa, synthetic construct
MPAAKRVKLDGGDKKYSIGLDIGTNSVGWAVITDEYKVPSKKFKVLGNTDRHSIKKNLIGALLFDSGETAEATRLKRTARRRYTRRKNRICYLQEIFSNEMAKVDDSFFHRLEESFLVEEDKKHERHPIFGNIVDEVAYHEKYPTIYHLRKKLVDSTDKADLRLIYLALAHMIKFRGHFLIEGDLNPDNSDVDKLFIQLVQTYNQLFEENPINASGVDAKAILSARLSKSRRLENLIAQLPGEKKNGLFGNLIALSLGLTPNFKSNFDLAEDAKLQLSKDTYDDDLDNLLAQIGDQYADLFLAAKNLSDAILLSDILRVNTEITKAPLSASMIKRYDEHHQDLTLLKALVRQQLPEKYKEIFFDQSKNGYAGYIDGGASQEEFYKFIKPILEKMDGTEELLVKLNREDLLRKQRTFDNGSIPHQIHLGELHAILRRQEDFYPFLKDNREKIEKILTFRIPYYVGPLARGNSRFAWMTRKSEETITPWNFEEVVDKGASAQSFIERMTNFDKNLPNEKVLPKHSLLYEYFTVYNELTKVKYVTEGMRKPAFLSGEQKKAIVDLLFKTNRKVTVKQLKEDYFKKIECFDSVEISGVEDRFNASLGTYHDLLKIIKDKDFLDNEENEDILEDIVLTLTLFEDREMIEERLKTYAHLFDDKVMKQLKRRRYTGWGRLSRKLINGIRDKQSGKTILDFLKSDGFANRNFMQLIHDDSLTFKEDIQKAQVSGQGDSLHEHIANLAGSPAIKKGILQTVKVVDELVKVMGRHKPENIVIEMARENQTTQKGQKNSRERMKRIEEGIKELGSQILKEHPVENTQLQNEKLYLYYLQNGRDMYVDQELDINRLSDYDVDHIVPQSFLKDDSIDNKVLTRSDKARGKSDNVPSEEVVKKMKNYWRQLLNAKLITQRKFDNLTKAERGGLSELDKAGFIKRQLVETRQITKHVAQILDSRMNTKYDENDKLIREVKVITLKSKLVSDFRKDFQFYKVREINNYHHAHDAYLNAVVGTALIKKYPKLESEFVYGDYKVYDVRKMIAKSEQEIGKATAKYFFYSNIMNFFKTEITLANGEIRKRPLIETNGETGEIVWDKGRDFATVRKVLSMPQVNIVKKTEVQTGGFSKESILPKRNSDKLIARKKDWDPKKYGGFDSPTVAYSVLVVAKVEKGKSKKLKSVKELLGITIMERSSFEKNPIDFLEAKGYKEVKKDLIIKLPKYSLFELENGRKRMLASAGELQKGNELALPSKYVNFLYLASHYEKLKGSPEDNEQKQLFVEQHKHYLDEIIEQISEFSKRVILADANLDKVLSAYNKHRDKPIREQAENIIHLFTLTNLGAPAAFKYFDTTIDRKRYTSTKEVLDATLIHQSITGLYETRIDLSQLGGDGGGSSGSSGGTLNIEDEHRLHETSKEPDVSLGSTWLSDFPQAWAETGGMGLAVRQAPLIIPLKATSTPVSIKQYPMSQEARLGIKPHIQRLLDQGILVPCQSPWNTPLLPVKKPGTNDYRPVQDLREVNKRVEDIHPTVPNPYNLLSGLPPSHQWYTVLDLKDAFFCLRLHPTSQPLFAFEWRDPEMGISGQLTWTRLPQGFKNSPTLFDEALHRDLADFRIQHPDLILLQYVDDLLLAATSELDCQQGTRALLQTLGNLGYRASAKKAQICQKQVKYLGYLLKEGQRWLTEARKETVMGQPTPKTPRQLREFLGTAGFCRLWIPGFAEMAAPLYPLTKTGTLFNWGPDQQKAYQEIKQALLTAPALGLPDLTKPFELFVDEKQGYAKGVLTQKLGPWRRPVAYLSKKLDPVAAGWPPCLRMVAAIAVLTKDAGKLTMGQPLVILAPHAVEALVKQPPDRWLSNARMTHYQALLLDTDRVQFGPVVALNPATLLPLPEEGLQHNCLDILAEAHGTRPDLTDQPLPDADHTWYTDGSSLLQEGQRKAGAAVTTETEVIWAKALPAGTSAQRAELIALTQALKMAEGKKLNVYTDSRYAFATAHIHGEIYRRRGLLTSEGKEIKNKDEILALLKALFLPKRLSIIHCPGHQKGHSAEARGNRMADQAARKAAITETPDTSTLLAGKRTADGSEFEKRTADGSEFESPKKKAKVE

SEQ ID NO: 6302 - protein, 2089 aa, synthetic construct
MPAAKRVKLDGGDKKYSIGLDIGTNSVGWAVITDEYKVPSKKFKVLGNTDRHSIKKNLIGALLFDSGETAEATRLKRTARRRYTRRKNRICYLQEIFSNEMAKVDDSFFHRLEESFLVEEDKKHERHPIFGNIVDEVAYHEKYPTIYHLRKKLVDSTDKADLRLIYLALAHMIKFRGHFLIEGDLNPDNSDVDKLFIQLVQTYNQLFEENPINASGVDAKAILSARLSKSRRLENLIAQLPGEKKNGLFGNLIALSLGLTPNFKSNFDLAEDAKLQLSKDTYDDDLDNLLAQIGDQYADLFLAAKNLSDAILLSDILRVNTEITKAPLSASMIKRYDEHHQDLTLLKALVRQQLPEKYKEIFFDQSKNGYAGYIDGGASQEEFYKFIKPILEKMDGTEELLVKLNREDLLRKQRTFDNGSIPHQIHLGELHAILRRQEDFYPFLKDNREKIEKILTFRIPYYVGPLARGNSRFAWMTRKSEETITPWNFEEVVDKGASAQSFIERMTNFDKNLPNEKVLPKHSLLYEYFTVYNELTKVKYVTEGMRKPAFLSGEQKKAIVDLLFKTNRKVTVKQLKEDYFKKIECFDSVEISGVEDRFNASLGTYHDLLKIIKDKDFLDNEENEDILEDIVLTLTLFEDREMIEERLKTYAHLFDDKVMKQLKRRRYTGWGRLSRKLINGIRDKQSGKTILDFLKSDGFANRNFMQLIHDDSLTFKEDIQKAQVSGQGDSLHEHIANLAGSPAIKKGILQTVKVVDELVKVMGRHKPENIVIEMARENQTTQKGQKNSRERMKRIEEGIKELGSQILKEHPVENTQLQNEKLYLYYLQNGRDMYVDQELDINRLSDYDVDHIVPQSFLKDDSIDNKVLTRSDKARGKSDNVPSEEVVKKMKNYWRQLLNAKLITQRKFDNLTKAERGGLSELDKAGFIKRQLVETRQITKHVAQILDSRMNTKYDENDKLIREVKVITLKSKLVSDFRKDFQFYKVREINNYHHAHDAYLNAVVGTALIKKYPKLESEFVYGDYKVYDVRKMIAKSEQEIGKATAKYFFYSNIMNFFKTEITLANGEIRKRPLIETNGETGEIVWDKGRDFATVRKVLSMPQVNIVKKTEVQTGGFSKESILPKRNSDKLIARKKDWDPKKYGGFDSPTVAYSVLVVAKVEKGKSKKLKSVKELLGITIMERSSFEKNPIDFLEAKGYKEVKKDLIIKLPKYSLFELENGRKRMLASAGELQKGNELALPSKYVNFLYLASHYEKLKGSPEDNEQKQLFVEQHKHYLDEIIEQISEFSKRVILADANLDKVLSAYNKHRDKPIREQAENIIHLFTLTNLGAPAAFKYFDTTIDRKRYTSTKEVLDATLIHQSITGLYETRIDLSQLGGDGGGSSGSSGGVLNLEEEYRLHEKPVPSSIDPSWLQLFPTVWAERAGMGLANQVPPVVVELRSGASPVAVRQYPMSKEAREGIRPHIQRFLDLGVLVPCQSPWNTPLLPVKKPGTNDYRPVQDLREINKRVQDIHPTVPNPYNLLSSLPPSHTWYSVLDLKDAFFCLKLHPNSQPLFAFEWRDPEKGNTGQLTWTRLPQGFKNSPTLFNEALHRDLAPFRALNPQVVLLQYVDDLLVAAPTYRDCKEGTQKLLQELSKLGYRVSAKKAQLCQKEVTYLGYLLKEGKRWLTPARKATVMKIPPPTTPRQVREFLGTAGFCRLWIPGFASLAAPLYPLTKPSIPFIWTEEHQKAFDRIKEALLSAPALALPDLTKPFTLYVDERAGVARGVLTQTLGPWRRPVAYLSKKLDPVASGWPTCLKAVAAVALLLKDADKLTLGQNVTVIASHSLESIVRQPPDRWMTNARMTHYQSLLLNERVSFAPPAVLNPATLLPVESEATPVHRCSEILAEETGTRRDLKDQPLPGVPAWYTDGSSFIAEGKRRAGAAIVDGKRTVWASSLPEGTSAQKAELVALTQALRLAEGKDINIYTDSRYAFATAHIHGAIYKQRGWLTSAGKDIKNKEEILALLEAIHLPKRVAIIHCPGHQKGNDPVATGNRRADEAAKQAALSTRVLAETTKPAGKRTADGSEFEKRTADGSEFESPKKKAKVE

SEQ ID NO: 6303 - protein, 2091 aa, synthetic construct
MPAAKRVKLDGGDKKYSIGLDIGTNSVGWAVITDEYKVPSKKFKVLGNTDRHSIKKNLIGALLFDSGETAEATRLKRTARRRYTRRKNRICYLQEIFSNEMAKVDDSFFHRLEESFLVEEDKKHERHPIFGNIVDEVAYHEKYPTIYHLRKKLVDSTDKADLRLIYLALAHMIKFRGHFLIEGDLNPDNSDVDKLFIQLVQTYNQLFEENPINASGVDAKAILSARLSKSRRLENLIAQLPGEKKNGLFGNLIALSLGLTPNFKSNFDLAEDAKLQLSKDTYDDDLDNLLAQIGDQYADLFLAAKNLSDAILLSDILRVNTEITKAPLSASMIKRYDEHHQDLTLLKALVRQQLPEKYKEIFFDQSKNGYAGYIDGGASQEEFYKFIKPILEKMDGTEELLVKLNREDLLRKQRTFDNGSIPHQIHLGELHAILRRQEDFYPFLKDNREKIEKILTFRIPYYVGPLARGNSRFAWMTRKSEETITPWNFEEVVDKGASAQSFIERMTNFDKNLPNEKVLPKHSLLYEYFTVYNELTKVKYVTEGMRKPAFLSGEQKKAIVDLLFKTNRKVTVKQLKEDYFKKIECFDSVEISGVEDRFNASLGTYHDLLKIIKDKDFLDNEENEDILEDIVLTLTLFEDREMIEERLKTYAHLFDDKVMKQLKRRRYTGWGRLSRKLINGIRDKQSGKTILDFLKSDGFANRNFMQLIHDDSLTFKEDIQKAQVSGQGDSLHEHIANLAGSPAIKKGILQTVKVVDELVKVMGRHKPENIVIEMARENQTTQKGQKNSRERMKRIEEGIKELGSQILKEHPVENTQLQNEKLYLYYLQNGRDMYVDQELDINRLSDYDVDHIVPQSFLKDDSIDNKVLTRSDKARGKSDNVPSEEVVKKMKNYWRQLLNAKLITQRKFDNLTKAERGGLSELDKAGFIKRQLVETRQITKHVAQILDSRMNTKYDENDKLIREVKVITLKSKLVSDFRKDFQFYKVREINNYHHAHDAYLNAVVGTALIKKYPKLESEFVYGDYKVYDVRKMIAKSEQEIGKATAKYFFYSNIMNFFKTEITLANGEIRKRPLIETNGETGEIVWDKGRDFATVRKVLSMPQVNIVKKTEVQTGGFSKESILPKRNSDKLIARKKDWDPKKYGGFDSPTVAYSVLVVAKVEKGKSKKLKSVKELLGITIMERSSFEKNPIDFLEAKGYKEVKKDLIIKLPKYSLFELENGRKRMLASAGELQKGNELALPSKYVNFLYLASHYEKLKGSPEDNEQKQLFVEQHKHYLDEIIEQISEFSKRVILADANLDKVLSAYNKHRDKPIREQAENIIHLFTLTNLGAPAAFKYFDTTIDRKRYTSTKEVLDATLIHQSITGLYETRIDLSQLGGDGGGSSGSSGGTLNIEDEYRLHETSKEPDVPLGSTWLSDFPQAWAETGGMGLAVRQAPLIIPLKATSTPVSIKQYPMSQEARLGIKPHIQRLLDQGILVPCQSPWNTPLLPVKKPGTNDYRPVQDLREVNKRVEDIHPTVPNPYNLLSGLPPSHQWYTVLDLKDAFFCLRLHPTSQPLFAFEWRDPEMGISGQLTWTRLPQGFKNSPTLFNEALHRDLADFRIQHPDLILLQYVDDLLLAATSEQDCQRGTRALLQTLGNLGYRASAKKAQICQKQVKYLGYLLKEGQRWLTEARKETVMGQPTPKTPRQLREFLGTAGFCRLWIPGFAEMAAPLYPLTKPGTLFNWGPDQQKAYQEIKQALLTAPALGLPDLTKPFELFVDEKQGYAKGVLTQKLGPWRRPVAYLSKKLDPVAAGWPPCLRMVAAIAVLTKDAGKLTMGQPLVILAPHAVEALVKQPPDRWLSNARMTHYQAMLLDTDRVQFGPVVALNPATLLPLPEKEAPHDCLEILAETHGTRPDLTDQPIPDADYTWYTDGSSFLQEGQRRAGAAVTTETEVIWARALPAGTSAQRAELIALTQALKMAEGKKLNVYTDSRYAFATAHVHGEIYRRRGWLTSEGREIKNKNEILALLKALFLPKRLSIIHCPGHQKGNSAEARGNRMADQAAREAAMKAVLETSTLLAGKRTADGSEFEKRTADGSEFESPKKKAKVE

SEQ ID NO: 6304 - protein, 2096 aa, synthetic construct
MPAAKRVKLDGGDKKYSIGLDIGTNSVGWAVITDEYKVPSKKFKVLGNTDRHSIKKNLIGALLFDSGETAEATRLKRTARRRYTRRKNRICYLQEIFSNEMAKVDDSFFHRLEESFLVEEDKKHERHPIFGNIVDEVAYHEKYPTIYHLRKKLVDSTDKADLRLIYLALAHMIKFRGHFLIEGDLNPDNSDVDKLFIQLVQTYNQLFEENPINASGVDAKAILSARLSKSRRLENLIAQLPGEKKNGLFGNLIALSLGLTPNFKSNFDLAEDAKLQLSKDTYDDDLDNLLAQIGDQYADLFLAAKNLSDAILLSDILRVNTEITKAPLSASMIKRYDEHHQDLTLLKALVRQQLPEKYKEIFFDQSKNGYAGYIDGGASQEEFYKFIKPILEKMDGTEELLVKLNREDLLRKQRTFDNGSIPHQIHLGELHAILRRQEDFYPFLKDNREKIEKILTFRIPYYVGPLARGNSRFAWMTRKSEETITPWNFEEVVDKGASAQSFIERMTNFDKNLPNEKVLPKHSLLYEYFTVYNELTKVKYVTEGMRKPAFLSGEQKKAIVDLLFKTNRKVTVKQLKEDYFKKIECFDSVEISGVEDRFNASLGTYHDLLKIIKDKDFLDNEENEDILEDIVLTLTLFEDREMIEERLKTYAHLFDDKVMKQLKRRRYTGWGRLSRKLINGIRDKQSGKTILDFLKSDGFANRNFMQLIHDDSLTFKEDIQKAQVSGQGDSLHEHIANLAGSPAIKKGILQTVKVVDELVKVMGRHKPENIVIEMARENQTTQKGQKNSRERMKRIEEGIKELGSQILKEHPVENTQLQNEKLYLYYLQNGRDMYVDQELDINRLSDYDVDHIVPQSFLKDDSIDNKVLTRSDKARGKSDNVPSEEVVKKMKNYWRQLLNAKLITQRKFDNLTKAERGGLSELDKAGFIKRQLVETRQITKHVAQILDSRMNTKYDENDKLIREVKVITLKSKLVSDFRKDFQFYKVREINNYHHAHDAYLNAVVGTALIKKYPKLESEFVYGDYKVYDVRKMIAKSEQEIGKATAKYFFYSNIMNFFKTEITLANGEIRKRPLIETNGETGEIVWDKGRDFATVRKVLSMPQVNIVKKTEVQTGGFSKESILPKRNSDKLIARKKDWDPKKYGGFDSPTVAYSVLVVAKVEKGKSKKLKSVKELLGITIMERSSFEKNPIDFLEAKGYKEVKKDLIIKLPKYSLFELENGRKRMLASAGELQKGNELALPSKYVNFLYLASHYEKLKGSPEDNEQKQLFVEQHKHYLDEIIEQISEFSKRVILADANLDKVLSAYNKHRDKPIREQAENIIHLFTLTNLGAPAAFKYFDTTIDRKRYTSTKEVLDATLIHQSITGLYETRIDLSQLGGDGGGSSGSSGSSGGTAPLEEEYRLFLEAPIQNVTLLEQWKREIPKVWAEINPPGLASTQAPIHVQLLSTALPVRVRQYPITLEAKRSLRETIRKFRAAGILRPVHSPWNTPLLPVRKSGTSEYRMVQDLREVNKRVETIHPTVPNPYTLLSLLPPDRIWYSVLDLKDAFFCIPLAPESQLIFAFEWADAEEGESGQLTWTRLPQGFKNSPTLFNEALNRDLQGFRLDHPSVSLLQYVDDLLIAADTQAACLSATRDLLMTLAELGYRVSGKKAQLCQEEVTYLGFKIHKGSRSLSNSRTQAILQIPVPKTKRQVREFLGTIGYCRLWIPGFAELAQPLYAATRPGNDPLVWGEKEEEAFQSLKLALTQPPALALPSLDKPFQLFVEETSGAAKGVLTQALGPWKRPVAYLSKRLDPVAAGWPRCLRAIAAAALLTREASKLTFGQDIEITSSHNLESLLRSPPDKWLTNARITQYQVLLLDPPRVRFKQTAALNPATLLPETDDTLPIHHCLDTLDSLTSTRPDLTDQPLAQAEATLFTDGSSYIRDGKRYAGAAVVTLDSVIWAEPLPIGTSAQKAELIALTKALEWSKDKSVNIYTDSRYAFATLHVHGMIYRERGWLTAGGKAIKNAPEILALLTAVWLPKRVAVMHCKGHQKDDAPTSTGNRRADEVAREVAIRPLSTQATISAGKRTADGSEFEKRTADGSEFESPKKKAKVE

SEQ ID NO: 6305 - protein, 2096 aa, synthetic construct
MPAAKRVKLDGGDKKYSIGLDIGTNSVGWAVITDEYKVPSKKFKVLGNTDRHSIKKNLIGALLFDSGETAEATRLKRTARRRYTRRKNRICYLQEIFSNEMAKVDDSFFHRLEESFLVEEDKKHERHPIFGNIVDEVAYHEKYPTIYHLRKKLVDSTDKADLRLIYLALAHMIKFRGHFLIEGDLNPDNSDVDKLFIQLVQTYNQLFEENPINASGVDAKAILSARLSKSRRLENLIAQLPGEKKNGLFGNLIALSLGLTPNFKSNFDLAEDAKLQLSKDTYDDDLDNLLAQIGDQYADLFLAAKNLSDAILLSDILRVNTEITKAPLSASMIKRYDEHHQDLTLLKALVRQQLPEKYKEIFFDQSKNGYAGYIDGGASQEEFYKFIKPILEKMDGTEELLVKLNREDLLRKQRTFDNGSIPHQIHLGELHAILRRQEDFYPFLKDNREKIEKILTFRIPYYVGPLARGNSRFAWMTRKSEETITPWNFEEVVDKGASAQSFIERMTNFDKNLPNEKVLPKHSLLYEYFTVYNELTKVKYVTEGMRKPAFLSGEQKKAIVDLLFKTNRKVTVKQLKEDYFKKIECFDSVEISGVEDRFNASLGTYHDLLKIIKDKDFLDNEENEDILEDIVLTLTLFEDREMIEERLKTYAHLFDDKVMKQLKRRRYTGWGRLSRKLINGIRDKQSGKTILDFLKSDGFANRNFMQLIHDDSLTFKEDIQKAQVSGQGDSLHEHIANLAGSPAIKKGILQTVKVVDELVKVMGRHKPENIVIEMARENQTTQKGQKNSRERMKRIEEGIKELGSQILKEHPVENTQLQNEKLYLYYLQNGRDMYVDQELDINRLSDYDVDHIVPQSFLKDDSIDNKVLTRSDKARGKSDNVPSEEVVKKMKNYWRQLLNAKLITQRKFDNLTKAERGGLSELDKAGFIKRQLVETRQITKHVAQILDSRMNTKYDENDKLIREVKVITLKSKLVSDFRKDFQFYKVREINNYHHAHDAYLNAVVGTALIKKYPKLESEFVYGDYKVYDVRKMIAKSEQEIGKATAKYFFYSNIMNFFKTEITLANGEIRKRPLIETNGETGEIVWDKGRDFATVRKVLSMPQVNIVKKTEVQTGGFSKESILPKRNSDKLIARKKDWDPKKYGGFDSPTVAYSVLVVAKVEKGKSKKLKSVKELLGITIMERSSFEKNPIDFLEAKGYKEVKKDLIIKLPKYSLFELENGRKRMLASAGELQKGNELALPSKYVNFLYLASHYEKLKGSPEDNEQKQLFVEQHKHYLDEIIEQISEFSKRVILADANLDKVLSAYNKHRDKPIREQAENIIHLFTLTNLGAPAAFKYFDTTIDRKRYTSTKEVLDATLIHQSITGLYETRIDLSQLGGDGGGSSGSSGSSGGTAPLEEEYRLFLEAPIQNVTLLEQWKREIPKVWAEINPPGLASTQAPIHVQLLSTALPVRVRQYPITLEAKRSLRETIRKFRAAGILRPVHSPWNTPLLPVRKSGTSEYRMVQDLREVNKRVETIHPTVPNPYTLLSLLPPDRIWYSVLDLKDAFFCIPLAPESQLIFAFEWADAEEGESGQLTWTRLPQGFKNSPTLFNEALNRDLQGFRLDHPSVSLLQYVDDLLIAADTQAACLSATRDLLMTLAELGYRVSGKKAQLCQEEVTYLGFKIHKGSRSLSNSRTQAILQIPVPKTKRQVREFLGKIGYCRLFIPGFAELAQPLYAATRPGNDPLVWGEKEEEAFQSLKLALTQPPALALPSLDKPFQLFVEETSGAAKGVLTQALGPWKRPVAYLSKRLDPVAAGWPRCLRAIAAAALLTREASKLTFGQDIEITSSHNLESLLRSPPDKWLTNARITQYQVLLLDPPRVRFKQTAALNPATLLPETDDTLPIHHCLDTLDSLTSTRPDLTDQPLAQAEATLFTDGSSYIRDGKRYAGAAVVTLDSVIWAEPLPIGTSAQKAELIALTKALEWSKDKSVNIYTDSRYAFATLHVHGMIYRERGWLTAGGKAIKNAPEILALLTAVWLPKRVAVMHCKGHQKDDAPTSTGNRRADEVAREVAIRPLSTQATISAGKRTADGSEFEKRTADGSEFESPKKKAKVE

SEQ ID NO: 6306 - protein, 2085 aa, synthetic construct
MPAAKRVKLDGGDKKYSIGLDIGTNSVGWAVITDEYKVPSKKFKVLGNTDRHSIKKNLIGALLFDSGETAEATRLKRTARRRYTRRKNRICYLQEIFSNEMAKVDDSFFHRLEESFLVEEDKKHERHPIFGNIVDEVAYHEKYPTIYHLRKKLVDSTDKADLRLIYLALAHMIKFRGHFLIEGDLNPDNSDVDKLFIQLVQTYNQLFEENPINASGVDAKAILSARLSKSRRLENLIAQLPGEKKNGLFGNLIALSLGLTPNFKSNFDLAEDAKLQLSKDTYDDDLDNLLAQIGDQYADLFLAAKNLSDAILLSDILRVNTEITKAPLSASMIKRYDEHHQDLTLLKALVRQQLPEKYKEIFFDQSKNGYAGYIDGGASQEEFYKFIKPILEKMDGTEELLVKLNREDLLRKQRTFDNGSIPHQIHLGELHAILRRQEDFYPFLKDNREKIEKILTFRIPYYVGPLARGNSRFAWMTRKSEETITPWNFEEVVDKGASAQSFIERMTNFDKNLPNEKVLPKHSLLYEYFTVYNELTKVKYVTEGMRKPAFLSGEQKKAIVDLLFKTNRKVTVKQLKEDYFKKIECFDSVEISGVEDRFNASLGTYHDLLKIIKDKDFLDNEENEDILEDIVLTLTLFEDREMIEERLKTYAHLFDDKVMKQLKRRRYTGWGRLSRKLINGIRDKQSGKTILDFLKSDGFANRNFMQLIHDDSLTFKEDIQKAQVSGQGDSLHEHIANLAGSPAIKKGILQTVKVVDELVKVMGRHKPENIVIEMARENQTTQKGQKNSRERMKRIEEGIKELGSQILKEHPVENTQLQNEKLYLYYLQNGRDMYVDQELDINRLSDYDVDHIVPQSFLKDDSIDNKVLTRSDKARGKSDNVPSEEVVKKMKNYWRQLLNAKLITQRKFDNLTKAERGGLSELDKAGFIKRQLVETRQITKHVAQILDSRMNTKYDENDKLIREVKVITLKSKLVSDFRKDFQFYKVREINNYHHAHDAYLNAVVGTALIKKYPKLESEFVYGDYKVYDVRKMIAKSEQEIGKATAKYFFYSNIMNFFKTEITLANGEIRKRPLIETNGETGEIVWDKGRDFATVRKVLSMPQVNIVKKTEVQTGGFSKESILPKRNSDKLIARKKDWDPKKYGGFDSPTVAYSVLVVAKVEKGKSKKLKSVKELLGITIMERSSFEKNPIDFLEAKGYKEVKKDLIIKLPKYSLFELENGRKRMLASAGELQKGNELALPSKYVNFLYLASHYEKLKGSPEDNEQKQLFVEQHKHYLDEIIEQISEFSKRVILADANLDKVLSAYNKHRDKPIREQAENIIHLFTLTNLGAPAAFKYFDTTIDRKRYTSTKEVLDATLIHQSITGLYETRIDLSQLGGDGGGSSGSSGSSGGVPWILKKPLELTIKLDLEEQQGTLLNNSILSKKGKEELKQLFEKYSALWQSWENQVGHRRIRPHKIATGTVKPTPQKQYHINPKAKPDIQIVINDLLKQGVLIQKESTMNTPVYPVPKPNGRWRMVLDYRAVNKVTPLIAVQNQHSYGILGSLFKGRYKTTIDLSNGFWAHPIVPEDYWITAFTWQGKQYCWTVLPQGFLNSPGLFTGDVVDLLQGIPNVEVYVDDVYISHDSEKEHLEYLDILFNRLKEAGYIISLKKSNIANSIVDFLGFQITNEGRGLTDTFKEKLENITAPTTLKQLQSILGLLNFARNFIPDFTELIAPLYALIPKSTKNYVPWQIEHSTTLETLITKLNGAEYLQGRKGDKTLIMKVNASYTTGYIRYYNEGEKKPISYVSIVFSKTELKFTELEKLLTTVHKGLLKALDLSMGQNIHVYSPIVSMQNIQKTPQTAKKALASRWLSWLSYLEDPRIRFFYDPQMPALKDLPAVDTGKDNKKHPSNFQHIFYTDGSAITSPTKEGHLNAGMGIVYFINKDGNLQKQQEWSISLGNHTAQFAEIAAFEFALKKCLPLGGNILVVTDSNYVAKAYNEELDVWASNGFVNNRKKPLKHISKWKSVADLKRLRPDVVVTHEPGHQKLDSSPHAYGNNLADQLATQASFKVHAGKRTADGSEFEKRTADGSEFESPKKKAKVE

SEQ ID NO: 6307 - protein, 2125 aa, synthetic construct
MPAAKRVKLDGGDKKYSIGLDIGTNSVGWAVITDEYKVPSKKFKVLGNTDRHSIKKNLIGALLFDSGETAEATRLKRTARRRYTRRKNRICYLQEIFSNEMAKVDDSFFHRLEESFLVEEDKKHERHPIFGNIVDEVAYHEKYPTIYHLRKKLVDSTDKADLRLIYLALAHMIKFRGHFLIEGDLNPDNSDVDKLFIQLVQTYNQLFEENPINASGVDAKAILSARLSKSRRLENLIAQLPGEKKNGLFGNLIALSLGLTPNFKSNFDLAEDAKLQLSKDTYDDDLDNLLAQIGDQYADLFLAAKNLSDAILLSDILRVNTEITKAPLSASMIKRYDEHHQDLTLLKALVRQQLPEKYKEIFFDQSKNGYAGYIDGGASQEEFYKFIKPILEKMDGTEELLVKLNREDLLRKQRTFDNGSIPHQIHLGELHAILRRQEDFYPFLKDNREKIEKILTFRIPYYVGPLARGNSRFAWMTRKSEETITPWNFEEVVDKGASAQSFIERMTNFDKNLPNEKVLPKHSLLYEYFTVYNELTKVKYVTEGMRKPAFLSGEQKKAIVDLLFKTNRKVTVKQLKEDYFKKIECFDSVEISGVEDRFNASLGTYHDLLKIIKDKDFLDNEENEDILEDIVLTLTLFEDREMIEERLKTYAHLFDDKVMKQLKRRRYTGWGRLSRKLINGIRDKQSGKTILDFLKSDGFANRNFMQLIHDDSLTFKEDIQKAQVSGQGDSLHEHIANLAGSPAIKKGILQTVKVVDELVKVMGRHKPENIVIEMARENQTTQKGQKNSRERMKRIEEGIKELGSQILKEHPVENTQLQNEKLYLYYLQNGRDMYVDQELDINRLSDYDVDHIVPQSFLKDDSIDNKVLTRSDKARGKSDNVPSEEVVKKMKNYWRQLLNAKLITQRKFDNLTKAERGGLSELDKAGFIKRQLVETRQITKHVAQILDSRMNTKYDENDKLIREVKVITLKSKLVSDFRKDFQFYKVREINNYHHAHDAYLNAVVGTALIKKYPKLESEFVYGDYKVYDVRKMIAKSEQEIGKATAKYFFYSNIMNFFKTEITLANGEIRKRPLIETNGETGEIVWDKGRDFATVRKVLSMPQVNIVKKTEVQTGGFSKESILPKRNSDKLIARKKDWDPKKYGGFDSPTVAYSVLVVAKVEKGKSKKLKSVKELLGITIMERSSFEKNPIDFLEAKGYKEVKKDLIIKLPKYSLFELENGRKRMLASAGELQKGNELALPSKYVNFLYLASHYEKLKGSPEDNEQKQLFVEQHKHYLDEIIEQISEFSKRVILADANLDKVLSAYNKHRDKPIREQAENIIHLFTLTNLGAPAAFKYFDTTIDRKRYTSTKEVLDATLIHQSITGLYETRIDLSQLGGDGGGSSGSSGSSGGLLGRDLLTKLKAQIQFSTEGPQVTWEDRPAMCLVLNLEEEYRLHEKPVPPSIDPSWLQLFPMVWAEKAGMGLANQVPPVVVELKSDASPVAVRQYPMSKEAREGIRPHIQRFLDLGILVPCQSPWNTPLLPVKKPGTNDYRPVQDLREVNKRVQDIHPTVPNPYNLLSSLPPSHTWYSVLDLKDAFFCLKLHPNSQPLFAFEWRDPEKGNTGQLTWTRLPQGFKNSPTLFNEALHRDLASFRALNPQVVMLQYVDDLLVAAPTYRDCKEGTRRLLQELSKLGYRVSAKKAQLCREEVTYLGYLLKGGKRWLTPARKATVMKIPTPTTPRQVREFLGTAGFCRLWIPGFASLAAPLYPLTRPKVPFTWTEAHQEAFGRIKEALLSAPALALPDLTKPFALYVDEKEGVARGVLTQTLGPWRRPVAYLSKKLDPVASGWPTCLKAIAAVALLLKDADKLTLGQNVLVIAPHNLESIVRQPPDRWMTNARMTHYQSLLLNERVSFAPPAILNPATLLPVESDDTPIHICSEILAEETGTRPDLRDQPLPGVPAWYTDGSSFIMDGRRQAGAAIVDNKRTVWASNLPEGTSAQKAELIALTQALRLAEGKSINIYTDSRYAFATAHVHGAIYKQRGWLTSAGKDIKNKEEILALLEAIHLPKRVAIIHCPGHQRGTDPVATGNRKADEAAKQAAQSTRILTETTKNAGKRTADGSEFEKRTADGSEFESPKKKAKVE

SEQ ID NO: 6308 - protein, 2094 aa, synthetic construct
MPAAKRVKLDGGDKKYSIGLDIGTNSVGWAVITDEYKVPSKKFKVLGNTDRHSIKKNLIGALLFDSGETAEATRLKRTARRRYTRRKNRICYLQEIFSNEMAKVDDSFFHRLEESFLVEEDKKHERHPIFGNIVDEVAYHEKYPTIYHLRKKLVDSTDKADLRLIYLALAHMIKFRGHFLIEGDLNPDNSDVDKLFIQLVQTYNQLFEENPINASGVDAKAILSARLSKSRRLENLIAQLPGEKKNGLFGNLIALSLGLTPNFKSNFDLAEDAKLQLSKDTYDDDLDNLLAQIGDQYADLFLAAKNLSDAILLSDILRVNTEITKAPLSASMIKRYDEHHQDLTLLKALVRQQLPEKYKEIFFDQSKNGYAGYIDGGASQEEFYKFIKPILEKMDGTEELLVKLNREDLLRKQRTFDNGSIPHQIHLGELHAILRRQEDFYPFLKDNREKIEKILTFRIPYYVGPLARGNSRFAWMTRKSEETITPWNFEEVVDKGASAQSFIERMTNFDKNLPNEKVLPKHSLLYEYFTVYNELTKVKYVTEGMRKPAFLSGEQKKAIVDLLFKTNRKVTVKQLKEDYFKKIECFDSVEISGVEDRFNASLGTYHDLLKIIKDKDFLDNEENEDILEDIVLTLTLFEDREMIEERLKTYAHLFDDKVMKQLKRRRYTGWGRLSRKLINGIRDKQSGKTILDFLKSDGFANRNFMQLIHDDSLTFKEDIQKAQVSGQGDSLHEHIANLAGSPAIKKGILQTVKVVDELVKVMGRHKPENIVIEMARENQTTQKGQKNSRERMKRIEEGIKELGSQILKEHPVENTQLQNEKLYLYYLQNGRDMYVDQELDINRLSDYDVDHIVPQSFLKDDSIDNKVLTRSDKARGKSDNVPSEEVVKKMKNYWRQLLNAKLITQRKFDNLTKAERGGLSELDKAGFIKRQLVETRQITKHVAQILDSRMNTKYDENDKLIREVKVITLKSKLVSDFRKDFQFYKVREINNYHHAHDAYLNAVVGTALIKKYPKLESEFVYGDYKVYDVRKMIAKSEQEIGKATAKYFFYSNIMNFFKTEITLANGEIRKRPLIETNGETGEIVWDKGRDFATVRKVLSMPQVNIVKKTEVQTGGFSKESILPKRNSDKLIARKKDWDPKKYGGFDSPTVAYSVLVVAKVEKGKSKKLKSVKELLGITIMERSSFEKNPIDFLEAKGYKEVKKDLIIKLPKYSLFELENGRKRMLASAGELQKGNELALPSKYVNFLYLASHYEKLKGSPEDNEQKQLFVEQHKHYLDEIIEQISEFSKRVILADANLDKVLSAYNKHRDKPIREQAENIIHLFTLTNLGAPAAFKYFDTTIDRKRYTSTKEVLDATLIHQSITGLYETRIDLSQLGGDGGGSSGSSGSSGGTLNLEDEYRLYETSAEPEVSPGSTWLSDFPQAWAETGGMGLAVRQAPLIIPLKATSTPVSIKQYPMSQEAKLGIKPHIQRLLDQGILVPCQSPWNTPLLPVKKPGTNDYRPVQDLREVNKRVEDIHPTVPNPYNLLSGLPPSHRWYTVLDLKDAFFCLRLHPTSQPLFAFEWRDPGMGISGQLTWTRLPQGFKNSPTLFNEALHRDLADFRIQHPDLILLQYVDDILLAATSELDCQQGTRALLLTLGNLGYRASAKKAQLCQKQVKYLGYLLKEGQRWLTEARKETVMGQPTPKTPRQLREFLGTAGFCRLWIPGFAEMAAPLYPLTKPGTLFNWGPDQQKAYQEIKQALLTAPALGLPDLTKPFELFVDEKQGYAKGVLTQKLGPWRRPVAYLSKKLDPVAAGWPPCLRMVAAIAVLRKDAGKLTMGQPLVILAPHAVEALVKQPPDRWLSNARMTHYQAMLLDTDRVQFGPVVALNPATLLPLPEEGAPHDCLEILAETHGTRPDLTDQPIPDADHTWYTDGSSFLQEGQRKAGAAVTTETEVIWARALPAGTSAQRAELIALTQALKMAEGKRLNVYTDSRYAFATAHIHGEIYRRRGWLTSEGREIKNKSEILALLKALFLPKRLSIIHCLGHQKGDSAEARGNRLADQAAREAAIKTPPDTSTLLAGKRTADGSEFEKRTADGSEFESPKKKAKVE

SEQ ID NO: 6309 - protein, 2094 aa, synthetic construct
MPAAKRVKLDGGDKKYSIGLDIGTNSVGWAVITDEYKVPSKKFKVLGNTDRHSIKKNLIGALLFDSGETAEATRLKRTARRRYTRRKNRICYLQEIFSNEMAKVDDSFFHRLEESFLVEEDKKHERHPIFGNIVDEVAYHEKYPTIYHLRKKLVDSTDKADLRLIYLALAHMIKFRGHFLIEGDLNPDNSDVDKLFIQLVQTYNQLFEENPINASGVDAKAILSARLSKSRRLENLIAQLPGEKKNGLFGNLIALSLGLTPNFKSNFDLAEDAKLQLSKDTYDDDLDNLLAQIGDQYADLFLAAKNLSDAILLSDILRVNTEITKAPLSASMIKRYDEHHQDLTLLKALVRQQLPEKYKEIFFDQSKNGYAGYIDGGASQEEFYKFIKPILEKMDGTEELLVKLNREDLLRKQRTFDNGSIPHQIHLGELHAILRRQEDFYPFLKDNREKIEKILTFRIPYYVGPLARGNSRFAWMTRKSEETITPWNFEEVVDKGASAQSFIERMTNFDKNLPNEKVLPKHSLLYEYFTVYNELTKVKYVTEGMRKPAFLSGEQKKAIVDLLFKTNRKVTVKQLKEDYFKKIECFDSVEISGVEDRFNASLGTYHDLLKIIKDKDFLDNEENEDILEDIVLTLTLFEDREMIEERLKTYAHLFDDKVMKQLKRRRYTGWGRLSRKLINGIRDKQSGKTILDFLKSDGFANRNFMQLIHDDSLTFKEDIQKAQVSGQGDSLHEHIANLAGSPAIKKGILQTVKVVDELVKVMGRHKPENIVIEMARENQTTQKGQKNSRERMKRIEEGIKELGSQILKEHPVENTQLQNEKLYLYYLQNGRDMYVDQELDINRLSDYDVDHIVPQSFLKDDSIDNKVLTRSDKARGKSDNVPSEEVVKKMKNYWRQLLNAKLITQRKFDNLTKAERGGLSELDKAGFIKRQLVETRQITKHVAQILDSRMNTKYDENDKLIREVKVITLKSKLVSDFRKDFQFYKVREINNYHHAHDAYLNAVVGTALIKKYPKLESEFVYGDYKVYDVRKMIAKSEQEIGKATAKYFFYSNIMNFFKTEITLANGEIRKRPLIETNGETGEIVWDKGRDFATVRKVLSMPQVNIVKKTEVQTGGFSKESILPKRNSDKLIARKKDWDPKKYGGFDSPTVAYSVLVVAKVEKGKSKKLKSVKELLGITIMERSSFEKNPIDFLEAKGYKEVKKDLIIKLPKYSLFELENGRKRMLASAGELQKGNELALPSKYVNFLYLASHYEKLKGSPEDNEQKQLFVEQHKHYLDEIIEQISEFSKRVILADANLDKVLSAYNKHRDKPIREQAENIIHLFTLTNLGAPAAFKYFDTTIDRKRYTSTKEVLDATLIHQSITGLYETRIDLSQLGGDGGGSSGSSGSSGGTLGIEDEYRLHETSTEPDVSLGSTWLSDFPQAWAETGGMGLAVRQAPLIIPLKATSTPVSIQQYPMSHEARLGIKPHIQRLLDQGILVPCQSPWNTPLLPVKKPGTNDYRPVQDLREVNKRVEDIHPTVPNPYNLLSGLPPSHQWYTVLDLKDAFFCLRLHPTSQPLFAFEWRDPGMGISGQLTWTRLPQGFKNSPTLFDEALHRDLADFRIQHPDLILLQYVDDILLAATSELDCQQGTRALLQTLGDLGYRASAKKAQICQKQVKYLGYLLREGQRWLTEARKETVMGQPVPKTPRQLREFLGTAGFCRLWIPGFAEMAAPLYPLTKTGTLFSWGPDQQKAYQEIKQALLTAPALGLPDLTKPFELFVDEKQGYAKGVLTQKLGPWRRPVAYLSKKLDPVAAGWPPCLRMVAAIAVLTKDAGKLTMGQPLVILAPHAVEALVKQPPDRWLSNARMTHYQAMLLDTDRVQFGPVVALNPATLLPLPEEGAPHDCLEILAETHGTRPDLTDQPIPDADHTWYTDGSSFLQEGQRKAGAAVTTETEVIWAGALPAGTSAQRAELIALTQALKMAEGKRLNVYTDSRYAFATAHIHGEIYRRRGLLTSEGREIKNKSEILALLKALFLPKRLSIIHCLGHQKGDSAEARGNRLADQAAREAAIKTPPDTSTLLAGKRTADGSEFEKRTADGSEFESPKKKAKVE

SEQ ID NO: 6310 - protein, 2094 aa, synthetic construct
MPAAKRVKLDGGDKKYSIGLDIGTNSVGWAVITDEYKVPSKKFKVLGNTDRHSIKKNLIGALLFDSGETAEATRLKRTARRRYTRRKNRICYLQEIFSNEMAKVDDSFFHRLEESFLVEEDKKHERHPIFGNIVDEVAYHEKYPTIYHLRKKLVDSTDKADLRLIYLALAHMIKFRGHFLIEGDLNPDNSDVDKLFIQLVQTYNQLFEENPINASGVDAKAILSARLSKSRRLENLIAQLPGEKKNGLFGNLIALSLGLTPNFKSNFDLAEDAKLQLSKDTYDDDLDNLLAQIGDQYADLFLAAKNLSDAILLSDILRVNTEITKAPLSASMIKRYDEHHQDLTLLKALVRQQLPEKYKEIFFDQSKNGYAGYIDGGASQEEFYKFIKPILEKMDGTEELLVKLNREDLLRKQRTFDNGSIPHQIHLGELHAILRRQEDFYPFLKDNREKIEKILTFRIPYYVGPLARGNSRFAWMTRKSEETITPWNFEEVVDKGASAQSFIERMTNFDKNLPNEKVLPKHSLLYEYFTVYNELTKVKYVTEGMRKPAFLSGEQKKAIVDLLFKTNRKVTVKQLKEDYFKKIECFDSVEISGVEDRFNASLGTYHDLLKIIKDKDFLDNEENEDILEDIVLTLTLFEDREMIEERLKTYAHLFDDKVMKQLKRRRYTGWGRLSRKLINGIRDKQSGKTILDFLKSDGFANRNFMQLIHDDSLTFKEDIQKAQVSGQGDSLHEHIANLAGSPAIKKGILQTVKVVDELVKVMGRHKPENIVIEMARENQTTQKGQKNSRERMKRIEEGIKELGSQILKEHPVENTQLQNEKLYLYYLQNGRDMYVDQELDINRLSDYDVDHIVPQSFLKDDSIDNKVLTRSDKARGKSDNVPSEEVVKKMKNYWRQLLNAKLITQRKFDNLTKAERGGLSELDKAGFIKRQLVETRQITKHVAQILDSRMNTKYDENDKLIREVKVITLKSKLVSDFRKDFQFYKVREINNYHHAHDAYLNAVVGTALIKKYPKLESEFVYGDYKVYDVRKMIAKSEQEIGKATAKYFFYSNIMNFFKTEITLANGEIRKRPLIETNGETGEIVWDKGRDFATVRKVLSMPQVNIVKKTEVQTGGFSKESILPKRNSDKLIARKKDWDPKKYGGFDSPTVAYSVLVVAKVEKGKSKKLKSVKELLGITIMERSSFEKNPIDFLEAKGYKEVKKDLIIKLPKYSLFELENGRKRMLASAGELQKGNELALPSKYVNFLYLASHYEKLKGSPEDNEQKQLFVEQHKHYLDEIIEQISEFSKRVILADANLDKVLSAYNKHRDKPIREQAENIIHLFTLTNLGAPAAFKYFDTTIDRKRYTSTKEVLDATLIHQSITGLYETRIDLSQLGGDGGGSSGSSGSSGGTLNIEDEYRLHETSKEPDVSLGSTWLSDFPQAWAETGGMGLAVRQAPLIIPLKATSTPVSIKQYPMSQEARLGIKPHIQRLLDQGILVPCQSPWNTPLLPVKKPGTNDYRPVQDLREVNKRVEDIHPTVPNPYNLLSGLPPSHQWYTVLDLKDAFFCLRLHPTSQPLFAFEWRDPEMGISGQLTWTRLPQGFKNSPTLFNEALHRDLAGFRIQHPDLILLQYVDDLLLAATSELDCQQGTRALLQTLGDLGYRASAKKAQICQKQVKYLGYLLKEGQRWLTEARKETVMGQPIPKTPRQLREFLGTAGFCRLWIPGFAEMAAPLYPLTKPGTLFNWGPDQQKAFQEIKQALLTAPALGLPDLTKPFELFVDEKQGYAKGVLTQKLGPWRRPVAYLSKKLDPVAAGWPPCLRMVAAIAVLTKDAGKLTMGQPLVILAPHAVEALVKQPPDRWLSNARMTHYQALLLDTDRVQFGPVVALNPATLLPLPEEGLQHDCLDILAEAHGTRSDLMDQPLPDADHTWYTDGSSFLQEGQRKAGAAVTTETEVIWARALPAGTSAQRAELIALTQALKMAEGKKLNVYTDSRYAFATAHIHGEIYRRRGWLTSEGKEIKNKDEILALLKALFLPKRLSIIHCPGHQKGNSAEARGNRMADQAAREVATRETPETSTLLAGKRTADGSEFEKRTADGSEFESPKKKAKVE

SEQ ID NO: 6311 - protein, 2094 aa, synthetic construct; identical to SEQ ID NO: 4505

SEQ ID NO: 6312 - protein, 2094 aa, synthetic construct; identical to SEQ ID NO: 4505

SEQ ID NO: 6313 - protein, 2088 aa, synthetic construct
MPAAKRVKLDGGDKKYSIGLDIGTNSVGWAVITDEYKVPSKKFKVLGNTDRHSIKKNLIGALLFDSGETAEATRLKRTARRRYTRRKNRICYLQEIFSNEMAKVDDSFFHRLEESFLVEEDKKHERHPIFGNIVDEVAYHEKYPTIYHLRKKLVDSTDKADLRLIYLALAHMIKFRGHFLIEGDLNPDNSDVDKLFIQLVQTYNQLFEENPINASGVDAKAILSARLSKSRRLENLIAQLPGEKKNGLFGNLIALSLGLTPNFKSNFDLAEDAKLQLSKDTYDDDLDNLLAQIGDQYADLFLAAKNLSDAILLSDILRVNTEITKAPLSASMIKRYDEHHQDLTLLKALVRQQLPEKYKEIFFDQSKNGYAGYIDGGASQEEFYKFIKPILEKMDGTEELLVKLNREDLLRKQRTFDNGSIPHQIHLGELHAILRRQEDFYPFLKDNREKIEKILTFRIPYYVGPLARGNSRFAWMTRKSEETITPWNFEEVVDKGASAQSFIERMTNFDKNLPNEKVLPKHSLLYEYFTVYNELTKVKYVTEGMRKPAFLSGEQKKAIVDLLFKTNRKVTVKQLKEDYFKKIECFDSVEISGVEDRFNASLGTYHDLLKIIKDKDFLDNEENEDILEDIVLTLTLFEDREMIEERLKTYAHLFDDKVMKQLKRRRYTGWGRLSRKLINGIRDKQSGKTILDFLKSDGFANRNFMQLIHDDSLTFKEDIQKAQVSGQGDSLHEHIANLAGSPAIKKGILQTVKVVDELVKVMGRHKPENIVIEMARENQTTQKGQKNSRERMKRIEEGIKELGSQILKEHPVENTQLQNEKLYLYYLQNGRDMYVDQELDINRLSDYDVDHIVPQSFLKDDSIDNKVLTRSDKARGKSDNVPSEEVVKKMKNYWRQLLNAKLITQRKFDNLTKAERGGLSELDKAGFIKRQLVETRQITKHVAQILDSRMNTKYDENDKLIREVKVITLKSKLVSDFRKDFQFYKVREINNYHHAHDAYLNAVVGTALIKKYPKLESEFVYGDYKVYDVRKMIAKSEQEIGKATAKYFFYSNIMNFFKTEITLANGEIRKRPLIETNGETGEIVWDKGRDFATVRKVLSMPQVNIVKKTEVQTGGFSKESILPKRNSDKLIARKKDWDPKKYGGFDSPTVAYSVLVVAKVEKGKSKKLKSVKELLGITIMERSSFEKNPIDFLEAKGYKEVKKDLIIKLPKYSLFELENGRKRMLASAGELQKGNELALPSKYVNFLYLASHYEKLKGSPEDNEQKQLFVEQHKHYLDEIIEQISEFSKRVILADANLDKVLSAYNKHRDKPIREQAENIIHLFTLTNLGAPAAFKYFDTTIDRKRYTSTKEVLDATLIHQSITGLYETRIDLSQLGGDGGGSSGSSGSSGGTLQLDDEYRLYSPLVKPDQNIQFWLEQFPQAWAETAGMGLAKQVPPQVIQLKASATPVSVRQYPLSKEAQEGIRPHVQRLIQQGILVPVQSPWNTPLLPVRKPGTNDYRPVQDLREVNKRVQDIHPTVPNPYNLLCALPPQRSWYTVLDLKDAFFCLRLHPTSQPLFAFEWRDPGTGRTGQLTWTRLPQGFKNSPTIFDEALHRDLANFRIQHPQVTLLQYVDDLLLAGATKQDCLEGTKALLLELSDLGYRASAKKAQICRREVTYLGYSLRDGQRWLTEARKKTVVQIPAPTTAKQVREFLGTAGFCRLWIPGFATLAAPLYPLTKEKGEFSWAPEHQKAFDAIKKALLSAPALALPDVTKPFTLYVDERKGVARGVLTQTLGPWRRPVAYLSKKLDPVASGWPVCLKAIAAVAILVKDADKLTLGQNITVIAPHALENIVRQPPDRWMTNARMTHYQSLLLTERVTFAPPAALNPATLLPEETDEPVTHDCHQLLIEETGVRKDLTDIPLTGEVLTWFTDGSSYVVEGKRMAGAAVVDGTRTIWASSLPEGTSAQKAELMALTQALRLAEGKSINIYTDSRYAFATAHVHGAIYKQRGLLTSAGREIKNKEEILSLLEALHLPKRLAIIHCPGHQKAKDPISRGNQMADRVAKQAAQGVNLLAGKRTADGSEFEKRTADGSEFESPKKKAKVE

SEQ ID NO: 6314 - protein, 2088 aa, synthetic construct; identical to SEQ ID NO: 6313

SEQ ID NO: 6315 - protein, 2099 aa, synthetic construct
MPAAKRVKLDGGDKKYSIGLDIGTNSVGWAVITDEYKVPSKKFKVLGNTDRHSIKKNLIGALLFDSGETAEATRLKRTARRRYTRRKNRICYLQEIFSNEMAKVDDSFFHRLEESFLVEEDKKHERHPIFGNIVDEVAYHEKYPTIYHLRKKLVDSTDKADLRLIYLALAHMIKFRGHFLIEGDLNPDNSDVDKLFIQLVQTYNQLFEENPINASGVDAKAILSARLSKSRRLENLIAQLPGEKKNGLFGNLIALSLGLTPNFKSNFDLAEDAKLQLSKDTYDDDLDNLLAQIGDQYADLFLAAKNLSDAILLSDILRVNTEITKAPLSASMIKRYDEHHQDLTLLKALVRQQLPEKYKEIFFDQSKNGYAGYIDGGASQEEFYKFIKPILEKMDGTEELLVKLNREDLLRKQRTFDNGSIPHQIHLGELHAILRRQEDFYPFLKDNREKIEKILTFRIPYYVGPLARGNSRFAWMTRKSEETITPWNFEEVVDKGASAQSFIERMTNFDKNLPNEKVLPKHSLLYEYFTVYNELTKVKYVTEGMRKPAFLSGEQKKAIVDLLFKTNRKVTVKQLKEDYFKKIECFDSVEISGVEDRFNASLGTYHDLLKIIKDKDFLDNEENEDILEDIVLTLTLFEDREMIEERLKTYAHLFDDKVMKQLKRRRYTGWGRLSRKLINGIRDKQSGKTILDFLKSDGFANRNFMQLIHDDSLTFKEDIQKAQVSGQGDSLHEHIANLAGSPAIKKGILQTVKVVDELVKVMGRHKPENIVIEMARENQTTQKGQKNSRERMKRIEEGIKELGSQILKEHPVENTQLQNEKLYLYYLQNGRDMYVDQELDINRLSDYDVDHIVPQSFLKDDSIDNKVLTRSDKARGKSDNVPSEEVVKKMKNYWRQLLNAKLITQRKFDNLTKAERGGLSELDKAGFIKRQLVETRQITKHVAQILDSRMNTKYDENDKLIREVKVITLKSKLVSDFRKDFQFYKVREINNYHHAHDAYLNAVVGTALIKKYPKLESEFVYGDYKVYDVRKMIAKSEQEIGKATAKYFFYSNIMNFFKTEITLANGEIRKRPLIETNGETGEIVWDKGRDFATVRKVLSMPQVNIVKKTEVQTGGFSKESILPKRNSDKLIARKKDWDPKKYGGFDSPTVAYSVLVVAKVEKGKSKKLKSVKELLGITIMERSSFEKNPIDFLEAKGYKEVKKDLIIKLPKYSLFELENGRKRMLASAGELQKGNELALPSKYVNFLYLASHYEKLKGSPEDNEQKQLFVEQHKHYLDEIIEQISEFSKRVILADANLDKVLSAYNKHRDKPIREQAENIIHLFTLTNLGAPAAFKYFDTTIDRKRYTSTKEVLDATLIHQSITGLYETRIDLSQLGGDGGGSSGSSGSSGSSGGTAPLEEEYRLFLEAPIQNVTLLEQWKREIPKVWAEINPPGLASTQAPIHVQLLSTALPVRVRQYPITLEAKRSLRETIRKFRAAGILRPVHSPWNTPLLPVRKSGTSEYRMVQDLREVNKRVETIHPTVPNPYTLLSLLPPDRIWYSVLDLKDAFFCIPLAPESQLIFAFEWADAEEGESGQLTWTRLPQGFKNSPTLFDEALNRDLQGFRLDHPSVSLLQYVDDLLIAADTQAACLSATRDLLMTLAELGYRVSGKKAQLCQEEVTYLGFKIHKGSRSLSNSRTQAILQIPVPKTKRQVREFLGTIGYCRLWIPGFAELAQPLYAATRGGNDPLVWGEKEEEAFQSLKLALTQPPALALPSLDKPFQLFVEETSGAAKGVLTQALGPWKRPVAYLSKRLDPVAAGWPRCLRAIAAAALLTREASKLTFGQDIEITSSHNLESLLRSPPDKWLTNARITQYQVLLLDPPRVRFKQTAALNPATLLPETDDTLPIHHCLDTLDSLTSTRPDLTDQPLAQAEATLFTDGSSYIRDGKRYAGAAVVTLDSVIWAEPLPIGTSAQKAELIALTKALEWSKDKSVNIYTDSRYAFATLHVHGMIYRERGLLTAGGKAIKNAPEILALLTAVWLPKRVAVMHCKGHQKDDAPTSTGNRRADEVAREVAIRPLSTQATISAGKRTADGSEFEKRTADGSEFESPKKKAKVE

SEQ ID NO: 6316 - protein, 2099 aa, synthetic construct
MPAAKRVKLDGGDKKYSIGLDIGTNSVGWAVITDEYKVPSKKFKVLGNTDRHSIKKNLIGALLFDSGETAEATRLKRTARRRYTRRKNRICYLQEIFSNEMAKVDDSFFHRLEESFLVEEDKKHERHPIFGNIVDEVAYHEKYPTIYHLRKKLVDSTDKADLRLIYLALAHMIKFRGHFLIEGDLNPDNSDVDKLFIQLVQTYNQLFEENPINASGVDAKAILSARLSKSRRLENLIAQLPGEKKNGLFGNLIALSLGLTPNFKSNFDLAEDAKLQLSKDTYDDDLDNLLAQIGDQYADLFLAAKNLSDAILLSDILRVNTEITKAPLSASMIKRYDEHHQDLTLLKALVRQQLPEKYKEIFFDQSKNGYAGYIDGGASQEEFYKFIKPILEKMDGTEELLVKLNREDLLRKQRTFDNGSIPHQIHLGELHAILRRQEDFYPFLKDNREKIEKILTFRIPYYVGPLARGNSRFAWMTRKSEETITPWNFEEVVDKGASAQSFIERMTNFDKNLPNEKVLPKHSLLYEYFTVYNELTKVKYVTEGMRKPAFLSGEQKKAIVDLLFKTNRKVTVKQLKEDYFKKIECFDSVEISGVEDRFNASLGTYHDLLKIIKDKDFLDNEENEDILEDIVLTLTLFEDREMIEERLKTYAHLFDDKVMKQLKRRRYTGWGRLSRKLINGIRDKQSGKTILDFLKSDGFANRNFMQLIHDDSLTFKEDIQKAQVSGQGDSLHEHIANLAGSPAIKKGILQTVKVVDELVKVMGRHKPENIVIEMARENQTTQKGQKNSRERMKRIEEGIKELGSQILKEHPVENTQLQNEKLYLYYLQNGRDMYVDQELDINRLSDYDVDHIVPQSFLKDDSIDNKVLTRSDKARGKSDNVPSEEVVKKMKNYWRQLLNAKLITQRKFDNLTKAERGGLSELDKAGFIKRQLVETRQITKHVAQILDSRMNTKYDENDKLIREVKVITLKSKLVSDFRKDFQFYKVREINNYHHAHDAYLNAVVGTALIKKYPKLESEFVYGDYKVYDVRKMIAKSEQEIGKATAKYFFYSNIMNFFKTEITLANGEIRKRPLIETNGETGEIVWDKGRDFATVRKVLSMPQVNIVKKTEVQTGGFSKESILPKRNSDKLIARKKDWDPKKYGGFDSPTVAYSVLVVAKVEKGKSKKLKSVKELLGITIMERSSFEKNPIDFLEAKGYKEVKKDLIIKLPKYSLFELENGRKRMLASAGELQKGNELALPSKYVNFLYLASHYEKLKGSPEDNEQKQLFVEQHKHYLDEIIEQISEFSKRVILADANLDKVLSAYNKHRDKPIREQAENIIHLFTLTNLGAPAAFKYFDTTIDRKRYTSTKEVLDATLIHQSITGLYETRIDLSQLGGDGGGSSGSSGSSGSSGGTAPLEEEYRLFLEAPIQNVTLLEQWKREIPKVWAEINPPGLASTQAPIHVQLLSTALPVRVRQYPITLEAKRSLRETIRKFRAAGILRPVHSPWNTPLLPVRKSGTSEYRMVQDLREVNKRVETIHPTVPNPYTLLSLLPPDRIWYSVLDLKDAFFCIPLAPESQLIFAFEWADAEEGESGQLTWTRLPQGFKNSPTLFNEALNRDLQGFRLDHPSVSLLQYVDDLLIAADTQAACLSATRDLLMTLAELGYRVSGKKAQLCQEEVTYLGFKIHKGSRSLSNSRTQAILQIPVPKTKRQVREFLGTIGYCRLWIPGFAELAQPLYAATRPGNDPLVWGEKEEEAFQSLKLALTQPPALALPSLDKPFQLFVEETSGAAKGVLTQALGPWKRPVAYLSKRLDPVAAGWPRCLRAIAAAALLTREASKLTFGQDIEITSSHNLESLLRSPPDKWLTNARITQYQVLLLDPPRVRFKQTAALNPATLLPETDDTLPIHHCLDTLDSLTSTRPDLTDQPLAQAEATLFTDGSSYIRDGKRYAGAAVVTLDSVIWAEPLPIGTSAQKAELIALTKALEWSKDKSVNIYTDSRYAFATLHVHGMIYRERGWLTAGGKAIKNAPEILALLTAVWLPKRVAVMHCKGHQKDDAPTSTGNRRADEVAREVAIRPLSTQATISAGKRTADGSEFEKRTADGSEFESPKKKAKVE

SEQ ID NO: 6317 - protein, 2103 aa, synthetic construct
MPAAKRVKLDGGDKKYSIGLDIGTNSVGWAVITDEYKVPSKKFKVLGNTDRHSIKKNLIGALLFDSGETAEATRLKRTARRRYTRRKNRICYLQEIFSNEMAKVDDSFFHRLEESFLVEEDKKHERHPIFGNIVDEVAYHEKYPTIYHLRKKLVDSTDKADLRLIYLALAHMIKFRGHFLIEGDLNPDNSDVDKLFIQLVQTYNQLFEENPINASGVDAKAILSARLSKSRRLENLIAQLPGEKKNGLFGNLIALSLGLTPNFKSNFDLAEDAKLQLSKDTYDDDLDNLLAQIGDQYADLFLAAKNLSDAILLSDILRVNTEITKAPLSASMIKRYDEHHQDLTLLKALVRQQLPEKYKEIFFDQSKNGYAGYIDGGASQEEFYKFIKPILEKMDGTEELLVKLNREDLLRKQRTFDNGSIPHQIHLGELHAILRRQEDFYPFLKDNREKIEKILTFRIPYYVGPLARGNSRFAWMTRKSEETITPWNFEEVVDKGASAQSFIERMTNFDKNLPNEKVLPKHSLLYEYFTVYNELTKVKYVTEGMRKPAFLSGEQKKAIVDLLFKTNRKVTVKQLKEDYFKKIECFDSVEISGVEDRFNASLGTYHDLLKIIKDKDFLDNEENEDILEDIVLTLTLFEDREMIEERLKTYAHLFDDKVMKQLKRRRYTGWGRLSRKLINGIRDKQSGKTILDFLKSDGFANRNFMQLIHDDSLTFKEDIQKAQVSGQGDSLHEHIANLAGSPAIKKGILQTVKVVDELVKVMGRHKPENIVIEMARENQTTQKGQKNSRERMKRIEEGIKELGSQILKEHPVENTQLQNEKLYLYYLQNGRDMYVDQELDINRLSDYDVDHIVPQSFLKDDSIDNKVLTRSDKARGKSDNVPSEEVVKKMKNYWRQLLNAKLITQRKFDNLTKAERGGLSELDKAGFIKRQLVETRQITKHVAQILDSRMNTKYDENDKLIREVKVITLKSKLVSDFRKDFQFYKVREINNYHHAHDAYLNAVVGTALIKKYPKLESEFVYGDYKVYDVRKMIAKSEQEIGKATAKYFFYSNIMNFFKTEITLANGEIRKRPLIETNGETGEIVWDKGRDFATVRKVLSMPQVNIVKKTEVQTGGFSKESILPKRNSDKLIARKKDWDPKKYGGFDSPTVAYSVLVVAKVEKGKSKKLKSVKELLGITIMERSSFEKNPIDFLEAKGYKEVKKDLIIKLPKYSLFELENGRKRMLASAGELQKGNELALPSKYVNFLYLASHYEKLKGSPEDNEQKQLFVEQHKHYLDEIIEQISEFSKRVILADANLDKVLSAYNKHRDKPIREQAENIIHLFTLTNLGAPAAFKYFDTTIDRKRYTSTKEVLDATLIHQSITGLYETRIDLSQLGGDGGGSSGSSGSSGSSGGTVSLQDEHRLFDIPVTTSLPDVWLQDFPQAWAETGGLGRAKCQAPIIIDLKPTAVPVSIKQYPMSLEAHMGIRQHIIKFLELGVLRPCRSPWNTPLLPVKKPGTQDYRPVQDLREINKRTVDIHPTVPNPYNLLSTLKPDYSWYTVLDLKDAFFCLPLAPQSQELFAFEWKDPERGISGQLTWTRLPQGFKNSPTLFNEALHRDLTDFRTQHPEVTLLQYVDDLLLAAPTKKACTQGTRHLLQELGEKGYRASAKKAQICQTKVTYLGYILSEGKRWLTPGRIETVARIPPPRNPREVREFLGTAGFCRLWIPGFAELAAPLYALTKPSTPFTWQTEHQLAFEALKKALLSAPALGLPDTSKPFTLFLDERQGIAKGVLTQKLGPWKRPVAYLSKKLDPVAAGWPPCLRIMAATAMLVKDSAKLTLGQPLTVITPHTLEAIVRQPPDRWITNARLTHYQALLLDTDRVQFGPPVTLNPATLLPVPENQPSPHDCRQVLAETHGTREDLKDQELPDADHTWYTDGSSYLDSGTRRAGAAVVDGHNTIWAQSLPPGTSAQKAELIALTKALELSKGKKANIYTDSRYAFATAHTHGSIYERRGWLTSEGKEIKNKAEIIALLKALFLPQEVAIIHCPGHQKGQDPVAVGNRQADRVARQAAMAEVLTLATEPDNTSHITAGKRTADGSEFEKRTADGSEFESPKKKAKVE

SEQ ID NO: 6318 - protein, 2096 aa, synthetic construct
MPAAKRVKLDGGDKKYSIGLDIGTNSVGWAVITDEYKVPSKKFKVLGNTDRHSIKKNLIGALLFDSGETAEATRLKRTARRRYTRRKNRICYLQEIFSNEMAKVDDSFFHRLEESFLVEEDKKHERHPIFGNIVDEVAYHEKYPTIYHLRKKLVDSTDKADLRLIYLALAHMIKFRGHFLIEGDLNPDNSDVDKLFIQLVQTYNQLFEENPINASGVDAKAILSARLSKSRRLENLIAQLPGEKKNGLFGNLIALSLGLTPNFKSNFDLAEDAKLQLSKDTYDDDLDNLLAQIGDQYADLFLAAKNLSDAILLSDILRVNTEITKAPLSASMIKRYDEHHQDLTLLKALVRQQLPEKYKEIFFDQSKNGYAGYIDGGASQEEFYKFIKPILEKMDGTEELLVKLNREDLLRKQRTFDNGSIPHQIHLGELHAILRRQEDFYPFLKDNREKIEKILTFRIPYYVGPLARGNSRFAWMTRKSEETITPWNFEEVVDKGASAQSFIERMTNFDKNLPNEKVLPKHSLLYEYFTVYNELTKVKYVTEGMRKPAFLSGEQKKAIVDLLFKTNRKVTVKQLKEDYFKKIECFDSVEISGVEDRFNASLGTYHDLLKIIKDKDFLDNEENEDILEDIVLTLTLFEDREMIEERLKTYAHLFDDKVMKQLKRRRYTGWGRLSRKLINGIRDKQSGKTILDFLKSDGFANRNFMQLIHDDSLTFKEDIQKAQVSGQGDSLHEHIANLAGSPAIKKGILQTVKVVDELVKVMGRHKPENIVIEMARENQTTQKGQKNSRERMKRIEEGIKELGSQILKEHPVENTQLQNEKLYLYYLQNGRDMYVDQELDINRLSDYDVDHIVPQSFLKDDSIDNKVLTRSDKARGKSDNVPSEEVVKKMKNYWRQLLNAKLITQRKFDNLTKAERGGLSELDKAGFIKRQLVETRQITKHVAQILDSRMNTKYDENDKLIREVKVITLKSKLVSDFRKDFQFYKVREINNYHHAHDAYLNAVVGTALIKKYPKLESEFVYGDYKVYDVRKMIAKSEQEIGKATAKYFFYSNIMNFFKTEITLANGEIRKRPLIETNGETGEIVWDKGRDFATVRKVLSMPQVNIVKKTEVQTGGFSKESILPKRNSDKLIARKKDWDPKKYGGFDSPTVAYSVLVVAKVEKGKSKKLKSVKELLGITIMERSSFEKNPIDFLEAKGYKEVKKDLIIKLPKYSLFELENGRKRMLASAGELQKGNELALPSKYVNFLYLASHYEKLKGSPEDNEQKQLFVEQHKHYLDEIIEQISEFSKRVILADANLDKVLSAYNKHRDKPIREQAENIIHLFTLTNLGAPAAFKYFDTTIDRKRYTSTKEVLDATLIHQSITGLYETRIDLSQLGGDGGGSSGSSGSSGSSGGTLQLEEEYRLFEPESTQKQEMDIWLKNFPQAWAETGGMGTAHCQAPVLIQLKATATPISIRQYPMPHEAYQGIKPHIRRMLDQGILKPCQSPWNTPLLPVKKPGTEDYRPVQDLREVNKRVEDIHPTVPNPYNLLSTLPPSHPWYTVLDLKDAFFCLRLHSESQLLFAFEWRDPEIGLSGQLTWTRLPQGFKNSPTLFNEALHSDLADFRVRYPALVLLQYVDDLLLAAATRTECLEGTKALLETLGNKGYRASAKKAQICLQEVTYLGYSLKDGQRWLTKARKEAILSIPVPKNSRQVREFLGTAGYCRLWIPGFAELAAPLYPLTRPGTLFQWGTEQQLAFEDIKKALLSSPALGLPDITKPFELFIDENSGFAKGVLVQKLGPWKRPVAYLSKKLDTVASGWPPCLRMVAAIAILVKDAGKLTLGQPLTILTSHPVEALVRQPPNKWLSNARMTHYQAMLLDAERVHFGPTVSLNPATLLPLPSGGNHHDCLQILAETHGTRPDLTDQPLPDADLTWYTDGSSFIRNGEREAGAAVTTESEVIWAAPLPPGTSAQRAELIALTQALKMAEGKKLTVYTDSRYAFATTHVHGEIYRRRGWLTSEGKEIKNKNEILALLEALFLPKRLSIIHCPGHQKGDSPQAKGNRLADDTAKKAATETHSSLTVLPAGKRTADGSEFEKRTADGSEFESPKKKAKVE

SEQ ID NO: 6319 - protein, 2219 aa, synthetic construct
MPAAKRVKLDGGDKKYSIGLDIGTNSVGWAVITDEYKVPSKKFKVLGNTDRHSIKKNLIGALLFDSGETAEATRLKRTARRRYTRRKNRICYLQEIFSNEMAKVDDSFFHRLEESFLVEEDKKHERHPIFGNIVDEVAYHEKYPTIYHLRKKLVDSTDKADLRLIYLALAHMIKFRGHFLIEGDLNPDNSDVDKLFIQLVQTYNQLFEENPINASGVDAKAILSARLSKSRRLENLIAQLPGEKKNGLFGNLIALSLGLTPNFKSNFDLAEDAKLQLSKDTYDDDLDNLLAQIGDQYADLFLAAKNLSDAILLSDILRVNTEITKAPLSASMIKRYDEHHQDLTLLKALVRQQLPEKYKEIFFDQSKNGYAGYIDGGASQEEFYKFIKPILEKMDGTEELLVKLNREDLLRKQRTFDNGSIPHQIHLGELHAILRRQEDFYPFLKDNREKIEKILTFRIPYYVGPLARGNSRFAWMTRKSEETITPWNFEEVVDKGASAQSFIERMTNFDKNLPNEKVLPKHSLLYEYFTVYNELTKVKYVTEGMRKPAFLSGEQKKAIVDLLFKTNRKVTVKQLKEDYFKKIECFDSVEISGVEDRFNASLGTYHDLLKIIKDKDFLDNEENEDILEDIVLTLTLFEDREMIEERLKTYAHLFDDKVMKQLKRRRYTGWGRLSRKLINGIRDKQSGKTILDFLKSDGFANRNFMQLIHDDSLTFKEDIQKAQVSGQGDSLHEHIANLAGSPAIKKGILQTVKVVDELVKVMGRHKPENIVIEMARENQTTQKGQKNSRERMKRIEEGIKELGSQILKEHPVENTQLQNEKLYLYYLQNGRDMYVDQELDINRLSDYDVDHIVPQSFLKDDSIDNKVLTRSDKARGKSDNVPSEEVVKKMKNYWRQLLNAKLITQRKFDNLTKAERGGLSELDKAGFIKRQLVETRQITKHVAQILDSRMNTKYDENDKLIREVKVITLKSKLVSDFRKDFQFYKVREINNYHHAHDAYLNAVVGTALIKKYPKLESEFVYGDYKVYDVRKMIAKSEQEIGKATAKYFFYSNIMNFFKTEITLANGEIRKRPLIETNGETGEIVWDKGRDFATVRKVLSMPQVNIVKKTEVQTGGFSKESILPKRNSDKLIARKKDWDPKKYGGFDSPTVAYSVLVVAKVEKGKSKKLKSVKELLGITIMERSSFEKNPIDFLEAKGYKEVKKDLIIKLPKYSLFELENGRKRMLASAGELQKGNELALPSKYVNFLYLASHYEKLKGSPEDNEQKQLFVEQHKHYLDEIIEQISEFSKRVILADANLDKVLSAYNKHRDKPIREQAENIIHLFTLTNLGAPAAFKYFDTTIDRKRYTSTKEVLDATLIHQSITGLYETRIDLSQLGGDGGGSSGSSGSSGSSGGTLGDQGSRGSDPLPEPRVTLTVEGIPTEFLVNTGAEHSVLTKPMGKMGSKRTVVAGATGSKVYPWTTKRLLKIGQKQVTHSFLVIPECPAPLLGRDLLTKLKAQIQFSTEGPQVTWEDRPAMCLVLNLEEEYRLHEKPVPPSIDPSWLQLFPMVWAEKAGMGLANQVPPVVVELKSDASPVAVRQYPMSKEAREGIRPHIQRFLDLGILVPCQSPWNTPLLPVKKPGTNDYRPVQDLREVNKRVQDIHPTVPNPYNLLSSLPPSHTWYSVLDLKDAFFCLKLHPNSQPLFAFEWRDPEKGNTGQLTWTRLPQGFKNSPTLFDEALHRDLASFRALNPQVVMLQYVDDLLVAAPTYRDCKEGTRRLLQELSKLGYRVSAKKAQLCREEVTYLGYLLKGGKRWLTPARKATVMKIPTPTTPRQVREFLGTAGFCRLWIPGFASLAAPLYPLTREKVPFTWTEAHQEAFGRIKEALLSAPALALPDLTKPFALYVDEKEGVARGVLTQTLGPWRRPVAYLSKKLDPVASGWPTCLKAIAAVALLLKDADKLTLGQNVLVIAPHNLESIVRQPPDRWMTNARMTHYQSLLLNERVSFAPPAILNPATLLPVESDDTPIHICSEILAEETGTRPDLRDQPLPGVPAWYTDGSSFIMDGRRQAGAAIVDNKRTVWASNLPEGTSAQKAELIALTQALRLAEGKSINIYTDSRYAFATAHVHGAIYKQRGLLTSAGKDIKNKEEILALLEAIHLPKRVAIIHCPGHQRGTDPVATGNRKADEAAKQAAQSTRILTETTKNAGKRTADGSEFEKRTADGSEFESPKKKAKVE

SEQ ID NO: 6320 - protein, 2128 aa, synthetic construct
MPAAKRVKLDGGDKKYSIGLDIGTNSVGWAVITDEYKVPSKKFKVLGNTDRHSIKKNLIGALLFDSGETAEATRLKRTARRRYTRRKNRICYLQEIFSNEMAKVDDSFFHRLEESFLVEEDKKHERHPIFGNIVDEVAYHEKYPTIYHLRKKLVDSTDKADLRLIYLALAHMIKFRGHFLIEGDLNPDNSDVDKLFIQLVQTYNQLFEENPINASGVDAKAILSARLSKSRRLENLIAQLPGEKKNGLFGNLIALSLGLTPNFKSNFDLAEDAKLQLSKDTYDDDLDNLLAQIGDQYADLFLAAKNLSDAILLSDILRVNTEITKAPLSASMIKRYDEHHQDLTLLKALVRQQLPEKYKEIFFDQSKNGYAGYIDGGASQEEFYKFIKPILEKMDGTEELLVKLNREDLLRKQRTFDNGSIPHQIHLGELHAILRRQEDFYPFLKDNREKIEKILTFRIPYYVGPLARGNSRFAWMTRKSEETITPWNFEEVVDKGASAQSFIERMTNFDKNLPNEKVLPKHSLLYEYFTVYNELTKVKYVTEGMRKPAFLSGEQKKAIVDLLFKTNRKVTVKQLKEDYFKKIECFDSVEISGVEDRFNASLGTYHDLLKIIKDKDFLDNEENEDILEDIVLTLTLFEDREMIEERLKTYAHLFDDKVMKQLKRRRYTGWGRLSRKLINGIRDKQSGKTILDFLKSDGFANRNFMQLIHDDSLTFKEDIQKAQVSGQGDSLHEHIANLAGSPAIKKGILQTVKVVDELVKVMGRHKPENIVIEMARENQTTQKGQKNSRERMKRIEEGIKELGSQILKEHPVENTQLQNEKLYLYYLQNGRDMYVDQELDINRLSDYDVDHIVPQSFLKDDSIDNKVLTRSDKARGKSDNVPSEEVVKKMKNYWRQLLNAKLITQRKFDNLTKAERGGLSELDKAGFIKRQLVETRQITKHVAQILDSRMNTKYDENDKLIREVKVITLKSKLVSDFRKDFQFYKVREINNYHHAHDAYLNAVVGTALIKKYPKLESEFVYGDYKVYDVRKMIAKSEQEIGKATAKYFFYSNIMNFFKTEITLANGEIRKRPLIETNGETGEIVWDKGRDFATVRKVLSMPQVNIVKKTEVQTGGFSKESILPKRNSDKLIARKKDWDPKKYGGFDSPTVAYSVLVVAKVEKGKSKKLKSVKELLGITIMERSSFEKNPIDFLEAKGYKEVKKDLIIKLPKYSLFELENGRKRMLASAGELQKGNELALPSKYVNFLYLASHYEKLKGSPEDNEQKQLFVEQHKHYLDEIIEQISEFSKRVILADANLDKVLSAYNKHRDKPIREQAENIIHLFTLTNLGAPAAFKYFDTTIDRKRYTSTKEVLDATLIHQSITGLYETRIDLSQLGGDGGGSSGSSGSSGSSGGLLGRDLLTKLKAQIQFSTEGPQVTWEDRPAMCLVLNLEEEYRLHEKPVPPSIDPSWLQLFPMVWAEKAGMGLANQVPPVVVELKSDASPVAVRQYPMSKEAREGIRPHIQRFLDLGILVPCQSPWNTPLLPVKKPGTNDYRPVQDLREVNKRVQDIHPTVPNPYNLLSSLPPSHTWYSVLDLKDAFFCLKLHPNSQPLFAFEWRDPEKGNTGQLTWTRLPQGFKNSPTLFNEALHRDLASFRALNPQVVMLQYVDDLLVAAPTYRDCKEGTRRLLQELSKLGYRVSAKKAQLCREEVTYLGYLLKGGKRWLTPARKATVMKIPTPTTPRQVREFLGTAGFCRLWIPGFASLAAPLYPLTRPKVPFTWTEAHQEAFGRIKEALLSAPALALPDLTKPFALYVDEKEGVARGVLTQTLGPWRRPVAYLSKKLDPVASGWPTCLKAIAAVALLLKDADKLTLGQNVLVIAPHNLESIVRQPPDRWMTNARMTHYQSLLLNERVSFAPPAILNPATLLPVESDDTPIHICSEILAEETGTRPDLRDQPLPGVPAWYTDGSSFIMDGRRQAGAAIVDNKRTVWASNLPEGTSAQKAELIALTQALRLAEGKSINIYTDSRYAFATAHVHGAIYKQRGWLTSAGKDIKNKEEILALLEAIHLPKRVAIIHCPGHQRGTDPVATGNRKADEAAKQAAQSTRILTETTKNAGKRTADGSEFEKRTADGSEFESPKKKAKVE

SEQ ID NO: 6321 - protein, 2219 aa, synthetic construct
MPAAKRVKLDGGDKKYSIGLDIGTNSVGWAVITDEYKVPSKKFKVLGNTDRHSIKKNLIGALLFDSGETAEATRLKRTARRRYTRRKNRICYLQEIFSNEMAKVDDSFFHRLEESFLVEEDKKHERHPIFGNIVDEVAYHEKYPTIYHLRKKLVDSTDKADLRLIYLALAHMIKFRGHFLIEGDLNPDNSDVDKLFIQLVQTYNQLFEENPINASGVDAKAILSARLSKSRRLENLIAQLPGEKKNGLFGNLIALSLGLTPNFKSNFDLAEDAKLQLSKDTYDDDLDNLLAQIGDQYADLFLAAKNLSDAILLSDILRVNTEITKAPLSASMIKRYDEHHQDLTLLKALVRQQLPEKYKEIFFDQSKNGYAGYIDGGASQEEFYKFIKPILEKMDGTEELLVKLNREDLLRKQRTFDNGSIPHQIHLGELHAILRRQEDFYPFLKDNREKIEKILTFRIPYYVGPLARGNSRFAWMTRKSEETITPWNFEEVVDKGASAQSFIERMTNFDKNLPNEKVLPKHSLLYEYFTVYNELTKVKYVTEGMRKPAFLSGEQKKAIVDLLFKTNRKVTVKQLKEDYFKKIECFDSVEISGVEDRFNASLGTYHDLLKIIKDKDFLDNEENEDILEDIVLTLTLFEDREMIEERLKTYAHLFDDKVMKQLKRRRYTGWGRLSRKLINGIRDKQSGKTILDFLKSDGFANRNFMQLIHDDSLTFKEDIQKAQVSGQGDSLHEHIANLAGSPAIKKGILQTVKVVDELVKVMGRHKPENIVIEMARENQTTQKGQKNSRERMKRIEEGIKELGSQILKEHPVENTQLQNEKLYLYYLQNGRDMYVDQELDINRLSDYDVDHIVPQSFLKDDSIDNKVLTRSDKARGKSDNVPSEEVVKKMKNYWRQLLNAKLITQRKFDNLTKAERGGLSELDKAGFIKRQLVETRQITKHVAQILDSRMNTKYDENDKLIREVKVITLKSKLVSDFRKDFQFYKVREINNYHHAHDAYLNAVVGTALIKKYPKLESEFVYGDYKVYDVRKMIAKSEQEIGKATAKYFFYSNIMNFFKTEITLANGEIRKRPLIETNGETGEIVWDKGRDFATVRKVLSMPQVNIVKKTEVQTGGFSKESILPKRNSDKLIARKKDWDPKKYGGFDSPTVAYSVLVVAKVEKGKSKKLKSVKELLGITIMERSSFEKNPIDFLEAKGYKEVKKDLIIKLPKYSLFELENGRKRMLASAGELQKGNELALPSKYVNFLYLASHYEKLKGSPEDNEQKQLFVEQHKHYLDEIIEQISEFSKRVILADANLDKVLSAYNKHRDKPIREQAENIIHLFTLTNLGAPAAFKYFDTTIDRKRYTSTKEVLDATLIHQSITGLYETRIDLSQLGGDGGGSSGSSGSSGSSGGTLGDQGSRGSDPLPEPRVTLTVEGIPTEFLVNTGAEHSVLTKPMGKMGSKRTVVAGATGSKVYPWTTKRLLKIGQKQVTHSFLVIPECPAPLLGRDLLTKLKAQIQFSTEGPQVTWEDRPAMCLVLNLEEEYRLHEKPVPPSIDPSWLQLFPMVWAEKAGMGLANQVPPVVVELKSDASPVAVRQYPMSKEAREGIRPHIQRFLDLGILVPCQSPWNTPLLPVKKPGTNDYRPVQDLREVNKRVQDIHPTVPNPYNLLSSLPPSHTWYSVLDLKDAFFCLKLHPNSQPLFAFEWRDPEKGNTGQLTWTRLPQGFKNSPTLFNEALHRDLASFRALNPQVVMLQYVDDLLVAAPTYRDCKEGTRRLLQELSKLGYRVSAKKAQLCREEVTYLGYLLKGGKRWLTPARKATVMKIPTPTTPRQVREFLGKAGFCRLFIPGFASLAAPLYPLTRPKVPFTWTEAHQEAFGRIKEALLSAPALALPDLTKPFALYVDEKEGVARGVLTQTLGPWRRPVAYLSKKLDPVASGWPTCLKAIAAVALLLKDADKLTLGQNVLVIAPHNLESIVRQPPDRWMTNARMTHYQSLLLNERVSFAPPAILNPATLLPVESDDTPIHICSEILAEETGTRPDLRDQPLPGVPAWYTDGSSFIMDGRRQAGAAIVDNKRTVWASNLPEGTSAQKAELIALTQALRLAEGKSINIYTDSRYAFATAHVHGAIYKQRGWLTSAGKDIKNKEEILALLEAIHLPKRVAIIHCPGHQRGTDPVATGNRKADEAAKQAAQSTRILTETTKNAGKRTADGSEFEKRTADGSEFESPKKKAKVE

SEQ ID NO: 6322 - protein, 2097 aa, synthetic construct
MPAAKRVKLDGGDKKYSIGLDIGTNSVGWAVITDEYKVPSKKFKVLGNTDRHSIKKNLIGALLFDSGETAEATRLKRTARRRYTRRKNRICYLQEIFSNEMAKVDDSFFHRLEESFLVEEDKKHERHPIFGNIVDEVAYHEKYPTIYHLRKKLVDSTDKADLRLIYLALAHMIKFRGHFLIEGDLNPDNSDVDKLFIQLVQTYNQLFEENPINASGVDAKAILSARLSKSRRLENLIAQLPGEKKNGLFGNLIALSLGLTPNFKSNFDLAEDAKLQLSKDTYDDDLDNLLAQIGDQYADLFLAAKNLSDAILLSDILRVNTEITKAPLSASMIKRYDEHHQDLTLLKALVRQQLPEKYKEIFFDQSKNGYAGYIDGGASQEEFYKFIKPILEKMDGTEELLVKLNREDLLRKQRTFDNGSIPHQIHLGELHAILRRQEDFYPFLKDNREKIEKILTFRIPYYVGPLARGNSRFAWMTRKSEETITPWNFEEVVDKGASAQSFIERMTNFDKNLPNEKVLPKHSLLYEYFTVYNELTKVKYVTEGMRKPAFLSGEQKKAIVDLLFKTNRKVTVKQLKEDYFKKIECFDSVEISGVEDRFNASLGTYHDLLKIIKDKDFLDNEENEDILEDIVLTLTLFEDREMIEERLKTYAHLFDDKVMKQLKRRRYTGWGRLSRKLINGIRDKQSGKTILDFLKSDGFANRNFMQLIHDDSLTFKEDIQKAQVSGQGDSLHEHIANLAGSPAIKKGILQTVKVVDELVKVMGRHKPENIVIEMARENQTTQKGQKNSRERMKRIEEGIKELGSQILKEHPVENTQLQNEKLYLYYLQNGRDMYVDQELDINRLSDYDVDHIVPQSFLKDDSIDNKVLTRSDKARGKSDNVPSEEVVKKMKNYWRQLLNAKLITQRKFDNLTKAERGGLSELDKAGFIKRQLVETRQITKHVAQILDSRMNTKYDENDKLIREVKVITLKSKLVSDFRKDFQFYKVREINNYHHAHDAYLNAVVGTALIKKYPKLESEFVYGDYKVYDVRKMIAKSEQEIGKATAKYFFYSNIMNFFKTEITLANGEIRKRPLIETNGETGEIVWDKGRDFATVRKVLSMPQVNIVKKTEVQTGGFSKESILPKRNSDKLIARKKDWDPKKYGGFDSPTVAYSVLVVAKVEKGKSKKLKSVKELLGITIMERSSFEKNPIDFLEAKGYKEVKKDLIIKLPKYSLFELENGRKRMLASAGELQKGNELALPSKYVNFLYLASHYEKLKGSPEDNEQKQLFVEQHKHYLDEIIEQISEFSKRVILADANLDKVLSAYNKHRDKPIREQAENIIHLFTLTNLGAPAAFKYFDTTIDRKRYTSTKEVLDATLIHQSITGLYETRIDLSQLGGDGGGSSGSSGSSGSSGGLGIEDEYRLHETSTEPDVSLGSTWLSDFPQAWAETGGMGLAVRQAPLIIPLKATSTPVSIQQYPMSHEARLGIKPHIQRLLDQGILVPCQSPWNTPLLPVKKPGTNDYRPVQDLREVNKRVEDIHPTVPNPYNLLSGLPPSHQWYTVLDLKDAFFCLRLHPTSQPLFAFEWRDPGMGISGQLTWTRLPQGFKNSPTLFNEALHRDLADFRIQHPDLILLQYVDDILLAATSELDCQQGTRALLQTLGDLGYRASAKKAQICQKQVKYLGYLLREGQRWLTEARKETVMGQPVPKTPRQLREFLGKAGFCRLFIPGFAEMAAPLYPLTKPGTLFSWGPDQQKAYQEIKQALLTAPALGLPDLTKPFELFVDEKQGYAKGVLTQKLGPWRRPVAYLSKKLDPVAAGWPPCLRMVAAIAVLTKDAGKLTMGQPLVILAPHAVEALVKQPPDRWLSNARMTHYQAMLLDTDRVQFGPVVALNPATLLPLPEEGAPHDCLEILAETHGTRPDLTDQPIPDADHTWYTDGSSFLQEGQRKAGAAVTTETEVIWAGALPAGTSAQRAELIALTQALKMAEGKRLNVYTDSRYAFATAHIHGEIYRRRGWLTSEGREIKNKSEILALLKALFLPKRLSIIHCLGHQKGDSAEARGNRLADQAAREAAIKTPPDTSTLLIAGKRTADGSEFEKRTADGSEFESPKKKAKVE

SEQ ID NO: 6323 - protein, 2097 aa, synthetic construct
MPAAKRVKLDGGDKKYSIGLDIGTNSVGWAVITDEYKVPSKKFKVLGNTDRHSIKKNLIGALLFDSGETAEATRLKRTARRRYTRRKNRICYLQEIFSNEMAKVDDSFFHRLEESFLVEEDKKHERHPIFGNIVDEVAYHEKYPTIYHLRKKLVDSTDKADLRLIYLALAHMIKFRGHFLIEGDLNPDNSDVDKLFIQLVQTYNQLFEENPINASGVDAKAILSARLSKSRRLENLIAQLPGEKKNGLFGNLIALSLGLTPNFKSNFDLAEDAKLQLSKDTYDDDLDNLLAQIGDQYADLFLAAKNLSDAILLSDILRVNTEITKAPLSASMIKRYDEHHQDLTLLKALVRQQLPEKYKEIFFDQSKNGYAGYIDGGASQEEFYKFIKPILEKMDGTEELLVKLNREDLLRKQRTFDNGSIPHQIHLGELHAILRRQEDFYPFLKDNREKIEKILTFRIPYYVGPLARGNSRFAWMTRKSEETITPWNFEEVVDKGASAQSFIERMTNFDKNLPNEKVLPKHSLLYEYFTVYNELTKVKYVTEGMRKPAFLSGEQKKAIVDLLFKTNRKVTVKQLKEDYFKKIECFDSVEISGVEDRFNASLGTYHDLLKIIKDKDFLDNEENEDILEDIVLTLTLFEDREMIEERLKTYAHLFDDKVMKQLKRRRYTGWGRLSRKLINGIRDKQSGKTILDFLKSDGFANRNFMQLIHDDSLTFKEDIQKAQVSGQGDSLHEHIANLAGSPAIKKGILQTVKVVDELVKVMGRHKPENIVIEMARENQTTQKGQKNSRERMKRIEEGIKELGSQILKEHPVENTQLQNEKLYLYYLQNGRDMYVDQELDINRLSDYDVDHIVPQSFLKDDSIDNKVLTRSDKARGKSDNVPSEEVVKKMKNYWRQLLNAKLITQRKFDNLTKAERGGLSELDKAGFIKRQLVETRQITKHVAQILDSRMNTKYDENDKLIREVKVITLKSKLVSDFRKDFQFYKVREINNYHHAHDAYLNAVVGTALIKKYPKLESEFVYGDYKVYDVRKMIAKSEQEIGKATAKYFFYSNIMNFFKTEITLANGEIRKRPLIETNGETGEIVWDKGRDFATVRKVLSMPQVNIVKKTEVQTGGFSKESILPKRNSDKLIARKKDWDPKKYGGFDSPTVAYSVLVVAKVEKGKSKKLKSVKELLGITIMERSSFEKNPIDFLEAKGYKEVKKDLIIKLPKYSLFELENGRKRMLASAGELQKGNELALPSKYVNFLYLASHYEKLKGSPEDNEQKQLFVEQHKHYLDEIIEQISEFSKRVILADANLDKVLSAYNKHRDKPIREQAENIIHLFTLTNLGAPAAFKYFDTTIDRKRYTSTKEVLDATLIHQSITGLYETRIDLSQLGGDGGGSSGSSGSSGSSGGTLGIEDEYRLHETSTEPDVSLGSTWLSDFPQAWAETGGMGLAVRQAPLIIPLKATSTPVSIQQYPMSHEARLGIKPHIQRLLDQGILVPCQSPWNTPLLPVKKPGTNDYRPVQDLREVNKRVEDIHPTVPNPYNLLSGLPPSHQWYTVLDLKDAFFCLRLHPTSQPLFAFEWRDPGMGISGQLTWTRLPQGFKNSPTLFNEALHRDLADFRIQHPDLILLQYVDDILLAATSELDCQQGTRALLQTLGDLGYRASAKKAQICQKQVKYLGYLLREGQRWLTEARKETVMGQPVPKTPRQLREFLGTAGFCRLWIPGFAEMAAPLYPLTKPGTLFSWGPDQQKAYQEIKQALLTAPALGLPDLTKPFELFVDEKQGYAKGVLTQKLGPWRRPVAYLSKKLDPVAAGWPPCLRMVAAIAVLTKDAGKLTMGQPLVILAPHAVEALVKQPPDRWLSNARMTHYQAMLLDTDRVQFGPVVALNPATLLPLPEEGAPHDCLEILAETHGTRPDLTDQPIPDADHTWYTDGSSFLQEGQRKAGAAVTTETEVIWAGALPAGTSAQRAELIALTQALKMAEGKRLNVYTDSRYAFATAHIHGEIYRRRGWLTSEGREIKNKSEILALLKALFLPKRLSIIHCLGHQKGDSAEARGNRLADQAAREAAIKTPPDTSTLLAGKRTADGSEFEKRTADGSEFESPKKKAKVE

SEQ ID NO: 6324 - protein, 2097 aa, synthetic construct
MPAAKRVKLDGGDKKYSIGLDIGTNSVGWAVITDEYKVPSKKFKVLGNTDRHSIKKNLIGALLFDSGETAEATRLKRTARRRYTRRKNRICYLQEIFSNEMAKVDDSFFHRLEESFLVEEDKKHERHPIFGNIVDEVAYHEKYPTIYHLRKKLVDSTDKADLRLIYLALAHMIKFRGHFLIEGDLNPDNSDVDKLFIQLVQTYNQLFEENPINASGVDAKAILSARLSKSRRLENLIAQLPGEKKNGLFGNLIALSLGLTPNFKSNFDLAEDAKLQLSKDTYDDDLDNLLAQIGDQYADLFLAAKNLSDAILLSDILRVNTEITKAPLSASMIKRYDEHHQDLTLLKALVRQQLPEKYKEIFFDQSKNGYAGYIDGGASQEEFYKFIKPILEKMDGTEELLVKLNREDLLRKQRTFDNGSIPHQIHLGELHAILRRQEDFYPFLKDNREKIEKILTFRIPYYVGPLARGNSRFAWMTRKSEETITPWNFEEVVDKGASAQSFIERMTNFDKNLPNEKVLPKHSLLYEYFTVYNELTKVKYVTEGMRKPAFLSGEQKKAIVDLLFKTNRKVTVKQLKEDYFKKIECFDSVEISGVEDRFNASLGTYHDLLKIIKDKDFLDNEENEDILEDIVLTLTLFEDREMIEERLKTYAHLFDDKVMKQLKRRRYTGWGRLSRKLINGIRDKQSGKTILDFLKSDGFANRNFMQLIHDDSLTFKEDIQKAQVSGQGDSLHEHIANLAGSPAIKKGILQTVKVVDELVKVMGRHKPENIVIEMARENQTTQKGQKNSRERMKRIEEGIKELGSQILKEHPVENTQLQNEKLYLYYLQNGRDMYVDQELDINRLSDYDVDHIVPQSFLKDDSIDNKVLTRSDKARGKSDNVPSEEVVKKMKNYWRQLLNAKLITQRKFDNLTKAERGGLSELDKAGFIKRQLVETRQITKHVAQILDSRMNTKYDENDKLIREVKVITLKSKLVSDFRKDFQFYKVREINNYHHAHDAYLNAVVGTALIKKYPKLESEFVYGDYKVYDVRKMIAKSEQEIGKATAKYFFYSNIMNFFKTEITLANGEIRKRPLIETNGETGEIVWDKGRDFATVRKVLSMPQVNIVKKTEVQTGGFSKESILPKRNSDKLIARKKDWDPKKYGGFDSPTVAYSVLVVAKVEKGKSKKLKSVKELLGITIMERSSFEKNPIDFLEAKGYKEVKKDLIIKLPKYSLFELENGRKRMLASAGELQKGNELALPSKYVNFLYLASHYEKLKGSPEDNEQKQLFVEQHKHYLDEIIEQISEFSKRVILADANLDKVLSAYNKHRDKPIREQAENIIHLFTLTNLGAPAAFKYFDTTIDRKRYTSTKEVLDATLIHQSITGLYETRIDLSQLGGDGGGSSGSSGSSGSSGGTLNIEDEYRLHETSKGPDVPLGSTWLSDFPQAWAETGGMGLAVRQAPLIIPLKATSTPVSIKQYPMSQEARLGIKPHIQRLLDQGILVPCQSPWNTPLLPVKKPGTNDYRPVQDLREVNKRVEDIHPTVPNPYNLLSGLPPSHQWYTVLDLKDAFFCLRLHPTSQSLFAFEWRDPEMGISGQLTWTRLPQGFKNSPTLFNEALHRDLADFRIQHPDLILLQYVDDLLLAATSELDCQQGTRALLQTLGDLGYRASAKKAQICQKQVKYLGYLLKEGQRWLTEARKETVMGQPTPKTPRQLREFLGTAGFCRLWIPGFAEMAAPLYPLTKPGTLFEWGPDQQKAYQEIKQALLTAPALGLPDLTKPFELFVDEKQGYAKGVLTQKLGPWRRPVAYLSKKLDPVAAGWPPCLRMVAAIAVLTKDAGKLTMGQPLVILAPHAVEALVKQPPDRWLSNARMTHYQALLLDTDRVQFGPIVALNPATLLPLPEEGLQHDCLDILAEAHGTRPDLTDQPLPDADHTWYTDGSSFLQEGQRKAGAAVTTETEVVWAKALPAGTSAQRAELIALTQALKMAEGKKLNVYTDSRYAFATAHIHGEIYRRRGWLTSEGKEIKNKDEILALLKALFLPKRLSIIHCPGHQKGNRAEARGNRMADQAAREVATRETPETSTLLAGKRTADGSEFEKRTADGSEFESPKKKAKVE

SEQ ID NO: 6325 - protein, 2088 aa, synthetic construct
MPAAKRVKLDGGDKKYSIGLDIGTNSVGWAVITDEYKVPSKKFKVLGNTDRHSIKKNLIGALLFDSGETAEATRLKRTARRRYTRRKNRICYLQEIFSNEMAKVDDSFFHRLEESFLVEEDKKHERHPIFGNIVDEVAYHEKYPTIYHLRKKLVDSTDKADLRLIYLALAHMIKFRGHFLIEGDLNPDNSDVDKLFIQLVQTYNQLFEENPINASGVDAKAILSARLSKSRRLENLIAQLPGEKKNGLFGNLIALSLGLTPNFKSNFDLAEDAKLQLSKDTYDDDLDNLLAQIGDQYADLFLAAKNLSDAILLSDILRVNTEITKAPLSASMIKRYDEHHQDLTLLKALVRQQLPEKYKEIFFDQSKNGYAGYIDGGASQEEFYKFIKPILEKMDGTEELLVKLNREDLLRKQRTFDNGSIPHQIHLGELHAILRRQEDFYPFLKDNREKIEKILTFRIPYYVGPLARGNSRFAWMTRKSEETITPWNFEEVVDKGASAQSFIERMTNFDKNLPNEKVLPKHSLLYEYFTVYNELTKVKYVTEGMRKPAFLSGEQKKAIVDLLFKTNRKVTVKQLKEDYFKKIECFDSVEISGVEDRFNASLGTYHDLLKIIKDKDFLDNEENEDILEDIVLTLTLFEDREMIEERLKTYAHLFDDKVMKQLKRRRYTGWGRLSRKLINGIRDKQSGKTILDFLKSDGFANRNFMQLIHDDSLTFKEDIQKAQVSGQGDSLHEHIANLAGSPAIKKGILQTVKVVDELVKVMGRHKPENIVIEMARENQTTQKGQKNSRERMKRIEEGIKELGSQILKEHPVENTQLQNEKLYLYYLQNGRDMYVDQELDINRLSDYDVDHIVPQSFLKDDSIDNKVLTRSDKARGKSDNVPSEEVVKKMKNYWRQLLNAKLITQRKFDNLTKAERGGLSELDKAGFIKRQLVETRQITKHVAQILDSRMNTKYDENDKLIREVKVITLKSKLVSDFRKDFQFYKVREINNYHHAHDAYLNAVVGTALIKKYPKLESEFVYGDYKVYDVRKMIAKSEQEIGKATAKYFFYSNIMNFFKTEITLANGEIRKRPLIETNGETGEIVWDKGRDFATVRKVLSMPQVNIVKKTEVQTGGFSKESILPKRNSDKLIARKKDWDPKKYGGFDSPTVAYSVLVVAKVEKGKSKKLKSVKELLGITIMERSSFEKNPIDFLEAKGYKEVKKDLIIKLPKYSLFELENGRKRMLASAGELQKGNELALPSKYVNFLYLASHYEKLKGSPEDNEQKQLFVEQHKHYLDEIIEQISEFSKRVILADANLDKVLSAYNKHRDKPIREQAENIIHLFTLTNLGAPAAFKYFDTTIDRKRYTSTKEVLDATLIHQSITGLYETRIDLSQLGGDGGGSSGSSGSSGSSGGIPWLMKKPLQLTTLVPLQEYEERLLKQTMLTGSYKEKLQSLFLKYDALWQHWENQVGHRRIKPHHIATGTVNPRPQKQYPINPKAKASIQTVINDLLKQGVLIQQNSIMNTPVYPVPKPDGKWRMVLDYREVNKTIPLIAAQNQHSAGILSSIFRGKYKTTLDLSNGFWAHSITPESYWLTAFTWLGQQYCWTRLPQGFLNSPALFNADVVDLLKEVPNVQVYVDDIYISHDDPREHLEQLEKVFSLLLNAGYVVSLKKSEIAQHEVEFLGFNITKEGRGLTETFKQKLLNITPPRDLKQLQSILGLLNFARNFIPNFSELVKPLYNIIATAPGKYITWTTDNSQQLQNIISMLNSAENLEERNPEVRLIMKVNTSPSAGYIRFYNEFAKRPIMYLNYVYTKAEVKFTNTEKLLTTIHKGLIKALDLGMGQEILVYSPIVSMTKIQKTPLPERKALPIRWITWMSYLEDPRIQFHYDKTLPELQQVPTVTDDIIAKIKHPSEFSMVFYTDGSAIKHPNVNKSHNAGMGIAQVQFKPEFTVINTWSIPLGDHTAQLAEVAAVEFACKKALKIDGPVLIVTDSFYVAESVNKELPYWQSNGFFNNKKKPLKHVSKWKSIADCIQLKPDIIIIHEKGHQPTASTFHTEGNNLADKLATQGSYVVNAGKRTADGSEFEKRTADGSEFESPKKKAKVE

SEQ ID NO: 6326 - protein, 2177 aa, synthetic construct
MPAAKRVKLDGGDKKYSIGLDIGTNSVGWAVITDEYKVPSKKFKVLGNTDRHSIKKNLIGALLFDSGETAEATRLKRTARRRYTRRKNRICYLQEIFSNEMAKVDDSFFHRLEESFLVEEDKKHERHPIFGNIVDEVAYHEKYPTIYHLRKKLVDSTDKADLRLIYLALAHMIKFRGHFLIEGDLNPDNSDVDKLFIQLVQTYNQLFEENPINASGVDAKAILSARLSKSRRLENLIAQLPGEKKNGLFGNLIALSLGLTPNFKSNFDLAEDAKLQLSKDTYDDDLDNLLAQIGDQYADLFLAAKNLSDAILLSDILRVNTEITKAPLSASMIKRYDEHHQDLTLLKALVRQQLPEKYKEIFFDQSKNGYAGYIDGGASQEEFYKFIKPILEKMDGTEELLVKLNREDLLRKQRTFDNGSIPHQIHLGELHAILRRQEDFYPFLKDNREKIEKILTFRIPYYVGPLARGNSRFAWMTRKSEETITPWNFEEVVDKGASAQSFIERMTNFDKNLPNEKVLPKHSLLYEYFTVYNELTKVKYVTEGMRKPAFLSGEQKKAIVDLLFKTNRKVTVKQLKEDYFKKIECFDSVEISGVEDRFNASLGTYHDLLKIIKDKDFLDNEENEDILEDIVLTLTLFEDREMIEERLKTYAHLFDDKVMKQLKRRRYTGWGRLSRKLINGIRDKQSGKTILDFLKSDGFANRNFMQLIHDDSLTFKEDIQKAQVSGQGDSLHEHIANLAGSPAIKKGILQTVKVVDELVKVMGRHKPENIVIEMARENQTTQKGQKNSRERMKRIEEGIKELGSQILKEHPVENTQLQNEKLYLYYLQNGRDMYVDQELDINRLSDYDVDHIVPQSFLKDDSIDNKVLTRSDKARGKSDNVPSEEVVKKMKNYWRQLLNAKLITQRKFDNLTKAERGGLSELDKAGFIKRQLVETRQITKHVAQILDSRMNTKYDENDKLIREVKVITLKSKLVSDFRKDFQFYKVREINNYHHAHDAYLNAVVGTALIKKYPKLESEFVYGDYKVYDVRKMIAKSEQEIGKATAKYFFYSNIMNFFKTEITLANGEIRKRPLIETNGETGEIVWDKGRDFATVRKVLSMPQVNIVKKTEVQTGGFSKESILPKRNSDKLIARKKDWDPKKYGGFDSPTVAYSVLVVAKVEKGKSKKLKSVKELLGITIMERSSFEKNPIDFLEAKGYKEVKKDLIIKLPKYSLFELENGRKRMLASAGELQKGNELALPSKYVNFLYLASHYEKLKGSPEDNEQKQLFVEQHKHYLDEIIEQISEFSKRVILADANLDKVLSAYNKHRDKPIREQAENIIHLFTLTNLGAPAAFKYFDTTIDRKRYTSTKEVLDATLIHQSITGLYETRIDLSQLGGDGGGSSGSSGSSGSSGGMDPLQLLQPLEAEIKGTKLKAHWNSGATITCVPQAFLEEEVPIKNIWIKTIHGEKEQPVYYLTFKIQGRKVEAEVISSPYDYILVSPSDIPWLMKKPLQLTTLVPLQEYEERLLKQTMLTGSYKEKLQSLFLKYDALWQHWENQVGHRRIKPHHIATGTVNPRPQKQYPINPKAKASIQTVINDLLKQGVLIQQNSIMNTPVYPVPKPDGKWRMVLDYREVNKTIPLIAAQNQHSAGILSSIFRGKYKTTLDLSNGFWAHSITPESYWLTAFTWLGQQYCWTRLPQGFLNSPALFNADVVDLLKEVPNVQVYVDDIYISHDDPREHLEQLEKVFSLLLNAGYVVSLKKSEIAQHEVEFLGFNITKEGRGLTETFKQKLLNITPPRDLKQLQSILGKLNFARNFIPNFSELVKPLYNIIATAPGKYITWTTDNSQQLQNIISMLNSAENLEERNPEVRLIMKVNTSPSAGYIRFYNEFAKRPIMYLNYVYTKAEVKFTNTEKLLTTIHKGLIKALDLGMGQEILVYSPIVSMTKIQKTPLPERKALPIRWITWMSYLEDPRIQFHYDKTLPELQQVPTVTDDIIAKIKHPSEFSMVFYTDGSAIKHPNVNKSHNAGMGIAQVQFKPEFTVINTWSIPLGDHTAQLAEVAAVEFACKKALKIDGPVLIVTDSFYVAESVNKELPYWQSNGFFNNKKKPLKHVSKWKSIADCIQLKPDIIIIHEKGHQPTASTFHTEGNNLADKLATQGSYVVNAGKRTADGSEFEKRTADGSEFESPKKKAKVE

SEQ ID NO: 6327 - protein, 2097 aa, synthetic construct
MPAAKRVKLDGGDKKYSIGLDIGTNSVGWAVITDEYKVPSKKFKVLGNTDRHSIKKNLIGALLFDSGETAEATRLKRTARRRYTRRKNRICYLQEIFSNEMAKVDDSFFHRLEESFLVEEDKKHERHPIFGNIVDEVAYHEKYPTIYHLRKKLVDSTDKADLRLIYLALAHMIKFRGHFLIEGDLNPDNSDVDKLFIQLVQTYNQLFEENPINASGVDAKAILSARLSKSRRLENLIAQLPGEKKNGLFGNLIALSLGLTPNFKSNFDLAEDAKLQLSKDTYDDDLDNLLAQIGDQYADLFLAAKNLSDAILLSDILRVNTEITKAPLSASMIKRYDEHHQDLTLLKALVRQQLPEKYKEIFFDQSKNGYAGYIDGGASQEEFYKFIKPILEKMDGTEELLVKLNREDLLRKQRTFDNGSIPHQIHLGELHAILRRQEDFYPFLKDNREKIEKILTFRIPYYVGPLARGNSRFAWMTRKSEETITPWNFEEVVDKGASAQSFIERMTNFDKNLPNEKVLPKHSLLYEYFTVYNELTKVKYVTEGMRKPAFLSGEQKKAIVDLLFKTNRKVTVKQLKEDYFKKIECFDSVEISGVEDRFNASLGTYHDLLKIIKDKDFLDNEENEDILEDIVLTLTLFEDREMIEERLKTYAHLFDDKVMKQLKRRRYTGWGRLSRKLINGIRDKQSGKTILDFLKSDGFANRNFMQLIHDDSLTFKEDIQKAQVSGQGDSLHEHIANLAGSPAIKKGILQTVKVVDELVKVMGRHKPENIVIEMARENQTTQKGQKNSRERMKRIEEGIKELGSQILKEHPVENTQLQNEKLYLYYLQNGRDMYVDQELDINRLSDYDVDHIVPQSFLKDDSIDNKVLTRSDKARGKSDNVPSEEVVKKMKNYWRQLLNAKLITQRKFDNLTKAERGGLSELDKAGFIKRQLVETRQITKHVAQILDSRMNTKYDENDKLIREVKVITLKSKLVSDFRKDFQFYKVREINNYHHAHDAYLNAVVGTALIKKYPKLESEFVYGDYKVYDVRKMIAKSEQEIGKATAKYFFYSNIMNFFKTEITLANGEIRKRPLIETNGETGEIVWDKGRDFATVRKVLSMPQVNIVKKTEVQTGGFSKESILPKRNSDKLIARKKDWDPKKYGGFDSPTVAYSVLVVAKVEKGKSKKLKSVKELLGITIMERSSFEKNPIDFLEAKGYKEVKKDLIIKLPKYSLFELENGRKRMLASAGELQKGNELALPSKYVNFLYLASHYEKLKGSPEDNEQKQLFVEQHKHYLDEIIEQISEFSKRVILADANLDKVLSAYNKHRDKPIREQAENIIHLFTLTNLGAPAAFKYFDTTIDRKRYTSTKEVLDATLIHQSITGLYETRIDLSQLGGDGGGSSGSSGSSGSSGGTLNIEDEYRLHETSKEPDVPLGSTWLSDFPQAWAETGGMGLAVRQAPLIIPLKATSTPVSIKQYPMSQEARLGIKPHIQRLLDQGILVPCQSPWNTPLLPVKKPGTNDYRPVQDLREVNKRVEDIHPTVPNPYNLLSGLPPSHQWYTVLDLKDAFFCLRLHPTSQPLFAFEWRDPEMGISGQLTWTRLPQGFKNSPTLFNEALHRDLADFRIQHPDLILLQYVDDLLLAATSEQDCQRGTRALLQTLGNLGYRASAKKAQICQKQVKYLGYLLKEGQRWLTEARKETVMGQPTPKTPRQLREFLGTAGFCRLWIPGFAEMAAPLYPLTKPGTLFNWGPDQQKAYQEIKQALLTAPALGLPDLTKPFELFVDEKQGYAKGVLTQKLGPWRRPVAYLSKKLDPVAAGWPPCLRMVAAIAVLTKDAGKLTMGQPLVILAPHAVEALVKQPPDRWLSNARMTHYQAMLLDTDRVQFGPVVALNPATLLPLPEKEAPHDCLEILAETHGTRPDLTDQPIPDADYTWYTDGSSFLQEGQRRAGAAVTTETEVIWARALPAGTSAQRAELIALTQALKMAEGKKLNVYTDSRYAFATAHVHGEIYRRRGWLTSEGREIKNKNEILALLKALFLPKRLSIIHCPGHQKGNSAEARGNRMADQAAREAAMKAVLETSTLLAGKRTADGSEFEKRTADGSEFESPKKKAKVE

SEQ ID NO: 6328 - protein, 2102 aa, synthetic construct
MPAAKRVKLDGGDKKYSIGLDIGTNSVGWAVITDEYKVPSKKFKVLGNTDRHSIKKNLIGALLFDSGETAEATRLKRTARRRYTRRKNRICYLQEIFSNEMAKVDDSFFHRLEESFLVEEDKKHERHPIFGNIVDEVAYHEKYPTIYHLRKKLVDSTDKADLRLIYLALAHMIKFRGHFLIEGDLNPDNSDVDKLFIQLVQTYNQLFEENPINASGVDAKAILSARLSKSRRLENLIAQLPGEKKNGLFGNLIALSLGLTPNFKSNFDLAEDAKLQLSKDTYDDDLDNLLAQIGDQYADLFLAAKNLSDAILLSDILRVNTEITKAPLSASMIKRYDEHHQDLTLLKALVRQQLPEKYKEIFFDQSKNGYAGYIDGGASQEEFYKFIKPILEKMDGTEELLVKLNREDLLRKQRTFDNGSIPHQIHLGELHAILRRQEDFYPFLKDNREKIEKILTFRIPYYVGPLARGNSRFAWMTRKSEETITPWNFEEVVDKGASAQSFIERMTNFDKNLPNEKVLPKHSLLYEYFTVYNELTKVKYVTEGMRKPAFLSGEQKKAIVDLLFKTNRKVTVKQLKEDYFKKIECFDSVEISGVEDRFNASLGTYHDLLKIIKDKDFLDNEENEDILEDIVLTLTLFEDREMIEERLKTYAHLFDDKVMKQLKRRRYTGWGRLSRKLINGIRDKQSGKTILDFLKSDGFANRNFMQLIHDDSLTFKEDIQKAQVSGQGDSLHEHIANLAGSPAIKKGILQTVKVVDELVKVMGRHKPENIVIEMARENQTTQKGQKNSRERMKRIEEGIKELGSQILKEHPVENTQLQNEKLYLYYLQNGRDMYVDQELDINRLSDYDVDHIVPQSFLKDDSIDNKVLTRSDKARGKSDNVPSEEVVKKMKNYWRQLLNAKLITQRKFDNLTKAERGGLSELDKAGFIKRQLVETRQITKHVAQILDSRMNTKYDENDKLIREVKVITLKSKLVSDFRKDFQFYKVREINNYHHAHDAYLNAVVGTALIKKYPKLESEFVYGDYKVYDVRKMIAKSEQEIGKATAKYFFYSNIMNFFKTEITLANGEIRKRPLIETNGETGEIVWDKGRDFATVRKVLSMPQVNIVKKTEVQTGGFSKESILPKRNSDKLIARKKDWDPKKYGGFDSPTVAYSVLVVAKVEKGKSKKLKSVKELLGITIMERSSFEKNPIDFLEAKGYKEVKKDLIIKLPKYSLFELENGRKRMLASAGELQKGNELALPSKYVNFLYLASHYEKLKGSPEDNEQKQLFVEQHKHYLDEIIEQISEFSKRVILADANLDKVLSAYNKHRDKPIREQAENIIHLFTLTNLGAPAAFKYFDTTIDRKRYTSTKEVLDATLIHQSITGLYETRIDLSQLGGDGGGSSGSSGSSGSSGSSGGTAPLEEEYRLFLEAPIQNVTLLEQWKREIPKVWAEINPPGLASTQAPIHVQLLSTALPVRVRQYPITLEAKRSLRETIRKFRAAGILRPVHSPWNTPLLPVRKSGTSEYRMVQDLREVNKRVETIHPTVPNPYTLLSLLPPDRIWYSVLDLKDAFFCIPLAPESQLIFAFEWADAEEGESGQLTWTRLPQGFKNSPTLFDEALNRDLQGFRLDHPSVSLLQYVDDLLIAADTQAACLSATRDLLMTLAELGYRVSGKKAQLCQEEVTYLGFKIHKGSRSLSNSRTQAILQIPVPKTKRQVREFLGTIGYCRLWIPGFAELAQPLYAATRGGNDPLVWGEKEEEAFQSLKLALTQPPALALPSLDKPFQLFVEETSGAAKGVLTQALGPWKRPVAYLSKRLDPVAAGWPRCLRAIAAAALLTREASKLTFGQDIEITSSHNLESLLRSPPDKWLTNARITQYQVLLLDPPRVRFKQTAALNPATLLPETDDTLPIHHCLDTLDSLTSTRPDLTDQPLAQAEATLFTDGSSYIRDGKRYAGAAVVTLDSVIWAEPLPIGTSAQKAELIALTKALEWSKDKSVNIYTDSRYAFATLHVHGMIYRERGLLTAGGKAIKNAPEILALLTAVWLPKRVAVMHCKGHQKDDAPTSTGNRRADEVAREVAIRPLSTQATISAGKRTADGSEFEKRTADGSEFESPKKKAKVE

SEQ ID NO: 6329 - protein, 2102 aa, synthetic construct
MPAAKRVKLDGGDKKYSIGLDIGTNSVGWAVITDEYKVPSKKFKVLGNTDRHSIKKNLIGALLFDSGETAEATRLKRTARRRYTRRKNRICYLQEIFSNEMAKVDDSFFHRLEESFLVEEDKKHERHPIFGNIVDEVAYHEKYPTIYHLRKKLVDSTDKADLRLIYLALAHMIKFRGHFLIEGDLNPDNSDVDKLFIQLVQTYNQLFEENPINASGVDAKAILSARLSKSRRLENLIAQLPGEKKNGLFGNLIALSLGLTPNFKSNFDLAEDAKLQLSKDTYDDDLDNLLAQIGDQYADLFLAAKNLSDAILLSDILRVNTEITKAPLSASMIKRYDEHHQDLTLLKALVRQQLPEKYKEIFFDQSKNGYAGYIDGGASQEEFYKFIKPILEKMDGTEELLVKLNREDLLRKQRTFDNGSIPHQIHLGELHAILRRQEDFYPFLKDNREKIEKILTFRIPYYVGPLARGNSRFAWMTRKSEETITPWNFEEVVDKGASAQSFIERMTNFDKNLPNEKVLPKHSLLYEYFTVYNELTKVKYVTEGMRKPAFLSGEQKKAIVDLLFKTNRKVTVKQLKEDYFKKIECFDSVEISGVEDRFNASLGTYHDLLKIIKDKDFLDNEENEDILEDIVLTLTLFEDREMIEERLKTYAHLFDDKVMKQLKRRRYTGWGRLSRKLINGIRDKQSGKTILDFLKSDGFANRNFMQLIHDDSLTFKEDIQKAQVSGQGDSLHEHIANLAGSPAIKKGILQTVKVVDELVKVMGRHKPENIVIEMARENQTTQKGQKNSRERMKRIEEGIKELGSQILKEHPVENTQLQNEKLYLYYLQNGRDMYVDQELDINRLSDYDVDHIVPQSFLKDDSIDNKVLTRSDKARGKSDNVPSEEVVKKMKNYWRQLLNAKLITQRKFDNLTKAERGGLSELDKAGFIKRQLVETRQITKHVAQILDSRMNTKYDENDKLIREVKVITLKSKLVSDFRKDFQFYKVREINNYHHAHDAYLNAVVGTALIKKYPKLESEFVYGDYKVYDVRKMIAKSEQEIGKATAKYFFYSNIMNFFKTEITLANGEIRKRPLIETNGETGEIVWDKGRDFATVRKVLSMPQVNIVKKTEVQTGGFSKESILPKRNSDKLIARKKDWDPKKYGGFDSPTVAYSVLVVAKVEKGKSKKLKSVKELLGITIMERSSFEKNPIDFLEAKGYKEVKKDLIIKLPKYSLFELENGRKRMLASAGELQKGNELALPSKYVNFLYLASHYEKLKGSPEDNEQKQLFVEQHKHYLDEIIEQISEFSKRVILADANLDKVLSAYNKHRDKPIREQAENIIHLFTLTNLGAPAAFKYFDTTIDRKRYTSTKEVLDATLIHQSITGLYETRIDLSQLGGDGGGSSGSSGSSGSSGSSGGTAPLEEEYRLFLEAPIQNVTLLEQWKREIPKVWAEINPPGLASTQAPIHVQLLSTALPVRVRQYPITLEAKRSLRETIRKFRAAGILRPVHSPWNTPLLPVRKSGTSEYRMVQDLREVNKRVETIHPTVPNPYTLLSLLPPDRIWYSVLDLKDAFFCIPLAPESQLIFAFEWADAEEGESGQLTWTRLPQGFKNSPTLFNEALNRDLQGFRLDHPSVSLLQYVDDLLIAADTQAACLSATRDLLMTLAELGYRVSGKKAQLCQEEVTYLGFKIHKGSRSLSNSRTQAILQIPVPKTKRQVREFLGKIGYCRLFIPGFAELAQPLYAATRPGNDPLVWGEKEEEAFQSLKLALTQPPALALPSLDKPFQLFVEETSGAAKGVLTQALGPWKRPVAYLSKRLDPVAAGWPRCLRAIAAAALLTREASKLTFGQDIEITSSHNLESLLRSPPDKWLTNARITQYQVLLLDPPRVRFKQTAALNPATLLPETDDTLPIHHCLDTLDSLTSTRPDLTDQPLAQAEATLFTDGSSYIRDGKRYAGAAVVTLDSVIWAEPLPIGTSAQKAELIALTKALEWSKDKSVNIYTDSRYAFATLHVHGMIYRERGWLTAGGKAIKNAPEILALLTAVWLPKRVAVMHCKGHQKDDAPTSTGNRRADEVAREVAIRPLSTQATISAGKRTADGSEFEKRTADGSEFESPKKKAKVE

SEQ ID NO: 6330 - protein, 2131 aa, synthetic construct
MPAAKRVKLDGGDKKYSIGLDIGTNSVGWAVITDEYKVPSKKFKVLGNTDRHSIKKNLIGALLFDSGETAEATRLKRTARRRYTRRKNRICYLQEIFSNEMAKVDDSFFHRLEESFLVEEDKKHERHPIFGNIVDEVAYHEKYPTIYHLRKKLVDSTDKADLRLIYLALAHMIKFRGHFLIEGDLNPDNSDVDKLFIQLVQTYNQLFEENPINASGVDAKAILSARLSKSRRLENLIAQLPGEKKNGLFGNLIALSLGLTPNFKSNFDLAEDAKLQLSKDTYDDDLDNLLAQIGDQYADLFLAAKNLSDAILLSDILRVNTEITKAPLSASMIKRYDEHHQDLTLLKALVRQQLPEKYKEIFFDQSKNGYAGYIDGGASQEEFYKFIKPILEKMDGTEELLVKLNREDLLRKQRTFDNGSIPHQIHLGELHAILRRQEDFYPFLKDNREKIEKILTFRIPYYVGPLARGNSRFAWMTRKSEETITPWNFEEVVDKGASAQSFIERMTNFDKNLPNEKVLPKHSLLYEYFTVYNELTKVKYVTEGMRKPAFLSGEQKKAIVDLLFKTNRKVTVKQLKEDYFKKIECFDSVEISGVEDRFNASLGTYHDLLKIIKDKDFLDNEENEDILEDIVLTLTLFEDREMIEERLKTYAHLFDDKVMKQLKRRRYTGWGRLSRKLINGIRDKQSGKTILDFLKSDGFANRNFMQLIHDDSLTFKEDIQKAQVSGQGDSLHEHIANLAGSPAIKKGILQTVKVVDELVKVMGRHKPENIVIEMARENQTTQKGQKNSRERMKRIEEGIKELGSQILKEHPVENTQLQNEKLYLYYLQNGRDMYVDQELDINRLSDYDVDHIVPQSFLKDDSIDNKVLTRSDKARGKSDNVPSEEVVKKMKNYWRQLLNAKLITQRKFDNLTKAERGGLSELDKAGFIKRQLVETRQITKHVAQILDSRMNTKYDENDKLIREVKVITLKSKLVSDFRKDFQFYKVREINNYHHAHDAYLNAVVGTALIKKYPKLESEFVYGDYKVYDVRKMIAKSEQEIGKATAKYFFYSNIMNFFKTEITLANGEIRKRPLIETNGETGEIVWDKGRDFATVRKVLSMPQVNIVKKTEVQTGGFSKESILPKRNSDKLIARKKDWDPKKYGGFDSPTVAYSVLVVAKVEKGKSKKLKSVKELLGITIMERSSFEKNPIDFLEAKGYKEVKKDLIIKLPKYSLFELENGRKRMLASAGELQKGNELALPSKYVNFLYLASHYEKLKGSPEDNEQKQLFVEQHKHYLDEIIEQISEFSKRVILADANLDKVLSAYNKHRDKPIREQAENIIHLFTLTNLGAPAAFKYFDTTIDRKRYTSTKEVLDATLIHQSITGLYETRIDLSQLGGDGGGSSGSSGSSGSSGSSGGLLGRDLLTKLKAQIQFSTEGPQVTWEDRPAMCLVLNLEEEYRLHEKPVPPSIDPSWLQLFPMVWAEKAGMGLANQVPPVVVELKSDASPVAVRQYPMSKEAREGIRPHIQRFLDLGILVPCQSPWNTPLLPVKKPGTNDYRPVQDLREVNKRVQDIHPTVPNPYNLLSSLPPSHTWYSVLDLKDAFFCLKLHPNSQPLFAFEWRDPEKGNTGQLTWTRLPQGFKNSPTLFDEALHRDLASFRALNPQVVMLQYVDDLLVAAPTYRDCKEGTRRLLQELSKLGYRVSAKKAQLCREEVTYLGYLLKGGKRWLTPARKATVMKIPTPTTPRQVREFLGTAGFCRLWIPGFASLAAPLYPLTREKVPFTWTEAHQEAFGRIKEALLSAPALALPDLTKPFALYVDEKEGVARGVLTQTLGPWRRPVAYLSKKLDPVASGWPTCLKAIAAVALLLKDADKLTLGQNVLVIAPHNLESIVRQPPDRWMTNARMTHYQSLLLNERVSFAPPAILNPATLLPVESDDTPIHICSEILAEETGTRPDLRDQPLPGVPAWYTDGSSFIMDGRRQAGAAIVDNKRTVWASNLPEGTSAQKAELIALTQALRLAEGKSINIYTDSRYAFATAHVHGAIYKQRGLLTSAGKDIKNKEEILALLEAIHLPKRVAIIHCPGHQRGTDPVATGNRKADEAAKQAAQSTRILTETTKNAGKRTADGSEFEKRTADGSEFESPKKKAKVE

SEQ ID NO: 6331 - protein, 2222 aa, synthetic construct
MPAAKRVKLDGGDKKYSIGLDIGTNSVGWAVITDEYKVPSKKFKVLGNTDRHSIKKNLIGALLFDSGETAEATRLKRTARRRYTRRKNRICYLQEIFSNEMAKVDDSFFHRLEESFLVEEDKKHERHPIFGNIVDEVAYHEKYPTIYHLRKKLVDSTDKADLRLIYLALAHMIKFRGHFLIEGDLNPDNSDVDKLFIQLVQTYNQLFEENPINASGVDAKAILSARLSKSRRLENLIAQLPGEKKNGLFGNLIALSLGLTPNFKSNFDLAEDAKLQLSKDTYDDDLDNLLAQIGDQYADLFLAAKNLSDAILLSDILRVNTEITKAPLSASMIKRYDEHHQDLTLLKALVRQQLPEKYKEIFFDQSKNGYAGYIDGGASQEEFYKFIKPILEKMDGTEELLVKLNREDLLRKQRTFDNGSIPHQIHLGELHAILRRQEDFYPFLKDNREKIEKILTFRIPYYVGPLARGNSRFAWMTRKSEETITPWNFEEVVDKGASAQSFIERMTNFDKNLPNEKVLPKHSLLYEYFTVYNELTKVKYVTEGMRKPAFLSGEQKKAIVDLLFKTNRKVTVKQLKEDYFKKIECFDSVEISGVEDRFNASLGTYHDLLKIIKDKDFLDNEENEDILEDIVLTLTLFEDREMIEERLKTYAHLFDDKVMKQLKRRRYTGWGRLSRKLINGIRDKQSGKTILDFLKSDGFANRNFMQLIHDDSLTFKEDIQKAQVSGQGDSLHEHIANLAGSPAIKKGILQTVKVVDELVKVMGRHKPENIVIEMARENQTTQKGQKNSRERMKRIEEGIKELGSQILKEHPVENTQLQNEKLYLYYLQNGRDMYVDQELDINRLSDYDVDHIVPQSFLKDDSIDNKVLTRSDKARGKSDNVPSEEVVKKMKNYWRQLLNAKLITQRKFDNLTKAERGGLSELDKAGFIKRQLVETRQITKHVAQILDSRMNTKYDENDKLIREVKVITLKSKLVSDFRKDFQFYKVREINNYHHAHDAYLNAVVGTALIKKYPKLESEFVYGDYKVYDVRKMIAKSEQEIGKATAKYFFYSNIMNFFKTEITLANGEIRKRPLIETNGETGEIVWDKGRDFATVRKVLSMPQVNIVKKTEVQTGGFSKESILPKRNSDKLIARKKDWDPKKYGGFDSPTVAYSVLVVAKVEKGKSKKLKSVKELLGITIMERSSFEKNPIDFLEAKGYKEVKKDLIIKLPKYSLFELENGRKRMLASAGELQKGNELALPSKYVNFLYLASHYEKLKGSPEDNEQKQLFVEQHKHYLDEIIEQISEFSKRVILADANLDKVLSAYNKHRDKPIREQAENIIHLFTLTNLGAPAAFKYFDTTIDRKRYTSTKEVLDATLIHQSITGLYETRIDLSQLGGDGGGSSGSSGSSGSSGSSGGTLGDQGSRGSDPLPEPRVTLTVEGIPTEFLVNTGAEHSVLTKPMGKMGSKRTVVAGATGSKVYPWTTKRLLKIGQKQVTHSFLVIPECPAPLLGRDLLTKLKAQIQFSTEGPQVTWEDRPAMCLVLNLEEEYRLHEKPVPPSIDPSWLQLFPMVWAEKAGMGLANQVPPVVVELKSDASPVAVRQYPMSKEAREGIRPHIQRFLDLGILVPCQSPWNTPLLPVKKPGTNDYRPVQDLREVNKRVQDIHPTVPNPYNLLSSLPPSHTWYSVLDLKDAFFCLKLHPNSQPLFAFEWRDPEKGNTGQLTWTRLPQGFKNSPTLFNEALHRDLASFRALNPQVVMLQYVDDLLVAAPTYRDCKEGTRRLLQELSKLGYRVSAKKAQLCREEVTYLGYLLKGGKRWLTPARKATVMKIPTPTTPRQVREFLGTAGFCRLWIPGFASLAAPLYPLTRPKVPFTWTEAHQEAFGRIKEALLSAPALALPDLTKPFALYVDEKEGVARGVLTQTLGPWRRPVAYLSKKLDPVASGWPTCLKAIAAVALLLKDADKLTLGQNVLVIAPHNLESIVRQPPDRWMTNARMTHYQSLLLNERVSFAPPAILNPATLLPVESDDTPIHICSEILAEETGTRPDLRDQPLPGVPAWYTDGSSFIMDGRRQAGAAIVDNKRTVWASNLPEGTSAQKAELIALTQALRLAEGKSINIYTDSRYAFATAHVHGAIYKQRGWLTSAGKDIKNKEEILALLEAIHLPKRVAIIHCPGHQRGTDPVATGNRKADEAAKQAAQSTRILTETTKNAGKRTADGSEFEKRTADGSEFESPKKKAKVE

SEQ ID NO: 6332 - protein, 2100 aa, synthetic construct
MPAAKRVKLDGGDKKYSIGLDIGTNSVGWAVITDEYKVPSKKFKVLGNTDRHSIKKNLIGALLFDSGETAEATRLKRTARRRYTRRKNRICYLQEIFSNEMAKVDDSFFHRLEESFLVEEDKKHERHPIFGNIVDEVAYHEKYPTIYHLRKKLVDSTDKADLRLIYLALAHMIKFRGHFLIEGDLNPDNSDVDKLFIQLVQTYNQLFEENPINASGVDAKAILSARLSKSRRLENLIAQLPGEKKNGLFGNLIALSLGLTPNFKSNFDLAEDAKLQLSKDTYDDDLDNLLAQIGDQYADLFLAAKNLSDAILLSDILRVNTEITKAPLSASMIKRYDEHHQDLTLLKALVRQQLPEKYKEIFFDQSKNGYAGYIDGGASQEEFYKFIKPILEKMDGTEELLVKLNREDLLRKQRTFDNGSIPHQIHLGELHAILRRQEDFYPFLKDNREKIEKILTFRIPYYVGPLARGNSRFAWMTRKSEETITPWNFEEVVDKGASAQSFIERMTNFDKNLPNEKVLPKHSLLYEYFTVYNELTKVKYVTEGMRKPAFLSGEQKKAIVDLLFKTNRKVTVKQLKEDYFKKIECFDSVEISGVEDRFNASLGTYHDLLKIIKDKDFLDNEENEDILEDIVLTLTLFEDREMIEERLKTYAHLFDDKVMKQLKRRRYTGWGRLSRKLINGIRDKQSGKTILDFLKSDGFANRNFMQLIHDDSLTFKEDIQKAQVSGQGDSLHEHIANLAGSPAIKKGILQTVKVVDELVKVMGRHKPENIVIEMARENQTTQKGQKNSRERMKRIEEGIKELGSQILKEHPVENTQLQNEKLYLYYLQNGRDMYVDQELDINRLSDYDVDHIVPQSFLKDDSIDNKVLTRSDKARGKSDNVPSEEVVKKMKNYWRQLLNAKLITQRKFDNLTKAERGGLSELDKAGFIKRQLVETRQITKHVAQILDSRMNTKYDENDKLIREVKVITLKSKLVSDFRKDFQFYKVREINNYHHAHDAYLNAVVGTALIKKYPKLESEFVYGDYKVYDVRKMIAKSEQEIGKATAKYFFYSNIMNFFKTEITLANGEIRKRPLIETNGETGEIVWDKGRDFATVRKVLSMPQVNIVKKTEVQTGGFSKESILPKRNSDKLIARKKDWDPKKYGGFDSPTVAYSVLVVAKVEKGKSKKLKSVKELLGITIMERSSFEKNPIDFLEAKGYKEVKKDLIIKLPKYSLFELENGRKRMLASAGELQKGNELALPSKYVNFLYLASHYEKLKGSPEDNEQKQLFVEQHKHYLDEIIEQISEFSKRVILADANLDKVLSAYNKHRDKPIREQAENIIHLFTLTNLGAPAAFKYFDTTIDRKRYTSTKEVLDATLIHQSITGLYETRIDLSQLGGDGGGSSGSSGSSGSSGSSGGTLNLEDEYRLYETSAEPEVSPGSTWLSDFPQAWAETGGMGLAVRQAPLIIPLKATSTPVSIKQYPMSQEAKLGIKPHIQRLLDQGILVPCQSPWNTPLLPVKKPGTNDYRPVQDLREVNKRVEDIHPTVPNPYNLLSGLPPSHRWYTVLDLKDAFFCLRLHPTSQPLFAFEWRDPGMGISGQLTWTRLPQGFKNSPTLFNEALHRDLADFRIQHPDLILLQYVDDILLAATSELDCQQGTRALLLTLGNLGYRASAKKAQLCQKQVKYLGYLLKEGQRWLTEARKETVMGQPTPKTPRQLREFLGTAGFCRLWIPGFAEMAAPLYPLTKPGTLFNWGPDQQKAYQEIKQALLTAPALGLPDLTKPFELFVDEKQGYAKGVLTQKLGPWRRPVAYLSKKLDPVAAGWPPCLRMVAAIAVLRKDAGKLTMGQPLVILAPHAVEALVKQPPDRWLSNARMTHYQAMLLDTDRVQFGPVVALNPATLLPLPEEGAPHDCLEILAETHGTRPDLTDQPIPDADHTWYTDGSSFLQEGQRKAGAAVTTETEVIWARALPAGTSAQRAELIALTQALKMAEGKRLNVYTDSRYAFATAHIHGEIYRRRGWLTSEGREIKNKSEILALLKALFLPKRLSIIHCLGHQKGDSAEARGNRLADQAAREAAIKTPPDTSTLLAGKRTADGSEFEKRTADGSEFESPKKKAKVE

SEQ ID NO: 6333 - protein, 2100 aa, synthetic construct
MPAAKRVKLDGGDKKYSIGLDIGTNSVGWAVITDEYKVPSKKFKVLGNTDRHSIKKNLIGALLFDSGETAEATRLKRTARRRYTRRKNRICYLQEIFSNEMAKVDDSFFHRLEESFLVEEDKKHERHPIFGNIVDEVAYHEKYPTIYHLRKKLVDSTDKADLRLIYLALAHMIKFRGHFLIEGDLNPDNSDVDKLFIQLVQTYNQLFEENPINASGVDAKAILSARLSKSRRLENLIAQLPGEKKNGLFGNLIALSLGLTPNFKSNFDLAEDAKLQLSKDTYDDDLDNLLAQIGDQYADLFLAAKNLSDAILLSDILRVNTEITKAPLSASMIKRYDEHHQDLTLLKALVRQQLPEKYKEIFFDQSKNGYAGYIDGGASQEEFYKFIKPILEKMDGTEELLVKLNREDLLRKQRTFDNGSIPHQIHLGELHAILRRQEDFYPFLKDNREKIEKILTFRIPYYVGPLARGNSRFAWMTRKSEETITPWNFEEVVDKGASAQSFIERMTNFDKNLPNEKVLPKHSLLYEYFTVYNELTKVKYVTEGMRKPAFLSGEQKKAIVDLLFKTNRKVTVKQLKEDYFKKIECFDSVEISGVEDRFNASLGTYHDLLKIIKDKDFLDNEENEDILEDIVLTLTLFEDREMIEERLKTYAHLFDDKVMKQLKRRRYTGWGRLSRKLINGIRDKQSGKTILDFLKSDGFANRNFMQLIHDDSLTFKEDIQKAQVSGQGDSLHEHIANLAGSPAIKKGILQTVKVVDELVKVMGRHKPENIVIEMARENQTTQKGQKNSRERMKRIEEGIKELGSQILKEHPVENTQLQNEKLYLYYLQNGRDMYVDQELDINRLSDYDVDHIVPQSFLKDDSIDNKVLTRSDKARGKSDNVPSEEVVKKMKNYWRQLLNAKLITQRKFDNLTKAERGGLSELDKAGFIKRQLVETRQITKHVAQILDSRMNTKYDENDKLIREVKVITLKSKLVSDFRKDFQFYKVREINNYHHAHDAYLNAVVGTALIKKYPKLESEFVYGDYKVYDVRKMIAKSEQEIGKATAKYFFYSNIMNFFKTEITLANGEIRKRPLIETNGETGEIVWDKGRDFATVRKVLSMPQVNIVKKTEVQTGGFSKESILPKRNSDKLIARKKDWDPKKYGGFDSPTVAYSVLVVAKVEKGKSKKLKSVKELLGITIMERSSFEKNPIDFLEAKGYKEVKKDLIIKLPKYSLFELENGRKRMLASAGELQKGNELALPSKYVNFLYLASHYEKLKGSPEDNEQKQLFVEQHKHYLDEIIEQISEFSKRVILADANLDKVLSAYNKHRDKPIREQAENIIHLFTLTNLGAPAAFKYFDTTIDRKRYTSTKEVLDATLIHQSITGLYETRIDLSQLGGDGGGSSGSSGSSGSSGSSGGTLGIEDEYRLHETSTEPDVSLGSTWLSDFPQAWAETGGMGLAVRQAPLIIPLKATSTPVSIQQYPMSHEARLGIKPHIQRLLDQGILVPCQSPWNTPLLPVKKPGTNDYRPVQDLREVNKRVEDIHPTVPNPYNLLSGLPPSHQWYTVLDLKDAFFCLRLHPTSQPLFAFEWRDPGMGISGQLTWTRLPQGFKNSPTLFNEALHRDLADFRIQHPDLILLQYVDDILLAATSELDCQQGTRALLQTLGDLGYRASAKKAQICQKQVKYLGYLLREGQRWLTEARKETVMGQPVPKTPRQLREFLGTAGFCRLWIPGFAEMAAPLYPLTKPGTLFSWGPDQQKAYQEIKQALLTAPALGLPDLTKPFELFVDEKQGYAKGVLTQKLGPWRRPVAYLSKKLDPVAAGWPPCLRMVAAIAVLTKDAGKLTMGQPLVILAPHAVEALVKQPPDRWLSNARMTHYQAMLLDTDRVQFGPVVALNPATLLPLPEEGAPHDCLEILAETHGTRPDLTDQPIPDADHTWYTDGSSFLQEGQRKAGAAVTTETEVIWAGALPAGTSAQRAELIALTQALKMAEGKRLNVYTDSRYAFATAHIHGEIYRRRGWLTSEGREIKNKSEILALLKALFLPKRLSIIHCLGHQKGDSAEARGNRLADQAAREAAIKTPPDTSTLLAGKRTADGSEFEKRTADGSEFESPKKKAKVE

SEQ ID NO: 6334 - protein, 2100 aa, synthetic construct
MPAAKRVKLDGGDKKYSIGLDIGTNSVGWAVITDEYKVPSKKFKVLGNTDRHSIKKNLIGALLFDSGETAEATRLKRTARRRYTRRKNRICYLQEIFSNEMAKVDDSFFHRLEESFLVEEDKKHERHPIFGNIVDEVAYHEKYPTIYHLRKKLVDSTDKADLRLIYLALAHMIKFRGHFLIEGDLNPDNSDVDKLFIQLVQTYNQLFEENPINASGVDAKAILSARLSKSRRLENLIAQLPGEKKNGLFGNLIALSLGLTPNFKSNFDLAEDAKLQLSKDTYDDDLDNLLAQIGDQYADLFLAAKNLSDAILLSDILRVNTEITKAPLSASMIKRYDEHHQDLTLLKALVRQQLPEKYKEIFFDQSKNGYAGYIDGGASQEEFYKFIKPILEKMDGTEELLVKLNREDLLRKQRTFDNGSIPHQIHLGELHAILRRQEDFYPFLKDNREKIEKILTFRIPYYVGPLARGNSRFAWMTRKSEETITPWNFEEVVDKGASAQSFIERMTNFDKNLPNEKVLPKHSLLYEYFTVYNELTKVKYVTEGMRKPAFLSGEQKKAIVDLLFKTNRKVTVKQLKEDYFKKIECFDSVEISGVEDRFNASLGTYHDLLKIIKDKDFLDNEENEDILEDIVLTLTLFEDREMIEERLKTYAHLFDDKVMKQLKRRRYTGWGRLSRKLINGIRDKQSGKTILDFLKSDGFANRNFMQLIHDDSLTFKEDIQKAQVSGQGDSLHEHIANLAGSPAIKKGILQTVKVVDELVKVMGRHKPENIVIEMARENQTTQKGQKNSRERMKRIEEGIKELGSQILKEHPVENTQLQNEKLYLYYLQNGRDMYVDQELDINRLSDYDVDHIVPQSFLKDDSIDNKVLTRSDKARGKSDNVPSEEVVKKMKNYWRQLLNAKLITQRKFDNLTKAERGGLSELDKAGFIKRQLVETRQITKHVAQILDSRMNTKYDENDKLIREVKVITLKSKLVSDFRKDFQFYKVREINNYHHAHDAYLNAVVGTALIKKYPKLESEFVYGDYKVYDVRKMIAKSEQEIGKATAKYFFYSNIMNFFKTEITLANGEIRKRPLIETNGETGEIVWDKGRDFATVRKVLSMPQVNIVKKTEVQTGGFSKESILPKRNSDKLIARKKDWDPKKYGGFDSPTVAYSVLVVAKVEKGKSKKLKSVKELLGITIMERSSFEKNPIDFLEAKGYKEVKKDLIIKLPKYSLFELENGRKRMLASAGELQKGNELALPSKYVNFLYLASHYEKLKGSPEDNEQKQLFVEQHKHYLDEIIEQISEFSKRVILADANLDKVLSAYNKHRDKPIREQAENIIHLFTLTNLGAPAAFKYFDTTIDRKRYTSTKEVLDATLIHQSITGLYETRIDLSQLGGDGGGSSGSSGSSGSSGSSGGTLNIEDEYRLHEISTEPDVSPGSTWLSDFPQAWAETGGMGLAVRQAPLIIPLKATSTPVSIKQYPMSQEAKLGIKPHIQRLLDQGILVPCQSPWNTPLLPVKKPGTNDYRPVQGLREVNKRVEDIHPTVPNPYNLLSGLPTSHRWYTVLDLKDAFFCLRLHPTSQPLFASEWRDPGMGISGQLTWTRLPQGFKNSPTLFDEALHRGLADFRIQHPDLILLQYVDDLLLAATSELDCQQGTRALLKTLGNLGYRASAKKAQICQKQVKYLGYLLREGQRWLTEARKETVMGQPTPKTPRQLREFLGTAGFCRLWIPRFAEMAAPLYPLTKTGTLFNWGPDQQKAYHEIKQALLTAPALGLPDLTKPFELFVDEKQGYAKGVLTQKLGPWRRPVAYLSKKLDPVAAGWPPCLRMVAAIAVLTKDAGKLTMGQPLVILAPHAVEALVKQPPDRWLSNARMTHYQAMLLDTDRVQFGPVVALNPATLLPLPEEGAPHDCLEILAETHGTEPDLTDQPIPDADHTWYTDGSSFLQEGQRKAGAAVTTETEVIWARALPAGTSAQRAELIALTQALKMAEGKRLNVYTDSRYAFATAHIHGEIYKRRGLLTSEGREIKNKSEILALLKALFLPKRLSIIHCLGHQKGDSAEARGNRLADQAAREAAIKTPPDTSTLLAGKRTADGSEFEKRTADGSEFESPKKKAKVE

SEQ ID NO: 6335 - protein, 2100 aa, synthetic construct
MPAAKRVKLDGGDKKYSIGLDIGTNSVGWAVITDEYKVPSKKFKVLGNTDRHSIKKNLIGALLFDSGETAEATRLKRTARRRYTRRKNRICYLQEIFSNEMAKVDDSFFHRLEESFLVEEDKKHERHPIFGNIVDEVAYHEKYPTIYHLRKKLVDSTDKADLRLIYLALAHMIKFRGHFLIEGDLNPDNSDVDKLFIQLVQTYNQLFEENPINASGVDAKAILSARLSKSRRLENLIAQLPGEKKNGLFGNLIALSLGLTPNFKSNFDLAEDAKLQLSKDTYDDDLDNLLAQIGDQYADLFLAAKNLSDAILLSDILRVNTEITKAPLSASMIKRYDEHHQDLTLLKALVRQQLPEKYKEIFFDQSKNGYAGYIDGGASQEEFYKFIKPILEKMDGTEELLVKLNREDLLRKQRTFDNGSIPHQIHLGELHAILRRQEDFYPFLKDNREKIEKILTFRIPYYVGPLARGNSRFAWMTRKSEETITPWNFEEVVDKGASAQSFIERMTNFDKNLPNEKVLPKHSLLYEYFTVYNELTKVKYVTEGMRKPAFLSGEQKKAIVDLLFKTNRKVTVKQLKEDYFKKIECFDSVEISGVEDRFNASLGTYHDLLKIIKDKDFLDNEENEDILEDIVLTLTLFEDREMIEERLKTYAHLFDDKVMKQLKRRRYTGWGRLSRKLINGIRDKQSGKTILDFLKSDGFANRNFMQLIHDDSLTFKEDIQKAQVSGQGDSLHEHIANLAGSPAIKKGILQTVKVVDELVKVMGRHKPENIVIEMARENQTTQKGQKNSRERMKRIEEGIKELGSQILKEHPVENTQLQNEKLYLYYLQNGRDMYVDQELDINRLSDYDVDHIVPQSFLKDDSIDNKVLTRSDKARGKSDNVPSEEVVKKMKNYWRQLLNAKLITQRKFDNLTKAERGGLSELDKAGFIKRQLVETRQITKHVAQILDSRMNTKYDENDKLIREVKVITLKSKLVSDFRKDFQFYKVREINNYHHAHDAYLNAVVGTALIKKYPKLESEFVYGDYKVYDVRKMIAKSEQEIGKATAKYFFYSNIMNFFKTEITLANGEIRKRPLIETNGETGEIVWDKGRDFATVRKVLSMPQVNIVKKTEVQTGGFSKESILPKRNSDKLIARKKDWDPKKYGGFDSPTVAYSVLVVAKVEKGKSKKLKSVKELLGITIMERSSFEKNPIDFLEAKGYKEVKKDLIIKLPKYSLFELENGRKRMLASAGELQKGNELALPSKYVNFLYLASHYEKLKGSPEDNEQKQLFVEQHKHYLDEIIEQISEFSKRVILADANLDKVLSAYNKHRDKPIREQAENIIHLFTLTNLGAPAAFKYFDTTIDRKRYTSTKEVLDATLIHQSITGLYETRIDLSQLGGDGGGSSGSSGSSGSSGSSGGTLNIEDEYRLHEISTEPDVSPGSTWLSDFPQAWAETGGMGLAVRQAPLIIPLKATSTPVSIKQYPMSQEAKLGIKPHIQRLLDQGILVPCQSPWNTPLLPVKKPGTNDYRPVQGLREVNKRVEDIHPTVPNPYNLLSGLPTSHRWYTVLDLKDAFFCLRLHPTSQPLFASEWRDPGMGISGQLTWTRLPQGFKNSPTLFNEALHRGLADFRIQHPDLILLQYVDDLLLAATSELDCQQGTRALLKTLGNLGYRASAKKAQICQKQVKYLGYLLREGQRWLTEARKETVMGQPTPKTPRQLREFLGTAGFCRLWIPRFAEMAAPLYPLTKPGTLFNWGPDQQKAYHEIKQALLTAPALGLPDLTKPFELFVDEKQGYAKGVLTQKLGPWRRPVAYLSKKLDPVAAGWPPCLRMVAAIAVLTKDAGKLTMGQPLVILAPHAVEALVKQPPDRWLSNARMTHYQAMLLDTDRVQFGPVVALNPATLLPLPEEGAPHDCLEILAETHGTEPDLTDQPIPDADHTWYTDGSSFLQEGQRKAGAAVTTETEVIWARALPAGTSAQRAELIALTQALKMAEGKRLNVYTDSRYAFATAHIHGEIYKRRGWLTSEGREIKNKSEILALLKALFLPKRLSIIHCLGHQKGDSAEARGNRLADQAAREAAIKTPPDTSTLLAGKRTADGSEFEKRTADGSEFESPKKKAKVE

SEQ ID NO: 6336 - protein, 2091 aa, synthetic construct
MPAAKRVKLDGGDKKYSIGLDIGTNSVGWAVITDEYKVPSKKFKVLGNTDRHSIKKNLIGALLFDSGETAEATRLKRTARRRYTRRKNRICYLQEIFSNEMAKVDDSFFHRLEESFLVEEDKKHERHPIFGNIVDEVAYHEKYPTIYHLRKKLVDSTDKADLRLIYLALAHMIKFRGHFLIEGDLNPDNSDVDKLFIQLVQTYNQLFEENPINASGVDAKAILSARLSKSRRLENLIAQLPGEKKNGLFGNLIALSLGLTPNFKSNFDLAEDAKLQLSKDTYDDDLDNLLAQIGDQYADLFLAAKNLSDAILLSDILRVNTEITKAPLSASMIKRYDEHHQDLTLLKALVRQQLPEKYKEIFFDQSKNGYAGYIDGGASQEEFYKFIKPILEKMDGTEELLVKLNREDLLRKQRTFDNGSIPHQIHLGELHAILRRQEDFYPFLKDNREKIEKILTFRIPYYVGPLARGNSRFAWMTRKSEETITPWNFEEVVDKGASAQSFIERMTNFDKNLPNEKVLPKHSLLYEYFTVYNELTKVKYVTEGMRKPAFLSGEQKKAIVDLLFKTNRKVTVKQLKEDYFKKIECFDSVEISGVEDRFNASLGTYHDLLKIIKDKDFLDNEENEDILEDIVLTLTLFEDREMIEERLKTYAHLFDDKVMKQLKRRRYTGWGRLSRKLINGIRDKQSGKTILDFLKSDGFANRNFMQLIHDDSLTFKEDIQKAQVSGQGDSLHEHIANLAGSPAIKKGILQTVKVVDELVKVMGRHKPENIVIEMARENQTTQKGQKNSRERMKRIEEGIKELGSQILKEHPVENTQLQNEKLYLYYLQNGRDMYVDQELDINRLSDYDVDHIVPQSFLKDDSIDNKVLTRSDKARGKSDNVPSEEVVKKMKNYWRQLLNAKLITQRKFDNLTKAERGGLSELDKAGFIKRQLVETRQITKHVAQILDSRMNTKYDENDKLIREVKVITLKSKLVSDFRKDFQFYKVREINNYHHAHDAYLNAVVGTALIKKYPKLESEFVYGDYKVYDVRKMIAKSEQEIGKATAKYFFYSNIMNFFKTEITLANGEIRKRPLIETNGETGEIVWDKGRDFATVRKVLSMPQVNIVKKTEVQTGGFSKESILPKRNSDKLIARKKDWDPKKYGGFDSPTVAYSVLVVAKVEKGKSKKLKSVKELLGITIMERSSFEKNPIDFLEAKGYKEVKKDLIIKLPKYSLFELENGRKRMLASAGELQKGNELALPSKYVNFLYLASHYEKLKGSPEDNEQKQLFVEQHKHYLDEIIEQISEFSKRVILADANLDKVLSAYNKHRDKPIREQAENIIHLFTLTNLGAPAAFKYFDTTIDRKRYTSTKEVLDATLIHQSITGLYETRIDLSQLGGDGGGSSGSSGSSGSSGSSGGIPWLMKKPLQLTTLVPLQEYEERLLKQTMLTGSYKEKLQSLFLKYDALWQHWENQVGHRRIKPHHIATGTVNPRPQKQYPINPKAKASIQTVINDLLKQGVLIQQNSIMNTPVYPVPKPDGKWRMVLDYREVNKTIPLIAAQNQHSAGILSSIFRGKYKTTLDLSNGFWAHSITPESYWLTAFTWLGQQYCWTRLPQGFLNSPALFNADVVDLLKEVPNVQVYVDDIYISHDDPREHLEQLEKVFSLLLNAGYVVSLKKSEIAQHEVEFLGFNITKEGRGLTETFKQKLLNITPPRDLKQLQSILGKLNFARNFIPNFSELVKPLYNIIATAPGKYITWTTDNSQQLQNIISMLNSAENLEERNPEVRLIMKVNTSPSAGYIRFYNEFAKRPIMYLNYVYTKAEVKFTNTEKLLTTIHKGLIKALDLGMGQEILVYSPIVSMTKIQKTPLPERKALPIRWITWMSYLEDPRIQFHYDKTLPELQQVPTVTDDIIAKIKHPSEFSMVFYTDGSAIKHPNVNKSHNAGMGIAQVQFKPEFTVINTWSIPLGDHTAQLAEVAAVEFACKKALKIDGPVLIVTDSFYVAESVNKELPYWQSNGFFNNKKKPLKHVSKWKSIADCIQLKPDIIIIHEKGHQPTASTFHTEGNNLADKLATQGSYVVNAGKRTADGSEFEKRTADGSEFESPKKKAKVE

SEQ ID NO: 6337 - protein, 2105 aa, synthetic construct
MPAAKRVKLDGGDKKYSIGLDIGTNSVGWAVITDEYKVPSKKFKVLGNTDRHSIKKNLIGALLFDSGETAEATRLKRTARRRYTRRKNRICYLQEIFSNEMAKVDDSFFHRLEESFLVEEDKKHERHPIFGNIVDEVAYHEKYPTIYHLRKKLVDSTDKADLRLIYLALAHMIKFRGHFLIEGDLNPDNSDVDKLFIQLVQTYNQLFEENPINASGVDAKAILSARLSKSRRLENLIAQLPGEKKNGLFGNLIALSLGLTPNFKSNFDLAEDAKLQLSKDTYDDDLDNLLAQIGDQYADLFLAAKNLSDAILLSDILRVNTEITKAPLSASMIKRYDEHHQDLTLLKALVRQQLPEKYKEIFFDQSKNGYAGYIDGGASQEEFYKFIKPILEKMDGTEELLVKLNREDLLRKQRTFDNGSIPHQIHLGELHAILRRQEDFYPFLKDNREKIEKILTFRIPYYVGPLARGNSRFAWMTRKSEETITPWNFEEVVDKGASAQSFIERMTNFDKNLPNEKVLPKHSLLYEYFTVYNELTKVKYVTEGMRKPAFLSGEQKKAIVDLLFKTNRKVTVKQLKEDYFKKIECFDSVEISGVEDRFNASLGTYHDLLKIIKDKDFLDNEENEDILEDIVLTLTLFEDREMIEERLKTYAHLFDDKVMKQLKRRRYTGWGRLSRKLINGIRDKQSGKTILDFLKSDGFANRNFMQLIHDDSLTFKEDIQKAQVSGQGDSLHEHIANLAGSPAIKKGILQTVKVVDELVKVMGRHKPENIVIEMARENQTTQKGQKNSRERMKRIEEGIKELGSQILKEHPVENTQLQNEKLYLYYLQNGRDMYVDQELDINRLSDYDVDHIVPQSFLKDDSIDNKVLTRSDKARGKSDNVPSEEVVKKMKNYWRQLLNAKLITQRKFDNLTKAERGGLSELDKAGFIKRQLVETRQITKHVAQILDSRMNTKYDENDKLIREVKVITLKSKLVSDFRKDFQFYKVREINNYHHAHDAYLNAVVGTALIKKYPKLESEFVYGDYKVYDVRKMIAKSEQEIGKATAKYFFYSNIMNFFKTEITLANGEIRKRPLIETNGETGEIVWDKGRDFATVRKVLSMPQVNIVKKTEVQTGGFSKESILPKRNSDKLIARKKDWDPKKYGGFDSPTVAYSVLVVAKVEKGKSKKLKSVKELLGITIMERSSFEKNPIDFLEAKGYKEVKKDLIIKLPKYSLFELENGRKRMLASAGELQKGNELALPSKYVNFLYLASHYEKLKGSPEDNEQKQLFVEQHKHYLDEIIEQISEFSKRVILADANLDKVLSAYNKHRDKPIREQAENIIHLFTLTNLGAPAAFKYFDTTIDRKRYTSTKEVLDATLIHQSITGLYETRIDLSQLGGDGGGSSGSSGSSGSSGSSGSSGGTAPLEEEYRLFLEAPIQNVTLLEQWKREIPKVWAEINPPGLASTQAPIHVQLLSTALPVRVRQYPITLEAKRSLRETIRKFRAAGILRPVHSPWNTPLLPVRKSGTSEYRMVQDLREVNKRVETIHPTVPNPYTLLSLLPPDRIWYSVLDLKDAFFCIPLAPESQLIFAFEWADAEEGESGQLTWTRLPQGFKNSPTLFDEALNRDLQGFRLDHPSVSLLQYVDDLLIAADTQAACLSATRDLLMTLAELGYRVSGKKAQLCQEEVTYLGFKIHKGSRSLSNSRTQAILQIPVPKTKRQVREFLGTIGYCRLWIPGFAELAQPLYAATRGGNDPLVWGEKEEEAFQSLKLALTQPPALALPSLDKPFQLFVEETSGAAKGVLTQALGPWKRPVAYLSKRLDPVAAGWPRCLRAIAAAALLTREASKLTFGQDIEITSSHNLESLLRSPPDKWLTNARITQYQVLLLDPPRVRFKQTAALNPATLLPETDDTLPIHHCLDTLDSLTSTRPDLTDQPLAQAEATLFTDGSSYIRDGKRYAGAAVVTLDSVIWAEPLPIGTSAQKAELIALTKALEWSKDKSVNIYTDSRYAFATLHVHGMIYRERGLLTAGGKAIKNAPEILALLTAVWLPKRVAVMHCKGHQKDDAPTSTGNRRADEVAREVAIRPLSTQATISAGKRTADGSEFEKRTADGSEFESPKKKAKVE

SEQ ID NO: 6338 - protein, 2180 aa, synthetic construct
MPAAKRVKLDGGDKKYSIGLDIGTNSVGWAVITDEYKVPSKKFKVLGNTDRHSIKKNLIGALLFDSGETAEATRLKRTARRRYTRRKNRICYLQEIFSNEMAKVDDSFFHRLEESFLVEEDKKHERHPIFGNIVDEVAYHEKYPTIYHLRKKLVDSTDKADLRLIYLALAHMIKFRGHFLIEGDLNPDNSDVDKLFIQLVQTYNQLFEENPINASGVDAKAILSARLSKSRRLENLIAQLPGEKKNGLFGNLIALSLGLTPNFKSNFDLAEDAKLQLSKDTYDDDLDNLLAQIGDQYADLFLAAKNLSDAILLSDILRVNTEITKAPLSASMIKRYDEHHQDLTLLKALVRQQLPEKYKEIFFDQSKNGYAGYIDGGASQEEFYKFIKPILEKMDGTEELLVKLNREDLLRKQRTFDNGSIPHQIHLGELHAILRRQEDFYPFLKDNREKIEKILTFRIPYYVGPLARGNSRFAWMTRKSEETITPWNFEEVVDKGASAQSFIERMTNFDKNLPNEKVLPKHSLLYEYFTVYNELTKVKYVTEGMRKPAFLSGEQKKAIVDLLFKTNRKVTVKQLKEDYFKKIECFDSVEISGVEDRFNASLGTYHDLLKIIKDKDFLDNEENEDILEDIVLTLTLFEDREMIEERLKTYAHLFDDKVMKQLKRRRYTGWGRLSRKLINGIRDKQSGKTILDFLKSDGFANRNFMQLIHDDSLTFKEDIQKAQVSGQGDSLHEHIANLAGSPAIKKGILQTVKVVDELVKVMGRHKPENIVIEMARENQTTQKGQKNSRERMKRIEEGIKELGSQILKEHPVENTQLQNEKLYLYYLQNGRDMYVDQELDINRLSDYDVDHIVPQSFLKDDSIDNKVLTRSDKARGKSDNVPSEEVVKKMKNYWRQLLNAKLITQRKFDNLTKAERGGLSELDKAGFIKRQLVETRQITKHVAQILDSRMNTKYDENDKLIREVKVITLKSKLVSDFRKDFQFYKVREINNYHHAHDAYLNAVVGTALIKKYPKLESEFVYGDYKVYDVRKMIAKSEQEIGKATAKYFFYSNIMNFFKTEITLANGEIRKRPLIETNGETGEIVWDKGRDFATVRKVLSMPQVNIVKKTEVQTGGFSKESILPKRNSDKLIARKKDWDPKKYGGFDSPTVAYSVLVVAKVEKGKSKKLKSVKELLGITIMERSSFEKNPIDFLEAKGYKEVKKDLIIKLPKYSLFELENGRKRMLASAGELQKGNELALPSKYVNFLYLASHYEKLKGSPEDNEQKQLFVEQHKHYLDEIIEQISEFSKRVILADANLDKVLSAYNKHRDKPIREQAENIIHLFTLTNLGAPAAFKYFDTTIDRKRYTSTKEVLDATLIHQSITGLYETRIDLSQLGGDGGGSSGSSGSSGSSGSSGSSGGMDLLKPLTVERKGVKIKGYWNSQADITCVPKDLLQGEEPVRQQNVTTIHGTQEGDVYYVNLKIDGRRINTEVIGTTLDYAIITPGDVPWILKKPLELTIKLDLEEQQGTLLNNSILSKKGKEELKQLFEKYSALWQSWENQVGHRRIRPHKIATGTVKPTPQKQYHINPKAKPDIQIVINDLLKQGVLIQKESTMNTPVYPVPKPNGRWRMVLDYRAVNKVTPLIAVQNQHSYGILGSLFKGRYKTTIDLSNGFWAHPIVPEDYWITAFTWQGKQYCWTVLPQGFLNSPGLFNGDVVDLLQGIPNVEVYVDDVYISHDSEKEHLEYLDILFNRLKEAGYIISLKKSNIANSIVDFLGFQITNEGRGLTDTFKEKLENITAPTTLKQLQSILGLLNFARNFIPDFTELIAPLYALIPKSPKNYVPWQIEHSTTLETLITKLNGAEYLQGRKGDKTLIMKVNASYTTGYIRYYNEGEKKPISYVSIVFSKTELKFTELEKLLTTVHKGLLKALDLSMGQNIHVYSPIVSMQNIQKTPQTAKKALASRWLSWLSYLEDPRIRFFYDPQMPALKDLPAVDTGKDNKKHPSNFQHIFYTDGSAITSPTKEGHLNAGMGIVYFINKDGNLQKQQEWSISLGNHTAQFAEIAAFEFALKKCLPLGGNILVVTDSNYVAKAYNEELDVWASNGFVNNRKKPLKHISKWKSVADLKRLRPDVVVTHEPGHQKLDSSPHAYGNNLADQLATQASFKVHAGKRTADGSEFEKRTADGSEFESPKKKAKVE

SEQ ID NO: 6339 - protein, 2102 aa, synthetic construct
MPAAKRVKLDGGDKKYSIGLDIGTNSVGWAVITDEYKVPSKKFKVLGNTDRHSIKKNLIGALLFDSGETAEATRLKRTARRRYTRRKNRICYLQEIFSNEMAKVDDSFFHRLEESFLVEEDKKHERHPIFGNIVDEVAYHEKYPTIYHLRKKLVDSTDKADLRLIYLALAHMIKFRGHFLIEGDLNPDNSDVDKLFIQLVQTYNQLFEENPINASGVDAKAILSARLSKSRRLENLIAQLPGEKKNGLFGNLIALSLGLTPNFKSNFDLAEDAKLQLSKDTYDDDLDNLLAQIGDQYADLFLAAKNLSDAILLSDILRVNTEITKAPLSASMIKRYDEHHQDLTLLKALVRQQLPEKYKEIFFDQSKNGYAGYIDGGASQEEFYKFIKPILEKMDGTEELLVKLNREDLLRKQRTFDNGSIPHQIHLGELHAILRRQEDFYPFLKDNREKIEKILTFRIPYYVGPLARGNSRFAWMTRKSEETITPWNFEEVVDKGASAQSFIERMTNFDKNLPNEKVLPKHSLLYEYFTVYNELTKVKYVTEGMRKPAFLSGEQKKAIVDLLFKTNRKVTVKQLKEDYFKKIECFDSVEISGVEDRFNASLGTYHDLLKIIKDKDFLDNEENEDILEDIVLTLTLFEDREMIEERLKTYAHLFDDKVMKQLKRRRYTGWGRLSRKLINGIRDKQSGKTILDFLKSDGFANRNFMQLIHDDSLTFKEDIQKAQVSGQGDSLHEHIANLAGSPAIKKGILQTVKVVDELVKVMGRHKPENIVIEMARENQTTQKGQKNSRERMKRIEEGIKELGSQILKEHPVENTQLQNEKLYLYYLQNGRDMYVDQELDINRLSDYDVDHIVPQSFLKDDSIDNKVLTRSDKARGKSDNVPSEEVVKKMKNYWRQLLNAKLITQRKFDNLTKAERGGLSELDKAGFIKRQLVETRQITKHVAQILDSRMNTKYDENDKLIREVKVITLKSKLVSDFRKDFQFYKVREINNYHHAHDAYLNAVVGTALIKKYPKLESEFVYGDYKVYDVRKMIAKSEQEIGKATAKYFFYSNIMNFFKTEITLANGEIRKRPLIETNGETGEIVWDKGRDFATVRKVLSMPQVNIVKKTEVQTGGFSKESILPKRNSDKLIARKKDWDPKKYGGFDSPTVAYSVLVVAKVEKGKSKKLKSVKELLGITIMERSSFEKNPIDFLEAKGYKEVKKDLIIKLPKYSLFELENGRKRMLASAGELQKGNELALPSKYVNFLYLASHYEKLKGSPEDNEQKQLFVEQHKHYLDEIIEQISEFSKRVILADANLDKVLSAYNKHRDKPIREQAENIIHLFTLTNLGAPAAFKYFDTTIDRKRYTSTKEVLDATLIHQSITGLYETRIDLSQLGGDGGGSSGSSGSSGSSGSSGSSGGTLQLEEEYRLFEPESTQKQEMDIWLKNFPQAWAETGGMGTAHCQAPVLIQLKATATPISIRQYPMPHEAYQGIKPHIRRMLDQGILKPCQSPWNTPLLPVKKPGTEDYRPVQDLREVNKRVEDIHPTVPNPYNLLSTLPPSHPWYTVLDLKDAFFCLRLHSESQLLFAFEWRDPEIGLSGQLTWTRLPQGFKNSPTLFNEALHSDLADFRVRYPALVLLQYVDDLLLAAATRTECLEGTKALLETLGNKGYRASAKKAQICLQEVTYLGYSLKDGQRWLTKARKEAILSIPVPKNSRQVREFLGTAGYCRLWIPGFAELAAPLYPLTRPGTLFQWGTEQQLAFEDIKKALLSSPALGLPDITKPFELFIDENSGFAKGVLVQKLGPWKRPVAYLSKKLDTVASGWPPCLRMVAAIAILVKDAGKLTLGQPLTILTSHPVEALVRQPPNKWLSNARMTHYQAMLLDAERVHFGPTVSLNPATLLPLPSGGNHHDCLQILAETHGTRPDLTDQPLPDADLTWYTDGSSFIRNGEREAGAAVTTESEVIWAAPLPPGTSAQRAELIALTQALKMAEGKKLTVYTDSRYAFATTHVHGEIYRRRGWLTSEGKEIKNKNEILALLEALFLPKRLSIIHCPGHQKGDSPQAKGNRLADDTAKKAATETHSSLTVLPAGKRTADGSEFEKRTADGSEFESPKKKAKVE

SEQ ID NO: 6340 - protein, 2094 aa, synthetic construct
MPAAKRVKLDGGDKKYSIGLDIGTNSVGWAVITDEYKVPSKKFKVLGNTDRHSIKKNLIGALLFDSGETAEATRLKRTARRRYTRRKNRICYLQEIFSNEMAKVDDSFFHRLEESFLVEEDKKHERHPIFGNIVDEVAYHEKYPTIYHLRKKLVDSTDKADLRLIYLALAHMIKFRGHFLIEGDLNPDNSDVDKLFIQLVQTYNQLFEENPINASGVDAKAILSARLSKSRRLENLIAQLPGEKKNGLFGNLIALSLGLTPNFKSNFDLAEDAKLQLSKDTYDDDLDNLLAQIGDQYADLFLAAKNLSDAILLSDILRVNTEITKAPLSASMIKRYDEHHQDLTLLKALVRQQLPEKYKEIFFDQSKNGYAGYIDGGASQEEFYKFIKPILEKMDGTEELLVKLNREDLLRKQRTFDNGSIPHQIHLGELHAILRRQEDFYPFLKDNREKIEKILTFRIPYYVGPLARGNSRFAWMTRKSEETITPWNFEEVVDKGASAQSFIERMTNFDKNLPNEKVLPKHSLLYEYFTVYNELTKVKYVTEGMRKPAFLSGEQKKAIVDLLFKTNRKVTVKQLKEDYFKKIECFDSVEISGVEDRFNASLGTYHDLLKIIKDKDFLDNEENEDILEDIVLTLTLFEDREMIEERLKTYAHLFDDKVMKQLKRRRYTGWGRLSRKLINGIRDKQSGKTILDFLKSDGFANRNFMQLIHDDSLTFKEDIQKAQVSGQGDSLHEHIANLAGSPAIKKGILQTVKVVDELVKVMGRHKPENIVIEMARENQTTQKGQKNSRERMKRIEEGIKELGSQILKEHPVENTQLQNEKLYLYYLQNGRDMYVDQELDINRLSDYDVDHIVPQSFLKDDSIDNKVLTRSDKARGKSDNVPSEEVVKKMKNYWRQLLNAKLITQRKFDNLTKAERGGLSELDKAGFIKRQLVETRQITKHVAQILDSRMNTKYDENDKLIREVKVITLKSKLVSDFRKDFQFYKVREINNYHHAHDAYLNAVVGTALIKKYPKLESEFVYGDYKVYDVRKMIAKSEQEIGKATAKYFFYSNIMNFFKTEITLANGEIRKRPLIETNGETGEIVWDKGRDFATVRKVLSMPQVNIVKKTEVQTGGFSKESILPKRNSDKLIARKKDWDPKKYGGFDSPTVAYSVLVVAKVEKGKSKKLKSVKELLGITIMERSSFEKNPIDFLEAKGYKEVKKDLIIKLPKYSLFELENGRKRMLASAGELQKGNELALPSKYVNFLYLASHYEKLKGSPEDNEQKQLFVEQHKHYLDEIIEQISEFSKRVILADANLDKVLSAYNKHRDKPIREQAENIIHLFTLTNLGAPAAFKYFDTTIDRKRYTSTKEVLDATLIHQSITGLYETRIDLSQLGGDGGGSSGSSGSSGSSGSSGSSGGVPWLTQQPLQLTILVPLQEYQEKILSKTALPEDQKQQLKTLFVKYDNLWQHWENQVGHRKIRPHNIATGDYPPRPQKQYPINPKAKPSIQIVIDDLLKQGVLTPQNSTMNTPVYPVPKPDGRWRMVLDYREVNKTIPLTAAQNQHSAGILATIVRQKYKTTLDLANGFWAHPITPESYWLTAFTWQGKQYCWTRLPQGFLNSPALFNADVVDLLKEIPNVQVYVDDIYLSHDDPKEHVQQLEKVFQILLQAGYVVSLKKSEIGQKTVEFLGFNITKEGRGLTDTFKTKLLNITPPKDLKQLQSILGLLNFARNFIPNFAELVQPLYNLIAPAKGKYIEWSEENTKQLNMVIEALNTASNLEERLPEQRLVIKVNTSPSAGYVRYYNETGKKPIMYLNYVFSKAELKFSMLEKLLTTMHKALIKAMDLAMGQEILVYSPIVSMTKIQKTPLPERKALPIRWITWMTYLEDPRIQFHYDKTLPELKHIPDVYTSSQSPVKHPSQYEGVFYTDGSAIKSPDPTKSNNAGMGIVHATYKPEYQVLNQWSIPLGNHTAQMAEIAAVEFACKKALKIPGPVLVITDSFYVAESANKELPYWKSNGFVNNKKKPLKHISKWKSIAECLSMKPDITIQHEKGISLQIPVFILKGNALADKLATQGSYVVNAGKRTADGSEFEKRTADGSEFESPKKKAKVE

SEQ ID NO: 6341 - protein, 2094 aa, synthetic construct
MPAAKRVKLDGGDKKYSIGLDIGTNSVGWAVITDEYKVPSKKFKVLGNTDRHSIKKNLIGALLFDSGETAEATRLKRTARRRYTRRKNRICYLQEIFSNEMAKVDDSFFHRLEESFLVEEDKKHERHPIFGNIVDEVAYHEKYPTIYHLRKKLVDSTDKADLRLIYLALAHMIKFRGHFLIEGDLNPDNSDVDKLFIQLVQTYNQLFEENPINASGVDAKAILSARLSKSRRLENLIAQLPGEKKNGLFGNLIALSLGLTPNFKSNFDLAEDAKLQLSKDTYDDDLDNLLAQIGDQYADLFLAAKNLSDAILLSDILRVNTEITKAPLSASMIKRYDEHHQDLTLLKALVRQQLPEKYKEIFFDQSKNGYAGYIDGGASQEEFYKFIKPILEKMDGTEELLVKLNREDLLRKQRTFDNGSIPHQIHLGELHAILRRQEDFYPFLKDNREKIEKILTFRIPYYVGPLARGNSRFAWMTRKSEETITPWNFEEVVDKGASAQSFIERMTNFDKNLPNEKVLPKHSLLYEYFTVYNELTKVKYVTEGMRKPAFLSGEQKKAIVDLLFKTNRKVTVKQLKEDYFKKIECFDSVEISGVEDRFNASLGTYHDLLKIIKDKDFLDNEENEDILEDIVLTLTLFEDREMIEERLKTYAHLFDDKVMKQLKRRRYTGWGRLSRKLINGIRDKQSGKTILDFLKSDGFANRNFMQLIHDDSLTFKEDIQKAQVSGQGDSLHEHIANLAGSPAIKKGILQTVKVVDELVKVMGRHKPENIVIEMARENQTTQKGQKNSRERMKRIEEGIKELGSQILKEHPVENTQLQNEKLYLYYLQNGRDMYVDQELDINRLSDYDVDHIVPQSFLKDDSIDNKVLTRSDKARGKSDNVPSEEVVKKMKNYWRQLLNAKLITQRKFDNLTKAERGGLSELDKAGFIKRQLVETRQITKHVAQILDSRMNTKYDENDKLIREVKVITLKSKLVSDFRKDFQFYKVREINNYHHAHDAYLNAVVGTALIKKYPKLESEFVYGDYKVYDVRKMIAKSEQEIGKATAKYFFYSNIMNFFKTEITLANGEIRKRPLIETNGETGEIVWDKGRDFATVRKVLSMPQVNIVKKTEVQTGGFSKESILPKRNSDKLIARKKDWDPKKYGGFDSPTVAYSVLVVAKVEKGKSKKLKSVKELLGITIMERSSFEKNPIDFLEAKGYKEVKKDLIIKLPKYSLFELENGRKRMLASAGELQKGNELALPSKYVNFLYLASHYEKLKGSPEDNEQKQLFVEQHKHYLDEIIEQISEFSKRVILADANLDKVLSAYNKHRDKPIREQAENIIHLFTLTNLGAPAAFKYFDTTIDRKRYTSTKEVLDATLIHQSITGLYETRIDLSQLGGDGGGSSGSSGSSGSSGSSGSSGGVPWLTQQPLQLTILVPLQEYQEKILSKTALPEDQKQQLKTLFVKYDNLWQHWENQVGHRKIRPHNIATGDYPPRPQKQYPINPKAKPSIQIVIDDLLKQGVLTPQNSTMNTPVYPVPKPDGRWRMVLDYREVNKTIPLTAAQNQHSAGILATIVRQKYKTTLDLANGFWAHPITPESYWLTAFTWQGKQYCWTRLPQGFLNSPALFNADVVDLLKEIPNVQVYVDDIYLSHDDPKEHVQQLEKVFQILLQAGYVVSLKKSEIGQKTVEFLGFNITKEGRGLTDTFKTKLLNITPPKDLKQLQSILGKLNFARNFIPNFAELVQPLYNLIAPAKGKYIEWSEENTKQLNMVIEALNTASNLEERLPEQRLVIKVNTSPSAGYVRYYNETGKKPIMYLNYVFSKAELKFSMLEKLLTTMHKALIKAMDLAMGQEILVYSPIVSMTKIQKTPLPERKALPIRWITWMTYLEDPRIQFHYDKTLPELKHIPDVYTSSQSPVKHPSQYEGVFYTDGSAIKSPDPTKSNNAGMGIVHATYKPEYQVLNQWSIPLGNHTAQMAEIAAVEFACKKALKIPGPVLVITDSFYVAESANKELPYWKSNGFVNNKKKPLKHISKWKSIAECLSMKPDITIQHEKGISLQIPVFILKGNALADKLATQGSYVVNAGKRTADGSEFEKRTADGSEFESPKKKAKVE

SEQ ID NO: 6342 - protein, 2183 aa, synthetic construct
MPAAKRVKLDGGDKKYSIGLDIGTNSVGWAVITDEYKVPSKKFKVLGNTDRHSIKKNLIGALLFDSGETAEATRLKRTARRRYTRRKNRICYLQEIFSNEMAKVDDSFFHRLEESFLVEEDKKHERHPIFGNIVDEVAYHEKYPTIYHLRKKLVDSTDKADLRLIYLALAHMIKFRGHFLIEGDLNPDNSDVDKLFIQLVQTYNQLFEENPINASGVDAKAILSARLSKSRRLENLIAQLPGEKKNGLFGNLIALSLGLTPNFKSNFDLAEDAKLQLSKDTYDDDLDNLLAQIGDQYADLFLAAKNLSDAILLSDILRVNTEITKAPLSASMIKRYDEHHQDLTLLKALVRQQLPEKYKEIFFDQSKNGYAGYIDGGASQEEFYKFIKPILEKMDGTEELLVKLNREDLLRKQRTFDNGSIPHQIHLGELHAILRRQEDFYPFLKDNREKIEKILTFRIPYYVGPLARGNSRFAWMTRKSEETITPWNFEEVVDKGASAQSFIERMTNFDKNLPNEKVLPKHSLLYEYFTVYNELTKVKYVTEGMRKPAFLSGEQKKAIVDLLFKTNRKVTVKQLKEDYFKKIECFDSVEISGVEDRFNASLGTYHDLLKIIKDKDFLDNEENEDILEDIVLTLTLFEDREMIEERLKTYAHLFDDKVMKQLKRRRYTGWGRLSRKLINGIRDKQSGKTILDFLKSDGFANRNFMQLIHDDSLTFKEDIQKAQVSGQGDSLHEHIANLAGSPAIKKGILQTVKVVDELVKVMGRHKPENIVIEMARENQTTQKGQKNSRERMKRIEEGIKELGSQILKEHPVENTQLQNEKLYLYYLQNGRDMYVDQELDINRLSDYDVDHIVPQSFLKDDSIDNKVLTRSDKARGKSDNVPSEEVVKKMKNYWRQLLNAKLITQRKFDNLTKAERGGLSELDKAGFIKRQLVETRQITKHVAQILDSRMNTKYDENDKLIREVKVITLKSKLVSDFRKDFQFYKVREINNYHHAHDAYLNAVVGTALIKKYPKLESEFVYGDYKVYDVRKMIAKSEQEIGKATAKYFFYSNIMNFFKTEITLANGEIRKRPLIETNGETGEIVWDKGRDFATVRKVLSMPQVNIVKKTEVQTGGFSKESILPKRNSDKLIARKKDWDPKKYGGFDSPTVAYSVLVVAKVEKGKSKKLKSVKELLGITIMERSSFEKNPIDFLEAKGYKEVKKDLIIKLPKYSLFELENGRKRMLASAGELQKGNELALPSKYVNFLYLASHYEKLKGSPEDNEQKQLFVEQHKHYLDEIIEQISEFSKRVILADANLDKVLSAYNKHRDKPIREQAENIIHLFTLTNLGAPAAFKYFDTTIDRKRYTSTKEVLDATLIHQSITGLYETRIDLSQLGGDGGGSSGSSGSSGSSGSSGSSGGMNPLQLLQPLPAEIKGTKLLAHWNSGATITCIPESFLEDEQPIKKTLIKTIHGEKQQNVYYVTFKVKGRKVEAEVIASPYEYILLSPTDVPWLTQQPLQLTILVPLQEYQEKILSKTALPEDQKQQLKTLFVKYDNLWQHWENQVGHRKIRPHNIATGDYPPRPQKQYPINPKAKPSIQIVIDDLLKQGVLTPQNSTMNTPVYPVPKPDGRWRMVLDYREVNKTIPLTAAQNQHSAGILATIVRQKYKTTLDLANGFWAHPITPESYWLTAFTWQGKQYCWTRLPQGFLNSPALFNADVVDLLKEIPNVQVYVDDIYLSHDDPKEHVQQLEKVFQILLQAGYVVSLKKSEIGQKTVEFLGFNITKEGRGLTDTFKTKLLNITPPKDLKQLQSILGLLNFARNFIPNFAELVQPLYNLIAPAKGKYIEWSEENTKQLNMVIEALNTASNLEERLPEQRLVIKVNTSPSAGYVRYYNETGKKPIMYLNYVFSKAELKFSMLEKLLTTMHKALIKAMDLAMGQEILVYSPIVSMTKIQKTPLPERKALPIRWITWMTYLEDPRIQFHYDKTLPELKHIPDVYTSSQSPVKHPSQYEGVFYTDGSAIKSPDPTKSNNAGMGIVHATYKPEYQVLNQWSIPLGNHTAQMAEIAAVEFACKKALKIPGPVLVITDSFYVAESANKELPYWKSNGFVNNKKKPLKHISKWKSIAECLSMKPDITIQHEKGISLQIPVFILKGNALADKLATQGSYVVNAGKRTADGSEFEKRTADGSEFESPKKKAKVE

SEQ ID NO: 6343 - protein, 2101 aa, synthetic construct
MPAAKRVKLDGGDKKYSIGLDIGTNSVGWAVITDEYKVPSKKFKVLGNTDRHSIKKNLIGALLFDSGETAEATRLKRTARRRYTRRKNRICYLQEIFSNEMAKVDDSFFHRLEESFLVEEDKKHERHPIFGNIVDEVAYHEKYPTIYHLRKKLVDSTDKADLRLIYLALAHMIKFRGHFLIEGDLNPDNSDVDKLFIQLVQTYNQLFEENPINASGVDAKAILSARLSKSRRLENLIAQLPGEKKNGLFGNLIALSLGLTPNFKSNFDLAEDAKLQLSKDTYDDDLDNLLAQIGDQYADLFLAAKNLSDAILLSDILRVNTEITKAPLSASMIKRYDEHHQDLTLLKALVRQQLPEKYKEIFFDQSKNGYAGYIDGGASQEEFYKFIKPILEKMDGTEELLVKLNREDLLRKQRTFDNGSIPHQIHLGELHAILRRQEDFYPFLKDNREKIEKILTFRIPYYVGPLARGNSRFAWMTRKSEETITPWNFEEVVDKGASAQSFIERMTNFDKNLPNEKVLPKHSLLYEYFTVYNELTKVKYVTEGMRKPAFLSGEQKKAIVDLLFKTNRKVTVKQLKEDYFKKIECFDSVEISGVEDRFNASLGTYHDLLKIIKDKDFLDNEENEDILEDIVLTLTLFEDREMIEERLKTYAHLFDDKVMKQLKRRRYTGWGRLSRKLINGIRDKQSGKTILDFLKSDGFANRNFMQLIHDDSLTFKEDIQKAQVSGQGDSLHEHIANLAGSPAIKKGILQTVKVVDELVKVMGRHKPENIVIEMARENQTTQKGQKNSRERMKRIEEGIKELGSQILKEHPVENTQLQNEKLYLYYLQNGRDMYVDQELDINRLSDYDVDHIVPQSFLKDDSIDNKVLTRSDKARGKSDNVPSEEVVKKMKNYWRQLLNAKLITQRKFDNLTKAERGGLSELDKAGFIKRQLVETRQITKHVAQILDSRMNTKYDENDKLIREVKVITLKSKLVSDFRKDFQFYKVREINNYHHAHDAYLNAVVGTALIKKYPKLESEFVYGDYKVYDVRKMIAKSEQEIGKATAKYFFYSNIMNFFKTEITLANGEIRKRPLIETNGETGEIVWDKGRDFATVRKVLSMPQVNIVKKTEVQTGGFSKESILPKRNSDKLIARKKDWDPKKYGGFDSPTVAYSVLVVAKVEKGKSKKLKSVKELLGITIMERSSFEKNPIDFLEAKGYKEVKKDLIIKLPKYSLFELENGRKRMLASAGELQKGNELALPSKYVNFLYLASHYEKLKGSPEDNEQKQLFVEQHKHYLDEIIEQISEFSKRVILADANLDKVLSAYNKHRDKPIREQAENIIHLFTLTNLGAPAAFKYFDTTIDRKRYTSTKEVLDATLIHQSITGLYETRIDLSQLGGDGGGSSGSSGSSGSSGSSGSSGGVLNLEEEYRLHEKPVPSSIDPSWLQLFPTVWAERAGMGLANQVPPVVVELRSGASPVAVRQYPMSKEAREGIRPHIQKFLDLGVLVPCRSPWNTPLLPVKKPGTNDYRPVQDLREINKRVQDIHPTVPNPYNLLSSLPPSYTWYSVLDLKDAFFCLRLHPNSQPLFAFEWKDPEKGNTGQLTWTRLPQGFKNSPTLFNEALHRDLAPFRALNPQVVLLQYVDDLLVAAPTYEDCKKGTQKLLQELSKLGYRVSAKKAQLCQREVTYLGYLLKEGKRWLTPARKATVMKIPVPTTPRQVREFLGKAGFCRLFIPGFASLAAPLYPLTKPSIPFIWTEEHQQAFDHIKKALLSAPALALPDLTKPFTLYIDERAGVARGVLTQTLGPWRRPVAYLSKKLDPVASGWPTCLKAVAAVALLLKDADKLTLGQNVTVIASHSLESIVRQPPDRWMTNARMTHYQSLLLNERVSFAPPAVLNPATLLPVESEATPVHRCSEILAEETGTRRDLEDQPLPGVPTWYTDGSSFITEGKRRAGAPIVDGKRTVWASSLPEGTSAQKAELVALTQALRLAEGKNINIYTDSRYAFATAHIHGAIYKQRGWLTSAGKDIKNKEEILALLEAIHLPRRVAIIHCPGHQRGSNPVATGNRRADEAAKQAALSTRVLAGTTKPAGKRTADGSEFEKRTADGSEFESPKKKAKVE

SEQ ID NO: 6344 - protein, 2134 aa, synthetic construct
MPAAKRVKLDGGDKKYSIGLDIGTNSVGWAVITDEYKVPSKKFKVLGNTDRHSIKKNLIGALLFDSGETAEATRLKRTARRRYTRRKNRICYLQEIFSNEMAKVDDSFFHRLEESFLVEEDKKHERHPIFGNIVDEVAYHEKYPTIYHLRKKLVDSTDKADLRLIYLALAHMIKFRGHFLIEGDLNPDNSDVDKLFIQLVQTYNQLFEENPINASGVDAKAILSARLSKSRRLENLIAQLPGEKKNGLFGNLIALSLGLTPNFKSNFDLAEDAKLQLSKDTYDDDLDNLLAQIGDQYADLFLAAKNLSDAILLSDILRVNTEITKAPLSASMIKRYDEHHQDLTLLKALVRQQLPEKYKEIFFDQSKNGYAGYIDGGASQEEFYKFIKPILEKMDGTEELLVKLNREDLLRKQRTFDNGSIPHQIHLGELHAILRRQEDFYPFLKDNREKIEKILTFRIPYYVGPLARGNSRFAWMTRKSEETITPWNFEEVVDKGASAQSFIERMTNFDKNLPNEKVLPKHSLLYEYFTVYNELTKVKYVTEGMRKPAFLSGEQKKAIVDLLFKTNRKVTVKQLKEDYFKKIECFDSVEISGVEDRFNASLGTYHDLLKIIKDKDFLDNEENEDILEDIVLTLTLFEDREMIEERLKTYAHLFDDKVMKQLKRRRYTGWGRLSRKLINGIRDKQSGKTILDFLKSDGFANRNFMQLIHDDSLTFKEDIQKAQVSGQGDSLHEHIANLAGSPAIKKGILQTVKVVDELVKVMGRHKPENIVIEMARENQTTQKGQKNSRERMKRIEEGIKELGSQILKEHPVENTQLQNEKLYLYYLQNGRDMYVDQELDINRLSDYDVDHIVPQSFLKDDSIDNKVLTRSDKARGKSDNVPSEEVVKKMKNYWRQLLNAKLITQRKFDNLTKAERGGLSELDKAGFIKRQLVETRQITKHVAQILDSRMNTKYDENDKLIREVKVITLKSKLVSDFRKDFQFYKVREINNYHHAHDAYLNAVVGTALIKKYPKLESEFVYGDYKVYDVRKMIAKSEQEIGKATAKYFFYSNIMNFFKTEITLANGEIRKRPLIETNGETGEIVWDKGRDFATVRKVLSMPQVNIVKKTEVQTGGFSKESILPKRNSDKLIARKKDWDPKKYGGFDSPTVAYSVLVVAKVEKGKSKKLKSVKELLGITIMERSSFEKNPIDFLEAKGYKEVKKDLIIKLPKYSLFELENGRKRMLASAGELQKGNELALPSKYVNFLYLASHYEKLKGSPEDNEQKQLFVEQHKHYLDEIIEQISEFSKRVILADANLDKVLSAYNKHRDKPIREQAENIIHLFTLTNLGAPAAFKYFDTTIDRKRYTSTKEVLDATLIHQSITGLYETRIDLSQLGGDGGGSSGSSGSSGSSGSSGSSGGLLGRDLLTKLKAQIQFSTEGPQVTWEDRPAMCLVLNLEEEYRLHEKPVPPSIDPSWLQLFPMVWAEKAGMGLANQVPPVVVELKSDASPVAVRQYPMSKEAREGIRPHIQRFLDLGILVPCQSPWNTPLLPVKKPGTNDYRPVQDLREVNKRVQDIHPTVPNPYNLLSSLPPSHTWYSVLDLKDAFFCLKLHPNSQPLFAFEWRDPEKGNTGQLTWTRLPQGFKNSPTLFNEALHRDLASFRALNPQVVMLQYVDDLLVAAPTYRDCKEGTRRLLQELSKLGYRVSAKKAQLCREEVTYLGYLLKGGKRWLTPARKATVMKIPTPTTPRQVREFLGTAGFCRLWIPGFASLAAPLYPLTRPKVPFTWTEAHQEAFGRIKEALLSAPALALPDLTKPFALYVDEKEGVARGVLTQTLGPWRRPVAYLSKKLDPVASGWPTCLKAIAAVALLLKDADKLTLGQNVLVIAPHNLESIVRQPPDRWMTNARMTHYQSLLLNERVSFAPPAILNPATLLPVESDDTPIHICSEILAEETGTRPDLRDQPLPGVPAWYTDGSSFIMDGRRQAGAAIVDNKRTVWASNLPEGTSAQKAELIALTQALRLAEGKSINIYTDSRYAFATAHVHGAIYKQRGWLTSAGKDIKNKEEILALLEAIHLPKRVAIIHCPGHQRGTDPVATGNRKADEAAKQAAQSTRILTETTKNAGKRTADGSEFEKRTADGSEFESPKKKAKVE

SEQ ID NO: 6345 - protein, 2225 aa, synthetic construct
MPAAKRVKLDGGDKKYSIGLDIGTNSVGWAVITDEYKVPSKKFKVLGNTDRHSIKKNLIGALLFDSGETAEATRLKRTARRRYTRRKNRICYLQEIFSNEMAKVDDSFFHRLEESFLVEEDKKHERHPIFGNIVDEVAYHEKYPTIYHLRKKLVDSTDKADLRLIYLALAHMIKFRGHFLIEGDLNPDNSDVDKLFIQLVQTYNQLFEENPINASGVDAKAILSARLSKSRRLENLIAQLPGEKKNGLFGNLIALSLGLTPNFKSNFDLAEDAKLQLSKDTYDDDLDNLLAQIGDQYADLFLAAKNLSDAILLSDILRVNTEITKAPLSASMIKRYDEHHQDLTLLKALVRQQLPEKYKEIFFDQSKNGYAGYIDGGASQEEFYKFIKPILEKMDGTEELLVKLNREDLLRKQRTFDNGSIPHQIHLGELHAILRRQEDFYPFLKDNREKIEKILTFRIPYYVGPLARGNSRFAWMTRKSEETITPWNFEEVVDKGASAQSFIERMTNFDKNLPNEKVLPKHSLLYEYFTVYNELTKVKYVTEGMRKPAFLSGEQKKAIVDLLFKTNRKVTVKQLKEDYFKKIECFDSVEISGVEDRFNASLGTYHDLLKIIKDKDFLDNEENEDILEDIVLTLTLFEDREMIEERLKTYAHLFDDKVMKQLKRRRYTGWGRLSRKLINGIRDKQSGKTILDFLKSDGFANRNFMQLIHDDSLTFKEDIQKAQVSGQGDSLHEHIANLAGSPAIKKGILQTVKVVDELVKVMGRHKPENIVIEMARENQTTQKGQKNSRERMKRIEEGIKELGSQILKEHPVENTQLQNEKLYLYYLQNGRDMYVDQELDINRLSDYDVDHIVPQSFLKDDSIDNKVLTRSDKARGKSDNVPSEEVVKKMKNYWRQLLNAKLITQRKFDNLTKAERGGLSELDKAGFIKRQLVETRQITKHVAQILDSRMNTKYDENDKLIREVKVITLKSKLVSDFRKDFQFYKVREINNYHHAHDAYLNAVVGTALIKKYPKLESEFVYGDYKVYDVRKMIAKSEQEIGKATAKYFFYSNIMNFFKTEITLANGEIRKRPLIETNGETGEIVWDKGRDFATVRKVLSMPQVNIVKKTEVQTGGFSKESILPKRNSDKLIARKKDWDPKKYGGFDSPTVAYSVLVVAKVEKGKSKKLKSVKELLGITIMERSSFEKNPIDFLEAKGYKEVKKDLIIKLPKYSLFELENGRKRMLASAGELQKGNELALPSKYVNFLYLASHYEKLKGSPEDNEQKQLFVEQHKHYLDEIIEQISEFSKRVILADANLDKVLSAYNKHRDKPIREQAENIIHLFTLTNLGAPAAFKYFDTTIDRKRYTSTKEVLDATLIHQSITGLYETRIDLSQLGGDGGGSSGSSGSSGSSGSSGSSGGTLGDQGSRGSDPLPEPRVTLTVEGIPTEFLVNTGAEHSVLTKPMGKMGSKRTVVAGATGSKVYPWTTKRLLKIGQKQVTHSFLVIPECPAPLLGRDLLTKLKAQIQFSTEGPQVTWEDRPAMCLVLNLEEEYRLHEKPVPPSIDPSWLQLFPMVWAEKAGMGLANQVPPVVVELKSDASPVAVRQYPMSKEAREGIRPHIQRFLDLGILVPCQSPWNTPLLPVKKPGTNDYRPVQDLREVNKRVQDIHPTVPNPYNLLSSLPPSHTWYSVLDLKDAFFCLKLHPNSQPLFAFEWRDPEKGNTGQLTWTRLPQGFKNSPTLFNEALHRDLASFRALNPQVVMLQYVDDLLVAAPTYRDCKEGTRRLLQELSKLGYRVSAKKAQLCREEVTYLGYLLKGGKRWLTPARKATVMKIPTPTTPRQVREFLGTAGFCRLWIPGFASLAAPLYPLTRPKVPFTWTEAHQEAFGRIKEALLSAPALALPDLTKPFALYVDEKEGVARGVLTQTLGPWRRPVAYLSKKLDPVASGWPTCLKAIAAVALLLKDADKLTLGQNVLVIAPHNLESIVRQPPDRWMTNARMTHYQSLLLNERVSFAPPAILNPATLLPVESDDTPIHICSEILAEETGTRPDLRDQPLPGVPAWYTDGSSFIMDGRRQAGAAIVDNKRTVWASNLPEGTSAQKAELIALTQALRLAEGKSINIYTDSRYAFATAHVHGAIYKQRGWLTSAGKDIKNKEEILALLEAIHLPKRVAIIHCPGHQRGTDPVATGNRKADEAAKQAAQSTRILTETTKNAGKRTADGSEFEKRTADGSEFESPKKKAKVE

SEQ ID NO: 6346 - protein, 2225 aa, synthetic construct
MPAAKRVKLDGGDKKYSIGLDIGTNSVGWAVITDEYKVPSKKFKVLGNTDRHSIKKNLIGALLFDSGETAEATRLKRTARRRYTRRKNRICYLQEIFSNEMAKVDDSFFHRLEESFLVEEDKKHERHPIFGNIVDEVAYHEKYPTIYHLRKKLVDSTDKADLRLIYLALAHMIKFRGHFLIEGDLNPDNSDVDKLFIQLVQTYNQLFEENPINASGVDAKAILSARLSKSRRLENLIAQLPGEKKNGLFGNLIALSLGLTPNFKSNFDLAEDAKLQLSKDTYDDDLDNLLAQIGDQYADLFLAAKNLSDAILLSDILRVNTEITKAPLSASMIKRYDEHHQDLTLLKALVRQQLPEKYKEIFFDQSKNGYAGYIDGGASQEEFYKFIKPILEKMDGTEELLVKLNREDLLRKQRTFDNGSIPHQIHLGELHAILRRQEDFYPFLKDNREKIEKILTFRIPYYVGPLARGNSRFAWMTRKSEETITPWNFEEVVDKGASAQSFIERMTNFDKNLPNEKVLPKHSLLYEYFTVYNELTKVKYVTEGMRKPAFLSGEQKKAIVDLLFKTNRKVTVKQLKEDYFKKIECFDSVEISGVEDRFNASLGTYHDLLKIIKDKDFLDNEENEDILEDIVLTLTLFEDREMIEERLKTYAHLFDDKVMKQLKRRRYTGWGRLSRKLINGIRDKQSGKTILDFLKSDGFANRNFMQLIHDDSLTFKEDIQKAQVSGQGDSLHEHIANLAGSPAIKKGILQTVKVVDELVKVMGRHKPENIVIEMARENQTTQKGQKNSRERMKRIEEGIKELGSQILKEHPVENTQLQNEKLYLYYLQNGRDMYVDQELDINRLSDYDVDHIVPQSFLKDDSIDNKVLTRSDKARGKSDNVPSEEVVKKMKNYWRQLLNAKLITQRKFDNLTKAERGGLSELDKAGFIKRQLVETRQITKHVAQILDSRMNTKYDENDKLIREVKVITLKSKLVSDFRKDFQFYKVREINNYHHAHDAYLNAVVGTALIKKYPKLESEFVYGDYKVYDVRKMIAKSEQEIGKATAKYFFYSNIMNFFKTEITLANGEIRKRPLIETNGETGEIVWDKGRDFATVRKVLSMPQVNIVKKTEVQTGGFSKESILPKRNSDKLIARKKDWDPKKYGGFDSPTVAYSVLVVAKVEKGKSKKLKSVKELLGITIMERSSFEKNPIDFLEAKGYKEVKKDLIIKLPKYSLFELENGRKRMLASAGELQKGNELALPSKYVNFLYLASHYEKLKGSPEDNEQKQLFVEQHKHYLDEIIEQISEFSKRVILADANLDKVLSAYNKHRDKPIREQAENIIHLFTLTNLGAPAAFKYFDTTIDRKRYTSTKEVLDATLIHQSITGLYETRIDLSQLGGDGGGSSGSSGSSGSSGSSGSSGGTLGDQGSRGSDPLPEPRVTLTVEGIPTEFLVNTGAEHSVLTKPMGKMGSKRTVVAGATGSKVYPWTTKRLLKIGQKQVTHSFLVIPECPAPLLGRDLLTKLKAQIQFSTEGPQVTWEDRPAMCLVLNLEEEYRLHEKPVPPSIDPSWLQLFPMVWAEKAGMGLANQVPPVVVELKSDASPVAVRQYPMSKEAREGIRPHIQRFLDLGILVPCQSPWNTPLLPVKKPGTNDYRPVQDLREVNKRVQDIHPTVPNPYNLLSSLPPSHTWYSVLDLKDAFFCLKLHPNSQPLFAFEWRDPEKGNTGQLTWTRLPQGFKNSPTLFNEALHRDLASFRALNPQVVMLQYVDDLLVAAPTYRDCKEGTRRLLQELSKLGYRVSAKKAQLCREEVTYLGYLLKGGKRWLTPARKATVMKIPTPTTPRQVREFLGKAGFCRLFIPGFASLAAPLYPLTRPKVPFTWTEAHQEAFGRIKEALLSAPALALPDLTKPFALYVDEKEGVARGVLTQTLGPWRRPVAYLSKKLDPVASGWPTCLKAIAAVALLLKDADKLTLGQNVLVIAPHNLESIVRQPPDRWMTNARMTHYQSLLLNERVSFAPPAILNPATLLPVESDDTPIHICSEILAEETGTRPDLRDQPLPGVPAWYTDGSSFIMDGRRQAGAAIVDNKRTVWASNLPEGTSAQKAELIALTQALRLAEGKSINIYTDSRYAFATAHVHGAIYKQRGWLTSAGKDIKNKEEILALLEAIHLPKRVAIIHCPGHQRGTDPVATGNRKADEAAKQAAQSTRILTETTKNAGKRTADGSEFEKRTADGSEFESPKKKAKVE

SEQ ID NO: 6347 - protein, 2103 aa, synthetic construct
MPAAKRVKLDGGDKKYSIGLDIGTNSVGWAVITDEYKVPSKKFKVLGNTDRHSIKKNLIGALLFDSGETAEATRLKRTARRRYTRRKNRICYLQEIFSNEMAKVDDSFFHRLEESFLVEEDKKHERHPIFGNIVDEVAYHEKYPTIYHLRKKLVDSTDKADLRLIYLALAHMIKFRGHFLIEGDLNPDNSDVDKLFIQLVQTYNQLFEENPINASGVDAKAILSARLSKSRRLENLIAQLPGEKKNGLFGNLIALSLGLTPNFKSNFDLAEDAKLQLSKDTYDDDLDNLLAQIGDQYADLFLAAKNLSDAILLSDILRVNTEITKAPLSASMIKRYDEHHQDLTLLKALVRQQLPEKYKEIFFDQSKNGYAGYIDGGASQEEFYKFIKPILEKMDGTEELLVKLNREDLLRKQRTFDNGSIPHQIHLGELHAILRRQEDFYPFLKDNREKIEKILTFRIPYYVGPLARGNSRFAWMTRKSEETITPWNFEEVVDKGASAQSFIERMTNFDKNLPNEKVLPKHSLLYEYFTVYNELTKVKYVTEGMRKPAFLSGEQKKAIVDLLFKTNRKVTVKQLKEDYFKKIECFDSVEISGVEDRFNASLGTYHDLLKIIKDKDFLDNEENEDILEDIVLTLTLFEDREMIEERLKTYAHLFDDKVMKQLKRRRYTGWGRLSRKLINGIRDKQSGKTILDFLKSDGFANRNFMQLIHDDSLTFKEDIQKAQVSGQGDSLHEHIANLAGSPAIKKGILQTVKVVDELVKVMGRHKPENIVIEMARENQTTQKGQKNSRERMKRIEEGIKELGSQILKEHPVENTQLQNEKLYLYYLQNGRDMYVDQELDINRLSDYDVDHIVPQSFLKDDSIDNKVLTRSDKARGKSDNVPSEEVVKKMKNYWRQLLNAKLITQRKFDNLTKAERGGLSELDKAGFIKRQLVETRQITKHVAQILDSRMNTKYDENDKLIREVKVITLKSKLVSDFRKDFQFYKVREINNYHHAHDAYLNAVVGTALIKKYPKLESEFVYGDYKVYDVRKMIAKSEQEIGKATAKYFFYSNIMNFFKTEITLANGEIRKRPLIETNGETGEIVWDKGRDFATVRKVLSMPQVNIVKKTEVQTGGFSKESILPKRNSDKLIARKKDWDPKKYGGFDSPTVAYSVLVVAKVEKGKSKKLKSVKELLGITIMERSSFEKNPIDFLEAKGYKEVKKDLIIKLPKYSLFELENGRKRMLASAGELQKGNELALPSKYVNFLYLASHYEKLKGSPEDNEQKQLFVEQHKHYLDEIIEQISEFSKRVILADANLDKVLSAYNKHRDKPIREQAENIIHLFTLTNLGAPAAFKYFDTTIDRKRYTSTKEVLDATLIHQSITGLYETRIDLSQLGGDGGGSSGSSGSSGSSGSSGSSGGTLNLEDEYRLYETSAEPEVSPGSTWLSDFPQAWAETGGMGLAVRQAPLIIPLKATSTPVSIKQYPMSQEAKLGIKPHIQRLLDQGILVPCQSPWNTPLLPVKKPGTNDYRPVQDLREVNKRVEDIHPTVPNPYNLLSGLPPSHRWYTVLDLKDAFFCLRLHPTSQPLFAFEWRDPGMGISGQLTWTRLPQGFKNSPTLFNEALHRDLADFRIQHPDLILLQYVDDILLAATSELDCQQGTRALLLTLGNLGYRASAKKAQLCQKQVKYLGYLLKEGQRWLTEARKETVMGQPTPKTPRQLREFLGTAGFCRLWIPGFAEMAAPLYPLTKPGTLFNWGPDQQKAYQEIKQALLTAPALGLPDLTKPFELFVDEKQGYAKGVLTQKLGPWRRPVAYLSKKLDPVAAGWPPCLRMVAAIAVLRKDAGKLTMGQPLVILAPHAVEALVKQPPDRWLSNARMTHYQAMLLDTDRVQFGPVVALNPATLLPLPEEGAPHDCLEILAETHGTRPDLTDQPIPDADHTWYTDGSSFLQEGQRKAGAAVTTETEVIWARALPAGTSAQRAELIALTQALKMAEGKRLNVYTDSRYAFATAHIHGEIYRRRGWLTSEGREIKNKSEILALLKALFLPKRLSIIHCLGHQKGDSAEARGNRLADQAAREAAIKTPPDTSTLLAGKRTADGSEFEKRTADGSEFESPKKKAKVE

SEQ ID NO: 6348 - protein, 2103 aa, synthetic construct
MPAAKRVKLDGGDKKYSIGLDIGTNSVGWAVITDEYKVPSKKFKVLGNTDRHSIKKNLIGALLFDSGETAEATRLKRTARRRYTRRKNRICYLQEIFSNEMAKVDDSFFHRLEESFLVEEDKKHERHPIFGNIVDEVAYHEKYPTIYHLRKKLVDSTDKADLRLIYLALAHMIKFRGHFLIEGDLNPDNSDVDKLFIQLVQTYNQLFEENPINASGVDAKAILSARLSKSRRLENLIAQLPGEKKNGLFGNLIALSLGLTPNFKSNFDLAEDAKLQLSKDTYDDDLDNLLAQIGDQYADLFLAAKNLSDAILLSDILRVNTEITKAPLSASMIKRYDEHHQDLTLLKALVRQQLPEKYKEIFFDQSKNGYAGYIDGGASQEEFYKFIKPILEKMDGTEELLVKLNREDLLRKQRTFDNGSIPHQIHLGELHAILRRQEDFYPFLKDNREKIEKILTFRIPYYVGPLARGNSRFAWMTRKSEETITPWNFEEVVDKGASAQSFIERMTNFDKNLPNEKVLPKHSLLYEYFTVYNELTKVKYVTEGMRKPAFLSGEQKKAIVDLLFKTNRKVTVKQLKEDYFKKIECFDSVEISGVEDRFNASLGTYHDLLKIIKDKDFLDNEENEDILEDIVLTLTLFEDREMIEERLKTYAHLFDDKVMKQLKRRRYTGWGRLSRKLINGIRDKQSGKTILDFLKSDGFANRNFMQLIHDDSLTFKEDIQKAQVSGQGDSLHEHIANLAGSPAIKKGILQTVKVVDELVKVMGRHKPENIVIEMARENQTTQKGQKNSRERMKRIEEGIKELGSQILKEHPVENTQLQNEKLYLYYLQNGRDMYVDQELDINRLSDYDVDHIVPQSFLKDDSIDNKVLTRSDKARGKSDNVPSEEVVKKMKNYWRQLLNAKLITQRKFDNLTKAERGGLSELDKAGFIKRQLVETRQITKHVAQILDSRMNTKYDENDKLIREVKVITLKSKLVSDFRKDFQFYKVREINNYHHAHDAYLNAVVGTALIKKYPKLESEFVYGDYKVYDVRKMIAKSEQEIGKATAKYFFYSNIMNFFKTEITLANGEIRKRPLIETNGETGEIVWDKGRDFATVRKVLSMPQVNIVKKTEVQTGGFSKESILPKRNSDKLIARKKDWDPKKYGGFDSPTVAYSVLVVAKVEKGKSKKLKSVKELLGITIMERSSFEKNPIDFLEAKGYKEVKKDLIIKLPKYSLFELENGRKRMLASAGELQKGNELALPSKYVNFLYLASHYEKLKGSPEDNEQKQLFVEQHKHYLDEIIEQISEFSKRVILADANLDKVLSAYNKHRDKPIREQAENIIHLFTLTNLGAPAAFKYFDTTIDRKRYTSTKEVLDATLIHQSITGLYETRIDLSQLGGDGGGSSGSSGSSGSSGSSGSSGGTLNLEDEYRLYETSAEPEVSPGSTWLSDFPQAWAETGGMGLAVRQAPLIIPLKATSTPVSIKQYPMSQEAKLGIKPHIQRLLDQGILVPCQSPWNTPLLPVKKPGTNDYRPVQDLREVNKRVEDIHPTVPNPYNLLSGLPPSHRWYTVLDLKDAFFCLRLHPTSQPLFAFEWRDPGMGISGQLTWTRLPQGFKNSPTLFNEALHRDLADFRIQHPDLILLQYVDDILLAATSELDCQQGTRALLLTLGNLGYRASAKKAQLCQKQVKYLGYLLKEGQRWLTEARKETVMGQPTPKTPRQLREFLGKAGFCRLFIPGFAEMAAPLYPLTKPGTLFNWGPDQQKAYQEIKQALLTAPALGLPDLTKPFELFVDEKQGYAKGVLTQKLGPWRRPVAYLSKKLDPVAAGWPPCLRMVAAIAVLRKDAGKLTMGQPLVILAPHAVEALVKQPPDRWLSNARMTHYQAMLLDTDRVQFGPVVALNPATLLPLPEEGAPHDCLEILAETHGTRPDLTDQPIPDADHTWYTDGSSFLQEGQRKAGAAVTTETEVIWARALPAGTSAQRAELIALTQALKMAEGKRLNVYTDSRYAFATAHIHGEIYRRRGWLTSEGREIKNKSEILALLKALFLPKRLSIIHCLGHQKGDSAEARGNRLADQAAREAAIKTPPDTSTLLAGKRTADGSEFEKRTADGSEFESPKKKAKVE

SEQ ID NO: 6349 - protein, 2103 aa, synthetic construct
MPAAKRVKLDGGDKKYSIGLDIGTNSVGWAVITDEYKVPSKKFKVLGNTDRHSIKKNLIGALLFDSGETAEATRLKRTARRRYTRRKNRICYLQEIFSNEMAKVDDSFFHRLEESFLVEEDKKHERHPIFGNIVDEVAYHEKYPTIYHLRKKLVDSTDKADLRLIYLALAHMIKFRGHFLIEGDLNPDNSDVDKLFIQLVQTYNQLFEENPINASGVDAKAILSARLSKSRRLENLIAQLPGEKKNGLFGNLIALSLGLTPNFKSNFDLAEDAKLQLSKDTYDDDLDNLLAQIGDQYADLFLAAKNLSDAILLSDILRVNTEITKAPLSASMIKRYDEHHQDLTLLKALVRQQLPEKYKEIFFDQSKNGYAGYIDGGASQEEFYKFIKPILEKMDGTEELLVKLNREDLLRKQRTFDNGSIPHQIHLGELHAILRRQEDFYPFLKDNREKIEKILTFRIPYYVGPLARGNSRFAWMTRKSEETITPWNFEEVVDKGASAQSFIERMTNFDKNLPNEKVLPKHSLLYEYFTVYNELTKVKYVTEGMRKPAFLSGEQKKAIVDLLFKTNRKVTVKQLKEDYFKKIECFDSVEISGVEDRFNASLGTYHDLLKIIKDKDFLDNEENEDILEDIVLTLTLFEDREMIEERLKTYAHLFDDKVMKQLKRRRYTGWGRLSRKLINGIRDKQSGKTILDFLKSDGFANRNFMQLIHDDSLTFKEDIQKAQVSGQGDSLHEHIANLAGSPAIKKGILQTVKVVDELVKVMGRHKPENIVIEMARENQTTQKGQKNSRERMKRIEEGIKELGSQILKEHPVENTQLQNEKLYLYYLQNGRDMYVDQELDINRLSDYDVDHIVPQSFLKDDSIDNKVLTRSDKARGKSDNVPSEEVVKKMKNYWRQLLNAKLITQRKFDNLTKAERGGLSELDKAGFIKRQLVETRQITKHVAQILDSRMNTKYDENDKLIREVKVITLKSKLVSDFRKDFQFYKVREINNYHHAHDAYLNAVVGTALIKKYPKLESEFVYGDYKVYDVRKMIAKSEQEIGKATAKYFFYSNIMNFFKTEITLANGEIRKRPLIETNGETGEIVWDKGRDFATVRKVLSMPQVNIVKKTEVQTGGFSKESILPKRNSDKLIARKKDWDPKKYGGFDSPTVAYSVLVVAKVEKGKSKKLKSVKELLGITIMERSSFEKNPIDFLEAKGYKEVKKDLIIKLPKYSLFELENGRKRMLASAGELQKGNELALPSKYVNFLYLASHYEKLKGSPEDNEQKQLFVEQHKHYLDEIIEQISEFSKRVILADANLDKVLSAYNKHRDKPIREQAENIIHLFTLTNLGAPAAFKYFDTTIDRKRYTSTKEVLDATLIHQSITGLYETRIDLSQLGGDGGGSSGSSGSSGSSGSSGSSGGTLNIEDEYRLHETSKEPDVSLGSTWLSDFPQAWAETGGMGLAVRQAPLIIPLKATSTPVSIKQYPMSQEARLGIKPHIQRLLDQGILVPCQSPWNTPLLPVKKPGTNDYRPVQDLREVNKRVEDIHPTVPNPYNLLSGLPPSHQWYTVLDLKDAFFCLRLHPTSQPLFAFEWRDPEMGISGQLTWTRLPQGFKNSPTLFNEALHRDLAGFRIQHPDLILLQYVDDLLLAATSELDCQQGTRALLQTLGDLGYRASAKKAQICQKQVKYLGYLLKEGQRWLTEARKETVMGQPIPKTPRQLREFLGTAGFCRLWIPGFAEMAAPLYPLTKPGTLFNWGPDQQKAFQEIKQALLTAPALGLPDLTKPFELFVDEKQGYAKGVLTQKLGPWRRPVAYLSKKLDPVAAGWPPCLRMVAAIAVLTKDAGKLTMGQPLVILAPHAVEALVKQPPDRWLSNARMTHYQALLLDTDRVQFGPVVALNPATLLPLPEEGLQHDCLDILAEAHGTRSDLMDQPLPDADHTWYTDGSSFLQEGQRKAGAAVTTETEVIWARALPAGTSAQRAELIALTQALKMAEGKKLNVYTDSRYAFATAHIHGEIYRRRGWLTSEGKEIKNKDEILALLKALFLPKRLSIIHCPGHQKGNSAEARGNRMADQAAREVATRETPETSTLLAGKRTADGSEFEKRTADGSEFESPKKKAKVE

SEQ ID NO: 6350 - protein, 2103 aa, synthetic construct
MPAAKRVKLDGGDKKYSIGLDIGTNSVGWAVITDEYKVPSKKFKVLGNTDRHSIKKNLIGALLFDSGETAEATRLKRTARRRYTRRKNRICYLQEIFSNEMAKVDDSFFHRLEESFLVEEDKKHERHPIFGNIVDEVAYHEKYPTIYHLRKKLVDSTDKADLRLIYLALAHMIKFRGHFLIEGDLNPDNSDVDKLFIQLVQTYNQLFEENPINASGVDAKAILSARLSKSRRLENLIAQLPGEKKNGLFGNLIALSLGLTPNFKSNFDLAEDAKLQLSKDTYDDDLDNLLAQIGDQYADLFLAAKNLSDAILLSDILRVNTEITKAPLSASMIKRYDEHHQDLTLLKALVRQQLPEKYKEIFFDQSKNGYAGYIDGGASQEEFYKFIKPILEKMDGTEELLVKLNREDLLRKQRTFDNGSIPHQIHLGELHAILRRQEDFYPFLKDNREKIEKILTFRIPYYVGPLARGNSRFAWMTRKSEETITPWNFEEVVDKGASAQSFIERMTNFDKNLPNEKVLPKHSLLYEYFTVYNELTKVKYVTEGMRKPAFLSGEQKKAIVDLLFKTNRKVTVKQLKEDYFKKIECFDSVEISGVEDRFNASLGTYHDLLKIIKDKDFLDNEENEDILEDIVLTLTLFEDREMIEERLKTYAHLFDDKVMKQLKRRRYTGWGRLSRKLINGIRDKQSGKTILDFLKSDGFANRNFMQLIHDDSLTFKEDIQKAQVSGQGDSLHEHIANLAGSPAIKKGILQTVKVVDELVKVMGRHKPENIVIEMARENQTTQKGQKNSRERMKRIEEGIKELGSQILKEHPVENTQLQNEKLYLYYLQNGRDMYVDQELDINRLSDYDVDHIVPQSFLKDDSIDNKVLTRSDKARGKSDNVPSEEVVKKMKNYWRQLLNAKLITQRKFDNLTKAERGGLSELDKAGFIKRQLVETRQITKHVAQILDSRMNTKYDENDKLIREVKVITLKSKLVSDFRKDFQFYKVREINNYHHAHDAYLNAVVGTALIKKYPKLESEFVYGDYKVYDVRKMIAKSEQEIGKATAKYFFYSNIMNFFKTEITLANGEIRKRPLIETNGETGEIVWDKGRDFATVRKVLSMPQVNIVKKTEVQTGGFSKESILPKRNSDKLIARKKDWDPKKYGGFDSPTVAYSVLVVAKVEKGKSKKLKSVKELLGITIMERSSFEKNPIDFLEAKGYKEVKKDLIIKLPKYSLFELENGRKRMLASAGELQKGNELALPSKYVNFLYLASHYEKLKGSPEDNEQKQLFVEQHKHYLDEIIEQISEFSKRVILADANLDKVLSAYNKHRDKPIREQAENIIHLFTLTNLGAPAAFKYFDTTIDRKRYTSTKEVLDATLIHQSITGLYETRIDLSQLGGDGGGSSGSSGSSGSSGSSGSSGGTLNIEDEYRLHETSKGPDVPLGSTWLSDFPQAWAETGGMGLAFRQAPLIISLKATSTPVSIKQYPMSQEARLGIKPHIQRLLDQGILVPCQSPWNTPLLPVKKPGTNDYRPVQDLREVNKRVEDIHPTVPNPYNLLSGLPPSHQWYTVLDLKDAFFCLRLHPTSQSLFAFEWKDPEMGISGQLTWTRLPQGFKNSPTLFDEALHRDLADFRIQHPDLILLQYVDDLLLAATSELDCQQGTRALLQTLGDLGYRASAKKAQICQKQVKYLGYLLKEGQRWLTEARKETVMGQPTPKTPRQLREFLGTAGLCRLWIPGFAEMAAPLYPLTKTGTLFKWGPDQQKAYQEIKQALLTAPALGLPDLTKPFELFVDEKQGYAKGVLTQKLGPWRRPVAYLSKKLDPVAAGWPPCLRMVAAIAVLTKDVGKLTMGQPLVILAPHAVEALVKQPPDRWLSNARMTHYQALLLDTDRVQFGPIVALNPATLLPLPEEGLQHDCLDILAEAHGTRPDLTDQPLPDADHTWYTDGSSFLQEGQRRAGAAVTTETEVIWAKALPAGTSAQRAELIALTQALKMAAGKKLNVYTDSRYAFATAHIHGEIYRRRGLLTSEGKEIKNKDEILALLKALFLPKRLSIIHCPGHQKGNHAEARGNRMADQAAREVATRETPETSTLLAGKRTADGSEFEKRTADGSEFESPKKKAKVE

SEQ ID NO: 6351 - protein, 2103 aa, synthetic construct
MPAAKRVKLDGGDKKYSIGLDIGTNSVGWAVITDEYKVPSKKFKVLGNTDRHSIKKNLIGALLFDSGETAEATRLKRTARRRYTRRKNRICYLQEIFSNEMAKVDDSFFHRLEESFLVEEDKKHERHPIFGNIVDEVAYHEKYPTIYHLRKKLVDSTDKADLRLIYLALAHMIKFRGHFLIEGDLNPDNSDVDKLFIQLVQTYNQLFEENPINASGVDAKAILSARLSKSRRLENLIAQLPGEKKNGLFGNLIALSLGLTPNFKSNFDLAEDAKLQLSKDTYDDDLDNLLAQIGDQYADLFLAAKNLSDAILLSDILRVNTEITKAPLSASMIKRYDEHHQDLTLLKALVRQQLPEKYKEIFFDQSKNGYAGYIDGGASQEEFYKFIKPILEKMDGTEELLVKLNREDLLRKQRTFDNGSIPHQIHLGELHAILRRQEDFYPFLKDNREKIEKILTFRIPYYVGPLARGNSRFAWMTRKSEETITPWNFEEVVDKGASAQSFIERMTNFDKNLPNEKVLPKHSLLYEYFTVYNELTKVKYVTEGMRKPAFLSGEQKKAIVDLLFKTNRKVTVKQLKEDYFKKIECFDSVEISGVEDRFNASLGTYHDLLKIIKDKDFLDNEENEDILEDIVLTLTLFEDREMIEERLKTYAHLFDDKVMKQLKRRRYTGWGRLSRKLINGIRDKQSGKTILDFLKSDGFANRNFMQLIHDDSLTFKEDIQKAQVSGQGDSLHEHIANLAGSPAIKKGILQTVKVVDELVKVMGRHKPENIVIEMARENQTTQKGQKNSRERMKRIEEGIKELGSQILKEHPVENTQLQNEKLYLYYLQNGRDMYVDQELDINRLSDYDVDHIVPQSFLKDDSIDNKVLTRSDKARGKSDNVPSEEVVKKMKNYWRQLLNAKLITQRKFDNLTKAERGGLSELDKAGFIKRQLVETRQITKHVAQILDSRMNTKYDENDKLIREVKVITLKSKLVSDFRKDFQFYKVREINNYHHAHDAYLNAVVGTALIKKYPKLESEFVYGDYKVYDVRKMIAKSEQEIGKATAKYFFYSNIMNFFKTEITLANGEIRKRPLIETNGETGEIVWDKGRDFATVRKVLSMPQVNIVKKTEVQTGGFSKESILPKRNSDKLIARKKDWDPKKYGGFDSPTVAYSVLVVAKVEKGKSKKLKSVKELLGITIMERSSFEKNPIDFLEAKGYKEVKKDLIIKLPKYSLFELENGRKRMLASAGELQKGNELALPSKYVNFLYLASHYEKLKGSPEDNEQKQLFVEQHKHYLDEIIEQISEFSKRVILADANLDKVLSAYNKHRDKPIREQAENIIHLFTLTNLGAPAAFKYFDTTIDRKRYTSTKEVLDATLIHQSITGLYETRIDLSQLGGDGGGSSGSSGSSGSSGSSGSSGGTLNIEDEYRLHETSKGPDVPLGSTWLSDFPQAWAETGGMGLAVRQAPLIIPLKATSTPVSIKQYPMSQEARLGIKPHIQRLLDQGILVPCQSPWNTPLLPVKKPGTNDYRPVQDLREVNKRVEDIHPTVPNPYNLLSGLPPSHQWYTVLDLKDAFFCLRLHPTSQSLFAFEWRDPEMGISGQLTWTRLPQGFKNSPTLFNEALHRDLADFRIQHPDLILLQYVDDLLLAATSELDCQQGTRALLQTLGDLGYRASAKKAQICQKQVKYLGYLLKEGQRWLTEARKETVMGQPTPKTPRQLREFLGTAGFCRLWIPGFAEMAAPLYPLTKPGTLFEWGPDQQKAYQEIKQALLTAPALGLPDLTKPFELFVDEKQGYAKGVLTQKLGPWRRPVAYLSKKLDPVAAGWPPCLRMVAAIAVLTKDAGKLTMGQPLVILAPHAVEALVKQPPDRWLSNARMTHYQALLLDTDRVQFGPIVALNPATLLPLPEEGLQHDCLDILAEAHGTRPDLTDQPLPDADHTWYTDGSSFLQEGQRKAGAAVTTETEVVWAKALPAGTSAQRAELIALTQALKMAEGKKLNVYTDSRYAFATAHIHGEIYRRRGWLTSEGKEIKNKDEILALLKALFLPKRLSIIHCPGHQKGNRAEARGNRMADQAAREVATRETPETSTLLAGKRTADGSEFEKRTADGSEFESPKKKAKVE

SEQ ID NO: 6352 - protein, 2103 aa, synthetic construct
MPAAKRVKLDGGDKKYSIGLDIGTNSVGWAVITDEYKVPSKKFKVLGNTDRHSIKKNLIGALLFDSGETAEATRLKRTARRRYTRRKNRICYLQEIFSNEMAKVDDSFFHRLEESFLVEEDKKHERHPIFGNIVDEVAYHEKYPTIYHLRKKLVDSTDKADLRLIYLALAHMIKFRGHFLIEGDLNPDNSDVDKLFIQLVQTYNQLFEENPINASGVDAKAILSARLSKSRRLENLIAQLPGEKKNGLFGNLIALSLGLTPNFKSNFDLAEDAKLQLSKDTYDDDLDNLLAQIGDQYADLFLAAKNLSDAILLSDILRVNTEITKAPLSASMIKRYDEHHQDLTLLKALVRQQLPEKYKEIFFDQSKNGYAGYIDGGASQEEFYKFIKPILEKMDGTEELLVKLNREDLLRKQRTFDNGSIPHQIHLGELHAILRRQEDFYPFLKDNREKIEKILTFRIPYYVGPLARGNSRFAWMTRKSEETITPWNFEEVVDKGASAQSFIERMTNFDKNLPNEKVLPKHSLLYEYFTVYNELTKVKYVTEGMRKPAFLSGEQKKAIVDLLFKTNRKVTVKQLKEDYFKKIECFDSVEISGVEDRFNASLGTYHDLLKIIKDKDFLDNEENEDILEDIVLTLTLFEDREMIEERLKTYAHLFDDKVMKQLKRRRYTGWGRLSRKLINGIRDKQSGKTILDFLKSDGFANRNFMQLIHDDSLTFKEDIQKAQVSGQGDSLHEHIANLAGSPAIKKGILQTVKVVDELVKVMGRHKPENIVIEMARENQTTQKGQKNSRERMKRIEEGIKELGSQILKEHPVENTQLQNEKLYLYYLQNGRDMYVDQELDINRLSDYDVDHIVPQSFLKDDSIDNKVLTRSDKARGKSDNVPSEEVVKKMKNYWRQLLNAKLITQRKFDNLTKAERGGLSELDKAGFIKRQLVETRQITKHVAQILDSRMNTKYDENDKLIREVKVITLKSKLVSDFRKDFQFYKVREINNYHHAHDAYLNAVVGTALIKKYPKLESEFVYGDYKVYDVRKMIAKSEQEIGKATAKYFFYSNIMNFFKTEITLANGEIRKRPLIETNGETGEIVWDKGRDFATVRKVLSMPQVNIVKKTEVQTGGFSKESILPKRNSDKLIARKKDWDPKKYGGFDSPTVAYSVLVVAKVEKGKSKKLKSVKELLGITIMERSSFEKNPIDFLEAKGYKEVKKDLIIKLPKYSLFELENGRKRMLASAGELQKGNELALPSKYVNFLYLASHYEKLKGSPEDNEQKQLFVEQHKHYLDEIIEQISEFSKRVILADANLDKVLSAYNKHRDKPIREQAENIIHLFTLTNLGAPAAFKYFDTTIDRKRYTSTKEVLDATLIHQSITGLYETRIDLSQLGGDGGGSSGSSGSSGSSGSSGSSGGTLNIEDEHRLHETSKEPDVSLGSTWLSDFPQAWAETGGMGLAVRQAPLIIPLKATSTPVSIKQYPMSQEARLGIKPHIQRLLDQGILVPCQSPWNTPLLPVKKPGTNDYRPVQDLREVNKRVEDIHPTVPNPYNLLSGLPPSHQWYTVLDLKDAFFCLRLHPTSQPLFAFEWRDPEMGISGQLTWTRLPQGFKNSPTLFDEALHRDLADFRIQHPDLILLQYVDDLLLAATSELDCQQGTRALLQTLGNLGYRASAKKAQICQKQVKYLGYLLKEGQRWLTEARKETVMGQPTPKTPRQLREFLGTAGFCRLWIPGFAEMAAPLYPLTKTGTLFNWGPDQQKAYQEIKQALLTAPALGLPDLTKPFELFVDEKQGYAKGVLTQKLGPWRRPVAYLSKKLDPVAAGWPPCLRMVAAIAVLTKDAGKLTMGQPLVILAPHAVEALVKQPPDRWLSNARMTHYQALLLDTDRVQFGPVVALNPATLLPLPEEGLQHNCLDILAEAHGTRPDLTDQPLPDADHTWYTDGSSLLQEGQRKAGAAVTTETEVIWAKALPAGTSAQRAELIALTQALKMAEGKKLNVYTDSRYAFATAHIHGEIYRRRGLLTSEGKEIKNKDEILALLKALFLPKRLSIIHCPGHQKGHSAEARGNRMADQAARKAAITETPDTSTLLAGKRTADGSEFEKRTADGSEFESPKKKAKVE

SEQ ID NO: 6353 - protein, 2103 aa, synthetic construct
MPAAKRVKLDGGDKKYSIGLDIGTNSVGWAVITDEYKVPSKKFKVLGNTDRHSIKKNLIGALLFDSGETAEATRLKRTARRRYTRRKNRICYLQEIFSNEMAKVDDSFFHRLEESFLVEEDKKHERHPIFGNIVDEVAYHEKYPTIYHLRKKLVDSTDKADLRLIYLALAHMIKFRGHFLIEGDLNPDNSDVDKLFIQLVQTYNQLFEENPINASGVDAKAILSARLSKSRRLENLIAQLPGEKKNGLFGNLIALSLGLTPNFKSNFDLAEDAKLQLSKDTYDDDLDNLLAQIGDQYADLFLAAKNLSDAILLSDILRVNTEITKAPLSASMIKRYDEHHQDLTLLKALVRQQLPEKYKEIFFDQSKNGYAGYIDGGASQEEFYKFIKPILEKMDGTEELLVKLNREDLLRKQRTFDNGSIPHQIHLGELHAILRRQEDFYPFLKDNREKIEKILTFRIPYYVGPLARGNSRFAWMTRKSEETITPWNFEEVVDKGASAQSFIERMTNFDKNLPNEKVLPKHSLLYEYFTVYNELTKVKYVTEGMRKPAFLSGEQKKAIVDLLFKTNRKVTVKQLKEDYFKKIECFDSVEISGVEDRFNASLGTYHDLLKIIKDKDFLDNEENEDILEDIVLTLTLFEDREMIEERLKTYAHLFDDKVMKQLKRRRYTGWGRLSRKLINGIRDKQSGKTILDFLKSDGFANRNFMQLIHDDSLTFKEDIQKAQVSGQGDSLHEHIANLAGSPAIKKGILQTVKVVDELVKVMGRHKPENIVIEMARENQTTQKGQKNSRERMKRIEEGIKELGSQILKEHPVENTQLQNEKLYLYYLQNGRDMYVDQELDINRLSDYDVDHIVPQSFLKDDSIDNKVLTRSDKARGKSDNVPSEEVVKKMKNYWRQLLNAKLITQRKFDNLTKAERGGLSELDKAGFIKRQLVETRQITKHVAQILDSRMNTKYDENDKLIREVKVITLKSKLVSDFRKDFQFYKVREINNYHHAHDAYLNAVVGTALIKKYPKLESEFVYGDYKVYDVRKMIAKSEQEIGKATAKYFFYSNIMNFFKTEITLANGEIRKRPLIETNGETGEIVWDKGRDFATVRKVLSMPQVNIVKKTEVQTGGFSKESILPKRNSDKLIARKKDWDPKKYGGFDSPTVAYSVLVVAKVEKGKSKKLKSVKELLGITIMERSSFEKNPIDFLEAKGYKEVKKDLIIKLPKYSLFELENGRKRMLASAGELQKGNELALPSKYVNFLYLASHYEKLKGSPEDNEQKQLFVEQHKHYLDEIIEQISEFSKRVILADANLDKVLSAYNKHRDKPIREQAENIIHLFTLTNLGAPAAFKYFDTTIDRKRYTSTKEVLDATLIHQSITGLYETRIDLSQLGGDGGGSSGSSGSSGSSGSSGSSGGTLNIEDEYRLHEISTEPDVSPGSTWLSDFPQAWAETGGMGLAVRQAPLIIPLKATSTPVSIKQYPMSQEAKLGIKPHIQRLLDQGILVPCQSPWNTPLLPVKKPGTNDYRPVQGLREVNKRVEDIHPTVPNPYNLLSGLPTSHRWYTVLDLKDAFFCLRLHPTSQPLFASEWRDPGMGISGQLTWTRLPQGFKNSPTLFDEALHRGLADFRIQHPDLILLQYVDDLLLAATSELDCQQGTRALLKTLGNLGYRASAKKAQICQKQVKYLGYLLREGQRWLTEARKETVMGQPTPKTPRQLREFLGTAGFCRLWIPRFAEMAAPLYPLTKTGTLFNWGPDQQKAYHEIKQALLTAPALGLPDLTKPFELFVDEKQGYAKGVLTQKLGPWRRPVAYLSKKLDPVAAGWPPCLRMVAAIAVLTKDAGKLTMGQPLVILAPHAVEALVKQPPDRWLSNARMTHYQAMLLDTDRVQFGPVVALNPATLLPLPEEGAPHDCLEILAETHGTEPDLTDQPIPDADHTWYTDGSSFLQEGQRKAGAAVTTETEVIWARALPAGTSAQRAELIALTQALKMAEGKRLNVYTDSRYAFATAHIHGEIYKRRGLLTSEGREIKNKSEILALLKALFLPKRLSIIHCLGHQKGDSAEARGNRLADQAAREAAIKTPPDTSTLLAGKRTADGSEFEKRTADGSEFESPKKKAKVE

SEQ ID NO: 6354 - protein, 2097 aa, synthetic construct
MPAAKRVKLDGGDKKYSIGLDIGTNSVGWAVITDEYKVPSKKFKVLGNTDRHSIKKNLIGALLFDSGETAEATRLKRTARRRYTRRKNRICYLQEIFSNEMAKVDDSFFHRLEESFLVEEDKKHERHPIFGNIVDEVAYHEKYPTIYHLRKKLVDSTDKADLRLIYLALAHMIKFRGHFLIEGDLNPDNSDVDKLFIQLVQTYNQLFEENPINASGVDAKAILSARLSKSRRLENLIAQLPGEKKNGLFGNLIALSLGLTPNFKSNFDLAEDAKLQLSKDTYDDDLDNLLAQIGDQYADLFLAAKNLSDAILLSDILRVNTEITKAPLSASMIKRYDEHHQDLTLLKALVRQQLPEKYKEIFFDQSKNGYAGYIDGGASQEEFYKFIKPILEKMDGTEELLVKLNREDLLRKQRTFDNGSIPHQIHLGELHAILRRQEDFYPFLKDNREKIEKILTFRIPYYVGPLARGNSRFAWMTRKSEETITPWNFEEVVDKGASAQSFIERMTNFDKNLPNEKVLPKHSLLYEYFTVYNELTKVKYVTEGMRKPAFLSGEQKKAIVDLLFKTNRKVTVKQLKEDYFKKIECFDSVEISGVEDRFNASLGTYHDLLKIIKDKDFLDNEENEDILEDIVLTLTLFEDREMIEERLKTYAHLFDDKVMKQLKRRRYTGWGRLSRKLINGIRDKQSGKTILDFLKSDGFANRNFMQLIHDDSLTFKEDIQKAQVSGQGDSLHEHIANLAGSPAIKKGILQTVKVVDELVKVMGRHKPENIVIEMARENQTTQKGQKNSRERMKRIEEGIKELGSQILKEHPVENTQLQNEKLYLYYLQNGRDMYVDQELDINRLSDYDVDHIVPQSFLKDDSIDNKVLTRSDKARGKSDNVPSEEVVKKMKNYWRQLLNAKLITQRKFDNLTKAERGGLSELDKAGFIKRQLVETRQITKHVAQILDSRMNTKYDENDKLIREVKVITLKSKLVSDFRKDFQFYKVREINNYHHAHDAYLNAVVGTALIKKYPKLESEFVYGDYKVYDVRKMIAKSEQEIGKATAKYFFYSNIMNFFKTEITLANGEIRKRPLIETNGETGEIVWDKGRDFATVRKVLSMPQVNIVKKTEVQTGGFSKESILPKRNSDKLIARKKDWDPKKYGGFDSPTVAYSVLVVAKVEKGKSKKLKSVKELLGITIMERSSFEKNPIDFLEAKGYKEVKKDLIIKLPKYSLFELENGRKRMLASAGELQKGNELALPSKYVNFLYLASHYEKLKGSPEDNEQKQLFVEQHKHYLDEIIEQISEFSKRVILADANLDKVLSAYNKHRDKPIREQAENIIHLFTLTNLGAPAAFKYFDTTIDRKRYTSTKEVLDATLIHQSITGLYETRIDLSQLGGDGGGSSGSSGSSGSSGSSGSSGGTLQLDDEYRLYSPLVKPDQNIQFWLEQFPQAWAETAGMGLAKQVPPQVIQLKASATPVSVRQYPLSKEAQEGIRPHVQRLIQQGILVPVQSPWNTPLLPVRKPGTNDYRPVQDLREVNKRVQDIHPTVPNPYNLLCALPPQRSWYTVLDLKDAFFCLRLHPTSQPLFAFEWRDPGTGRTGQLTWTRLPQGFKNSPTIFDEALHRDLANFRIQHPQVTLLQYVDDLLLAGATKQDCLEGTKALLLELSDLGYRASAKKAQICRREVTYLGYSLRDGQRWLTEARKKTVVQIPAPTTAKQVREFLGTAGFCRLWIPGFATLAAPLYPLTKEKGEFSWAPEHQKAFDAIKKALLSAPALALPDVTKPFTLYVDERKGVARGVLTQTLGPWRRPVAYLSKKLDPVASGWPVCLKAIAAVAILVKDADKLTLGQNITVIAPHALENIVRQPPDRWMTNARMTHYQSLLLTERVTFAPPAALNPATLLPEETDEPVTHDCHQLLIEETGVRKDLTDIPLTGEVLTWFTDGSSYVVEGKRMAGAAVVDGTRTIWASSLPEGTSAQKAELMALTQALRLAEGKSINIYTDSRYAFATAHVHGAIYKQRGLLTSAGREIKNKEEILSLLEALHLPKRLAIIHCPGHQKAKDPISRGNQMADRVAKQAAQGVNLLAGKRTADGSEFEKRTADGSEFESPKKKAKVE

SEQ ID NO: 6355 - protein, 2183 aa, synthetic construct
MPAAKRVKLDGGDKKYSIGLDIGTNSVGWAVITDEYKVPSKKFKVLGNTDRHSIKKNLIGALLFDSGETAEATRLKRTARRRYTRRKNRICYLQEIFSNEMAKVDDSFFHRLEESFLVEEDKKHERHPIFGNIVDEVAYHEKYPTIYHLRKKLVDSTDKADLRLIYLALAHMIKFRGHFLIEGDLNPDNSDVDKLFIQLVQTYNQLFEENPINASGVDAKAILSARLSKSRRLENLIAQLPGEKKNGLFGNLIALSLGLTPNFKSNFDLAEDAKLQLSKDTYDDDLDNLLAQIGDQYADLFLAAKNLSDAILLSDILRVNTEITKAPLSASMIKRYDEHHQDLTLLKALVRQQLPEKYKEIFFDQSKNGYAGYIDGGASQEEFYKFIKPILEKMDGTEELLVKLNREDLLRKQRTFDNGSIPHQIHLGELHAILRRQEDFYPFLKDNREKIEKILTFRIPYYVGPLARGNSRFAWMTRKSEETITPWNFEEVVDKGASAQSFIERMTNFDKNLPNEKVLPKHSLLYEYFTVYNELTKVKYVTEGMRKPAFLSGEQKKAIVDLLFKTNRKVTVKQLKEDYFKKIECFDSVEISGVEDRFNASLGTYHDLLKIIKDKDFLDNEENEDILEDIVLTLTLFEDREMIEERLKTYAHLFDDKVMKQLKRRRYTGWGRLSRKLINGIRDKQSGKTILDFLKSDGFANRNFMQLIHDDSLTFKEDIQKAQVSGQGDSLHEHIANLAGSPAIKKGILQTVKVVDELVKVMGRHKPENIVIEMARENQTTQKGQKNSRERMKRIEEGIKELGSQILKEHPVENTQLQNEKLYLYYLQNGRDMYVDQELDINRLSDYDVDHIVPQSFLKDDSIDNKVLTRSDKARGKSDNVPSEEVVKKMKNYWRQLLNAKLITQRKFDNLTKAERGGLSELDKAGFIKRQLVETRQITKHVAQILDSRMNTKYDENDKLIREVKVITLKSKLVSDFRKDFQFYKVREINNYHHAHDAYLNAVVGTALIKKYPKLESEFVYGDYKVYDVRKMIAKSEQEIGKATAKYFFYSNIMNFFKTEITLANGEIRKRPLIETNGETGEIVWDKGRDFATVRKVLSMPQVNIVKKTEVQTGGFSKESILPKRNSDKLIARKKDWDPKKYGGFDSPTVAYSVLVVAKVEKGKSKKLKSVKELLGITIMERSSFEKNPIDFLEAKGYKEVKKDLIIKLPKYSLFELENGRKRMLASAGELQKGNELALPSKYVNFLYLASHYEKLKGSPEDNEQKQLFVEQHKHYLDEIIEQISEFSKRVILADANLDKVLSAYNKHRDKPIREQAENIIHLFTLTNLGAPAAFKYFDTTIDRKRYTSTKEVLDATLIHQSITGLYETRIDLSQLGGDGGGSSGSSGSSGSSGSSGSSGGMDPLQLLQPLEAEIKGTKLKAHWNSGATITCVPEAFLEDERPIQTMLIKTIHGEKQQDVYYLTFKVQGRKVEAEVLASPYDYILLNPSDVPWLMKKPLQLTVLVPLHEYQERLLQQTALPKEQKELLQKLFLKYDALWQHWENQVGHRRIKPHNIATGTLAPRPQKQYPINPKAKPSIQIVIDDLLKQGVLIQQNSTMNTPVYPVPKPDGKWRMVLDYREVNKTIPLIAAQNQHSAGILSSIYRGKYKTTLDLTNGFWAHPITPESYWLTAFTWQGKQYCWTRLPQGFLNSPALFNADVVDLLKEIPNVQAYVDDIYISHDDPQEHLEQLEKIFSILLNAGYVVSLKKSEIAQREVEFLGFNITKEGRGLTDTFKQKLLNITPPKDLKQLQSILGLLNFARNFIPNYSELVKPLYTIVAPANGKFISWTEDNSNQLQHIISVLNQADNLEERNPETRLIIKVNSSPSAGYIRYYNEGSKRPIMYVNYIFSKAEAKFTQTEKLLTTMHKGLIKAMDLAMGQEILVYSPIVSMTKIQRTPLPERKALPVRWITWMTYLEDPRIQFHYDKSLPELQQIPNVTEDVIAKTKHPSEFAMVFYTDGSAIKHPDVNKSHSAGMGIAQVQFIPEYKIVHQWSIPLGDHTAQLAEIAAVEFACKKALKISGPVLIVTDSFYVAESANKELPYWKSNGFLNNKKKPLRHVSKWKSIAECLQLKPDIIIMHEKGHQQPMTTLHTEGNNLADKLATQGSYVVHAGKRTADGSEFEKRTADGSEFESPKKKAKVE

SEQ ID NO: 6356 - protein, 2094 aa, synthetic construct
MPAAKRVKLDGGDKKYSIGLDIGTNSVGWAVITDEYKVPSKKFKVLGNTDRHSIKKNLIGALLFDSGETAEATRLKRTARRRYTRRKNRICYLQEIFSNEMAKVDDSFFHRLEESFLVEEDKKHERHPIFGNIVDEVAYHEKYPTIYHLRKKLVDSTDKADLRLIYLALAHMIKFRGHFLIEGDLNPDNSDVDKLFIQLVQTYNQLFEENPINASGVDAKAILSARLSKSRRLENLIAQLPGEKKNGLFGNLIALSLGLTPNFKSNFDLAEDAKLQLSKDTYDDDLDNLLAQIGDQYADLFLAAKNLSDAILLSDILRVNTEITKAPLSASMIKRYDEHHQDLTLLKALVRQQLPEKYKEIFFDQSKNGYAGYIDGGASQEEFYKFIKPILEKMDGTEELLVKLNREDLLRKQRTFDNGSIPHQIHLGELHAILRRQEDFYPFLKDNREKIEKILTFRIPYYVGPLARGNSRFAWMTRKSEETITPWNFEEVVDKGASAQSFIERMTNFDKNLPNEKVLPKHSLLYEYFTVYNELTKVKYVTEGMRKPAFLSGEQKKAIVDLLFKTNRKVTVKQLKEDYFKKIECFDSVEISGVEDRFNASLGTYHDLLKIIKDKDFLDNEENEDILEDIVLTLTLFEDREMIEERLKTYAHLFDDKVMKQLKRRRYTGWGRLSRKLINGIRDKQSGKTILDFLKSDGFANRNFMQLIHDDSLTFKEDIQKAQVSGQGDSLHEHIANLAGSPAIKKGILQTVKVVDELVKVMGRHKPENIVIEMARENQTTQKGQKNSRERMKRIEEGIKELGSQILKEHPVENTQLQNEKLYLYYLQNGRDMYVDQELDINRLSDYDVDHIVPQSFLKDDSIDNKVLTRSDKARGKSDNVPSEEVVKKMKNYWRQLLNAKLITQRKFDNLTKAERGGLSELDKAGFIKRQLVETRQITKHVAQILDSRMNTKYDENDKLIREVKVITLKSKLVSDFRKDFQFYKVREINNYHHAHDAYLNAVVGTALIKKYPKLESEFVYGDYKVYDVRKMIAKSEQEIGKATAKYFFYSNIMNFFKTEITLANGEIRKRPLIETNGETGEIVWDKGRDFATVRKVLSMPQVNIVKKTEVQTGGFSKESILPKRNSDKLIARKKDWDPKKYGGFDSPTVAYSVLVVAKVEKGKSKKLKSVKELLGITIMERSSFEKNPIDFLEAKGYKEVKKDLIIKLPKYSLFELENGRKRMLASAGELQKGNELALPSKYVNFLYLASHYEKLKGSPEDNEQKQLFVEQHKHYLDEIIEQISEFSKRVILADANLDKVLSAYNKHRDKPIREQAENIIHLFTLTNLGAPAAFKYFDTTIDRKRYTSTKEVLDATLIHQSITGLYETRIDLSQLGGDGGGSSGSSGSSGSSGSSGSSGGIPWLMKKPLQLTTLVPLQEYEERLLKQTMLTGSYKEKLQSLFLKYDALWQHWENQVGHRRIKPHHIATGTVNPRPQKQYPINPKAKASIQTVINDLLKQGVLIQQNSIMNTPVYPVPKPDGKWRMVLDYREVNKTIPLIAAQNQHSAGILSSIFRGKYKTTLDLSNGFWAHSITPESYWLTAFTWLGQQYCWTRLPQGFLNSPALFNADVVDLLKEVPNVQVYVDDIYISHDDPREHLEQLEKVFSLLLNAGYVVSLKKSEIAQHEVEFLGFNITKEGRGLTETFKQKLLNITPPRDLKQLQSILGKLNFARNFIPNFSELVKPLYNIIATAPGKYITWTTDNSQQLQNIISMLNSAENLEERNPEVRLIMKVNTSPSAGYIRFYNEFAKRPIMYLNYVYTKAEVKFTNTEKLLTTIHKGLIKALDLGMGQEILVYSPIVSMTKIQKTPLPERKALPIRWITWMSYLEDPRIQFHYDKTLPELQQVPTVTDDIIAKIKHPSEFSMVFYTDGSAIKHPNVNKSHNAGMGIAQVQFKPEFTVINTWSIPLGDHTAQLAEVAAVEFACKKALKIDGPVLIVTDSFYVAESVNKELPYWQSNGFFNNKKKPLKHVSKWKSIADCIQLKPDIIIIHEKGHQPTASTFHTEGNNLADKLATQGSYVVNAGKRTADGSEFEKRTADGSEFESPKKKAKVE

SEQ ID NO: 6357 - protein, 2183 aa, synthetic construct
MPAAKRVKLDGGDKKYSIGLDIGTNSVGWAVITDEYKVPSKKFKVLGNTDRHSIKKNLIGALLFDSGETAEATRLKRTARRRYTRRKNRICYLQEIFSNEMAKVDDSFFHRLEESFLVEEDKKHERHPIFGNIVDEVAYHEKYPTIYHLRKKLVDSTDKADLRLIYLALAHMIKFRGHFLIEGDLNPDNSDVDKLFIQLVQTYNQLFEENPINASGVDAKAILSARLSKSRRLENLIAQLPGEKKNGLFGNLIALSLGLTPNFKSNFDLAEDAKLQLSKDTYDDDLDNLLAQIGDQYADLFLAAKNLSDAILLSDILRVNTEITKAPLSASMIKRYDEHHQDLTLLKALVRQQLPEKYKEIFFDQSKNGYAGYIDGGASQEEFYKFIKPILEKMDGTEELLVKLNREDLLRKQRTFDNGSIPHQIHLGELHAILRRQEDFYPFLKDNREKIEKILTFRIPYYVGPLARGNSRFAWMTRKSEETITPWNFEEVVDKGASAQSFIERMTNFDKNLPNEKVLPKHSLLYEYFTVYNELTKVKYVTEGMRKPAFLSGEQKKAIVDLLFKTNRKVTVKQLKEDYFKKIECFDSVEISGVEDRFNASLGTYHDLLKIIKDKDFLDNEENEDILEDIVLTLTLFEDREMIEERLKTYAHLFDDKVMKQLKRRRYTGWGRLSRKLINGIRDKQSGKTILDFLKSDGFANRNFMQLIHDDSLTFKEDIQKAQVSGQGDSLHEHIANLAGSPAIKKGILQTVKVVDELVKVMGRHKPENIVIEMARENQTTQKGQKNSRERMKRIEEGIKELGSQILKEHPVENTQLQNEKLYLYYLQNGRDMYVDQELDINRLSDYDVDHIVPQSFLKDDSIDNKVLTRSDKARGKSDNVPSEEVVKKMKNYWRQLLNAKLITQRKFDNLTKAERGGLSELDKAGFIKRQLVETRQITKHVAQILDSRMNTKYDENDKLIREVKVITLKSKLVSDFRKDFQFYKVREINNYHHAHDAYLNAVVGTALIKKYPKLESEFVYGDYKVYDVRKMIAKSEQEIGKATAKYFFYSNIMNFFKTEITLANGEIRKRPLIETNGETGEIVWDKGRDFATVRKVLSMPQVNIVKKTEVQTGGFSKESILPKRNSDKLIARKKDWDPKKYGGFDSPTVAYSVLVVAKVEKGKSKKLKSVKELLGITIMERSSFEKNPIDFLEAKGYKEVKKDLIIKLPKYSLFELENGRKRMLASAGELQKGNELALPSKYVNFLYLASHYEKLKGSPEDNEQKQLFVEQHKHYLDEIIEQISEFSKRVILADANLDKVLSAYNKHRDKPIREQAENIIHLFTLTNLGAPAAFKYFDTTIDRKRYTSTKEVLDATLIHQSITGLYETRIDLSQLGGDGGGSSGSSGSSGSSGSSGSSGGMDPLQLLQPLEAEIKGTKLKAHWNSGATITCVPQAFLEEEVPIKNIWIKTIHGEKEQPVYYLTFKIQGRKVEAEVISSPYDYILVSPSDIPWLMKKPLQLTTLVPLQEYEERLLKQTMLTGSYKEKLQSLFLKYDALWQHWENQVGHRRIKPHHIATGTVNPRPQKQYPINPKAKASIQTVINDLLKQGVLIQQNSIMNTPVYPVPKPDGKWRMVLDYREVNKTIPLIAAQNQHSAGILSSIFRGKYKTTLDLSNGFWAHSITPESYWLTAFTWLGQQYCWTRLPQGFLNSPALFNADVVDLLKEVPNVQVYVDDIYISHDDPREHLEQLEKVFSLLLNAGYVVSLKKSEIAQHEVEFLGFNITKEGRGLTETFKQKLLNITPPRDLKQLQSILGLLNFARNFIPNFSELVKPLYNIIATAPGKYITWTTDNSQQLQNIISMLNSAENLEERNPEVRLIMKVNTSPSAGYIRFYNEFAKRPIMYLNYVYTKAEVKFTNTEKLLTTIHKGLIKALDLGMGQEILVYSPIVSMTKIQKTPLPERKALPIRWITWMSYLEDPRIQFHYDKTLPELQQVPTVTDDIIAKIKHPSEFSMVFYTDGSAIKHPNVNKSHNAGMGIAQVQFKPEFTVINTWSIPLGDHTAQLAEVAAVEFACKKALKIDGPVLIVTDSFYVAESVNKELPYWQSNGFFNNKKKPLKHVSKWKSIADCIQLKPDIIIIHEKGHQPTASTFHTEGNNLADKLATQGSYVVNAGKRTADGSEFEKRTADGSEFESPKKKAKVE

SEQ ID NO: 6358 - protein, 2101 aa, synthetic construct
MPAAKRVKLDGGDKKYSIGLDIGTNSVGWAVITDEYKVPSKKFKVLGNTDRHSIKKNLIGALLFDSGETAEATRLKRTARRRYTRRKNRICYLQEIFSNEMAKVDDSFFHRLEESFLVEEDKKHERHPIFGNIVDEVAYHEKYPTIYHLRKKLVDSTDKADLRLIYLALAHMIKFRGHFLIEGDLNPDNSDVDKLFIQLVQTYNQLFEENPINASGVDAKAILSARLSKSRRLENLIAQLPGEKKNGLFGNLIALSLGLTPNFKSNFDLAEDAKLQLSKDTYDDDLDNLLAQIGDQYADLFLAAKNLSDAILLSDILRVNTEITKAPLSASMIKRYDEHHQDLTLLKALVRQQLPEKYKEIFFDQSKNGYAGYIDGGASQEEFYKFIKPILEKMDGTEELLVKLNREDLLRKQRTFDNGSIPHQIHLGELHAILRRQEDFYPFLKDNREKIEKILTFRIPYYVGPLARGNSRFAWMTRKSEETITPWNFEEVVDKGASAQSFIERMTNFDKNLPNEKVLPKHSLLYEYFTVYNELTKVKYVTEGMRKPAFLSGEQKKAIVDLLFKTNRKVTVKQLKEDYFKKIECFDSVEISGVEDRFNASLGTYHDLLKIIKDKDFLDNEENEDILEDIVLTLTLFEDREMIEERLKTYAHLFDDKVMKQLKRRRYTGWGRLSRKLINGIRDKQSGKTILDFLKSDGFANRNFMQLIHDDSLTFKEDIQKAQVSGQGDSLHEHIANLAGSPAIKKGILQTVKVVDELVKVMGRHKPENIVIEMARENQTTQKGQKNSRERMKRIEEGIKELGSQILKEHPVENTQLQNEKLYLYYLQNGRDMYVDQELDINRLSDYDVDHIVPQSFLKDDSIDNKVLTRSDKARGKSDNVPSEEVVKKMKNYWRQLLNAKLITQRKFDNLTKAERGGLSELDKAGFIKRQLVETRQITKHVAQILDSRMNTKYDENDKLIREVKVITLKSKLVSDFRKDFQFYKVREINNYHHAHDAYLNAVVGTALIKKYPKLESEFVYGDYKVYDVRKMIAKSEQEIGKATAKYFFYSNIMNFFKTEITLANGEIRKRPLIETNGETGEIVWDKGRDFATVRKVLSMPQVNIVKKTEVQTGGFSKESILPKRNSDKLIARKKDWDPKKYGGFDSPTVAYSVLVVAKVEKGKSKKLKSVKELLGITIMERSSFEKNPIDFLEAKGYKEVKKDLIIKLPKYSLFELENGRKRMLASAGELQKGNELALPSKYVNFLYLASHYEKLKGSPEDNEQKQLFVEQHKHYLDEIIEQISEFSKRVILADANLDKVLSAYNKHRDKPIREQAENIIHLFTLTNLGAPAAFKYFDTTIDRKRYTSTKEVLDATLIHQSITGLYETRIDLSQLGGDGGGSSGSSGSSGSSGSSGSSGGVLNLEEEYRLHEKPVPSSIDPSWLQLFPTVWAERAGMGLANQVPPVVVELRSGASPVAVRQYPMSKEAREGIRPHIQRFLDLGVLVPCQSPWNTPLLPVKKPGTNDYRPVQDLREINKRVQDIHPTVPNPYNLLSSLPPSHTWYSVLDLKDAFFCLKLHPNSQPLFAFEWRDPEKGNTGQLTWTRLPQGFKNSPTLFDEALHRDLAPFRALNPQVVLLQYVDDLLVAAPTYRDCKEGTQKLLQELSKLGYRVSAKKAQLCQKEVTYLGYLLKEGKRWLTPARKATVMKIPPPTTPRQVREFLGTAGFCRLWIPGFASLAAPLYPLTKESIPFIWTEEHQKAFDRIKEALLSAPALALPDLTKPFTLYVDERAGVARGVLTQTLGPWRRPVAYLSKKLDPVASGWPTCLKAVAAVALLLKDADKLTLGQNVTVIASHSLESIVRQPPDRWMTNARMTHYQSLLLNERVSFAPPAVLNPATLLPVESEATPVHRCSEILAEETGTRRDLKDQPLPGVPAWYTDGSSFIAEGKRRAGAAIVDGKRTVWASSLPEGTSAQKAELVALTQALRLAEGKDINIYTDSRYAFATAHIHGAIYKQRGLLTSAGKDIKNKEEILALLEAIHLPKRVAIIHCPGHQKGNDPVATGNRRADEAAKQAALSTRVLAETTKPAGKRTADGSEFEKRTADGSEFESPKKKAKVE

SEQ ID NO: 6359 - protein, 2103 aa, synthetic construct
MPAAKRVKLDGGDKKYSIGLDIGTNSVGWAVITDEYKVPSKKFKVLGNTDRHSIKKNLIGALLFDSGETAEATRLKRTARRRYTRRKNRICYLQEIFSNEMAKVDDSFFHRLEESFLVEEDKKHERHPIFGNIVDEVAYHEKYPTIYHLRKKLVDSTDKADLRLIYLALAHMIKFRGHFLIEGDLNPDNSDVDKLFIQLVQTYNQLFEENPINASGVDAKAILSARLSKSRRLENLIAQLPGEKKNGLFGNLIALSLGLTPNFKSNFDLAEDAKLQLSKDTYDDDLDNLLAQIGDQYADLFLAAKNLSDAILLSDILRVNTEITKAPLSASMIKRYDEHHQDLTLLKALVRQQLPEKYKEIFFDQSKNGYAGYIDGGASQEEFYKFIKPILEKMDGTEELLVKLNREDLLRKQRTFDNGSIPHQIHLGELHAILRRQEDFYPFLKDNREKIEKILTFRIPYYVGPLARGNSRFAWMTRKSEETITPWNFEEVVDKGASAQSFIERMTNFDKNLPNEKVLPKHSLLYEYFTVYNELTKVKYVTEGMRKPAFLSGEQKKAIVDLLFKTNRKVTVKQLKEDYFKKIECFDSVEISGVEDRFNASLGTYHDLLKIIKDKDFLDNEENEDILEDIVLTLTLFEDREMIEERLKTYAHLFDDKVMKQLKRRRYTGWGRLSRKLINGIRDKQSGKTILDFLKSDGFANRNFMQLIHDDSLTFKEDIQKAQVSGQGDSLHEHIANLAGSPAIKKGILQTVKVVDELVKVMGRHKPENIVIEMARENQTTQKGQKNSRERMKRIEEGIKELGSQILKEHPVENTQLQNEKLYLYYLQNGRDMYVDQELDINRLSDYDVDHIVPQSFLKDDSIDNKVLTRSDKARGKSDNVPSEEVVKKMKNYWRQLLNAKLITQRKFDNLTKAERGGLSELDKAGFIKRQLVETRQITKHVAQILDSRMNTKYDENDKLIREVKVITLKSKLVSDFRKDFQFYKVREINNYHHAHDAYLNAVVGTALIKKYPKLESEFVYGDYKVYDVRKMIAKSEQEIGKATAKYFFYSNIMNFFKTEITLANGEIRKRPLIETNGETGEIVWDKGRDFATVRKVLSMPQVNIVKKTEVQTGGFSKESILPKRNSDKLIARKKDWDPKKYGGFDSPTVAYSVLVVAKVEKGKSKKLKSVKELLGITIMERSSFEKNPIDFLEAKGYKEVKKDLIIKLPKYSLFELENGRKRMLASAGELQKGNELALPSKYVNFLYLASHYEKLKGSPEDNEQKQLFVEQHKHYLDEIIEQISEFSKRVILADANLDKVLSAYNKHRDKPIREQAENIIHLFTLTNLGAPAAFKYFDTTIDRKRYTSTKEVLDATLIHQSITGLYETRIDLSQLGGDGGGSSGSSGSSGSSGSSGSSGGTLNIEDEYRLHETSKEPDVPLGSTWLSDFPQAWAETGGMGLAVRQAPLIIPLKATSTPVSIKQYPMSQEARLGIKPHIQRLLDQGILVPCQSPWNTPLLPVKKPGTNDYRPVQDLREVNKRVEDIHPTVPNPYNLLSGLPPSHQWYTVLDLKDAFFCLRLHPTSQPLFAFEWRDPEMGISGQLTWTRLPQGFKNSPTLFNEALHRDLADFRIQHPDLILLQYVDDLLLAATSEQDCQRGTRALLQTLGNLGYRASAKKAQICQKQVKYLGYLLKEGQRWLTEARKETVMGQPTPKTPRQLREFLGTAGFCRLWIPGFAEMAAPLYPLTKPGTLFNWGPDQQKAYQEIKQALLTAPALGLPDLTKPFELFVDEKQGYAKGVLTQKLGPWRRPVAYLSKKLDPVAAGWPPCLRMVAAIAVLTKDAGKLTMGQPLVILAPHAVEALVKQPPDRWLSNARMTHYQAMLLDTDRVQFGPVVALNPATLLPLPEKEAPHDCLEILAETHGTRPDLTDQPIPDADYTWYTDGSSFLQEGQRRAGAAVTTETEVIWARALPAGTSAQRAELIALTQALKMAEGKKLNVYTDSRYAFATAHVHGEIYRRRGWLTSEGREIKNKNEILALLKALFLPKRLSIIHCPGHQKGNSAEARGNRMADQAAREAAMKAVLETSTLLAGKRTADGSEFEKRTADGSEFESPKKKAKVE

SEQ ID NO: 6360 - protein, 2096 aa, synthetic construct
MPAAKRVKLDGGDKKYSIGLDIGTNSVGWAVITDEYKVPSKKFKVLGNTDRHSIKKNLIGALLFDSGETAEATRLKRTARRRYTRRKNRICYLQEIFSNEMAKVDDSFFHRLEESFLVEEDKKHERHPIFGNIVDEVAYHEKYPTIYHLRKKLVDSTDKADLRLIYLALAHMIKFRGHFLIEGDLNPDNSDVDKLFIQLVQTYNQLFEENPINASGVDAKAILSARLSKSRRLENLIAQLPGEKKNGLFGNLIALSLGLTPNFKSNFDLAEDAKLQLSKDTYDDDLDNLLAQIGDQYADLFLAAKNLSDAILLSDILRVNTEITKAPLSASMIKRYDEHHQDLTLLKALVRQQLPEKYKEIFFDQSKNGYAGYIDGGASQEEFYKFIKPILEKMDGTEELLVKLNREDLLRKQRTFDNGSIPHQIHLGELHAILRRQEDFYPFLKDNREKIEKILTFRIPYYVGPLARGNSRFAWMTRKSEETITPWNFEEVVDKGASAQSFIERMTNFDKNLPNEKVLPKHSLLYEYFTVYNELTKVKYVTEGMRKPAFLSGEQKKAIVDLLFKTNRKVTVKQLKEDYFKKIECFDSVEISGVEDRFNASLGTYHDLLKIIKDKDFLDNEENEDILEDIVLTLTLFEDREMIEERLKTYAHLFDDKVMKQLKRRRYTGWGRLSRKLINGIRDKQSGKTILDFLKSDGFANRNFMQLIHDDSLTFKEDIQKAQVSGQGDSLHEHIANLAGSPAIKKGILQTVKVVDELVKVMGRHKPENIVIEMARENQTTQKGQKNSRERMKRIEEGIKELGSQILKEHPVENTQLQNEKLYLYYLQNGRDMYVDQELDINRLSDYDVDHIVPQSFLKDDSIDNKVLTRSDKARGKSDNVPSEEVVKKMKNYWRQLLNAKLITQRKFDNLTKAERGGLSELDKAGFIKRQLVETRQITKHVAQILDSRMNTKYDENDKLIREVKVITLKSKLVSDFRKDFQFYKVREINNYHHAHDAYLNAVVGTALIKKYPKLESEFVYGDYKVYDVRKMIAKSEQEIGKATAKYFFYSNIMNFFKTEITLANGEIRKRPLIETNGETGEIVWDKGRDFATVRKVLSMPQVNIVKKTEVQTGGFSKESILPKRNSDKLIARKKDWDPKKYGGFDSPTVAYSVLVVAKVEKGKSKKLKSVKELLGITIMERSSFEKNPIDFLEAKGYKEVKKDLIIKLPKYSLFELENGRKRMLASAGELQKGNELALPSKYVNFLYLASHYEKLKGSPEDNEQKQLFVEQHKHYLDEIIEQISEFSKRVILADANLDKVLSAYNKHRDKPIREQAENIIHLFTLTNLGAPAAFKYFDTTIDRKRYTSTKEVLDATLIHQSITGLYETRIDLSQLGGDGGEAAAKGGTVSLQDEHRLFDIPVTTSLPDVWLQDFPQAWAETGGLGRAKCQAPIIIDLKPTAVPVSIKQYPMSLEAHMGIRQHIIKFLELGVLRPCRSPWNTPLLPVKKPGTQDYRPVQDLREINKRTVDIHPTVPNPYNLLSTLKPDYSWYTVLDLKDAFFCLPLAPQSQELFAFEWKDPERGISGQLTWTRLPQGFKNSPTLFNEALHRDLTDFRTQHPEVTLLQYVDDLLLAAPTKKACTQGTRHLLQELGEKGYRASAKKAQICQTKVTYLGYILSEGKRWLTPGRIETVARIPPPRNPREVREFLGTAGFCRLWIPGFAELAAPLYALTKPSTPFTWQTEHQLAFEALKKALLSAPALGLPDTSKPFTLFLDERQGIAKGVLTQKLGPWKRPVAYLSKKLDPVAAGWPPCLRIMAATAMLVKDSAKLTLGQPLTVITPHTLEAIVRQPPDRWITNARLTHYQALLLDTDRVQFGPPVTLNPATLLPVPENQPSPHDCRQVLAETHGTREDLKDQELPDADHTWYTDGSSYLDSGTRRAGAAVVDGHNTIWAQSLPPGTSAQKAELIALTKALELSKGKKANIYTDSRYAFATAHTHGSIYERRGWLTSEGKEIKNKAEIIALLKALFLPQEVAIIHCPGHQKGQDPVAVGNRQADRVARQAAMAEVLTLATEPDNTSHITAGKRTADGSEFEKRTADGSEFESPKKKAKVE

SEQ ID NO: 6361 - protein, 2167 aa, synthetic construct
MPAAKRVKLDGGDKKYSIGLDIGTNSVGWAVITDEYKVPSKKFKVLGNTDRHSIKKNLIGALLFDSGETAEATRLKRTARRRYTRRKNRICYLQEIFSNEMAKVDDSFFHRLEESFLVEEDKKHERHPIFGNIVDEVAYHEKYPTIYHLRKKLVDSTDKADLRLIYLALAHMIKFRGHFLIEGDLNPDNSDVDKLFIQLVQTYNQLFEENPINASGVDAKAILSARLSKSRRLENLIAQLPGEKKNGLFGNLIALSLGLTPNFKSNFDLAEDAKLQLSKDTYDDDLDNLLAQIGDQYADLFLAAKNLSDAILLSDILRVNTEITKAPLSASMIKRYDEHHQDLTLLKALVRQQLPEKYKEIFFDQSKNGYAGYIDGGASQEEFYKFIKPILEKMDGTEELLVKLNREDLLRKQRTFDNGSIPHQIHLGELHAILRRQEDFYPFLKDNREKIEKILTFRIPYYVGPLARGNSRFAWMTRKSEETITPWNFEEVVDKGASAQSFIERMTNFDKNLPNEKVLPKHSLLYEYFTVYNELTKVKYVTEGMRKPAFLSGEQKKAIVDLLFKTNRKVTVKQLKEDYFKKIECFDSVEISGVEDRFNASLGTYHDLLKIIKDKDFLDNEENEDILEDIVLTLTLFEDREMIEERLKTYAHLFDDKVMKQLKRRRYTGWGRLSRKLINGIRDKQSGKTILDFLKSDGFANRNFMQLIHDDSLTFKEDIQKAQVSGQGDSLHEHIANLAGSPAIKKGILQTVKVVDELVKVMGRHKPENIVIEMARENQTTQKGQKNSRERMKRIEEGIKELGSQILKEHPVENTQLQNEKLYLYYLQNGRDMYVDQELDINRLSDYDVDHIVPQSFLKDDSIDNKVLTRSDKARGKSDNVPSEEVVKKMKNYWRQLLNAKLITQRKFDNLTKAERGGLSELDKAGFIKRQLVETRQITKHVAQILDSRMNTKYDENDKLIREVKVITLKSKLVSDFRKDFQFYKVREINNYHHAHDAYLNAVVGTALIKKYPKLESEFVYGDYKVYDVRKMIAKSEQEIGKATAKYFFYSNIMNFFKTEITLANGEIRKRPLIETNGETGEIVWDKGRDFATVRKVLSMPQVNIVKKTEVQTGGFSKESILPKRNSDKLIARKKDWDPKKYGGFDSPTVAYSVLVVAKVEKGKSKKLKSVKELLGITIMERSSFEKNPIDFLEAKGYKEVKKDLIIKLPKYSLFELENGRKRMLASAGELQKGNELALPSKYVNFLYLASHYEKLKGSPEDNEQKQLFVEQHKHYLDEIIEQISEFSKRVILADANLDKVLSAYNKHRDKPIREQAENIIHLFTLTNLGAPAAFKYFDTTIDRKRYTSTKEVLDATLIHQSITGLYETRIDLSQLGGDGGEAAAKGGMDLLKPLTVERKGVKIKGYWNSQADITCVPKDLLQGEEPVRQQNVTTIHGTQEGDVYYVNLKIDGRRINTEVIGTTLDYAIITPGDVPWILKKPLELTIKLDLEEQQGTLLNNSILSKKGKEELKQLFEKYSALWQSWENQVGHRRIRPHKIATGTVKPTPQKQYHINPKAKPDIQIVINDLLKQGVLIQKESTMNTPVYPVPKPNGRWRMVLDYRAVNKVTPLIAVQNQHSYGILGSLFKGRYKTTIDLSNGFWAHPIVPEDYWITAFTWQGKQYCWTVLPQGFLNSPGLFNGDVVDLLQGIPNVEVYVDDVYISHDSEKEHLEYLDILFNRLKEAGYIISLKKSNIANSIVDFLGFQITNEGRGLTDTFKEKLENITAPTTLKQLQSILGLLNFARNFIPDFTELIAPLYALIPKSPKNYVPWQIEHSTTLETLITKLNGAEYLQGRKGDKTLIMKVNASYTTGYIRYYNEGEKKPISYVSIVFSKTELKFTELEKLLTTVHKGLLKALDLSMGQNIHVYSPIVSMQNIQKTPQTAKKALASRWLSWLSYLEDPRIRFFYDPQMPALKDLPAVDTGKDNKKHPSNFQHIFYTDGSAITSPTKEGHLNAGMGIVYFINKDGNLQKQQEWSISLGNHTAQFAEIAAFEFALKKCLPLGGNILVVTDSNYVAKAYNEELDVWASNGFVNNRKKPLKHISKWKSVADLKRLRPDVVVTHEPGHQKLDSSPHAYGNNLADQLATQASFKVHAGKRTADGSEFEKRTADGSEFESPKKKAKVE

SEQ ID NO: 6362 - protein, 2121 aa, synthetic construct
MPAAKRVKLDGGDKKYSIGLDIGTNSVGWAVITDEYKVPSKKFKVLGNTDRHSIKKNLIGALLFDSGETAEATRLKRTARRRYTRRKNRICYLQEIFSNEMAKVDDSFFHRLEESFLVEEDKKHERHPIFGNIVDEVAYHEKYPTIYHLRKKLVDSTDKADLRLIYLALAHMIKFRGHFLIEGDLNPDNSDVDKLFIQLVQTYNQLFEENPINASGVDAKAILSARLSKSRRLENLIAQLPGEKKNGLFGNLIALSLGLTPNFKSNFDLAEDAKLQLSKDTYDDDLDNLLAQIGDQYADLFLAAKNLSDAILLSDILRVNTEITKAPLSASMIKRYDEHHQDLTLLKALVRQQLPEKYKEIFFDQSKNGYAGYIDGGASQEEFYKFIKPILEKMDGTEELLVKLNREDLLRKQRTFDNGSIPHQIHLGELHAILRRQEDFYPFLKDNREKIEKILTFRIPYYVGPLARGNSRFAWMTRKSEETITPWNFEEVVDKGASAQSFIERMTNFDKNLPNEKVLPKHSLLYEYFTVYNELTKVKYVTEGMRKPAFLSGEQKKAIVDLLFKTNRKVTVKQLKEDYFKKIECFDSVEISGVEDRFNASLGTYHDLLKIIKDKDFLDNEENEDILEDIVLTLTLFEDREMIEERLKTYAHLFDDKVMKQLKRRRYTGWGRLSRKLINGIRDKQSGKTILDFLKSDGFANRNFMQLIHDDSLTFKEDIQKAQVSGQGDSLHEHIANLAGSPAIKKGILQTVKVVDELVKVMGRHKPENIVIEMARENQTTQKGQKNSRERMKRIEEGIKELGSQILKEHPVENTQLQNEKLYLYYLQNGRDMYVDQELDINRLSDYDVDHIVPQSFLKDDSIDNKVLTRSDKARGKSDNVPSEEVVKKMKNYWRQLLNAKLITQRKFDNLTKAERGGLSELDKAGFIKRQLVETRQITKHVAQILDSRMNTKYDENDKLIREVKVITLKSKLVSDFRKDFQFYKVREINNYHHAHDAYLNAVVGTALIKKYPKLESEFVYGDYKVYDVRKMIAKSEQEIGKATAKYFFYSNIMNFFKTEITLANGEIRKRPLIETNGETGEIVWDKGRDFATVRKVLSMPQVNIVKKTEVQTGGFSKESILPKRNSDKLIARKKDWDPKKYGGFDSPTVAYSVLVVAKVEKGKSKKLKSVKELLGITIMERSSFEKNPIDFLEAKGYKEVKKDLIIKLPKYSLFELENGRKRMLASAGELQKGNELALPSKYVNFLYLASHYEKLKGSPEDNEQKQLFVEQHKHYLDEIIEQISEFSKRVILADANLDKVLSAYNKHRDKPIREQAENIIHLFTLTNLGAPAAFKYFDTTIDRKRYTSTKEVLDATLIHQSITGLYETRIDLSQLGGDGGEAAAKGGLLGRDLLTKLKAQIQFSTEGPQVTWEDRPAMCLVLNLEEEYRLHEKPVPPSIDPSWLQLFPMVWAEKAGMGLANQVPPVVVELKSDASPVAVRQYPMSKEAREGIRPHIQRFLDLGILVPCQSPWNTPLLPVKKPGTNDYRPVQDLREVNKRVQDIHPTVPNPYNLLSSLPPSHTWYSVLDLKDAFFCLKLHPNSQPLFAFEWRDPEKGNTGQLTWTRLPQGFKNSPTLFNEALHRDLASFRALNPQVVMLQYVDDLLVAAPTYRDCKEGTRRLLQELSKLGYRVSAKKAQLCREEVTYLGYLLKGGKRWLTPARKATVMKIPTPTTPRQVREFLGTAGFCRLWIPGFASLAAPLYPLTRPKVPFTWTEAHQEAFGRIKEALLSAPALALPDLTKPFALYVDEKEGVARGVLTQTLGPWRRPVAYLSKKLDPVASGWPTCLKAIAAVALLLKDADKLTLGQNVLVIAPHNLESIVRQPPDRWMTNARMTHYQSLLLNERVSFAPPAILNPATLLPVESDDTPIHICSEILAEETGTRPDLRDQPLPGVPAWYTDGSSFIMDGRRQAGAAIVDNKRTVWASNLPEGTSAQKAELIALTQALRLAEGKSINIYTDSRYAFATAHVHGAIYKQRGWLTSAGKDIKNKEEILALLEAIHLPKRVAIIHCPGHQRGTDPVATGNRKADEAAKQAAQSTRILTETTKNAGKRTADGSEFEKRTADGSEFESPKKKAKVE

SEQ ID NO: 6363 - protein, 2212 aa, synthetic construct
MPAAKRVKLDGGDKKYSIGLDIGTNSVGWAVITDEYKVPSKKFKVLGNTDRHSIKKNLIGALLFDSGETAEATRLKRTARRRYTRRKNRICYLQEIFSNEMAKVDDSFFHRLEESFLVEEDKKHERHPIFGNIVDEVAYHEKYPTIYHLRKKLVDSTDKADLRLIYLALAHMIKFRGHFLIEGDLNPDNSDVDKLFIQLVQTYNQLFEENPINASGVDAKAILSARLSKSRRLENLIAQLPGEKKNGLFGNLIALSLGLTPNFKSNFDLAEDAKLQLSKDTYDDDLDNLLAQIGDQYADLFLAAKNLSDAILLSDILRVNTEITKAPLSASMIKRYDEHHQDLTLLKALVRQQLPEKYKEIFFDQSKNGYAGYIDGGASQEEFYKFIKPILEKMDGTEELLVKLNREDLLRKQRTFDNGSIPHQIHLGELHAILRRQEDFYPFLKDNREKIEKILTFRIPYYVGPLARGNSRFAWMTRKSEETITPWNFEEVVDKGASAQSFIERMTNFDKNLPNEKVLPKHSLLYEYFTVYNELTKVKYVTEGMRKPAFLSGEQKKAIVDLLFKTNRKVTVKQLKEDYFKKIECFDSVEISGVEDRFNASLGTYHDLLKIIKDKDFLDNEENEDILEDIVLTLTLFEDREMIEERLKTYAHLFDDKVMKQLKRRRYTGWGRLSRKLINGIRDKQSGKTILDFLKSDGFANRNFMQLIHDDSLTFKEDIQKAQVSGQGDSLHEHIANLAGSPAIKKGILQTVKVVDELVKVMGRHKPENIVIEMARENQTTQKGQKNSRERMKRIEEGIKELGSQILKEHPVENTQLQNEKLYLYYLQNGRDMYVDQELDINRLSDYDVDHIVPQSFLKDDSIDNKVLTRSDKARGKSDNVPSEEVVKKMKNYWRQLLNAKLITQRKFDNLTKAERGGLSELDKAGFIKRQLVETRQITKHVAQILDSRMNTKYDENDKLIREVKVITLKSKLVSDFRKDFQFYKVREINNYHHAHDAYLNAVVGTALIKKYPKLESEFVYGDYKVYDVRKMIAKSEQEIGKATAKYFFYSNIMNFFKTEITLANGEIRKRPLIETNGETGEIVWDKGRDFATVRKVLSMPQVNIVKKTEVQTGGFSKESILPKRNSDKLIARKKDWDPKKYGGFDSPTVAYSVLVVAKVEKGKSKKLKSVKELLGITIMERSSFEKNPIDFLEAKGYKEVKKDLIIKLPKYSLFELENGRKRMLASAGELQKGNELALPSKYVNFLYLASHYEKLKGSPEDNEQKQLFVEQHKHYLDEIIEQISEFSKRVILADANLDKVLSAYNKHRDKPIREQAENIIHLFTLTNLGAPAAFKYFDTTIDRKRYTSTKEVLDATLIHQSITGLYETRIDLSQLGGDGGEAAAKGGTLGDQGSRGSDPLPEPRVTLTVEGIPTEFLVNTGAEHSVLTKPMGKMGSKRTVVAGATGSKVYPWTTKRLLKIGQKQVTHSFLVIPECPAPLLGRDLLTKLKAQIQFSTEGPQVTWEDRPAMCLVLNLEEEYRLHEKPVPPSIDPSWLQLFPMVWAEKAGMGLANQVPPVVVELKSDASPVAVRQYPMSKEAREGIRPHIQRFLDLGILVPCQSPWNTPLLPVKKPGTNDYRPVQDLREVNKRVQDIHPTVPNPYNLLSSLPPSHTWYSVLDLKDAFFCLKLHPNSQPLFAFEWRDPEKGNTGQLTWTRLPQGFKNSPTLFNEALHRDLASFRALNPQVVMLQYVDDLLVAAPTYRDCKEGTRRLLQELSKLGYRVSAKKAQLCREEVTYLGYLLKGGKRWLTPARKATVMKIPTPTTPRQVREFLGTAGFCRLWIPGFASLAAPLYPLTRPKVPFTWTEAHQEAFGRIKEALLSAPALALPDLTKPFALYVDEKEGVARGVLTQTLGPWRRPVAYLSKKLDPVASGWPTCLKAIAAVALLLKDADKLTLGQNVLVIAPHNLESIVRQPPDRWMTNARMTHYQSLLLNERVSFAPPAILNPATLLPVESDDTPIHICSEILAEETGTRPDLRDQPLPGVPAWYTDGSSFIMDGRRQAGAAIVDNKRTVWASNLPEGTSAQKAELIALTQALRLAEGKSINIYTDSRYAFATAHVHGAIYKQRGWLTSAGKDIKNKEEILALLEAIHLPKRVAIIHCPGHQRGTDPVATGNRKADEAAKQAAQSTRILTETTKNAGKRTADGSEFEKRTADGSEFESPKKKAKVE

SEQ ID NO: 6364 - protein, 2212 aa, synthetic construct
MPAAKRVKLDGGDKKYSIGLDIGTNSVGWAVITDEYKVPSKKFKVLGNTDRHSIKKNLIGALLFDSGETAEATRLKRTARRRYTRRKNRICYLQEIFSNEMAKVDDSFFHRLEESFLVEEDKKHERHPIFGNIVDEVAYHEKYPTIYHLRKKLVDSTDKADLRLIYLALAHMIKFRGHFLIEGDLNPDNSDVDKLFIQLVQTYNQLFEENPINASGVDAKAILSARLSKSRRLENLIAQLPGEKKNGLFGNLIALSLGLTPNFKSNFDLAEDAKLQLSKDTYDDDLDNLLAQIGDQYADLFLAAKNLSDAILLSDILRVNTEITKAPLSASMIKRYDEHHQDLTLLKALVRQQLPEKYKEIFFDQSKNGYAGYIDGGASQEEFYKFIKPILEKMDGTEELLVKLNREDLLRKQRTFDNGSIPHQIHLGELHAILRRQEDFYPFLKDNREKIEKILTFRIPYYVGPLARGNSRFAWMTRKSEETITPWNFEEVVDKGASAQSFIERMTNFDKNLPNEKVLPKHSLLYEYFTVYNELTKVKYVTEGMRKPAFLSGEQKKAIVDLLFKTNRKVTVKQLKEDYFKKIECFDSVEISGVEDRFNASLGTYHDLLKIIKDKDFLDNEENEDILEDIVLTLTLFEDREMIEERLKTYAHLFDDKVMKQLKRRRYTGWGRLSRKLINGIRDKQSGKTILDFLKSDGFANRNFMQLIHDDSLTFKEDIQKAQVSGQGDSLHEHIANLAGSPAIKKGILQTVKVVDELVKVMGRHKPENIVIEMARENQTTQKGQKNSRERMKRIEEGIKELGSQILKEHPVENTQLQNEKLYLYYLQNGRDMYVDQELDINRLSDYDVDHIVPQSFLKDDSIDNKVLTRSDKARGKSDNVPSEEVVKKMKNYWRQLLNAKLITQRKFDNLTKAERGGLSELDKAGFIKRQLVETRQITKHVAQILDSRMNTKYDENDKLIREVKVITLKSKLVSDFRKDFQFYKVREINNYHHAHDAYLNAVVGTALIKKYPKLESEFVYGDYKVYDVRKMIAKSEQEIGKATAKYFFYSNIMNFFKTEITLANGEIRKRPLIETNGETGEIVWDKGRDFATVRKVLSMPQVNIVKKTEVQTGGFSKESILPKRNSDKLIARKKDWDPKKYGGFDSPTVAYSVLVVAKVEKGKSKKLKSVKELLGITIMERSSFEKNPIDFLEAKGYKEVKKDLIIKLPKYSLFELENGRKRMLASAGELQKGNELALPSKYVNFLYLASHYEKLKGSPEDNEQKQLFVEQHKHYLDEIIEQISEFSKRVILADANLDKVLSAYNKHRDKPIREQAENIIHLFTLTNLGAPAAFKYFDTTIDRKRYTSTKEVLDATLIHQSITGLYETRIDLSQLGGDGGEAAAKGGTLGDQGSRGSDPLPEPRVTLTVEGIPTEFLVNTGAEHSVLTKPMGKMGSKRTVVAGATGSKVYPWTTKRLLKIGQKQVTHSFLVIPECPAPLLGRDLLTKLKAQIQFSTEGPQVTWEDRPAMCLVLNLEEEYRLHEKPVPPSIDPSWLQLFPMVWAEKAGMGLANQVPPVVVELKSDASPVAVRQYPMSKEAREGIRPHIQRFLDLGILVPCQSPWNTPLLPVKKPGTNDYRPVQDLREVNKRVQDIHPTVPNPYNLLSSLPPSHTWYSVLDLKDAFFCLKLHPNSQPLFAFEWRDPEKGNTGQLTWTRLPQGFKNSPTLFNEALHRDLASFRALNPQVVMLQYVDDLLVAAPTYRDCKEGTRRLLQELSKLGYRVSAKKAQLCREEVTYLGYLLKGGKRWLTPARKATVMKIPTPTTPRQVREFLGKAGFCRLFIPGFASLAAPLYPLTRPKVPFTWTEAHQEAFGRIKEALLSAPALALPDLTKPFALYVDEKEGVARGVLTQTLGPWRRPVAYLSKKLDPVASGWPTCLKAIAAVALLLKDADKLTLGQNVLVIAPHNLESIVRQPPDRWMTNARMTHYQSLLLNERVSFAPPAILNPATLLPVESDDTPIHICSEILAEETGTRPDLRDQPLPGVPAWYTDGSSFIMDGRRQAGAAIVDNKRTVWASNLPEGTSAQKAELIALTQALRLAEGKSINIYTDSRYAFATAHVHGAIYKQRGWLTSAGKDIKNKEEILALLEAIHLPKRVAIIHCPGHQRGTDPVATGNRKADEAAKQAAQSTRILTETTKNAGKRTADGSEFEKRTADGSEFESPKKKAKVE

SEQ ID NO: 6365 - protein, 2090 aa, synthetic construct
MPAAKRVKLDGGDKKYSIGLDIGTNSVGWAVITDEYKVPSKKFKVLGNTDRHSIKKNLIGALLFDSGETAEATRLKRTARRRYTRRKNRICYLQEIFSNEMAKVDDSFFHRLEESFLVEEDKKHERHPIFGNIVDEVAYHEKYPTIYHLRKKLVDSTDKADLRLIYLALAHMIKFRGHFLIEGDLNPDNSDVDKLFIQLVQTYNQLFEENPINASGVDAKAILSARLSKSRRLENLIAQLPGEKKNGLFGNLIALSLGLTPNFKSNFDLAEDAKLQLSKDTYDDDLDNLLAQIGDQYADLFLAAKNLSDAILLSDILRVNTEITKAPLSASMIKRYDEHHQDLTLLKALVRQQLPEKYKEIFFDQSKNGYAGYIDGGASQEEFYKFIKPILEKMDGTEELLVKLNREDLLRKQRTFDNGSIPHQIHLGELHAILRRQEDFYPFLKDNREKIEKILTFRIPYYVGPLARGNSRFAWMTRKSEETITPWNFEEVVDKGASAQSFIERMTNFDKNLPNEKVLPKHSLLYEYFTVYNELTKVKYVTEGMRKPAFLSGEQKKAIVDLLFKTNRKVTVKQLKEDYFKKIECFDSVEISGVEDRFNASLGTYHDLLKIIKDKDFLDNEENEDILEDIVLTLTLFEDREMIEERLKTYAHLFDDKVMKQLKRRRYTGWGRLSRKLINGIRDKQSGKTILDFLKSDGFANRNFMQLIHDDSLTFKEDIQKAQVSGQGDSLHEHIANLAGSPAIKKGILQTVKVVDELVKVMGRHKPENIVIEMARENQTTQKGQKNSRERMKRIEEGIKELGSQILKEHPVENTQLQNEKLYLYYLQNGRDMYVDQELDINRLSDYDVDHIVPQSFLKDDSIDNKVLTRSDKARGKSDNVPSEEVVKKMKNYWRQLLNAKLITQRKFDNLTKAERGGLSELDKAGFIKRQLVETRQITKHVAQILDSRMNTKYDENDKLIREVKVITLKSKLVSDFRKDFQFYKVREINNYHHAHDAYLNAVVGTALIKKYPKLESEFVYGDYKVYDVRKMIAKSEQEIGKATAKYFFYSNIMNFFKTEITLANGEIRKRPLIETNGETGEIVWDKGRDFATVRKVLSMPQVNIVKKTEVQTGGFSKESILPKRNSDKLIARKKDWDPKKYGGFDSPTVAYSVLVVAKVEKGKSKKLKSVKELLGITIMERSSFEKNPIDFLEAKGYKEVKKDLIIKLPKYSLFELENGRKRMLASAGELQKGNELALPSKYVNFLYLASHYEKLKGSPEDNEQKQLFVEQHKHYLDEIIEQISEFSKRVILADANLDKVLSAYNKHRDKPIREQAENIIHLFTLTNLGAPAAFKYFDTTIDRKRYTSTKEVLDATLIHQSITGLYETRIDLSQLGGDGGEAAAKGGTLNIEDEHRLHETSKEPDVSLGSTWLSDFPQAWAETGGMGLAVRQAPLIIPLKATSTPVSIKQYPMSQEARLGIKPHIQRLLDQGILVPCQSPWNTPLLPVKKPGTNDYRPVQDLREVNKRVEDIHPTVPNPYNLLSGLPPSHQWYTVLDLKDAFFCLRLHPTSQPLFAFEWRDPEMGISGQLTWTRLPQGFKNSPTLFDEALHRDLADFRIQHPDLILLQYVDDLLLAATSELDCQQGTRALLQTLGNLGYRASAKKAQICQKQVKYLGYLLKEGQRWLTEARKETVMGQPTPKTPRQLREFLGTAGFCRLWIPGFAEMAAPLYPLTKTGTLFNWGPDQQKAYQEIKQALLTAPALGLPDLTKPFELFVDEKQGYAKGVLTQKLGPWRRPVAYLSKKLDPVAAGWPPCLRMVAAIAVLTKDAGKLTMGQPLVILAPHAVEALVKQPPDRWLSNARMTHYQALLLDTDRVQFGPVVALNPATLLPLPEEGLQHNCLDILAEAHGTRPDLTDQPLPDADHTWYTDGSSLLQEGQRKAGAAVTTETEVIWAKALPAGTSAQRAELIALTQALKMAEGKKLNVYTDSRYAFATAHIHGEIYRRRGLLTSEGKEIKNKDEILALLKALFLPKRLSIIHCPGHQKGHSAEARGNRMADQAARKAAITETPDTSTLLAGKRTADGSEFEKRTADGSEFESPKKKAKVE

SEQ ID NO: 6366 - protein, 2082 aa, synthetic construct
MPAAKRVKLDGGDKKYSIGLDIGTNSVGWAVITDEYKVPSKKFKVLGNTDRHSIKKNLIGALLFDSGETAEATRLKRTARRRYTRRKNRICYLQEIFSNEMAKVDDSFFHRLEESFLVEEDKKHERHPIFGNIVDEVAYHEKYPTIYHLRKKLVDSTDKADLRLIYLALAHMIKFRGHFLIEGDLNPDNSDVDKLFIQLVQTYNQLFEENPINASGVDAKAILSARLSKSRRLENLIAQLPGEKKNGLFGNLIALSLGLTPNFKSNFDLAEDAKLQLSKDTYDDDLDNLLAQIGDQYADLFLAAKNLSDAILLSDILRVNTEITKAPLSASMIKRYDEHHQDLTLLKALVRQQLPEKYKEIFFDQSKNGYAGYIDGGASQEEFYKFIKPILEKMDGTEELLVKLNREDLLRKQRTFDNGSIPHQIHLGELHAILRRQEDFYPFLKDNREKIEKILTFRIPYYVGPLARGNSRFAWMTRKSEETITPWNFEEVVDKGASAQSFIERMTNFDKNLPNEKVLPKHSLLYEYFTVYNELTKVKYVTEGMRKPAFLSGEQKKAIVDLLFKTNRKVTVKQLKEDYFKKIECFDSVEISGVEDRFNASLGTYHDLLKIIKDKDFLDNEENEDILEDIVLTLTLFEDREMIEERLKTYAHLFDDKVMKQLKRRRYTGWGRLSRKLINGIRDKQSGKTILDFLKSDGFANRNFMQLIHDDSLTFKEDIQKAQVSGQGDSLHEHIANLAGSPAIKKGILQTVKVVDELVKVMGRHKPENIVIEMARENQTTQKGQKNSRERMKRIEEGIKELGSQILKEHPVENTQLQNEKLYLYYLQNGRDMYVDQELDINRLSDYDVDHIVPQSFLKDDSIDNKVLTRSDKARGKSDNVPSEEVVKKMKNYWRQLLNAKLITQRKFDNLTKAERGGLSELDKAGFIKRQLVETRQITKHVAQILDSRMNTKYDENDKLIREVKVITLKSKLVSDFRKDFQFYKVREINNYHHAHDAYLNAVVGTALIKKYPKLESEFVYGDYKVYDVRKMIAKSEQEIGKATAKYFFYSNIMNFFKTEITLANGEIRKRPLIETNGETGEIVWDKGRDFATVRKVLSMPQVNIVKKTEVQTGGFSKESILPKRNSDKLIARKKDWDPKKYGGFDSPTVAYSVLVVAKVEKGKSKKLKSVKELLGITIMERSSFEKNPIDFLEAKGYKEVKKDLIIKLPKYSLFELENGRKRMLASAGELQKGNELALPSKYVNFLYLASHYEKLKGSPEDNEQKQLFVEQHKHYLDEIIEQISEFSKRVILADANLDKVLSAYNKHRDKPIREQAENIIHLFTLTNLGAPAAFKYFDTTIDRKRYTSTKEVLDATLIHQSITGLYETRIDLSQLGGDGGEAAAKGGLDDEYRLYSPLVKPDQNIQFWLEQFPQAWAETAGMGLAKQVPPQVIQLKASATPVSVRQYPLSKEAQEGIRPHVQRLIQQGILVPVQSPWNTPLLPVRKPGTNDYRPVQDLREVNKRVQDIHPTVPNPYNLLCALPPQRSWYTVLDLKDAFFCLRLHPTSQPLFAFEWRDPGTGRTGQLTWTRLPQGFKNSPTIFNEALHRDLANFRIQHPQVTLLQYVDDLLLAGATKQDCLEGTKALLLELSDLGYRASAKKAQICRREVTYLGYSLRDGQRWLTEARKKTVVQIPAPTTAKQVREFLGKAGFCRLFIPGFATLAAPLYPLTKPKGEFSWAPEHQKAFDAIKKALLSAPALALPDVTKPFTLYVDERKGVARGVLTQTLGPWRRPVAYLSKKLDPVASGWPVCLKAIAAVAILVKDADKLTLGQNITVIAPHALENIVRQPPDRWMTNARMTHYQSLLLTERVTFAPPAALNPATLLPEETDEPVTHDCHQLLIEETGVRKDLTDIPLTGEVLTWFTDGSSYVVEGKRMAGAAVVDGTRTIWASSLPEGTSAQKAELMALTQALRLAEGKSINIYTDSRYAFATAHVHGAIYKQRGWLTSAGREIKNKEEILSLLEALHLPKRLAIIHCPGHQKAKDPISRGNQMADRVAKQAAQGVNLLPAGKRTADGSEFEKRTADGSEFESPKKKAKVE

SEQ ID NO: 6367 - protein, 2084 aa, synthetic construct
MPAAKRVKLDGGDKKYSIGLDIGTNSVGWAVITDEYKVPSKKFKVLGNTDRHSIKKNLIGALLFDSGETAEATRLKRTARRRYTRRKNRICYLQEIFSNEMAKVDDSFFHRLEESFLVEEDKKHERHPIFGNIVDEVAYHEKYPTIYHLRKKLVDSTDKADLRLIYLALAHMIKFRGHFLIEGDLNPDNSDVDKLFIQLVQTYNQLFEENPINASGVDAKAILSARLSKSRRLENLIAQLPGEKKNGLFGNLIALSLGLTPNFKSNFDLAEDAKLQLSKDTYDDDLDNLLAQIGDQYADLFLAAKNLSDAILLSDILRVNTEITKAPLSASMIKRYDEHHQDLTLLKALVRQQLPEKYKEIFFDQSKNGYAGYIDGGASQEEFYKFIKPILEKMDGTEELLVKLNREDLLRKQRTFDNGSIPHQIHLGELHAILRRQEDFYPFLKDNREKIEKILTFRIPYYVGPLARGNSRFAWMTRKSEETITPWNFEEVVDKGASAQSFIERMTNFDKNLPNEKVLPKHSLLYEYFTVYNELTKVKYVTEGMRKPAFLSGEQKKAIVDLLFKTNRKVTVKQLKEDYFKKIECFDSVEISGVEDRFNASLGTYHDLLKIIKDKDFLDNEENEDILEDIVLTLTLFEDREMIEERLKTYAHLFDDKVMKQLKRRRYTGWGRLSRKLINGIRDKQSGKTILDFLKSDGFANRNFMQLIHDDSLTFKEDIQKAQVSGQGDSLHEHIANLAGSPAIKKGILQTVKVVDELVKVMGRHKPENIVIEMARENQTTQKGQKNSRERMKRIEEGIKELGSQILKEHPVENTQLQNEKLYLYYLQNGRDMYVDQELDINRLSDYDVDHIVPQSFLKDDSIDNKVLTRSDKARGKSDNVPSEEVVKKMKNYWRQLLNAKLITQRKFDNLTKAERGGLSELDKAGFIKRQLVETRQITKHVAQILDSRMNTKYDENDKLIREVKVITLKSKLVSDFRKDFQFYKVREINNYHHAHDAYLNAVVGTALIKKYPKLESEFVYGDYKVYDVRKMIAKSEQEIGKATAKYFFYSNIMNFFKTEITLANGEIRKRPLIETNGETGEIVWDKGRDFATVRKVLSMPQVNIVKKTEVQTGGFSKESILPKRNSDKLIARKKDWDPKKYGGFDSPTVAYSVLVVAKVEKGKSKKLKSVKELLGITIMERSSFEKNPIDFLEAKGYKEVKKDLIIKLPKYSLFELENGRKRMLASAGELQKGNELALPSKYVNFLYLASHYEKLKGSPEDNEQKQLFVEQHKHYLDEIIEQISEFSKRVILADANLDKVLSAYNKHRDKPIREQAENIIHLFTLTNLGAPAAFKYFDTTIDRKRYTSTKEVLDATLIHQSITGLYETRIDLSQLGGDGGEAAAKGGTLQLDDEYRLYSPLVKPDQNIQFWLEQFPQAWAETAGMGLAKQVPPQVIQLKASATPVSVRQYPLSKEAQEGIRPHVQRLIQQGILVPVQSPWNTPLLPVRKPGTNDYRPVQDLREVNKRVQDIHPTVPNPYNLLCALPPQRSWYTVLDLKDAFFCLRLHPTSQPLFAFEWRDPGTGRTGQLTWTRLPQGFKNSPTIFDEALHRDLANFRIQHPQVTLLQYVDDLLLAGATKQDCLEGTKALLLELSDLGYRASAKKAQICRREVTYLGYSLRDGQRWLTEARKKTVVQIPAPTTAKQVREFLGTAGFCRLWIPGFATLAAPLYPLTKEKGEFSWAPEHQKAFDAIKKALLSAPALALPDVTKPFTLYVDERKGVARGVLTQTLGPWRRPVAYLSKKLDPVASGWPVCLKAIAAVAILVKDADKLTLGQNITVIAPHALENIVRQPPDRWMTNARMTHYQSLLLTERVTFAPPAALNPATLLPEETDEPVTHDCHQLLIEETGVRKDLTDIPLTGEVLTWFTDGSSYVVEGKRMAGAAVVDGTRTIWASSLPEGTSAQKAELMALTQALRLAEGKSINIYTDSRYAFATAHVHGAIYKQRGLLTSAGREIKNKEEILSLLEALHLPKRLAIIHCPGHQKAKDPISRGNQMADRVAKQAAQGVNLLAGKRTADGSEFEKRTADGSEFESPKKKAKVE

SEQ ID NO: 6368 - protein, 2082 aa, synthetic construct; identical to SEQ ID NO: 6366

SEQ ID NO: 6369 - protein, 2081 aa, synthetic construct
MPAAKRVKLDGGDKKYSIGLDIGTNSVGWAVITDEYKVPSKKFKVLGNTDRHSIKKNLIGALLFDSGETAEATRLKRTARRRYTRRKNRICYLQEIFSNEMAKVDDSFFHRLEESFLVEEDKKHERHPIFGNIVDEVAYHEKYPTIYHLRKKLVDSTDKADLRLIYLALAHMIKFRGHFLIEGDLNPDNSDVDKLFIQLVQTYNQLFEENPINASGVDAKAILSARLSKSRRLENLIAQLPGEKKNGLFGNLIALSLGLTPNFKSNFDLAEDAKLQLSKDTYDDDLDNLLAQIGDQYADLFLAAKNLSDAILLSDILRVNTEITKAPLSASMIKRYDEHHQDLTLLKALVRQQLPEKYKEIFFDQSKNGYAGYIDGGASQEEFYKFIKPILEKMDGTEELLVKLNREDLLRKQRTFDNGSIPHQIHLGELHAILRRQEDFYPFLKDNREKIEKILTFRIPYYVGPLARGNSRFAWMTRKSEETITPWNFEEVVDKGASAQSFIERMTNFDKNLPNEKVLPKHSLLYEYFTVYNELTKVKYVTEGMRKPAFLSGEQKKAIVDLLFKTNRKVTVKQLKEDYFKKIECFDSVEISGVEDRFNASLGTYHDLLKIIKDKDFLDNEENEDILEDIVLTLTLFEDREMIEERLKTYAHLFDDKVMKQLKRRRYTGWGRLSRKLINGIRDKQSGKTILDFLKSDGFANRNFMQLIHDDSLTFKEDIQKAQVSGQGDSLHEHIANLAGSPAIKKGILQTVKVVDELVKVMGRHKPENIVIEMARENQTTQKGQKNSRERMKRIEEGIKELGSQILKEHPVENTQLQNEKLYLYYLQNGRDMYVDQELDINRLSDYDVDHIVPQSFLKDDSIDNKVLTRSDKARGKSDNVPSEEVVKKMKNYWRQLLNAKLITQRKFDNLTKAERGGLSELDKAGFIKRQLVETRQITKHVAQILDSRMNTKYDENDKLIREVKVITLKSKLVSDFRKDFQFYKVREINNYHHAHDAYLNAVVGTALIKKYPKLESEFVYGDYKVYDVRKMIAKSEQEIGKATAKYFFYSNIMNFFKTEITLANGEIRKRPLIETNGETGEIVWDKGRDFATVRKVLSMPQVNIVKKTEVQTGGFSKESILPKRNSDKLIARKKDWDPKKYGGFDSPTVAYSVLVVAKVEKGKSKKLKSVKELLGITIMERSSFEKNPIDFLEAKGYKEVKKDLIIKLPKYSLFELENGRKRMLASAGELQKGNELALPSKYVNFLYLASHYEKLKGSPEDNEQKQLFVEQHKHYLDEIIEQISEFSKRVILADANLDKVLSAYNKHRDKPIREQAENIIHLFTLTNLGAPAAFKYFDTTIDRKRYTSTKEVLDATLIHQSITGLYETRIDLSQLGGDGGEAAAKGGIPWLMKKPLQLTTLVPLQEYEERLLKQTMLTGSYKEKLQSLFLKYDALWQHWENQVGHRRIKPHHIATGTVNPRPQKQYPINPKAKASIQTVINDLLKQGVLIQQNSIMNTPVYPVPKPDGKWRMVLDYREVNKTIPLIAAQNQHSAGILSSIFRGKYKTTLDLSNGFWAHSITPESYWLTAFTWLGQQYCWTRLPQGFLNSPALFNADVVDLLKEVPNVQVYVDDIYISHDDPREHLEQLEKVFSLLLNAGYVVSLKKSEIAQHEVEFLGFNITKEGRGLTETFKQKLLNITPPRDLKQLQSILGLLNFARNFIPNFSELVKPLYNIIATAPGKYITWTTDNSQQLQNIISMLNSAENLEERNPEVRLIMKVNTSPSAGYIRFYNEFAKRPIMYLNYVYTKAEVKFTNTEKLLTTIHKGLIKALDLGMGQEILVYSPIVSMTKIQKTPLPERKALPIRWITWMSYLEDPRIQFHYDKTLPELQQVPTVTDDIIAKIKHPSEFSMVFYTDGSAIKHPNVNKSHNAGMGIAQVQFKPEFTVINTWSIPLGDHTAQLAEVAAVEFACKKALKIDGPVLIVTDSFYVAESVNKELPYWQSNGFFNNKKKPLKHVSKWKSIADCIQLKPDIIIIHEKGHQPTASTFHTEGNNLADKLATQGSYVVNAGKRTADGSEFEKRTADGSEFESPKKKAKVE

SEQ ID NO: 6370 - protein, 2097 aa, synthetic construct
MPAAKRVKLDGGDKKYSIGLDIGTNSVGWAVITDEYKVPSKKFKVLGNTDRHSIKKNLIGALLFDSGETAEATRLKRTARRRYTRRKNRICYLQEIFSNEMAKVDDSFFHRLEESFLVEEDKKHERHPIFGNIVDEVAYHEKYPTIYHLRKKLVDSTDKADLRLIYLALAHMIKFRGHFLIEGDLNPDNSDVDKLFIQLVQTYNQLFEENPINASGVDAKAILSARLSKSRRLENLIAQLPGEKKNGLFGNLIALSLGLTPNFKSNFDLAEDAKLQLSKDTYDDDLDNLLAQIGDQYADLFLAAKNLSDAILLSDILRVNTEITKAPLSASMIKRYDEHHQDLTLLKALVRQQLPEKYKEIFFDQSKNGYAGYIDGGASQEEFYKFIKPILEKMDGTEELLVKLNREDLLRKQRTFDNGSIPHQIHLGELHAILRRQEDFYPFLKDNREKIEKILTFRIPYYVGPLARGNSRFAWMTRKSEETITPWNFEEVVDKGASAQSFIERMTNFDKNLPNEKVLPKHSLLYEYFTVYNELTKVKYVTEGMRKPAFLSGEQKKAIVDLLFKTNRKVTVKQLKEDYFKKIECFDSVEISGVEDRFNASLGTYHDLLKIIKDKDFLDNEENEDILEDIVLTLTLFEDREMIEERLKTYAHLFDDKVMKQLKRRRYTGWGRLSRKLINGIRDKQSGKTILDFLKSDGFANRNFMQLIHDDSLTFKEDIQKAQVSGQGDSLHEHIANLAGSPAIKKGILQTVKVVDELVKVMGRHKPENIVIEMARENQTTQKGQKNSRERMKRIEEGIKELGSQILKEHPVENTQLQNEKLYLYYLQNGRDMYVDQELDINRLSDYDVDHIVPQSFLKDDSIDNKVLTRSDKARGKSDNVPSEEVVKKMKNYWRQLLNAKLITQRKFDNLTKAERGGLSELDKAGFIKRQLVETRQITKHVAQILDSRMNTKYDENDKLIREVKVITLKSKLVSDFRKDFQFYKVREINNYHHAHDAYLNAVVGTALIKKYPKLESEFVYGDYKVYDVRKMIAKSEQEIGKATAKYFFYSNIMNFFKTEITLANGEIRKRPLIETNGETGEIVWDKGRDFATVRKVLSMPQVNIVKKTEVQTGGFSKESILPKRNSDKLIARKKDWDPKKYGGFDSPTVAYSVLVVAKVEKGKSKKLKSVKELLGITIMERSSFEKNPIDFLEAKGYKEVKKDLIIKLPKYSLFELENGRKRMLASAGELQKGNELALPSKYVNFLYLASHYEKLKGSPEDNEQKQLFVEQHKHYLDEIIEQISEFSKRVILADANLDKVLSAYNKHRDKPIREQAENIIHLFTLTNLGAPAAFKYFDTTIDRKRYTSTKEVLDATLIHQSITGLYETRIDLSQLGGDGGEAAAKEAAAKGGTAPLEEEYRLFLEAPIQNVTLLEQWKREIPKVWAEINPPGLASTQAPIHVQLLSTALPVRVRQYPITLEAKRSLRETIRKFRAAGILRPVHSPWNTPLLPVRKSGTSEYRMVQDLREVNKRVETIHPTVPNPYTLLSLLPPDRIWYSVLDLKDAFFCIPLAPESQLIFAFEWADAEEGESGQLTWTRLPQGFKNSPTLFNEALNRDLQGFRLDHPSVSLLQYVDDLLIAADTQAACLSATRDLLMTLAELGYRVSGKKAQLCQEEVTYLGFKIHKGSRSLSNSRTQAILQIPVPKTKRQVREFLGKIGYCRLFIPGFAELAQPLYAATRPGNDPLVWGEKEEEAFQSLKLALTQPPALALPSLDKPFQLFVEETSGAAKGVLTQALGPWKRPVAYLSKRLDPVAAGWPRCLRAIAAAALLTREASKLTFGQDIEITSSHNLESLLRSPPDKWLTNARITQYQVLLLDPPRVRFKQTAALNPATLLPETDDTLPIHHCLDTLDSLTSTRPDLTDQPLAQAEATLFTDGSSYIRDGKRYAGAAVVTLDSVIWAEPLPIGTSAQKAELIALTKALEWSKDKSVNIYTDSRYAFATLHVHGMIYRERGWLTAGGKAIKNAPEILALLTAVWLPKRVAVMHCKGHQKDDAPTSTGNRRADEVAREVAIRPLSTQATISAGKRTADGSEFEKRTADGSEFESPKKKAKVE

SEQ ID NO: 6371 - protein, 2172 aa, synthetic construct
MPAAKRVKLDGGDKKYSIGLDIGTNSVGWAVITDEYKVPSKKFKVLGNTDRHSIKKNLIGALLFDSGETAEATRLKRTARRRYTRRKNRICYLQEIFSNEMAKVDDSFFHRLEESFLVEEDKKHERHPIFGNIVDEVAYHEKYPTIYHLRKKLVDSTDKADLRLIYLALAHMIKFRGHFLIEGDLNPDNSDVDKLFIQLVQTYNQLFEENPINASGVDAKAILSARLSKSRRLENLIAQLPGEKKNGLFGNLIALSLGLTPNFKSNFDLAEDAKLQLSKDTYDDDLDNLLAQIGDQYADLFLAAKNLSDAILLSDILRVNTEITKAPLSASMIKRYDEHHQDLTLLKALVRQQLPEKYKEIFFDQSKNGYAGYIDGGASQEEFYKFIKPILEKMDGTEELLVKLNREDLLRKQRTFDNGSIPHQIHLGELHAILRRQEDFYPFLKDNREKIEKILTFRIPYYVGPLARGNSRFAWMTRKSEETITPWNFEEVVDKGASAQSFIERMTNFDKNLPNEKVLPKHSLLYEYFTVYNELTKVKYVTEGMRKPAFLSGEQKKAIVDLLFKTNRKVTVKQLKEDYFKKIECFDSVEISGVEDRFNASLGTYHDLLKIIKDKDFLDNEENEDILEDIVLTLTLFEDREMIEERLKTYAHLFDDKVMKQLKRRRYTGWGRLSRKLINGIRDKQSGKTILDFLKSDGFANRNFMQLIHDDSLTFKEDIQKAQVSGQGDSLHEHIANLAGSPAIKKGILQTVKVVDELVKVMGRHKPENIVIEMARENQTTQKGQKNSRERMKRIEEGIKELGSQILKEHPVENTQLQNEKLYLYYLQNGRDMYVDQELDINRLSDYDVDHIVPQSFLKDDSIDNKVLTRSDKARGKSDNVPSEEVVKKMKNYWRQLLNAKLITQRKFDNLTKAERGGLSELDKAGFIKRQLVETRQITKHVAQILDSRMNTKYDENDKLIREVKVITLKSKLVSDFRKDFQFYKVREINNYHHAHDAYLNAVVGTALIKKYPKLESEFVYGDYKVYDVRKMIAKSEQEIGKATAKYFFYSNIMNFFKTEITLANGEIRKRPLIETNGETGEIVWDKGRDFATVRKVLSMPQVNIVKKTEVQTGGFSKESILPKRNSDKLIARKKDWDPKKYGGFDSPTVAYSVLVVAKVEKGKSKKLKSVKELLGITIMERSSFEKNPIDFLEAKGYKEVKKDLIIKLPKYSLFELENGRKRMLASAGELQKGNELALPSKYVNFLYLASHYEKLKGSPEDNEQKQLFVEQHKHYLDEIIEQISEFSKRVILADANLDKVLSAYNKHRDKPIREQAENIIHLFTLTNLGAPAAFKYFDTTIDRKRYTSTKEVLDATLIHQSITGLYETRIDLSQLGGDGGEAAAKEAAAKGGMDLLKPLTVERKGVKIKGYWNSQADITCVPKDLLQGEEPVRQQNVTTIHGTQEGDVYYVNLKIDGRRINTEVIGTTLDYAIITPGDVPWILKKPLELTIKLDLEEQQGTLLNNSILSKKGKEELKQLFEKYSALWQSWENQVGHRRIRPHKIATGTVKPTPQKQYHINPKAKPDIQIVINDLLKQGVLIQKESTMNTPVYPVPKPNGRWRMVLDYRAVNKVTPLIAVQNQHSYGILGSLFKGRYKTTIDLSNGFWAHPIVPEDYWITAFTWQGKQYCWTVLPQGFLNSPGLFTGDVVDLLQGIPNVEVYVDDVYISHDSEKEHLEYLDILFNRLKEAGYIISLKKSNIANSIVDFLGFQITNEGRGLTDTFKEKLENITAPTTLKQLQSILGLLNFARNFIPDFTELIAPLYALIPKSTKNYVPWQIEHSTTLETLITKLNGAEYLQGRKGDKTLIMKVNASYTTGYIRYYNEGEKKPISYVSIVFSKTELKFTELEKLLTTVHKGLLKALDLSMGQNIHVYSPIVSMQNIQKTPQTAKKALASRWLSWLSYLEDPRIRFFYDPQMPALKDLPAVDTGKDNKKHPSNFQHIFYTDGSAITSPTKEGHLNAGMGIVYFINKDGNLQKQQEWSISLGNHTAQFAEIAAFEFALKKCLPLGGNILVVTDSNYVAKAYNEELDVWASNGFVNNRKKPLKHISKWKSVADLKRLRPDVVVTHEPGHQKLDSSPHAYGNNLADQLATQASFKVHAGKRTADGSEFEKRTADGSEFESPKKKAKVE

SEQ ID NO: 6372 - protein, 2086 aa, synthetic construct
MPAAKRVKLDGGDKKYSIGLDIGTNSVGWAVITDEYKVPSKKFKVLGNTDRHSIKKNLIGALLFDSGETAEATRLKRTARRRYTRRKNRICYLQEIFSNEMAKVDDSFFHRLEESFLVEEDKKHERHPIFGNIVDEVAYHEKYPTIYHLRKKLVDSTDKADLRLIYLALAHMIKFRGHFLIEGDLNPDNSDVDKLFIQLVQTYNQLFEENPINASGVDAKAILSARLSKSRRLENLIAQLPGEKKNGLFGNLIALSLGLTPNFKSNFDLAEDAKLQLSKDTYDDDLDNLLAQIGDQYADLFLAAKNLSDAILLSDILRVNTEITKAPLSASMIKRYDEHHQDLTLLKALVRQQLPEKYKEIFFDQSKNGYAGYIDGGASQEEFYKFIKPILEKMDGTEELLVKLNREDLLRKQRTFDNGSIPHQIHLGELHAILRRQEDFYPFLKDNREKIEKILTFRIPYYVGPLARGNSRFAWMTRKSEETITPWNFEEVVDKGASAQSFIERMTNFDKNLPNEKVLPKHSLLYEYFTVYNELTKVKYVTEGMRKPAFLSGEQKKAIVDLLFKTNRKVTVKQLKEDYFKKIECFDSVEISGVEDRFNASLGTYHDLLKIIKDKDFLDNEENEDILEDIVLTLTLFEDREMIEERLKTYAHLFDDKVMKQLKRRRYTGWGRLSRKLINGIRDKQSGKTILDFLKSDGFANRNFMQLIHDDSLTFKEDIQKAQVSGQGDSLHEHIANLAGSPAIKKGILQTVKVVDELVKVMGRHKPENIVIEMARENQTTQKGQKNSRERMKRIEEGIKELGSQILKEHPVENTQLQNEKLYLYYLQNGRDMYVDQELDINRLSDYDVDHIVPQSFLKDDSIDNKVLTRSDKARGKSDNVPSEEVVKKMKNYWRQLLNAKLITQRKFDNLTKAERGGLSELDKAGFIKRQLVETRQITKHVAQILDSRMNTKYDENDKLIREVKVITLKSKLVSDFRKDFQFYKVREINNYHHAHDAYLNAVVGTALIKKYPKLESEFVYGDYKVYDVRKMIAKSEQEIGKATAKYFFYSNIMNFFKTEITLANGEIRKRPLIETNGETGEIVWDKGRDFATVRKVLSMPQVNIVKKTEVQTGGFSKESILPKRNSDKLIARKKDWDPKKYGGFDSPTVAYSVLVVAKVEKGKSKKLKSVKELLGITIMERSSFEKNPIDFLEAKGYKEVKKDLIIKLPKYSLFELENGRKRMLASAGELQKGNELALPSKYVNFLYLASHYEKLKGSPEDNEQKQLFVEQHKHYLDEIIEQISEFSKRVILADANLDKVLSAYNKHRDKPIREQAENIIHLFTLTNLGAPAAFKYFDTTIDRKRYTSTKEVLDATLIHQSITGLYETRIDLSQLGGDGGEAAAKEAAAKGGVPWILKKPLELTIKLDLEEQQGTLLNNSILSKKGKEELKQLFEKYSALWQSWENQVGHRRIRPHKIATGTVKPTPQKQYHINPKAKPDIQIVINDLLKQGVLIQKESTMNTPVYPVPKPNGRWRMVLDYRAVNKVTPLIAVQNQHSYGILGSLFKGRYKTTIDLSNGFWAHPIVPEDYWITAFTWQGKQYCWTVLPQGFLNSPGLFTGDVVDLLQGIPNVEVYVDDVYISHDSEKEHLEYLDILFNRLKEAGYIISLKKSNIANSIVDFLGFQITNEGRGLTDTFKEKLENITAPTTLKQLQSILGLLNFARNFIPDFTELIAPLYALIPKSTKNYVPWQIEHSTTLETLITKLNGAEYLQGRKGDKTLIMKVNASYTTGYIRYYNEGEKKPISYVSIVFSKTELKFTELEKLLTTVHKGLLKALDLSMGQNIHVYSPIVSMQNIQKTPQTAKKALASRWLSWLSYLEDPRIRFFYDPQMPALKDLPAVDTGKDNKKHPSNFQHIFYTDGSAITSPTKEGHLNAGMGIVYFINKDGNLQKQQEWSISLGNHTAQFAEIAAFEFALKKCLPLGGNILVVTDSNYVAKAYNEELDVWASNGFVNNRKKPLKHISKWKSVADLKRLRPDVVVTHEPGHQKLDSSPHAYGNNLADQLATQASFKVHAGKRTADGSEFEKRTADGSEFESPKKKAKVE

SEQ ID NO: 6373 - protein, 2172 aa, synthetic construct
MPAAKRVKLDGGDKKYSIGLDIGTNSVGWAVITDEYKVPSKKFKVLGNTDRHSIKKNLIGALLFDSGETAEATRLKRTARRRYTRRKNRICYLQEIFSNEMAKVDDSFFHRLEESFLVEEDKKHERHPIFGNIVDEVAYHEKYPTIYHLRKKLVDSTDKADLRLIYLALAHMIKFRGHFLIEGDLNPDNSDVDKLFIQLVQTYNQLFEENPINASGVDAKAILSARLSKSRRLENLIAQLPGEKKNGLFGNLIALSLGLTPNFKSNFDLAEDAKLQLSKDTYDDDLDNLLAQIGDQYADLFLAAKNLSDAILLSDILRVNTEITKAPLSASMIKRYDEHHQDLTLLKALVRQQLPEKYKEIFFDQSKNGYAGYIDGGASQEEFYKFIKPILEKMDGTEELLVKLNREDLLRKQRTFDNGSIPHQIHLGELHAILRRQEDFYPFLKDNREKIEKILTFRIPYYVGPLARGNSRFAWMTRKSEETITPWNFEEVVDKGASAQSFIERMTNFDKNLPNEKVLPKHSLLYEYFTVYNELTKVKYVTEGMRKPAFLSGEQKKAIVDLLFKTNRKVTVKQLKEDYFKKIECFDSVEISGVEDRFNASLGTYHDLLKIIKDKDFLDNEENEDILEDIVLTLTLFEDREMIEERLKTYAHLFDDKVMKQLKRRRYTGWGRLSRKLINGIRDKQSGKTILDFLKSDGFANRNFMQLIHDDSLTFKEDIQKAQVSGQGDSLHEHIANLAGSPAIKKGILQTVKVVDELVKVMGRHKPENIVIEMARENQTTQKGQKNSRERMKRIEEGIKELGSQILKEHPVENTQLQNEKLYLYYLQNGRDMYVDQELDINRLSDYDVDHIVPQSFLKDDSIDNKVLTRSDKARGKSDNVPSEEVVKKMKNYWRQLLNAKLITQRKFDNLTKAERGGLSELDKAGFIKRQLVETRQITKHVAQILDSRMNTKYDENDKLIREVKVITLKSKLVSDFRKDFQFYKVREINNYHHAHDAYLNAVVGTALIKKYPKLESEFVYGDYKVYDVRKMIAKSEQEIGKATAKYFFYSNIMNFFKTEITLANGEIRKRPLIETNGETGEIVWDKGRDFATVRKVLSMPQVNIVKKTEVQTGGFSKESILPKRNSDKLIARKKDWDPKKYGGFDSPTVAYSVLVVAKVEKGKSKKLKSVKELLGITIMERSSFEKNPIDFLEAKGYKEVKKDLIIKLPKYSLFELENGRKRMLASAGELQKGNELALPSKYVNFLYLASHYEKLKGSPEDNEQKQLFVEQHKHYLDEIIEQISEFSKRVILADANLDKVLSAYNKHRDKPIREQAENIIHLFTLTNLGAPAAFKYFDTTIDRKRYTSTKEVLDATLIHQSITGLYETRIDLSQLGGDGGEAAAKEAAAKGGMDLLKPLTVERKGVKIKGYWNSQADITCVPKDLLQGEEPVRQQNVTTIHGTQEGDVYYVNLKIDGRRINTEVIGTTLDYAIITPGDVPWILKKPLELTIKLDLEEQQGTLLNNSILSKKGKEELKQLFEKYSALWQSWENQVGHRRIRPHKIATGTVKPTPQKQYHINPKAKPDIQIVINDLLKQGVLIQKESTMNTPVYPVPKPNGRWRMVLDYRAVNKVTPLIAVQNQHSYGILGSLFKGRYKTTIDLSNGFWAHPIVPEDYWITAFTWQGKQYCWTVLPQGFLNSPGLFNGDVVDLLQGIPNVEVYVDDVYISHDSEKEHLEYLDILFNRLKEAGYIISLKKSNIANSIVDFLGFQITNEGRGLTDTFKEKLENITAPTTLKQLQSILGLLNFARNFIPDFTELIAPLYALIPKSPKNYVPWQIEHSTTLETLITKLNGAEYLQGRKGDKTLIMKVNASYTTGYIRYYNEGEKKPISYVSIVFSKTELKFTELEKLLTTVHKGLLKALDLSMGQNIHVYSPIVSMQNIQKTPQTAKKALASRWLSWLSYLEDPRIRFFYDPQMPALKDLPAVDTGKDNKKHPSNFQHIFYTDGSAITSPTKEGHLNAGMGIVYFINKDGNLQKQQEWSISLGNHTAQFAEIAAFEFALKKCLPLGGNILVVTDSNYVAKAYNEELDVWASNGFVNNRKKPLKHISKWKSVADLKRLRPDVVVTHEPGHQKLDSSPHAYGNNLADQLATQASFKVHAGKRTADGSEFEKRTADGSEFESPKKKAKVE

SEQ ID NO: 6374 - protein, 2093 aa, synthetic construct
MPAAKRVKLDGGDKKYSIGLDIGTNSVGWAVITDEYKVPSKKFKVLGNTDRHSIKKNLIGALLFDSGETAEATRLKRTARRRYTRRKNRICYLQEIFSNEMAKVDDSFFHRLEESFLVEEDKKHERHPIFGNIVDEVAYHEKYPTIYHLRKKLVDSTDKADLRLIYLALAHMIKFRGHFLIEGDLNPDNSDVDKLFIQLVQTYNQLFEENPINASGVDAKAILSARLSKSRRLENLIAQLPGEKKNGLFGNLIALSLGLTPNFKSNFDLAEDAKLQLSKDTYDDDLDNLLAQIGDQYADLFLAAKNLSDAILLSDILRVNTEITKAPLSASMIKRYDEHHQDLTLLKALVRQQLPEKYKEIFFDQSKNGYAGYIDGGASQEEFYKFIKPILEKMDGTEELLVKLNREDLLRKQRTFDNGSIPHQIHLGELHAILRRQEDFYPFLKDNREKIEKILTFRIPYYVGPLARGNSRFAWMTRKSEETITPWNFEEVVDKGASAQSFIERMTNFDKNLPNEKVLPKHSLLYEYFTVYNELTKVKYVTEGMRKPAFLSGEQKKAIVDLLFKTNRKVTVKQLKEDYFKKIECFDSVEISGVEDRFNASLGTYHDLLKIIKDKDFLDNEENEDILEDIVLTLTLFEDREMIEERLKTYAHLFDDKVMKQLKRRRYTGWGRLSRKLINGIRDKQSGKTILDFLKSDGFANRNFMQLIHDDSLTFKEDIQKAQVSGQGDSLHEHIANLAGSPAIKKGILQTVKVVDELVKVMGRHKPENIVIEMARENQTTQKGQKNSRERMKRIEEGIKELGSQILKEHPVENTQLQNEKLYLYYLQNGRDMYVDQELDINRLSDYDVDHIVPQSFLKDDSIDNKVLTRSDKARGKSDNVPSEEVVKKMKNYWRQLLNAKLITQRKFDNLTKAERGGLSELDKAGFIKRQLVETRQITKHVAQILDSRMNTKYDENDKLIREVKVITLKSKLVSDFRKDFQFYKVREINNYHHAHDAYLNAVVGTALIKKYPKLESEFVYGDYKVYDVRKMIAKSEQEIGKATAKYFFYSNIMNFFKTEITLANGEIRKRPLIETNGETGEIVWDKGRDFATVRKVLSMPQVNIVKKTEVQTGGFSKESILPKRNSDKLIARKKDWDPKKYGGFDSPTVAYSVLVVAKVEKGKSKKLKSVKELLGITIMERSSFEKNPIDFLEAKGYKEVKKDLIIKLPKYSLFELENGRKRMLASAGELQKGNELALPSKYVNFLYLASHYEKLKGSPEDNEQKQLFVEQHKHYLDEIIEQISEFSKRVILADANLDKVLSAYNKHRDKPIREQAENIIHLFTLTNLGAPAAFKYFDTTIDRKRYTSTKEVLDATLIHQSITGLYETRIDLSQLGGDGGEAAAKEAAAKGGVLNLEEEYRLHEKPVPSSIDPSWLQLFPTVWAERAGMGLANQVPPVVVELRSGASPVAVRQYPMSKEAREGIRPHIQKFLDLGVLVPCRSPWNTPLLPVKKPGTNDYRPVQDLREINKRVQDIHPTVPNPYNLLSSLPPSYTWYSVLDLKDAFFCLRLHPNSQPLFAFEWKDPEKGNTGQLTWTRLPQGFKNSPTLFNEALHRDLAPFRALNPQVVLLQYVDDLLVAAPTYEDCKKGTQKLLQELSKLGYRVSAKKAQLCQREVTYLGYLLKEGKRWLTPARKATVMKIPVPTTPRQVREFLGKAGFCRLFIPGFASLAAPLYPLTKPSIPFIWTEEHQQAFDHIKKALLSAPALALPDLTKPFTLYIDERAGVARGVLTQTLGPWRRPVAYLSKKLDPVASGWPTCLKAVAAVALLLKDADKLTLGQNVTVIASHSLESIVRQPPDRWMTNARMTHYQSLLLNERVSFAPPAVLNPATLLPVESEATPVHRCSEILAEETGTRRDLEDQPLPGVPTWYTDGSSFITEGKRRAGAPIVDGKRTVWASSLPEGTSAQKAELVALTQALRLAEGKNINIYTDSRYAFATAHIHGAIYKQRGWLTSAGKDIKNKEEILALLEAIHLPRRVAIIHCPGHQRGSNPVATGNRRADEAAKQAALSTRVLAGTTKPAGKRTADGSEFEKRTADGSEFESPKKKAKVE

SEQ ID NO: 6375 - protein, 2126 aa, synthetic construct
MPAAKRVKLDGGDKKYSIGLDIGTNSVGWAVITDEYKVPSKKFKVLGNTDRHSIKKNLIGALLFDSGETAEATRLKRTARRRYTRRKNRICYLQEIFSNEMAKVDDSFFHRLEESFLVEEDKKHERHPIFGNIVDEVAYHEKYPTIYHLRKKLVDSTDKADLRLIYLALAHMIKFRGHFLIEGDLNPDNSDVDKLFIQLVQTYNQLFEENPINASGVDAKAILSARLSKSRRLENLIAQLPGEKKNGLFGNLIALSLGLTPNFKSNFDLAEDAKLQLSKDTYDDDLDNLLAQIGDQYADLFLAAKNLSDAILLSDILRVNTEITKAPLSASMIKRYDEHHQDLTLLKALVRQQLPEKYKEIFFDQSKNGYAGYIDGGASQEEFYKFIKPILEKMDGTEELLVKLNREDLLRKQRTFDNGSIPHQIHLGELHAILRRQEDFYPFLKDNREKIEKILTFRIPYYVGPLARGNSRFAWMTRKSEETITPWNFEEVVDKGASAQSFIERMTNFDKNLPNEKVLPKHSLLYEYFTVYNELTKVKYVTEGMRKPAFLSGEQKKAIVDLLFKTNRKVTVKQLKEDYFKKIECFDSVEISGVEDRFNASLGTYHDLLKIIKDKDFLDNEENEDILEDIVLTLTLFEDREMIEERLKTYAHLFDDKVMKQLKRRRYTGWGRLSRKLINGIRDKQSGKTILDFLKSDGFANRNFMQLIHDDSLTFKEDIQKAQVSGQGDSLHEHIANLAGSPAIKKGILQTVKVVDELVKVMGRHKPENIVIEMARENQTTQKGQKNSRERMKRIEEGIKELGSQILKEHPVENTQLQNEKLYLYYLQNGRDMYVDQELDINRLSDYDVDHIVPQSFLKDDSIDNKVLTRSDKARGKSDNVPSEEVVKKMKNYWRQLLNAKLITQRKFDNLTKAERGGLSELDKAGFIKRQLVETRQITKHVAQILDSRMNTKYDENDKLIREVKVITLKSKLVSDFRKDFQFYKVREINNYHHAHDAYLNAVVGTALIKKYPKLESEFVYGDYKVYDVRKMIAKSEQEIGKATAKYFFYSNIMNFFKTEITLANGEIRKRPLIETNGETGEIVWDKGRDFATVRKVLSMPQVNIVKKTEVQTGGFSKESILPKRNSDKLIARKKDWDPKKYGGFDSPTVAYSVLVVAKVEKGKSKKLKSVKELLGITIMERSSFEKNPIDFLEAKGYKEVKKDLIIKLPKYSLFELENGRKRMLASAGELQKGNELALPSKYVNFLYLASHYEKLKGSPEDNEQKQLFVEQHKHYLDEIIEQISEFSKRVILADANLDKVLSAYNKHRDKPIREQAENIIHLFTLTNLGAPAAFKYFDTTIDRKRYTSTKEVLDATLIHQSITGLYETRIDLSQLGGDGGEAAAKEAAAKGGLLGRDLLTKLKAQIQFSTEGPQVTWEDRPAMCLVLNLEEEYRLHEKPVPPSIDPSWLQLFPMVWAEKAGMGLANQVPPVVVELKSDASPVAVRQYPMSKEAREGIRPHIQRFLDLGILVPCQSPWNTPLLPVKKPGTNDYRPVQDLREVNKRVQDIHPTVPNPYNLLSSLPPSHTWYSVLDLKDAFFCLKLHPNSQPLFAFEWRDPEKGNTGQLTWTRLPQGFKNSPTLFNEALHRDLASFRALNPQVVMLQYVDDLLVAAPTYRDCKEGTRRLLQELSKLGYRVSAKKAQLCREEVTYLGYLLKGGKRWLTPARKATVMKIPTPTTPRQVREFLGTAGFCRLWIPGFASLAAPLYPLTRPKVPFTWTEAHQEAFGRIKEALLSAPALALPDLTKPFALYVDEKEGVARGVLTQTLGPWRRPVAYLSKKLDPVASGWPTCLKAIAAVALLLKDADKLTLGQNVLVIAPHNLESIVRQPPDRWMTNARMTHYQSLLLNERVSFAPPAILNPATLLPVESDDTPIHICSEILAEETGTRPDLRDQPLPGVPAWYTDGSSFIMDGRRQAGAAIVDNKRTVWASNLPEGTSAQKAELIALTQALRLAEGKSINIYTDSRYAFATAHVHGAIYKQRGWLTSAGKDIKNKEEILALLEAIHLPKRVAIIHCPGHQRGTDPVATGNRKADEAAKQAAQSTRILTETTKNAGKRTADGSEFEKRTADGSEFESPKKKAKVE

SEQ ID NO: 6376 - protein, 2126 aa, synthetic construct
MPAAKRVKLDGGDKKYSIGLDIGTNSVGWAVITDEYKVPSKKFKVLGNTDRHSIKKNLIGALLFDSGETAEATRLKRTARRRYTRRKNRICYLQEIFSNEMAKVDDSFFHRLEESFLVEEDKKHERHPIFGNIVDEVAYHEKYPTIYHLRKKLVDSTDKADLRLIYLALAHMIKFRGHFLIEGDLNPDNSDVDKLFIQLVQTYNQLFEENPINASGVDAKAILSARLSKSRRLENLIAQLPGEKKNGLFGNLIALSLGLTPNFKSNFDLAEDAKLQLSKDTYDDDLDNLLAQIGDQYADLFLAAKNLSDAILLSDILRVNTEITKAPLSASMIKRYDEHHQDLTLLKALVRQQLPEKYKEIFFDQSKNGYAGYIDGGASQEEFYKFIKPILEKMDGTEELLVKLNREDLLRKQRTFDNGSIPHQIHLGELHAILRRQEDFYPFLKDNREKIEKILTFRIPYYVGPLARGNSRFAWMTRKSEETITPWNFEEVVDKGASAQSFIERMTNFDKNLPNEKVLPKHSLLYEYFTVYNELTKVKYVTEGMRKPAFLSGEQKKAIVDLLFKTNRKVTVKQLKEDYFKKIECFDSVEISGVEDRFNASLGTYHDLLKIIKDKDFLDNEENEDILEDIVLTLTLFEDREMIEERLKTYAHLFDDKVMKQLKRRRYTGWGRLSRKLINGIRDKQSGKTILDFLKSDGFANRNFMQLIHDDSLTFKEDIQKAQVSGQGDSLHEHIANLAGSPAIKKGILQTVKVVDELVKVMGRHKPENIVIEMARENQTTQKGQKNSRERMKRIEEGIKELGSQILKEHPVENTQLQNEKLYLYYLQNGRDMYVDQELDINRLSDYDVDHIVPQSFLKDDSIDNKVLTRSDKARGKSDNVPSEEVVKKMKNYWRQLLNAKLITQRKFDNLTKAERGGLSELDKAGFIKRQLVETRQITKHVAQILDSRMNTKYDENDKLIREVKVITLKSKLVSDFRKDFQFYKVREINNYHHAHDAYLNAVVGTALIKKYPKLESEFVYGDYKVYDVRKMIAKSEQEIGKATAKYFFYSNIMNFFKTEITLANGEIRKRPLIETNGETGEIVWDKGRDFATVRKVLSMPQVNIVKKTEVQTGGFSKESILPKRNSDKLIARKKDWDPKKYGGFDSPTVAYSVLVVAKVEKGKSKKLKSVKELLGITIMERSSFEKNPIDFLEAKGYKEVKKDLIIKLPKYSLFELENGRKRMLASAGELQKGNELALPSKYVNFLYLASHYEKLKGSPEDNEQKQLFVEQHKHYLDEIIEQISEFSKRVILADANLDKVLSAYNKHRDKPIREQAENIIHLFTLTNLGAPAAFKYFDTTIDRKRYTSTKEVLDATLIHQSITGLYETRIDLSQLGGDGGEAAAKEAAAKGGLLGRDLLTKLKAQIQFSTEGPQVTWEDRPAMCLVLNLEEEYRLHEKPVPPSIDPSWLQLFPMVWAEKAGMGLANQVPPVVVELKSDASPVAVRQYPMSKEAREGIRPHIQRFLDLGILVPCQSPWNTPLLPVKKPGTNDYRPVQDLREVNKRVQDIHPTVPNPYNLLSSLPPSHTWYSVLDLKDAFFCLKLHPNSQPLFAFEWRDPEKGNTGQLTWTRLPQGFKNSPTLFNEALHRDLASFRALNPQVVMLQYVDDLLVAAPTYRDCKEGTRRLLQELSKLGYRVSAKKAQLCREEVTYLGYLLKGGKRWLTPARKATVMKIPTPTTPRQVREFLGKAGFCRLFIPGFASLAAPLYPLTRPKVPFTWTEAHQEAFGRIKEALLSAPALALPDLTKPFALYVDEKEGVARGVLTQTLGPWRRPVAYLSKKLDPVASGWPTCLKAIAAVALLLKDADKLTLGQNVLVIAPHNLESIVRQPPDRWMTNARMTHYQSLLLNERVSFAPPAILNPATLLPVESDDTPIHICSEILAEETGTRPDLRDQPLPGVPAWYTDGSSFIMDGRRQAGAAIVDNKRTVWASNLPEGTSAQKAELIALTQALRLAEGKSINIYTDSRYAFATAHVHGAIYKQRGWLTSAGKDIKNKEEILALLEAIHLPKRVAIIHCPGHQRGTDPVATGNRKADEAAKQAAQSTRILTETTKNAGKRTADGSEFEKRTADGSEFESPKKKAKVE

SEQ ID NO: 6377 - protein, 2095 aa, synthetic construct
MPAAKRVKLDGGDKKYSIGLDIGTNSVGWAVITDEYKVPSKKFKVLGNTDRHSIKKNLIGALLFDSGETAEATRLKRTARRRYTRRKNRICYLQEIFSNEMAKVDDSFFHRLEESFLVEEDKKHERHPIFGNIVDEVAYHEKYPTIYHLRKKLVDSTDKADLRLIYLALAHMIKFRGHFLIEGDLNPDNSDVDKLFIQLVQTYNQLFEENPINASGVDAKAILSARLSKSRRLENLIAQLPGEKKNGLFGNLIALSLGLTPNFKSNFDLAEDAKLQLSKDTYDDDLDNLLAQIGDQYADLFLAAKNLSDAILLSDILRVNTEITKAPLSASMIKRYDEHHQDLTLLKALVRQQLPEKYKEIFFDQSKNGYAGYIDGGASQEEFYKFIKPILEKMDGTEELLVKLNREDLLRKQRTFDNGSIPHQIHLGELHAILRRQEDFYPFLKDNREKIEKILTFRIPYYVGPLARGNSRFAWMTRKSEETITPWNFEEVVDKGASAQSFIERMTNFDKNLPNEKVLPKHSLLYEYFTVYNELTKVKYVTEGMRKPAFLSGEQKKAIVDLLFKTNRKVTVKQLKEDYFKKIECFDSVEISGVEDRFNASLGTYHDLLKIIKDKDFLDNEENEDILEDIVLTLTLFEDREMIEERLKTYAHLFDDKVMKQLKRRRYTGWGRLSRKLINGIRDKQSGKTILDFLKSDGFANRNFMQLIHDDSLTFKEDIQKAQVSGQGDSLHEHIANLAGSPAIKKGILQTVKVVDELVKVMGRHKPENIVIEMARENQTTQKGQKNSRERMKRIEEGIKELGSQILKEHPVENTQLQNEKLYLYYLQNGRDMYVDQELDINRLSDYDVDHIVPQSFLKDDSIDNKVLTRSDKARGKSDNVPSEEVVKKMKNYWRQLLNAKLITQRKFDNLTKAERGGLSELDKAGFIKRQLVETRQITKHVAQILDSRMNTKYDENDKLIREVKVITLKSKLVSDFRKDFQFYKVREINNYHHAHDAYLNAVVGTALIKKYPKLESEFVYGDYKVYDVRKMIAKSEQEIGKATAKYFFYSNIMNFFKTEITLANGEIRKRPLIETNGETGEIVWDKGRDFATVRKVLSMPQVNIVKKTEVQTGGFSKESILPKRNSDKLIARKKDWDPKKYGGFDSPTVAYSVLVVAKVEKGKSKKLKSVKELLGITIMERSSFEKNPIDFLEAKGYKEVKKDLIIKLPKYSLFELENGRKRMLASAGELQKGNELALPSKYVNFLYLASHYEKLKGSPEDNEQKQLFVEQHKHYLDEIIEQISEFSKRVILADANLDKVLSAYNKHRDKPIREQAENIIHLFTLTNLGAPAAFKYFDTTIDRKRYTSTKEVLDATLIHQSITGLYETRIDLSQLGGDGGEAAAKEAAAKGGTLNLEDEYRLYETSAEPEVSPGSTWLSDFPQAWAETGGMGLAVRQAPLIIPLKATSTPVSIKQYPMSQEAKLGIKPHIQRLLDQGILVPCQSPWNTPLLPVKKPGTNDYRPVQDLREVNKRVEDIHPTVPNPYNLLSGLPPSHRWYTVLDLKDAFFCLRLHPTSQPLFAFEWRDPGMGISGQLTWTRLPQGFKNSPTLFNEALHRDLADFRIQHPDLILLQYVDDILLAATSELDCQQGTRALLLTLGNLGYRASAKKAQLCQKQVKYLGYLLKEGQRWLTEARKETVMGQPTPKTPRQLREFLGKAGFCRLFIPGFAEMAAPLYPLTKPGTLFNWGPDQQKAYQEIKQALLTAPALGLPDLTKPFELFVDEKQGYAKGVLTQKLGPWRRPVAYLSKKLDPVAAGWPPCLRMVAAIAVLRKDAGKLTMGQPLVILAPHAVEALVKQPPDRWLSNARMTHYQAMLLDTDRVQFGPVVALNPATLLPLPEEGAPHDCLEILAETHGTRPDLTDQPIPDADHTWYTDGSSFLQEGQRKAGAAVTTETEVIWARALPAGTSAQRAELIALTQALKMAEGKRLNVYTDSRYAFATAHIHGEIYRRRGWLTSEGREIKNKSEILALLKALFLPKRLSIIHCLGHQKGDSAEARGNRLADQAAREAAIKTPPDTSTLLAGKRTADGSEFEKRTADGSEFESPKKKAKVE

SEQ ID NO: 6378 - protein, 2095 aa, synthetic construct
MPAAKRVKLDGGDKKYSIGLDIGTNSVGWAVITDEYKVPSKKFKVLGNTDRHSIKKNLIGALLFDSGETAEATRLKRTARRRYTRRKNRICYLQEIFSNEMAKVDDSFFHRLEESFLVEEDKKHERHPIFGNIVDEVAYHEKYPTIYHLRKKLVDSTDKADLRLIYLALAHMIKFRGHFLIEGDLNPDNSDVDKLFIQLVQTYNQLFEENPINASGVDAKAILSARLSKSRRLENLIAQLPGEKKNGLFGNLIALSLGLTPNFKSNFDLAEDAKLQLSKDTYDDDLDNLLAQIGDQYADLFLAAKNLSDAILLSDILRVNTEITKAPLSASMIKRYDEHHQDLTLLKALVRQQLPEKYKEIFFDQSKNGYAGYIDGGASQEEFYKFIKPILEKMDGTEELLVKLNREDLLRKQRTFDNGSIPHQIHLGELHAILRRQEDFYPFLKDNREKIEKILTFRIPYYVGPLARGNSRFAWMTRKSEETITPWNFEEVVDKGASAQSFIERMTNFDKNLPNEKVLPKHSLLYEYFTVYNELTKVKYVTEGMRKPAFLSGEQKKAIVDLLFKTNRKVTVKQLKEDYFKKIECFDSVEISGVEDRFNASLGTYHDLLKIIKDKDFLDNEENEDILEDIVLTLTLFEDREMIEERLKTYAHLFDDKVMKQLKRRRYTGWGRLSRKLINGIRDKQSGKTILDFLKSDGFANRNFMQLIHDDSLTFKEDIQKAQVSGQGDSLHEHIANLAGSPAIKKGILQTVKVVDELVKVMGRHKPENIVIEMARENQTTQKGQKNSRERMKRIEEGIKELGSQILKEHPVENTQLQNEKLYLYYLQNGRDMYVDQELDINRLSDYDVDHIVPQSFLKDDSIDNKVLTRSDKARGKSDNVPSEEVVKKMKNYWRQLLNAKLITQRKFDNLTKAERGGLSELDKAGFIKRQLVETRQITKHVAQILDSRMNTKYDENDKLIREVKVITLKSKLVSDFRKDFQFYKVREINNYHHAHDAYLNAVVGTALIKKYPKLESEFVYGDYKVYDVRKMIAKSEQEIGKATAKYFFYSNIMNFFKTEITLANGEIRKRPLIETNGETGEIVWDKGRDFATVRKVLSMPQVNIVKKTEVQTGGFSKESILPKRNSDKLIARKKDWDPKKYGGFDSPTVAYSVLVVAKVEKGKSKKLKSVKELLGITIMERSSFEKNPIDFLEAKGYKEVKKDLIIKLPKYSLFELENGRKRMLASAGELQKGNELALPSKYVNFLYLASHYEKLKGSPEDNEQKQLFVEQHKHYLDEIIEQISEFSKRVILADANLDKVLSAYNKHRDKPIREQAENIIHLFTLTNLGAPAAFKYFDTTIDRKRYTSTKEVLDATLIHQSITGLYETRIDLSQLGGDGGEAAAKEAAAKGGTLGIEDEYRLHETSTEPDVSLGSTWLSDFPQAWAETGGMGLAVRQAPLIIPLKATSTPVSIQQYPMSHEARLGIKPHIQRLLDQGILVPCQSPWNTPLLPVKKPGTNDYRPVQDLREVNKRVEDIHPTVPNPYNLLSGLPPSHQWYTVLDLKDAFFCLRLHPTSQPLFAFEWRDPGMGISGQLTWTRLPQGFKNSPTLFNEALHRDLADFRIQHPDLILLQYVDDILLAATSELDCQQGTRALLQTLGDLGYRASAKKAQICQKQVKYLGYLLREGQRWLTEARKETVMGQPVPKTPRQLREFLGTAGFCRLWIPGFAEMAAPLYPLTKPGTLFSWGPDQQKAYQEIKQALLTAPALGLPDLTKPFELFVDEKQGYAKGVLTQKLGPWRRPVAYLSKKLDPVAAGWPPCLRMVAAIAVLTKDAGKLTMGQPLVILAPHAVEALVKQPPDRWLSNARMTHYQAMLLDTDRVQFGPVVALNPATLLPLPEEGAPHDCLEILAETHGTRPDLTDQPIPDADHTWYTDGSSFLQEGQRKAGAAVTTETEVIWAGALPAGTSAQRAELIALTQALKMAEGKRLNVYTDSRYAFATAHIHGEIYRRRGWLTSEGREIKNKSEILALLKALFLPKRLSIIHCLGHQKGDSAEARGNRLADQAAREAAIKTPPDTSTLLAGKRTADGSEFEKRTADGSEFESPKKKAKVE

SEQ ID NO: 6379 - protein, 2087 aa, synthetic construct
MPAAKRVKLDGGDKKYSIGLDIGTNSVGWAVITDEYKVPSKKFKVLGNTDRHSIKKNLIGALLFDSGETAEATRLKRTARRRYTRRKNRICYLQEIFSNEMAKVDDSFFHRLEESFLVEEDKKHERHPIFGNIVDEVAYHEKYPTIYHLRKKLVDSTDKADLRLIYLALAHMIKFRGHFLIEGDLNPDNSDVDKLFIQLVQTYNQLFEENPINASGVDAKAILSARLSKSRRLENLIAQLPGEKKNGLFGNLIALSLGLTPNFKSNFDLAEDAKLQLSKDTYDDDLDNLLAQIGDQYADLFLAAKNLSDAILLSDILRVNTEITKAPLSASMIKRYDEHHQDLTLLKALVRQQLPEKYKEIFFDQSKNGYAGYIDGGASQEEFYKFIKPILEKMDGTEELLVKLNREDLLRKQRTFDNGSIPHQIHLGELHAILRRQEDFYPFLKDNREKIEKILTFRIPYYVGPLARGNSRFAWMTRKSEETITPWNFEEVVDKGASAQSFIERMTNFDKNLPNEKVLPKHSLLYEYFTVYNELTKVKYVTEGMRKPAFLSGEQKKAIVDLLFKTNRKVTVKQLKEDYFKKIECFDSVEISGVEDRFNASLGTYHDLLKIIKDKDFLDNEENEDILEDIVLTLTLFEDREMIEERLKTYAHLFDDKVMKQLKRRRYTGWGRLSRKLINGIRDKQSGKTILDFLKSDGFANRNFMQLIHDDSLTFKEDIQKAQVSGQGDSLHEHIANLAGSPAIKKGILQTVKVVDELVKVMGRHKPENIVIEMARENQTTQKGQKNSRERMKRIEEGIKELGSQILKEHPVENTQLQNEKLYLYYLQNGRDMYVDQELDINRLSDYDVDHIVPQSFLKDDSIDNKVLTRSDKARGKSDNVPSEEVVKKMKNYWRQLLNAKLITQRKFDNLTKAERGGLSELDKAGFIKRQLVETRQITKHVAQILDSRMNTKYDENDKLIREVKVITLKSKLVSDFRKDFQFYKVREINNYHHAHDAYLNAVVGTALIKKYPKLESEFVYGDYKVYDVRKMIAKSEQEIGKATAKYFFYSNIMNFFKTEITLANGEIRKRPLIETNGETGEIVWDKGRDFATVRKVLSMPQVNIVKKTEVQTGGFSKESILPKRNSDKLIARKKDWDPKKYGGFDSPTVAYSVLVVAKVEKGKSKKLKSVKELLGITIMERSSFEKNPIDFLEAKGYKEVKKDLIIKLPKYSLFELENGRKRMLASAGELQKGNELALPSKYVNFLYLASHYEKLKGSPEDNEQKQLFVEQHKHYLDEIIEQISEFSKRVILADANLDKVLSAYNKHRDKPIREQAENIIHLFTLTNLGAPAAFKYFDTTIDRKRYTSTKEVLDATLIHQSITGLYETRIDLSQLGGDGGEAAAKEAAAKGGLDDEYRLYSPLVKPDQNIQFWLEQFPQAWAETAGMGLAKQVPPQVIQLKASATPVSVRQYPLSKEAQEGIRPHVQRLIQQGILVPVQSPWNTPLLPVRKPGTNDYRPVQDLREVNKRVQDIHPTVPNPYNLLCALPPQRSWYTVLDLKDAFFCLRLHPTSQPLFAFEWRDPGTGRTGQLTWTRLPQGFKNSPTIFNEALHRDLANFRIQHPQVTLLQYVDDLLLAGATKQDCLEGTKALLLELSDLGYRASAKKAQICRREVTYLGYSLRDGQRWLTEARKKTVVQIPAPTTAKQVREFLGKAGFCRLFIPGFATLAAPLYPLTKPKGEFSWAPEHQKAFDAIKKALLSAPALALPDVTKPFTLYVDERKGVARGVLTQTLGPWRRPVAYLSKKLDPVASGWPVCLKAIAAVAILVKDADKLTLGQNITVIAPHALENIVRQPPDRWMTNARMTHYQSLLLTERVTFAPPAALNPATLLPEETDEPVTHDCHQLLIEETGVRKDLTDIPLTGEVLTWFTDGSSYVVEGKRMAGAAVVDGTRTIWASSLPEGTSAQKAELMALTQALRLAEGKSINIYTDSRYAFATAHVHGAIYKQRGWLTSAGREIKNKEEILSLLEALHLPKRLAIIHCPGHQKAKDPISRGNQMADRVAKQAAQGVNLLPAGKRTADGSEFEKRTADGSEFESPKKKAKVE

SEQ ID NO: 6380 - protein, 2089 aa, synthetic construct
MPAAKRVKLDGGDKKYSIGLDIGTNSVGWAVITDEYKVPSKKFKVLGNTDRHSIKKNLIGALLFDSGETAEATRLKRTARRRYTRRKNRICYLQEIFSNEMAKVDDSFFHRLEESFLVEEDKKHERHPIFGNIVDEVAYHEKYPTIYHLRKKLVDSTDKADLRLIYLALAHMIKFRGHFLIEGDLNPDNSDVDKLFIQLVQTYNQLFEENPINASGVDAKAILSARLSKSRRLENLIAQLPGEKKNGLFGNLIALSLGLTPNFKSNFDLAEDAKLQLSKDTYDDDLDNLLAQIGDQYADLFLAAKNLSDAILLSDILRVNTEITKAPLSASMIKRYDEHHQDLTLLKALVRQQLPEKYKEIFFDQSKNGYAGYIDGGASQEEFYKFIKPILEKMDGTEELLVKLNREDLLRKQRTFDNGSIPHQIHLGELHAILRRQEDFYPFLKDNREKIEKILTFRIPYYVGPLARGNSRFAWMTRKSEETITPWNFEEVVDKGASAQSFIERMTNFDKNLPNEKVLPKHSLLYEYFTVYNELTKVKYVTEGMRKPAFLSGEQKKAIVDLLFKTNRKVTVKQLKEDYFKKIECFDSVEISGVEDRFNASLGTYHDLLKIIKDKDFLDNEENEDILEDIVLTLTLFEDREMIEERLKTYAHLFDDKVMKQLKRRRYTGWGRLSRKLINGIRDKQSGKTILDFLKSDGFANRNFMQLIHDDSLTFKEDIQKAQVSGQGDSLHEHIANLAGSPAIKKGILQTVKVVDELVKVMGRHKPENIVIEMARENQTTQKGQKNSRERMKRIEEGIKELGSQILKEHPVENTQLQNEKLYLYYLQNGRDMYVDQELDINRLSDYDVDHIVPQSFLKDDSIDNKVLTRSDKARGKSDNVPSEEVVKKMKNYWRQLLNAKLITQRKFDNLTKAERGGLSELDKAGFIKRQLVETRQITKHVAQILDSRMNTKYDENDKLIREVKVITLKSKLVSDFRKDFQFYKVREINNYHHAHDAYLNAVVGTALIKKYPKLESEFVYGDYKVYDVRKMIAKSEQEIGKATAKYFFYSNIMNFFKTEITLANGEIRKRPLIETNGETGEIVWDKGRDFATVRKVLSMPQVNIVKKTEVQTGGFSKESILPKRNSDKLIARKKDWDPKKYGGFDSPTVAYSVLVVAKVEKGKSKKLKSVKELLGITIMERSSFEKNPIDFLEAKGYKEVKKDLIIKLPKYSLFELENGRKRMLASAGELQKGNELALPSKYVNFLYLASHYEKLKGSPEDNEQKQLFVEQHKHYLDEIIEQISEFSKRVILADANLDKVLSAYNKHRDKPIREQAENIIHLFTLTNLGAPAAFKYFDTTIDRKRYTSTKEVLDATLIHQSITGLYETRIDLSQLGGDGGEAAAKEAAAKGGTLQLDDEYRLYSPLVKPDQNIQFWLEQFPQAWAETAGMGLAKQVPPQVIQLKASATPVSVRQYPLSKEAQEGIRPHVQRLIQQGILVPVQSPWNTPLLPVRKPGTNDYRPVQDLREVNKRVQDIHPTVPNPYNLLCALPPQRSWYTVLDLKDAFFCLRLHPTSQPLFAFEWRDPGTGRTGQLTWTRLPQGFKNSPTIFDEALHRDLANFRIQHPQVTLLQYVDDLLLAGATKQDCLEGTKALLLELSDLGYRASAKKAQICRREVTYLGYSLRDGQRWLTEARKKTVVQIPAPTTAKQVREFLGTAGFCRLWIPGFATLAAPLYPLTKEKGEFSWAPEHQKAFDAIKKALLSAPALALPDVTKPFTLYVDERKGVARGVLTQTLGPWRRPVAYLSKKLDPVASGWPVCLKAIAAVAILVKDADKLTLGQNITVIAPHALENIVRQPPDRWMTNARMTHYQSLLLTERVTFAPPAALNPATLLPEETDEPVTHDCHQLLIEETGVRKDLTDIPLTGEVLTWFTDGSSYVVEGKRMAGAAVVDGTRTIWASSLPEGTSAQKAELMALTQALRLAEGKSINIYTDSRYAFATAHVHGAIYKQRGLLTSAGREIKNKEEILSLLEALHLPKRLAIIHCPGHQKAKDPISRGNQMADRVAKQAAQGVNLLAGKRTADGSEFEKRTADGSEFESPKKKAKVE

SEQ ID NO: 6381 - protein, 2087 aa, synthetic construct; identical to SEQ ID NO: 6379

SEQ ID NO: 6382 - protein, 2175 aa, synthetic construct
MPAAKRVKLDGGDKKYSIGLDIGTNSVGWAVITDEYKVPSKKFKVLGNTDRHSIKKNLIGALLFDSGETAEATRLKRTARRRYTRRKNRICYLQEIFSNEMAKVDDSFFHRLEESFLVEEDKKHERHPIFGNIVDEVAYHEKYPTIYHLRKKLVDSTDKADLRLIYLALAHMIKFRGHFLIEGDLNPDNSDVDKLFIQLVQTYNQLFEENPINASGVDAKAILSARLSKSRRLENLIAQLPGEKKNGLFGNLIALSLGLTPNFKSNFDLAEDAKLQLSKDTYDDDLDNLLAQIGDQYADLFLAAKNLSDAILLSDILRVNTEITKAPLSASMIKRYDEHHQDLTLLKALVRQQLPEKYKEIFFDQSKNGYAGYIDGGASQEEFYKFIKPILEKMDGTEELLVKLNREDLLRKQRTFDNGSIPHQIHLGELHAILRRQEDFYPFLKDNREKIEKILTFRIPYYVGPLARGNSRFAWMTRKSEETITPWNFEEVVDKGASAQSFIERMTNFDKNLPNEKVLPKHSLLYEYFTVYNELTKVKYVTEGMRKPAFLSGEQKKAIVDLLFKTNRKVTVKQLKEDYFKKIECFDSVEISGVEDRFNASLGTYHDLLKIIKDKDFLDNEENEDILEDIVLTLTLFEDREMIEERLKTYAHLFDDKVMKQLKRRRYTGWGRLSRKLINGIRDKQSGKTILDFLKSDGFANRNFMQLIHDDSLTFKEDIQKAQVSGQGDSLHEHIANLAGSPAIKKGILQTVKVVDELVKVMGRHKPENIVIEMARENQTTQKGQKNSRERMKRIEEGIKELGSQILKEHPVENTQLQNEKLYLYYLQNGRDMYVDQELDINRLSDYDVDHIVPQSFLKDDSIDNKVLTRSDKARGKSDNVPSEEVVKKMKNYWRQLLNAKLITQRKFDNLTKAERGGLSELDKAGFIKRQLVETRQITKHVAQILDSRMNTKYDENDKLIREVKVITLKSKLVSDFRKDFQFYKVREINNYHHAHDAYLNAVVGTALIKKYPKLESEFVYGDYKVYDVRKMIAKSEQEIGKATAKYFFYSNIMNFFKTEITLANGEIRKRPLIETNGETGEIVWDKGRDFATVRKVLSMPQVNIVKKTEVQTGGFSKESILPKRNSDKLIARKKDWDPKKYGGFDSPTVAYSVLVVAKVEKGKSKKLKSVKELLGITIMERSSFEKNPIDFLEAKGYKEVKKDLIIKLPKYSLFELENGRKRMLASAGELQKGNELALPSKYVNFLYLASHYEKLKGSPEDNEQKQLFVEQHKHYLDEIIEQISEFSKRVILADANLDKVLSAYNKHRDKPIREQAENIIHLFTLTNLGAPAAFKYFDTTIDRKRYTSTKEVLDATLIHQSITGLYETRIDLSQLGGDGGEAAAKEAAAKGGMDPLQLLQPLEAEIKGTKLKAHWNSGATITCVPQAFLEEEVPIKNIWIKTIHGEKEQPVYYLTFKIQGRKVEAEVISSPYDYILVSPSDIPWLMKKPLQLTTLVPLQEYEERLLKQTMLTGSYKEKLQSLFLKYDALWQHWENQVGHRRIKPHHIATGTVNPRPQKQYPINPKAKASIQTVINDLLKQGVLIQQNSIMNTPVYPVPKPDGKWRMVLDYREVNKTIPLIAAQNQHSAGILSSIFRGKYKTTLDLSNGFWAHSITPESYWLTAFTWLGQQYCWTRLPQGFLNSPALFNADVVDLLKEVPNVQVYVDDIYISHDDPREHLEQLEKVFSLLLNAGYVVSLKKSEIAQHEVEFLGFNITKEGRGLTETFKQKLLNITPPRDLKQLQSILGKLNFARNFIPNFSELVKPLYNIIATAPGKYITWTTDNSQQLQNIISMLNSAENLEERNPEVRLIMKVNTSPSAGYIRFYNEFAKRPIMYLNYVYTKAEVKFTNTEKLLTTIHKGLIKALDLGMGQEILVYSPIVSMTKIQKTPLPERKALPIRWITWMSYLEDPRIQFHYDKTLPELQQVPTVTDDIIAKIKHPSEFSMVFYTDGSAIKHPNVNKSHNAGMGIAQVQFKPEFTVINTWSIPLGDHTAQLAEVAAVEFACKKALKIDGPVLIVTDSFYVAESVNKELPYWQSNGFFNNKKKPLKHVSKWKSIADCIQLKPDIIIIHEKGHQPTASTFHTEGNNLADKLATQGSYVVNAGKRTADGSEFEKRTADGSEFESPKKKAKVE

SEQ ID NO: 6383 - protein, 2095 aa, synthetic construct
MPAAKRVKLDGGDKKYSIGLDIGTNSVGWAVITDEYKVPSKKFKVLGNTDRHSIKKNLIGALLFDSGETAEATRLKRTARRRYTRRKNRICYLQEIFSNEMAKVDDSFFHRLEESFLVEEDKKHERHPIFGNIVDEVAYHEKYPTIYHLRKKLVDSTDKADLRLIYLALAHMIKFRGHFLIEGDLNPDNSDVDKLFIQLVQTYNQLFEENPINASGVDAKAILSARLSKSRRLENLIAQLPGEKKNGLFGNLIALSLGLTPNFKSNFDLAEDAKLQLSKDTYDDDLDNLLAQIGDQYADLFLAAKNLSDAILLSDILRVNTEITKAPLSASMIKRYDEHHQDLTLLKALVRQQLPEKYKEIFFDQSKNGYAGYIDGGASQEEFYKFIKPILEKMDGTEELLVKLNREDLLRKQRTFDNGSIPHQIHLGELHAILRRQEDFYPFLKDNREKIEKILTFRIPYYVGPLARGNSRFAWMTRKSEETITPWNFEEVVDKGASAQSFIERMTNFDKNLPNEKVLPKHSLLYEYFTVYNELTKVKYVTEGMRKPAFLSGEQKKAIVDLLFKTNRKVTVKQLKEDYFKKIECFDSVEISGVEDRFNASLGTYHDLLKIIKDKDFLDNEENEDILEDIVLTLTLFEDREMIEERLKTYAHLFDDKVMKQLKRRRYTGWGRLSRKLINGIRDKQSGKTILDFLKSDGFANRNFMQLIHDDSLTFKEDIQKAQVSGQGDSLHEHIANLAGSPAIKKGILQTVKVVDELVKVMGRHKPENIVIEMARENQTTQKGQKNSRERMKRIEEGIKELGSQILKEHPVENTQLQNEKLYLYYLQNGRDMYVDQELDINRLSDYDVDHIVPQSFLKDDSIDNKVLTRSDKARGKSDNVPSEEVVKKMKNYWRQLLNAKLITQRKFDNLTKAERGGLSELDKAGFIKRQLVETRQITKHVAQILDSRMNTKYDENDKLIREVKVITLKSKLVSDFRKDFQFYKVREINNYHHAHDAYLNAVVGTALIKKYPKLESEFVYGDYKVYDVRKMIAKSEQEIGKATAKYFFYSNIMNFFKTEITLANGEIRKRPLIETNGETGEIVWDKGRDFATVRKVLSMPQVNIVKKTEVQTGGFSKESILPKRNSDKLIARKKDWDPKKYGGFDSPTVAYSVLVVAKVEKGKSKKLKSVKELLGITIMERSSFEKNPIDFLEAKGYKEVKKDLIIKLPKYSLFELENGRKRMLASAGELQKGNELALPSKYVNFLYLASHYEKLKGSPEDNEQKQLFVEQHKHYLDEIIEQISEFSKRVILADANLDKVLSAYNKHRDKPIREQAENIIHLFTLTNLGAPAAFKYFDTTIDRKRYTSTKEVLDATLIHQSITGLYETRIDLSQLGGDGGEAAAKEAAAKGGTLNIEDEYRLHETSKEPDVPLGSTWLSDFPQAWAETGGMGLAVRQAPLIIPLKATSTPVSIKQYPMSQEARLGIKPHIQRLLDQGILVPCQSPWNTPLLPVKKPGTNDYRPVQDLREVNKRVEDIHPTVPNPYNLLSGLPPSHQWYTVLDLKDAFFCLRLHPTSQPLFAFEWRDPEMGISGQLTWTRLPQGFKNSPTLFNEALHRDLADFRIQHPDLILLQYVDDLLLAATSEQDCQRGTRALLQTLGNLGYRASAKKAQICQKQVKYLGYLLKEGQRWLTEARKETVMGQPTPKTPRQLREFLGKAGFCRLFIPGFAEMAAPLYPLTKPGTLFNWGPDQQKAYQEIKQALLTAPALGLPDLTKPFELFVDEKQGYAKGVLTQKLGPWRRPVAYLSKKLDPVAAGWPPCLRMVAAIAVLTKDAGKLTMGQPLVILAPHAVEALVKQPPDRWLSNARMTHYQAMLLDTDRVQFGPVVALNPATLLPLPEKEAPHDCLEILAETHGTRPDLTDQPIPDADYTWYTDGSSFLQEGQRRAGAAVTTETEVIWARALPAGTSAQRAELIALTQALKMAEGKKLNVYTDSRYAFATAHVHGEIYRRRGWLTSEGREIKNKNEILALLKALFLPKRLSIIHCPGHQKGNSAEARGNRMADQAAREAAMKAVLETSTLLAGKRTADGSEFEKRTADGSEFESPKKKAKVE

SEQ ID NO: 6384 - protein, 2102 aa, synthetic construct
MPAAKRVKLDGGDKKYSIGLDIGTNSVGWAVITDEYKVPSKKFKVLGNTDRHSIKKNLIGALLFDSGETAEATRLKRTARRRYTRRKNRICYLQEIFSNEMAKVDDSFFHRLEESFLVEEDKKHERHPIFGNIVDEVAYHEKYPTIYHLRKKLVDSTDKADLRLIYLALAHMIKFRGHFLIEGDLNPDNSDVDKLFIQLVQTYNQLFEENPINASGVDAKAILSARLSKSRRLENLIAQLPGEKKNGLFGNLIALSLGLTPNFKSNFDLAEDAKLQLSKDTYDDDLDNLLAQIGDQYADLFLAAKNLSDAILLSDILRVNTEITKAPLSASMIKRYDEHHQDLTLLKALVRQQLPEKYKEIFFDQSKNGYAGYIDGGASQEEFYKFIKPILEKMDGTEELLVKLNREDLLRKQRTFDNGSIPHQIHLGELHAILRRQEDFYPFLKDNREKIEKILTFRIPYYVGPLARGNSRFAWMTRKSEETITPWNFEEVVDKGASAQSFIERMTNFDKNLPNEKVLPKHSLLYEYFTVYNELTKVKYVTEGMRKPAFLSGEQKKAIVDLLFKTNRKVTVKQLKEDYFKKIECFDSVEISGVEDRFNASLGTYHDLLKIIKDKDFLDNEENEDILEDIVLTLTLFEDREMIEERLKTYAHLFDDKVMKQLKRRRYTGWGRLSRKLINGIRDKQSGKTILDFLKSDGFANRNFMQLIHDDSLTFKEDIQKAQVSGQGDSLHEHIANLAGSPAIKKGILQTVKVVDELVKVMGRHKPENIVIEMARENQTTQKGQKNSRERMKRIEEGIKELGSQILKEHPVENTQLQNEKLYLYYLQNGRDMYVDQELDINRLSDYDVDHIVPQSFLKDDSIDNKVLTRSDKARGKSDNVPSEEVVKKMKNYWRQLLNAKLITQRKFDNLTKAERGGLSELDKAGFIKRQLVETRQITKHVAQILDSRMNTKYDENDKLIREVKVITLKSKLVSDFRKDFQFYKVREINNYHHAHDAYLNAVVGTALIKKYPKLESEFVYGDYKVYDVRKMIAKSEQEIGKATAKYFFYSNIMNFFKTEITLANGEIRKRPLIETNGETGEIVWDKGRDFATVRKVLSMPQVNIVKKTEVQTGGFSKESILPKRNSDKLIARKKDWDPKKYGGFDSPTVAYSVLVVAKVEKGKSKKLKSVKELLGITIMERSSFEKNPIDFLEAKGYKEVKKDLIIKLPKYSLFELENGRKRMLASAGELQKGNELALPSKYVNFLYLASHYEKLKGSPEDNEQKQLFVEQHKHYLDEIIEQISEFSKRVILADANLDKVLSAYNKHRDKPIREQAENIIHLFTLTNLGAPAAFKYFDTTIDRKRYTSTKEVLDATLIHQSITGLYETRIDLSQLGGDGGEAAAKEAAAKEAAAKGGTAPLEEEYRLFLEAPIQNVTLLEQWKREIPKVWAEINPPGLASTQAPIHVQLLSTALPVRVRQYPITLEAKRSLRETIRKFRAAGILRPVHSPWNTPLLPVRKSGTSEYRMVQDLREVNKRVETIHPTVPNPYTLLSLLPPDRIWYSVLDLKDAFFCIPLAPESQLIFAFEWADAEEGESGQLTWTRLPQGFKNSPTLFNEALNRDLQGFRLDHPSVSLLQYVDDLLIAADTQAACLSATRDLLMTLAELGYRVSGKKAQLCQEEVTYLGFKIHKGSRSLSNSRTQAILQIPVPKTKRQVREFLGTIGYCRLWIPGFAELAQPLYAATRPGNDPLVWGEKEEEAFQSLKLALTQPPALALPSLDKPFQLFVEETSGAAKGVLTQALGPWKRPVAYLSKRLDPVAAGWPRCLRAIAAAALLTREASKLTFGQDIEITSSHNLESLLRSPPDKWLTNARITQYQVLLLDPPRVRFKQTAALNPATLLPETDDTLPIHHCLDTLDSLTSTRPDLTDQPLAQAEATLFTDGSSYIRDGKRYAGAAVVTLDSVIWAEPLPIGTSAQKAELIALTKALEWSKDKSVNIYTDSRYAFATLHVHGMIYRERGWLTAGGKAIKNAPEILALLTAVWLPKRVAVMHCKGHQKDDAPTSTGNRRADEVAREVAIRPLSTQATISAGKRTADGSEFEKRTADGSEFESPKKKAKVE

SEQ ID NO: 6385 - protein, 2102 aa, synthetic construct
MPAAKRVKLDGGDKKYSIGLDIGTNSVGWAVITDEYKVPSKKFKVLGNTDRHSIKKNLIGALLFDSGETAEATRLKRTARRRYTRRKNRICYLQEIFSNEMAKVDDSFFHRLEESFLVEEDKKHERHPIFGNIVDEVAYHEKYPTIYHLRKKLVDSTDKADLRLIYLALAHMIKFRGHFLIEGDLNPDNSDVDKLFIQLVQTYNQLFEENPINASGVDAKAILSARLSKSRRLENLIAQLPGEKKNGLFGNLIALSLGLTPNFKSNFDLAEDAKLQLSKDTYDDDLDNLLAQIGDQYADLFLAAKNLSDAILLSDILRVNTEITKAPLSASMIKRYDEHHQDLTLLKALVRQQLPEKYKEIFFDQSKNGYAGYIDGGASQEEFYKFIKPILEKMDGTEELLVKLNREDLLRKQRTFDNGSIPHQIHLGELHAILRRQEDFYPFLKDNREKIEKILTFRIPYYVGPLARGNSRFAWMTRKSEETITPWNFEEVVDKGASAQSFIERMTNFDKNLPNEKVLPKHSLLYEYFTVYNELTKVKYVTEGMRKPAFLSGEQKKAIVDLLFKTNRKVTVKQLKEDYFKKIECFDSVEISGVEDRFNASLGTYHDLLKIIKDKDFLDNEENEDILEDIVLTLTLFEDREMIEERLKTYAHLFDDKVMKQLKRRRYTGWGRLSRKLINGIRDKQSGKTILDFLKSDGFANRNFMQLIHDDSLTFKEDIQKAQVSGQGDSLHEHIANLAGSPAIKKGILQTVKVVDELVKVMGRHKPENIVIEMARENQTTQKGQKNSRERMKRIEEGIKELGSQILKEHPVENTQLQNEKLYLYYLQNGRDMYVDQELDINRLSDYDVDHIVPQSFLKDDSIDNKVLTRSDKARGKSDNVPSEEVVKKMKNYWRQLLNAKLITQRKFDNLTKAERGGLSELDKAGFIKRQLVETRQITKHVAQILDSRMNTKYDENDKLIREVKVITLKSKLVSDFRKDFQFYKVREINNYHHAHDAYLNAVVGTALIKKYPKLESEFVYGDYKVYDVRKMIAKSEQEIGKATAKYFFYSNIMNFFKTEITLANGEIRKRPLIETNGETGEIVWDKGRDFATVRKVLSMPQVNIVKKTEVQTGGFSKESILPKRNSDKLIARKKDWDPKKYGGFDSPTVAYSVLVVAKVEKGKSKKLKSVKELLGITIMERSSFEKNPIDFLEAKGYKEVKKDLIIKLPKYSLFELENGRKRMLASAGELQKGNELALPSKYVNFLYLASHYEKLKGSPEDNEQKQLFVEQHKHYLDEIIEQISEFSKRVILADANLDKVLSAYNKHRDKPIREQAENIIHLFTLTNLGAPAAFKYFDTTIDRKRYTSTKEVLDATLIHQSITGLYETRIDLSQLGGDGGEAAAKEAAAKEAAAKGGTAPLEEEYRLFLEAPIQNVTLLEQWKREIPKVWAEINPPGLASTQAPIHVQLLSTALPVRVRQYPITLEAKRSLRETIRKFRAAGILRPVHSPWNTPLLPVRKSGTSEYRMVQDLREVNKRVETIHPTVPNPYTLLSLLPPDRIWYSVLDLKDAFFCIPLAPESQLIFAFEWADAEEGESGQLTWTRLPQGFKNSPTLFNEALNRDLQGFRLDHPSVSLLQYVDDLLIAADTQAACLSATRDLLMTLAELGYRVSGKKAQLCQEEVTYLGFKIHKGSRSLSNSRTQAILQIPVPKTKRQVREFLGKIGYCRLFIPGFAELAQPLYAATRPGNDPLVWGEKEEEAFQSLKLALTQPPALALPSLDKPFQLFVEETSGAAKGVLTQALGPWKRPVAYLSKRLDPVAAGWPRCLRAIAAAALLTREASKLTFGQDIEITSSHNLESLLRSPPDKWLTNARITQYQVLLLDPPRVRFKQTAALNPATLLPETDDTLPIHHCLDTLDSLTSTRPDLTDQPLAQAEATLFTDGSSYIRDGKRYAGAAVVTLDSVIWAEPLPIGTSAQKAELIALTKALEWSKDKSVNIYTDSRYAFATLHVHGMIYRERGWLTAGGKAIKNAPEILALLTAVWLPKRVAVMHCKGHQKDDAPTSTGNRRADEVAREVAIRPLSTQATISAGKRTADGSEFEKRTADGSEFESPKKKAKVE

SEQ ID NO: 6386 - protein, 2106 aa, synthetic construct
MPAAKRVKLDGGDKKYSIGLDIGTNSVGWAVITDEYKVPSKKFKVLGNTDRHSIKKNLIGALLFDSGETAEATRLKRTARRRYTRRKNRICYLQEIFSNEMAKVDDSFFHRLEESFLVEEDKKHERHPIFGNIVDEVAYHEKYPTIYHLRKKLVDSTDKADLRLIYLALAHMIKFRGHFLIEGDLNPDNSDVDKLFIQLVQTYNQLFEENPINASGVDAKAILSARLSKSRRLENLIAQLPGEKKNGLFGNLIALSLGLTPNFKSNFDLAEDAKLQLSKDTYDDDLDNLLAQIGDQYADLFLAAKNLSDAILLSDILRVNTEITKAPLSASMIKRYDEHHQDLTLLKALVRQQLPEKYKEIFFDQSKNGYAGYIDGGASQEEFYKFIKPILEKMDGTEELLVKLNREDLLRKQRTFDNGSIPHQIHLGELHAILRRQEDFYPFLKDNREKIEKILTFRIPYYVGPLARGNSRFAWMTRKSEETITPWNFEEVVDKGASAQSFIERMTNFDKNLPNEKVLPKHSLLYEYFTVYNELTKVKYVTEGMRKPAFLSGEQKKAIVDLLFKTNRKVTVKQLKEDYFKKIECFDSVEISGVEDRFNASLGTYHDLLKIIKDKDFLDNEENEDILEDIVLTLTLFEDREMIEERLKTYAHLFDDKVMKQLKRRRYTGWGRLSRKLINGIRDKQSGKTILDFLKSDGFANRNFMQLIHDDSLTFKEDIQKAQVSGQGDSLHEHIANLAGSPAIKKGILQTVKVVDELVKVMGRHKPENIVIEMARENQTTQKGQKNSRERMKRIEEGIKELGSQILKEHPVENTQLQNEKLYLYYLQNGRDMYVDQELDINRLSDYDVDHIVPQSFLKDDSIDNKVLTRSDKARGKSDNVPSEEVVKKMKNYWRQLLNAKLITQRKFDNLTKAERGGLSELDKAGFIKRQLVETRQITKHVAQILDSRMNTKYDENDKLIREVKVITLKSKLVSDFRKDFQFYKVREINNYHHAHDAYLNAVVGTALIKKYPKLESEFVYGDYKVYDVRKMIAKSEQEIGKATAKYFFYSNIMNFFKTEITLANGEIRKRPLIETNGETGEIVWDKGRDFATVRKVLSMPQVNIVKKTEVQTGGFSKESILPKRNSDKLIARKKDWDPKKYGGFDSPTVAYSVLVVAKVEKGKSKKLKSVKELLGITIMERSSFEKNPIDFLEAKGYKEVKKDLIIKLPKYSLFELENGRKRMLASAGELQKGNELALPSKYVNFLYLASHYEKLKGSPEDNEQKQLFVEQHKHYLDEIIEQISEFSKRVILADANLDKVLSAYNKHRDKPIREQAENIIHLFTLTNLGAPAAFKYFDTTIDRKRYTSTKEVLDATLIHQSITGLYETRIDLSQLGGDGGEAAAKEAAAKEAAAKGGTVSLQDEHRLFDIPVTTSLPDVWLQDFPQAWAETGGLGRAKCQAPIIIDLKPTAVPVSIKQYPMSLEAHMGIRQHIIKFLELGVLRPCRSPWNTPLLPVKKPGTQDYRPVQDLREINKRTVDIHPTVPNPYNLLSTLKPDYSWYTVLDLKDAFFCLPLAPQSQELFAFEWKDPERGISGQLTWTRLPQGFKNSPTLFNEALHRDLTDFRTQHPEVTLLQYVDDLLLAAPTKKACTQGTRHLLQELGEKGYRASAKKAQICQTKVTYLGYILSEGKRWLTPGRIETVARIPPPRNPREVREFLGTAGFCRLWIPGFAELAAPLYALTKPSTPFTWQTEHQLAFEALKKALLSAPALGLPDTSKPFTLFLDERQGIAKGVLTQKLGPWKRPVAYLSKKLDPVAAGWPPCLRIMAATAMLVKDSAKLTLGQPLTVITPHTLEAIVRQPPDRWITNARLTHYQALLLDTDRVQFGPPVTLNPATLLPVPENQPSPHDCRQVLAETHGTREDLKDQELPDADHTWYTDGSSYLDSGTRRAGAAVVDGHNTIWAQSLPPGTSAQKAELIALTKALELSKGKKANIYTDSRYAFATAHTHGSIYERRGWLTSEGKEIKNKAEIIALLKALFLPQEVAIIHCPGHQKGQDPVAVGNRQADRVARQAAMAEVLTLATEPDNTSHITAGKRTADGSEFEKRTADGSEFESPKKKAKVE

SEQ ID NO: 6387 - protein, 2091 aa, synthetic construct
MPAAKRVKLDGGDKKYSIGLDIGTNSVGWAVITDEYKVPSKKFKVLGNTDRHSIKKNLIGALLFDSGETAEATRLKRTARRRYTRRKNRICYLQEIFSNEMAKVDDSFFHRLEESFLVEEDKKHERHPIFGNIVDEVAYHEKYPTIYHLRKKLVDSTDKADLRLIYLALAHMIKFRGHFLIEGDLNPDNSDVDKLFIQLVQTYNQLFEENPINASGVDAKAILSARLSKSRRLENLIAQLPGEKKNGLFGNLIALSLGLTPNFKSNFDLAEDAKLQLSKDTYDDDLDNLLAQIGDQYADLFLAAKNLSDAILLSDILRVNTEITKAPLSASMIKRYDEHHQDLTLLKALVRQQLPEKYKEIFFDQSKNGYAGYIDGGASQEEFYKFIKPILEKMDGTEELLVKLNREDLLRKQRTFDNGSIPHQIHLGELHAILRRQEDFYPFLKDNREKIEKILTFRIPYYVGPLARGNSRFAWMTRKSEETITPWNFEEVVDKGASAQSFIERMTNFDKNLPNEKVLPKHSLLYEYFTVYNELTKVKYVTEGMRKPAFLSGEQKKAIVDLLFKTNRKVTVKQLKEDYFKKIECFDSVEISGVEDRFNASLGTYHDLLKIIKDKDFLDNEENEDILEDIVLTLTLFEDREMIEERLKTYAHLFDDKVMKQLKRRRYTGWGRLSRKLINGIRDKQSGKTILDFLKSDGFANRNFMQLIHDDSLTFKEDIQKAQVSGQGDSLHEHIANLAGSPAIKKGILQTVKVVDELVKVMGRHKPENIVIEMARENQTTQKGQKNSRERMKRIEEGIKELGSQILKEHPVENTQLQNEKLYLYYLQNGRDMYVDQELDINRLSDYDVDHIVPQSFLKDDSIDNKVLTRSDKARGKSDNVPSEEVVKKMKNYWRQLLNAKLITQRKFDNLTKAERGGLSELDKAGFIKRQLVETRQITKHVAQILDSRMNTKYDENDKLIREVKVITLKSKLVSDFRKDFQFYKVREINNYHHAHDAYLNAVVGTALIKKYPKLESEFVYGDYKVYDVRKMIAKSEQEIGKATAKYFFYSNIMNFFKTEITLANGEIRKRPLIETNGETGEIVWDKGRDFATVRKVLSMPQVNIVKKTEVQTGGFSKESILPKRNSDKLIARKKDWDPKKYGGFDSPTVAYSVLVVAKVEKGKSKKLKSVKELLGITIMERSSFEKNPIDFLEAKGYKEVKKDLIIKLPKYSLFELENGRKRMLASAGELQKGNELALPSKYVNFLYLASHYEKLKGSPEDNEQKQLFVEQHKHYLDEIIEQISEFSKRVILADANLDKVLSAYNKHRDKPIREQAENIIHLFTLTNLGAPAAFKYFDTTIDRKRYTSTKEVLDATLIHQSITGLYETRIDLSQLGGDGGEAAAKEAAAKEAAAKGGVPWILKKPLELTIKLDLEEQQGTLLNNSILSKKGKEELKQLFEKYSALWQSWENQVGHRRIRPHKIATGTVKPTPQKQYHINPKAKPDIQIVINDLLKQGVLIQKESTMNTPVYPVPKPNGRWRMVLDYRAVNKVTPLIAVQNQHSYGILGSLFKGRYKTTIDLSNGFWAHPIVPEDYWITAFTWQGKQYCWTVLPQGFLNSPGLFTGDVVDLLQGIPNVEVYVDDVYISHDSEKEHLEYLDILFNRLKEAGYIISLKKSNIANSIVDFLGFQITNEGRGLTDTFKEKLENITAPTTLKQLQSILGLLNFARNFIPDFTELIAPLYALIPKSTKNYVPWQIEHSTTLETLITKLNGAEYLQGRKGDKTLIMKVNASYTTGYIRYYNEGEKKPISYVSIVFSKTELKFTELEKLLTTVHKGLLKALDLSMGQNIHVYSPIVSMQNIQKTPQTAKKALASRWLSWLSYLEDPRIRFFYDPQMPALKDLPAVDTGKDNKKHPSNFQHIFYTDGSAITSPTKEGHLNAGMGIVYFINKDGNLQKQQEWSISLGNHTAQFAEIAAFEFALKKCLPLGGNILVVTDSNYVAKAYNEELDVWASNGFVNNRKKPLKHISKWKSVADLKRLRPDVVVTHEPGHQKLDSSPHAYGNNLADQLATQASFKVHAGKRTADGSEFEKRTADGSEFESPKKKAKVE

SEQ ID NO: 6388 - protein, 2091 aa, synthetic construct
MPAAKRVKLDGGDKKYSIGLDIGTNSVGWAVITDEYKVPSKKFKVLGNTDRHSIKKNLIGALLFDSGETAEATRLKRTARRRYTRRKNRICYLQEIFSNEMAKVDDSFFHRLEESFLVEEDKKHERHPIFGNIVDEVAYHEKYPTIYHLRKKLVDSTDKADLRLIYLALAHMIKFRGHFLIEGDLNPDNSDVDKLFIQLVQTYNQLFEENPINASGVDAKAILSARLSKSRRLENLIAQLPGEKKNGLFGNLIALSLGLTPNFKSNFDLAEDAKLQLSKDTYDDDLDNLLAQIGDQYADLFLAAKNLSDAILLSDILRVNTEITKAPLSASMIKRYDEHHQDLTLLKALVRQQLPEKYKEIFFDQSKNGYAGYIDGGASQEEFYKFIKPILEKMDGTEELLVKLNREDLLRKQRTFDNGSIPHQIHLGELHAILRRQEDFYPFLKDNREKIEKILTFRIPYYVGPLARGNSRFAWMTRKSEETITPWNFEEVVDKGASAQSFIERMTNFDKNLPNEKVLPKHSLLYEYFTVYNELTKVKYVTEGMRKPAFLSGEQKKAIVDLLFKTNRKVTVKQLKEDYFKKIECFDSVEISGVEDRFNASLGTYHDLLKIIKDKDFLDNEENEDILEDIVLTLTLFEDREMIEERLKTYAHLFDDKVMKQLKRRRYTGWGRLSRKLINGIRDKQSGKTILDFLKSDGFANRNFMQLIHDDSLTFKEDIQKAQVSGQGDSLHEHIANLAGSPAIKKGILQTVKVVDELVKVMGRHKPENIVIEMARENQTTQKGQKNSRERMKRIEEGIKELGSQILKEHPVENTQLQNEKLYLYYLQNGRDMYVDQELDINRLSDYDVDHIVPQSFLKDDSIDNKVLTRSDKARGKSDNVPSEEVVKKMKNYWRQLLNAKLITQRKFDNLTKAERGGLSELDKAGFIKRQLVETRQITKHVAQILDSRMNTKYDENDKLIREVKVITLKSKLVSDFRKDFQFYKVREINNYHHAHDAYLNAVVGTALIKKYPKLESEFVYGDYKVYDVRKMIAKSEQEIGKATAKYFFYSNIMNFFKTEITLANGEIRKRPLIETNGETGEIVWDKGRDFATVRKVLSMPQVNIVKKTEVQTGGFSKESILPKRNSDKLIARKKDWDPKKYGGFDSPTVAYSVLVVAKVEKGKSKKLKSVKELLGITIMERSSFEKNPIDFLEAKGYKEVKKDLIIKLPKYSLFELENGRKRMLASAGELQKGNELALPSKYVNFLYLASHYEKLKGSPEDNEQKQLFVEQHKHYLDEIIEQISEFSKRVILADANLDKVLSAYNKHRDKPIREQAENIIHLFTLTNLGAPAAFKYFDTTIDRKRYTSTKEVLDATLIHQSITGLYETRIDLSQLGGDGGEAAAKEAAAKEAAAKGGVPWLTQQPLQLTILVPLQEYQEKILSKTALPEDQKQQLKTLFVKYDNLWQHWENQVGHRKIRPHNIATGDYPPRPQKQYPINPKAKPSIQIVIDDLLKQGVLTPQNSTMNTPVYPVPKPDGRWRMVLDYREVNKTIPLTAAQNQHSAGILATIVRQKYKTTLDLANGFWAHPITPESYWLTAFTWQGKQYCWTRLPQGFLNSPALFNADVVDLLKEIPNVQVYVDDIYLSHDDPKEHVQQLEKVFQILLQAGYVVSLKKSEIGQKTVEFLGFNITKEGRGLTDTFKTKLLNITPPKDLKQLQSILGLLNFARNFIPNFAELVQPLYNLIAPAKGKYIEWSEENTKQLNMVIEALNTASNLEERLPEQRLVIKVNTSPSAGYVRYYNETGKKPIMYLNYVFSKAELKFSMLEKLLTTMHKALIKAMDLAMGQEILVYSPIVSMTKIQKTPLPERKALPIRWITWMTYLEDPRIQFHYDKTLPELKHIPDVYTSSQSPVKHPSQYEGVFYTDGSAIKSPDPTKSNNAGMGIVHATYKPEYQVLNQWSIPLGNHTAQMAEIAAVEFACKKALKIPGPVLVITDSFYVAESANKELPYWKSNGFVNNKKKPLKHISKWKSIAECLSMKPDITIQHEKGISLQIPVFILKGNALADKLATQGSYVVNAGKRTADGSEFEKRTADGSEFESPKKKAKVE

SEQ ID NO: 6389 - protein, 2091 aa, synthetic construct
MPAAKRVKLDGGDKKYSIGLDIGTNSVGWAVITDEYKVPSKKFKVLGNTDRHSIKKNLIGALLFDSGETAEATRLKRTARRRYTRRKNRICYLQEIFSNEMAKVDDSFFHRLEESFLVEEDKKHERHPIFGNIVDEVAYHEKYPTIYHLRKKLVDSTDKADLRLIYLALAHMIKFRGHFLIEGDLNPDNSDVDKLFIQLVQTYNQLFEENPINASGVDAKAILSARLSKSRRLENLIAQLPGEKKNGLFGNLIALSLGLTPNFKSNFDLAEDAKLQLSKDTYDDDLDNLLAQIGDQYADLFLAAKNLSDAILLSDILRVNTEITKAPLSASMIKRYDEHHQDLTLLKALVRQQLPEKYKEIFFDQSKNGYAGYIDGGASQEEFYKFIKPILEKMDGTEELLVKLNREDLLRKQRTFDNGSIPHQIHLGELHAILRRQEDFYPFLKDNREKIEKILTFRIPYYVGPLARGNSRFAWMTRKSEETITPWNFEEVVDKGASAQSFIERMTNFDKNLPNEKVLPKHSLLYEYFTVYNELTKVKYVTEGMRKPAFLSGEQKKAIVDLLFKTNRKVTVKQLKEDYFKKIECFDSVEISGVEDRFNASLGTYHDLLKIIKDKDFLDNEENEDILEDIVLTLTLFEDREMIEERLKTYAHLFDDKVMKQLKRRRYTGWGRLSRKLINGIRDKQSGKTILDFLKSDGFANRNFMQLIHDDSLTFKEDIQKAQVSGQGDSLHEHIANLAGSPAIKKGILQTVKVVDELVKVMGRHKPENIVIEMARENQTTQKGQKNSRERMKRIEEGIKELGSQILKEHPVENTQLQNEKLYLYYLQNGRDMYVDQELDINRLSDYDVDHIVPQSFLKDDSIDNKVLTRSDKARGKSDNVPSEEVVKKMKNYWRQLLNAKLITQRKFDNLTKAERGGLSELDKAGFIKRQLVETRQITKHVAQILDSRMNTKYDENDKLIREVKVITLKSKLVSDFRKDFQFYKVREINNYHHAHDAYLNAVVGTALIKKYPKLESEFVYGDYKVYDVRKMIAKSEQEIGKATAKYFFYSNIMNFFKTEITLANGEIRKRPLIETNGETGEIVWDKGRDFATVRKVLSMPQVNIVKKTEVQTGGFSKESILPKRNSDKLIARKKDWDPKKYGGFDSPTVAYSVLVVAKVEKGKSKKLKSVKELLGITIMERSSFEKNPIDFLEAKGYKEVKKDLIIKLPKYSLFELENGRKRMLASAGELQKGNELALPSKYVNFLYLASHYEKLKGSPEDNEQKQLFVEQHKHYLDEIIEQISEFSKRVILADANLDKVLSAYNKHRDKPIREQAENIIHLFTLTNLGAPAAFKYFDTTIDRKRYTSTKEVLDATLIHQSITGLYETRIDLSQLGGDGGEAAAKEAAAKEAAAKGGVPWLTQQPLQLTILVPLQEYQEKILSKTALPEDQKQQLKTLFVKYDNLWQHWENQVGHRKIRPHNIATGDYPPRPQKQYPINPKAKPSIQIVIDDLLKQGVLTPQNSTMNTPVYPVPKPDGRWRMVLDYREVNKTIPLTAAQNQHSAGILATIVRQKYKTTLDLANGFWAHPITPESYWLTAFTWQGKQYCWTRLPQGFLNSPALFNADVVDLLKEIPNVQVYVDDIYLSHDDPKEHVQQLEKVFQILLQAGYVVSLKKSEIGQKTVEFLGFNITKEGRGLTDTFKTKLLNITPPKDLKQLQSILGKLNFARNFIPNFAELVQPLYNLIAPAKGKYIEWSEENTKQLNMVIEALNTASNLEERLPEQRLVIKVNTSPSAGYVRYYNETGKKPIMYLNYVFSKAELKFSMLEKLLTTMHKALIKAMDLAMGQEILVYSPIVSMTKIQKTPLPERKALPIRWITWMTYLEDPRIQFHYDKTLPELKHIPDVYTSSQSPVKHPSQYEGVFYTDGSAIKSPDPTKSNNAGMGIVHATYKPEYQVLNQWSIPLGNHTAQMAEIAAVEFACKKALKIPGPVLVITDSFYVAESANKELPYWKSNGFVNNKKKPLKHISKWKSIAECLSMKPDITIQHEKGISLQIPVFILKGNALADKLATQGSYVVNAGKRTADGSEFEKRTADGSEFESPKKKAKVE

SEQ ID NO: 6390 - protein, 2222 aa, synthetic construct
MPAAKRVKLDGGDKKYSIGLDIGTNSVGWAVITDEYKVPSKKFKVLGNTDRHSIKKNLIGALLFDSGETAEATRLKRTARRRYTRRKNRICYLQEIFSNEMAKVDDSFFHRLEESFLVEEDKKHERHPIFGNIVDEVAYHEKYPTIYHLRKKLVDSTDKADLRLIYLALAHMIKFRGHFLIEGDLNPDNSDVDKLFIQLVQTYNQLFEENPINASGVDAKAILSARLSKSRRLENLIAQLPGEKKNGLFGNLIALSLGLTPNFKSNFDLAEDAKLQLSKDTYDDDLDNLLAQIGDQYADLFLAAKNLSDAILLSDILRVNTEITKAPLSASMIKRYDEHHQDLTLLKALVRQQLPEKYKEIFFDQSKNGYAGYIDGGASQEEFYKFIKPILEKMDGTEELLVKLNREDLLRKQRTFDNGSIPHQIHLGELHAILRRQEDFYPFLKDNREKIEKILTFRIPYYVGPLARGNSRFAWMTRKSEETITPWNFEEVVDKGASAQSFIERMTNFDKNLPNEKVLPKHSLLYEYFTVYNELTKVKYVTEGMRKPAFLSGEQKKAIVDLLFKTNRKVTVKQLKEDYFKKIECFDSVEISGVEDRFNASLGTYHDLLKIIKDKDFLDNEENEDILEDIVLTLTLFEDREMIEERLKTYAHLFDDKVMKQLKRRRYTGWGRLSRKLINGIRDKQSGKTILDFLKSDGFANRNFMQLIHDDSLTFKEDIQKAQVSGQGDSLHEHIANLAGSPAIKKGILQTVKVVDELVKVMGRHKPENIVIEMARENQTTQKGQKNSRERMKRIEEGIKELGSQILKEHPVENTQLQNEKLYLYYLQNGRDMYVDQELDINRLSDYDVDHIVPQSFLKDDSIDNKVLTRSDKARGKSDNVPSEEVVKKMKNYWRQLLNAKLITQRKFDNLTKAERGGLSELDKAGFIKRQLVETRQITKHVAQILDSRMNTKYDENDKLIREVKVITLKSKLVSDFRKDFQFYKVREINNYHHAHDAYLNAVVGTALIKKYPKLESEFVYGDYKVYDVRKMIAKSEQEIGKATAKYFFYSNIMNFFKTEITLANGEIRKRPLIETNGETGEIVWDKGRDFATVRKVLSMPQVNIVKKTEVQTGGFSKESILPKRNSDKLIARKKDWDPKKYGGFDSPTVAYSVLVVAKVEKGKSKKLKSVKELLGITIMERSSFEKNPIDFLEAKGYKEVKKDLIIKLPKYSLFELENGRKRMLASAGELQKGNELALPSKYVNFLYLASHYEKLKGSPEDNEQKQLFVEQHKHYLDEIIEQISEFSKRVILADANLDKVLSAYNKHRDKPIREQAENIIHLFTLTNLGAPAAFKYFDTTIDRKRYTSTKEVLDATLIHQSITGLYETRIDLSQLGGDGGEAAAKEAAAKEAAAKGGTLGDQGSRGSDPLPEPRVTLTVEGIPTEFLVNTGAEHSVLTKPMGKMGSKRTVVAGATGSKVYPWTTKRLLKIGQKQVTHSFLVIPECPAPLLGRDLLTKLKAQIQFSTEGPQVTWEDRPAMCLVLNLEEEYRLHEKPVPPSIDPSWLQLFPMVWAEKAGMGLANQVPPVVVELKSDASPVAVRQYPMSKEAREGIRPHIQRFLDLGILVPCQSPWNTPLLPVKKPGTNDYRPVQDLREVNKRVQDIHPTVPNPYNLLSSLPPSHTWYSVLDLKDAFFCLKLHPNSQPLFAFEWRDPEKGNTGQLTWTRLPQGFKNSPTLFDEALHRDLASFRALNPQVVMLQYVDDLLVAAPTYRDCKEGTRRLLQELSKLGYRVSAKKAQLCREEVTYLGYLLKGGKRWLTPARKATVMKIPTPTTPRQVREFLGTAGFCRLWIPGFASLAAPLYPLTREKVPFTWTEAHQEAFGRIKEALLSAPALALPDLTKPFALYVDEKEGVARGVLTQTLGPWRRPVAYLSKKLDPVASGWPTCLKAIAAVALLLKDADKLTLGQNVLVIAPHNLESIVRQPPDRWMTNARMTHYQSLLLNERVSFAPPAILNPATLLPVESDDTPIHICSEILAEETGTRPDLRDQPLPGVPAWYTDGSSFIMDGRRQAGAAIVDNKRTVWASNLPEGTSAQKAELIALTQALRLAEGKSINIYTDSRYAFATAHVHGAIYKQRGLLTSAGKDIKNKEEILALLEAIHLPKRVAIIHCPGHQRGTDPVATGNRKADEAAKQAAQSTRILTETTKNAGKRTADGSEFEKRTADGSEFESPKKKAKVE

SEQ ID NO: 6391 - protein, 2131 aa, synthetic construct
MPAAKRVKLDGGDKKYSIGLDIGTNSVGWAVITDEYKVPSKKFKVLGNTDRHSIKKNLIGALLFDSGETAEATRLKRTARRRYTRRKNRICYLQEIFSNEMAKVDDSFFHRLEESFLVEEDKKHERHPIFGNIVDEVAYHEKYPTIYHLRKKLVDSTDKADLRLIYLALAHMIKFRGHFLIEGDLNPDNSDVDKLFIQLVQTYNQLFEENPINASGVDAKAILSARLSKSRRLENLIAQLPGEKKNGLFGNLIALSLGLTPNFKSNFDLAEDAKLQLSKDTYDDDLDNLLAQIGDQYADLFLAAKNLSDAILLSDILRVNTEITKAPLSASMIKRYDEHHQDLTLLKALVRQQLPEKYKEIFFDQSKNGYAGYIDGGASQEEFYKFIKPILEKMDGTEELLVKLNREDLLRKQRTFDNGSIPHQIHLGELHAILRRQEDFYPFLKDNREKIEKILTFRIPYYVGPLARGNSRFAWMTRKSEETITPWNFEEVVDKGASAQSFIERMTNFDKNLPNEKVLPKHSLLYEYFTVYNELTKVKYVTEGMRKPAFLSGEQKKAIVDLLFKTNRKVTVKQLKEDYFKKIECFDSVEISGVEDRFNASLGTYHDLLKIIKDKDFLDNEENEDILEDIVLTLTLFEDREMIEERLKTYAHLFDDKVMKQLKRRRYTGWGRLSRKLINGIRDKQSGKTILDFLKSDGFANRNFMQLIHDDSLTFKEDIQKAQVSGQGDSLHEHIANLAGSPAIKKGILQTVKVVDELVKVMGRHKPENIVIEMARENQTTQKGQKNSRERMKRIEEGIKELGSQILKEHPVENTQLQNEKLYLYYLQNGRDMYVDQELDINRLSDYDVDHIVPQSFLKDDSIDNKVLTRSDKARGKSDNVPSEEVVKKMKNYWRQLLNAKLITQRKFDNLTKAERGGLSELDKAGFIKRQLVETRQITKHVAQILDSRMNTKYDENDKLIREVKVITLKSKLVSDFRKDFQFYKVREINNYHHAHDAYLNAVVGTALIKKYPKLESEFVYGDYKVYDVRKMIAKSEQEIGKATAKYFFYSNIMNFFKTEITLANGEIRKRPLIETNGETGEIVWDKGRDFATVRKVLSMPQVNIVKKTEVQTGGFSKESILPKRNSDKLIARKKDWDPKKYGGFDSPTVAYSVLVVAKVEKGKSKKLKSVKELLGITIMERSSFEKNPIDFLEAKGYKEVKKDLIIKLPKYSLFELENGRKRMLASAGELQKGNELALPSKYVNFLYLASHYEKLKGSPEDNEQKQLFVEQHKHYLDEIIEQISEFSKRVILADANLDKVLSAYNKHRDKPIREQAENIIHLFTLTNLGAPAAFKYFDTTIDRKRYTSTKEVLDATLIHQSITGLYETRIDLSQLGGDGGEAAAKEAAAKEAAAKGGLLGRDLLTKLKAQIQFSTEGPQVTWEDRPAMCLVLNLEEEYRLHEKPVPPSIDPSWLQLFPMVWAEKAGMGLANQVPPVVVELKSDASPVAVRQYPMSKEAREGIRPHIQRFLDLGILVPCQSPWNTPLLPVKKPGTNDYRPVQDLREVNKRVQDIHPTVPNPYNLLSSLPPSHTWYSVLDLKDAFFCLKLHPNSQPLFAFEWRDPEKGNTGQLTWTRLPQGFKNSPTLFNEALHRDLASFRALNPQVVMLQYVDDLLVAAPTYRDCKEGTRRLLQELSKLGYRVSAKKAQLCREEVTYLGYLLKGGKRWLTPARKATVMKIPTPTTPRQVREFLGKAGFCRLFIPGFASLAAPLYPLTRPKVPFTWTEAHQEAFGRIKEALLSAPALALPDLTKPFALYVDEKEGVARGVLTQTLGPWRRPVAYLSKKLDPVASGWPTCLKAIAAVALLLKDADKLTLGQNVLVIAPHNLESIVRQPPDRWMTNARMTHYQSLLLNERVSFAPPAILNPATLLPVESDDTPIHICSEILAEETGTRPDLRDQPLPGVPAWYTDGSSFIMDGRRQAGAAIVDNKRTVWASNLPEGTSAQKAELIALTQALRLAEGKSINIYTDSRYAFATAHVHGAIYKQRGWLTSAGKDIKNKEEILALLEAIHLPKRVAIIHCPGHQRGTDPVATGNRKADEAAKQAAQSTRILTETTKNAGKRTADGSEFEKRTADGSEFESPKKKAKVE

SEQ ID NO: 6392 - protein, 2222 aa, synthetic construct
MPAAKRVKLDGGDKKYSIGLDIGTNSVGWAVITDEYKVPSKKFKVLGNTDRHSIKKNLIGALLFDSGETAEATRLKRTARRRYTRRKNRICYLQEIFSNEMAKVDDSFFHRLEESFLVEEDKKHERHPIFGNIVDEVAYHEKYPTIYHLRKKLVDSTDKADLRLIYLALAHMIKFRGHFLIEGDLNPDNSDVDKLFIQLVQTYNQLFEENPINASGVDAKAILSARLSKSRRLENLIAQLPGEKKNGLFGNLIALSLGLTPNFKSNFDLAEDAKLQLSKDTYDDDLDNLLAQIGDQYADLFLAAKNLSDAILLSDILRVNTEITKAPLSASMIKRYDEHHQDLTLLKALVRQQLPEKYKEIFFDQSKNGYAGYIDGGASQEEFYKFIKPILEKMDGTEELLVKLNREDLLRKQRTFDNGSIPHQIHLGELHAILRRQEDFYPFLKDNREKIEKILTFRIPYYVGPLARGNSRFAWMTRKSEETITPWNFEEVVDKGASAQSFIERMTNFDKNLPNEKVLPKHSLLYEYFTVYNELTKVKYVTEGMRKPAFLSGEQKKAIVDLLFKTNRKVTVKQLKEDYFKKIECFDSVEISGVEDRFNASLGTYHDLLKIIKDKDFLDNEENEDILEDIVLTLTLFEDREMIEERLKTYAHLFDDKVMKQLKRRRYTGWGRLSRKLINGIRDKQSGKTILDFLKSDGFANRNFMQLIHDDSLTFKEDIQKAQVSGQGDSLHEHIANLAGSPAIKKGILQTVKVVDELVKVMGRHKPENIVIEMARENQTTQKGQKNSRERMKRIEEGIKELGSQILKEHPVENTQLQNEKLYLYYLQNGRDMYVDQELDINRLSDYDVDHIVPQSFLKDDSIDNKVLTRSDKARGKSDNVPSEEVVKKMKNYWRQLLNAKLITQRKFDNLTKAERGGLSELDKAGFIKRQLVETRQITKHVAQILDSRMNTKYDENDKLIREVKVITLKSKLVSDFRKDFQFYKVREINNYHHAHDAYLNAVVGTALIKKYPKLESEFVYGDYKVYDVRKMIAKSEQEIGKATAKYFFYSNIMNFFKTEITLANGEIRKRPLIETNGETGEIVWDKGRDFATVRKVLSMPQVNIVKKTEVQTGGFSKESILPKRNSDKLIARKKDWDPKKYGGFDSPTVAYSVLVVAKVEKGKSKKLKSVKELLGITIMERSSFEKNPIDFLEAKGYKEVKKDLIIKLPKYSLFELENGRKRMLASAGELQKGNELALPSKYVNFLYLASHYEKLKGSPEDNEQKQLFVEQHKHYLDEIIEQISEFSKRVILADANLDKVLSAYNKHRDKPIREQAENIIHLFTLTNLGAPAAFKYFDTTIDRKRYTSTKEVLDATLIHQSITGLYETRIDLSQLGGDGGEAAAKEAAAKEAAAKGGTLGDQGSRGSDPLPEPRVTLTVEGIPTEFLVNTGAEHSVLTKPMGKMGSKRTVVAGATGSKVYPWTTKRLLKIGQKQVTHSFLVIPECPAPLLGRDLLTKLKAQIQFSTEGPQVTWEDRPAMCLVLNLEEEYRLHEKPVPPSIDPSWLQLFPMVWAEKAGMGLANQVPPVVVELKSDASPVAVRQYPMSKEAREGIRPHIQRFLDLGILVPCQSPWNTPLLPVKKPGTNDYRPVQDLREVNKRVQDIHPTVPNPYNLLSSLPPSHTWYSVLDLKDAFFCLKLHPNSQPLFAFEWRDPEKGNTGQLTWTRLPQGFKNSPTLFNEALHRDLASFRALNPQVVMLQYVDDLLVAAPTYRDCKEGTRRLLQELSKLGYRVSAKKAQLCREEVTYLGYLLKGGKRWLTPARKATVMKIPTPTTPRQVREFLGKAGFCRLFIPGFASLAAPLYPLTRPKVPFTWTEAHQEAFGRIKEALLSAPALALPDLTKPFALYVDEKEGVARGVLTQTLGPWRRPVAYLSKKLDPVASGWPTCLKAIAAVALLLKDADKLTLGQNVLVIAPHNLESIVRQPPDRWMTNARMTHYQSLLLNERVSFAPPAILNPATLLPVESDDTPIHICSEILAEETGTRPDLRDQPLPGVPAWYTDGSSFIMDGRRQAGAAIVDNKRTVWASNLPEGTSAQKAELIALTQALRLAEGKSINIYTDSRYAFATAHVHGAIYKQRGWLTSAGKDIKNKEEILALLEAIHLPKRVAIIHCPGHQRGTDPVATGNRKADEAAKQAAQSTRILTETTKNAGKRTADGSEFEKRTADGSEFESPKKKAKVE

SEQ ID NO: 6393 - protein, 2100 aa, synthetic construct
MPAAKRVKLDGGDKKYSIGLDIGTNSVGWAVITDEYKVPSKKFKVLGNTDRHSIKKNLIGALLFDSGETAEATRLKRTARRRYTRRKNRICYLQEIFSNEMAKVDDSFFHRLEESFLVEEDKKHERHPIFGNIVDEVAYHEKYPTIYHLRKKLVDSTDKADLRLIYLALAHMIKFRGHFLIEGDLNPDNSDVDKLFIQLVQTYNQLFEENPINASGVDAKAILSARLSKSRRLENLIAQLPGEKKNGLFGNLIALSLGLTPNFKSNFDLAEDAKLQLSKDTYDDDLDNLLAQIGDQYADLFLAAKNLSDAILLSDILRVNTEITKAPLSASMIKRYDEHHQDLTLLKALVRQQLPEKYKEIFFDQSKNGYAGYIDGGASQEEFYKFIKPILEKMDGTEELLVKLNREDLLRKQRTFDNGSIPHQIHLGELHAILRRQEDFYPFLKDNREKIEKILTFRIPYYVGPLARGNSRFAWMTRKSEETITPWNFEEVVDKGASAQSFIERMTNFDKNLPNEKVLPKHSLLYEYFTVYNELTKVKYVTEGMRKPAFLSGEQKKAIVDLLFKTNRKVTVKQLKEDYFKKIECFDSVEISGVEDRFNASLGTYHDLLKIIKDKDFLDNEENEDILEDIVLTLTLFEDREMIEERLKTYAHLFDDKVMKQLKRRRYTGWGRLSRKLINGIRDKQSGKTILDFLKSDGFANRNFMQLIHDDSLTFKEDIQKAQVSGQGDSLHEHIANLAGSPAIKKGILQTVKVVDELVKVMGRHKPENIVIEMARENQTTQKGQKNSRERMKRIEEGIKELGSQILKEHPVENTQLQNEKLYLYYLQNGRDMYVDQELDINRLSDYDVDHIVPQSFLKDDSIDNKVLTRSDKARGKSDNVPSEEVVKKMKNYWRQLLNAKLITQRKFDNLTKAERGGLSELDKAGFIKRQLVETRQITKHVAQILDSRMNTKYDENDKLIREVKVITLKSKLVSDFRKDFQFYKVREINNYHHAHDAYLNAVVGTALIKKYPKLESEFVYGDYKVYDVRKMIAKSEQEIGKATAKYFFYSNIMNFFKTEITLANGEIRKRPLIETNGETGEIVWDKGRDFATVRKVLSMPQVNIVKKTEVQTGGFSKESILPKRNSDKLIARKKDWDPKKYGGFDSPTVAYSVLVVAKVEKGKSKKLKSVKELLGITIMERSSFEKNPIDFLEAKGYKEVKKDLIIKLPKYSLFELENGRKRMLASAGELQKGNELALPSKYVNFLYLASHYEKLKGSPEDNEQKQLFVEQHKHYLDEIIEQISEFSKRVILADANLDKVLSAYNKHRDKPIREQAENIIHLFTLTNLGAPAAFKYFDTTIDRKRYTSTKEVLDATLIHQSITGLYETRIDLSQLGGDGGEAAAKEAAAKEAAAKGGLGIEDEYRLHETSTEPDVSLGSTWLSDFPQAWAETGGMGLAVRQAPLIIPLKATSTPVSIQQYPMSHEARLGIKPHIQRLLDQGILVPCQSPWNTPLLPVKKPGTNDYRPVQDLREVNKRVEDIHPTVPNPYNLLSGLPPSHQWYTVLDLKDAFFCLRLHPTSQPLFAFEWRDPGMGISGQLTWTRLPQGFKNSPTLFNEALHRDLADFRIQHPDLILLQYVDDILLAATSELDCQQGTRALLQTLGDLGYRASAKKAQICQKQVKYLGYLLREGQRWLTEARKETVMGQPVPKTPRQLREFLGKAGFCRLFIPGFAEMAAPLYPLTKPGTLFSWGPDQQKAYQEIKQALLTAPALGLPDLTKPFELFVDEKQGYAKGVLTQKLGPWRRPVAYLSKKLDPVAAGWPPCLRMVAAIAVLTKDAGKLTMGQPLVILAPHAVEALVKQPPDRWLSNARMTHYQAMLLDTDRVQFGPVVALNPATLLPLPEEGAPHDCLEILAETHGTRPDLTDQPIPDADHTWYTDGSSFLQEGQRKAGAAVTTETEVIWAGALPAGTSAQRAELIALTQALKMAEGKRLNVYTDSRYAFATAHIHGEIYRRRGWLTSEGREIKNKSEILALLKALFLPKRLSIIHCLGHQKGDSAEARGNRLADQAAREAAIKTPPDTSTLLIAGKRTADGSEFEKRTADGSEFESPKKKAKVE

SEQ ID NO: 6394 - protein, 2100 aa, synthetic construct; identical to SEQ ID NO: 6393

SEQ ID NO: 6395 - protein, 2100 aa, synthetic construct
MPAAKRVKLDGGDKKYSIGLDIGTNSVGWAVITDEYKVPSKKFKVLGNTDRHSIKKNLIGALLFDSGETAEATRLKRTARRRYTRRKNRICYLQEIFSNEMAKVDDSFFHRLEESFLVEEDKKHERHPIFGNIVDEVAYHEKYPTIYHLRKKLVDSTDKADLRLIYLALAHMIKFRGHFLIEGDLNPDNSDVDKLFIQLVQTYNQLFEENPINASGVDAKAILSARLSKSRRLENLIAQLPGEKKNGLFGNLIALSLGLTPNFKSNFDLAEDAKLQLSKDTYDDDLDNLLAQIGDQYADLFLAAKNLSDAILLSDILRVNTEITKAPLSASMIKRYDEHHQDLTLLKALVRQQLPEKYKEIFFDQSKNGYAGYIDGGASQEEFYKFIKPILEKMDGTEELLVKLNREDLLRKQRTFDNGSIPHQIHLGELHAILRRQEDFYPFLKDNREKIEKILTFRIPYYVGPLARGNSRFAWMTRKSEETITPWNFEEVVDKGASAQSFIERMTNFDKNLPNEKVLPKHSLLYEYFTVYNELTKVKYVTEGMRKPAFLSGEQKKAIVDLLFKTNRKVTVKQLKEDYFKKIECFDSVEISGVEDRFNASLGTYHDLLKIIKDKDFLDNEENEDILEDIVLTLTLFEDREMIEERLKTYAHLFDDKVMKQLKRRRYTGWGRLSRKLINGIRDKQSGKTILDFLKSDGFANRNFMQLIHDDSLTFKEDIQKAQVSGQGDSLHEHIANLAGSPAIKKGILQTVKVVDELVKVMGRHKPENIVIEMARENQTTQKGQKNSRERMKRIEEGIKELGSQILKEHPVENTQLQNEKLYLYYLQNGRDMYVDQELDINRLSDYDVDHIVPQSFLKDDSIDNKVLTRSDKARGKSDNVPSEEVVKKMKNYWRQLLNAKLITQRKFDNLTKAERGGLSELDKAGFIKRQLVETRQITKHVAQILDSRMNTKYDENDKLIREVKVITLKSKLVSDFRKDFQFYKVREINNYHHAHDAYLNAVVGTALIKKYPKLESEFVYGDYKVYDVRKMIAKSEQEIGKATAKYFFYSNIMNFFKTEITLANGEIRKRPLIETNGETGEIVWDKGRDFATVRKVLSMPQVNIVKKTEVQTGGFSKESILPKRNSDKLIARKKDWDPKKYGGFDSPTVAYSVLVVAKVEKGKSKKLKSVKELLGITIMERSSFEKNPIDFLEAKGYKEVKKDLIIKLPKYSLFELENGRKRMLASAGELQKGNELALPSKYVNFLYLASHYEKLKGSPEDNEQKQLFVEQHKHYLDEIIEQISEFSKRVILADANLDKVLSAYNKHRDKPIREQAENIIHLFTLTNLGAPAAFKYFDTTIDRKRYTSTKEVLDATLIHQSITGLYETRIDLSQLGGDGGEAAAKEAAAKEAAAKGGTLNIEDEYRLHETSKGPDVPLGSTWLSDFPQAWAETGGMGLAVRQAPLIIPLKATSTPVSIKQYPMSQEARLGIKPHIQRLLDQGILVPCQSPWNTPLLPVKKPGTNDYRPVQDLREVNKRVEDIHPTVPNPYNLLSGLPPSHQWYTVLDLKDAFFCLRLHPTSQSLFAFEWRDPEMGISGQLTWTRLPQGFKNSPTLFNEALHRDLADFRIQHPDLILLQYVDDLLLAATSELDCQQGTRALLQTLGDLGYRASAKKAQICQKQVKYLGYLLKEGQRWLTEARKETVMGQPTPKTPRQLREFLGTAGFCRLWIPGFAEMAAPLYPLTKPGTLFEWGPDQQKAYQEIKQALLTAPALGLPDLTKPFELFVDEKQGYAKGVLTQKLGPWRRPVAYLSKKLDPVAAGWPPCLRMVAAIAVLTKDAGKLTMGQPLVILAPHAVEALVKQPPDRWLSNARMTHYQALLLDTDRVQFGPIVALNPATLLPLPEEGLQHDCLDILAEAHGTRPDLTDQPLPDADHTWYTDGSSFLQEGQRKAGAAVTTETEVVWAKALPAGTSAQRAELIALTQALKMAEGKKLNVYTDSRYAFATAHIHGEIYRRRGWLTSEGKEIKNKDEILALLKALFLPKRLSIIHCPGHQKGNRAEARGNRMADQAAREVATRETPETSTLLAGKRTADGSEFEKRTADGSEFESPKKKAKVE

SEQ ID NO: 6396 - protein, 2100 aa, synthetic construct
MPAAKRVKLDGGDKKYSIGLDIGTNSVGWAVITDEYKVPSKKFKVLGNTDRHSIKKNLIGALLFDSGETAEATRLKRTARRRYTRRKNRICYLQEIFSNEMAKVDDSFFHRLEESFLVEEDKKHERHPIFGNIVDEVAYHEKYPTIYHLRKKLVDSTDKADLRLIYLALAHMIKFRGHFLIEGDLNPDNSDVDKLFIQLVQTYNQLFEENPINASGVDAKAILSARLSKSRRLENLIAQLPGEKKNGLFGNLIALSLGLTPNFKSNFDLAEDAKLQLSKDTYDDDLDNLLAQIGDQYADLFLAAKNLSDAILLSDILRVNTEITKAPLSASMIKRYDEHHQDLTLLKALVRQQLPEKYKEIFFDQSKNGYAGYIDGGASQEEFYKFIKPILEKMDGTEELLVKLNREDLLRKQRTFDNGSIPHQIHLGELHAILRRQEDFYPFLKDNREKIEKILTFRIPYYVGPLARGNSRFAWMTRKSEETITPWNFEEVVDKGASAQSFIERMTNFDKNLPNEKVLPKHSLLYEYFTVYNELTKVKYVTEGMRKPAFLSGEQKKAIVDLLFKTNRKVTVKQLKEDYFKKIECFDSVEISGVEDRFNASLGTYHDLLKIIKDKDFLDNEENEDILEDIVLTLTLFEDREMIEERLKTYAHLFDDKVMKQLKRRRYTGWGRLSRKLINGIRDKQSGKTILDFLKSDGFANRNFMQLIHDDSLTFKEDIQKAQVSGQGDSLHEHIANLAGSPAIKKGILQTVKVVDELVKVMGRHKPENIVIEMARENQTTQKGQKNSRERMKRIEEGIKELGSQILKEHPVENTQLQNEKLYLYYLQNGRDMYVDQELDINRLSDYDVDHIVPQSFLKDDSIDNKVLTRSDKARGKSDNVPSEEVVKKMKNYWRQLLNAKLITQRKFDNLTKAERGGLSELDKAGFIKRQLVETRQITKHVAQILDSRMNTKYDENDKLIREVKVITLKSKLVSDFRKDFQFYKVREINNYHHAHDAYLNAVVGTALIKKYPKLESEFVYGDYKVYDVRKMIAKSEQEIGKATAKYFFYSNIMNFFKTEITLANGEIRKRPLIETNGETGEIVWDKGRDFATVRKVLSMPQVNIVKKTEVQTGGFSKESILPKRNSDKLIARKKDWDPKKYGGFDSPTVAYSVLVVAKVEKGKSKKLKSVKELLGITIMERSSFEKNPIDFLEAKGYKEVKKDLIIKLPKYSLFELENGRKRMLASAGELQKGNELALPSKYVNFLYLASHYEKLKGSPEDNEQKQLFVEQHKHYLDEIIEQISEFSKRVILADANLDKVLSAYNKHRDKPIREQAENIIHLFTLTNLGAPAAFKYFDTTIDRKRYTSTKEVLDATLIHQSITGLYETRIDLSQLGGDGGEAAAKEAAAKEAAAKGGTLNIEDEYRLHEISTEPDVSPGSTWLSDFPQAWAETGGMGLAVRQAPLIIPLKATSTPVSIKQYPMSQEAKLGIKPHIQRLLDQGILVPCQSPWNTPLLPVKKPGTNDYRPVQGLREVNKRVEDIHPTVPNPYNLLSGLPTSHRWYTVLDLKDAFFCLRLHPTSQPLFASEWRDPGMGISGQLTWTRLPQGFKNSPTLFDEALHRGLADFRIQHPDLILLQYVDDLLLAATSELDCQQGTRALLKTLGNLGYRASAKKAQICQKQVKYLGYLLREGQRWLTEARKETVMGQPTPKTPRQLREFLGTAGFCRLWIPRFAEMAAPLYPLTKTGTLFNWGPDQQKAYHEIKQALLTAPALGLPDLTKPFELFVDEKQGYAKGVLTQKLGPWRRPVAYLSKKLDPVAAGWPPCLRMVAAIAVLTKDAGKLTMGQPLVILAPHAVEALVKQPPDRWLSNARMTHYQAMLLDTDRVQFGPVVALNPATLLPLPEEGAPHDCLEILAETHGTEPDLTDQPIPDADHTWYTDGSSFLQEGQRKAGAAVTTETEVIWARALPAGTSAQRAELIALTQALKMAEGKRLNVYTDSRYAFATAHIHGEIYKRRGLLTSEGREIKNKSEILALLKALFLPKRLSIIHCLGHQKGDSAEARGNRLADQAAREAAIKTPPDTSTLLAGKRTADGSEFEKRTADGSEFESPKKKAKVE

SEQ ID NO: 6397 - protein, 2120 aa, synthetic construct
MPAAKRVKLDGGDKKYSIGLDIGTNSVGWAVITDEYKVPSKKFKVLGNTDRHSIKKNLIGALLFDSGETAEATRLKRTARRRYTRRKNRICYLQEIFSNEMAKVDDSFFHRLEESFLVEEDKKHERHPIFGNIVDEVAYHEKYPTIYHLRKKLVDSTDKADLRLIYLALAHMIKFRGHFLIEGDLNPDNSDVDKLFIQLVQTYNQLFEENPINASGVDAKAILSARLSKSRRLENLIAQLPGEKKNGLFGNLIALSLGLTPNFKSNFDLAEDAKLQLSKDTYDDDLDNLLAQIGDQYADLFLAAKNLSDAILLSDILRVNTEITKAPLSASMIKRYDEHHQDLTLLKALVRQQLPEKYKEIFFDQSKNGYAGYIDGGASQEEFYKFIKPILEKMDGTEELLVKLNREDLLRKQRTFDNGSIPHQIHLGELHAILRRQEDFYPFLKDNREKIEKILTFRIPYYVGPLARGNSRFAWMTRKSEETITPWNFEEVVDKGASAQSFIERMTNFDKNLPNEKVLPKHSLLYEYFTVYNELTKVKYVTEGMRKPAFLSGEQKKAIVDLLFKTNRKVTVKQLKEDYFKKIECFDSVEISGVEDRFNASLGTYHDLLKIIKDKDFLDNEENEDILEDIVLTLTLFEDREMIEERLKTYAHLFDDKVMKQLKRRRYTGWGRLSRKLINGIRDKQSGKTILDFLKSDGFANRNFMQLIHDDSLTFKEDIQKAQVSGQGDSLHEHIANLAGSPAIKKGILQTVKVVDELVKVMGRHKPENIVIEMARENQTTQKGQKNSRERMKRIEEGIKELGSQILKEHPVENTQLQNEKLYLYYLQNGRDMYVDQELDINRLSDYDVDHIVPQSFLKDDSIDNKVLTRSDKARGKSDNVPSEEVVKKMKNYWRQLLNAKLITQRKFDNLTKAERGGLSELDKAGFIKRQLVETRQITKHVAQILDSRMNTKYDENDKLIREVKVITLKSKLVSDFRKDFQFYKVREINNYHHAHDAYLNAVVGTALIKKYPKLESEFVYGDYKVYDVRKMIAKSEQEIGKATAKYFFYSNIMNFFKTEITLANGEIRKRPLIETNGETGEIVWDKGRDFATVRKVLSMPQVNIVKKTEVQTGGFSKESILPKRNSDKLIARKKDWDPKKYGGFDSPTVAYSVLVVAKVEKGKSKKLKSVKELLGITIMERSSFEKNPIDFLEAKGYKEVKKDLIIKLPKYSLFELENGRKRMLASAGELQKGNELALPSKYVNFLYLASHYEKLKGSPEDNEQKQLFVEQHKHYLDEIIEQISEFSKRVILADANLDKVLSAYNKHRDKPIREQAENIIHLFTLTNLGAPAAFKYFDTTIDRKRYTSTKEVLDATLIHQSITGLYETRIDLSQLGGDGGEAAAKEAAAKEAAAKGGVQEISDSRPMLHIYLNGRRFLGLLDTGADKTCIAGRDWPANWPIHQTESSLQGLGMACGVARSSQPLRWQHEDKSGIIHPFVIPTLPFTLWGRDIMKDIKVRLMTDSPDDSQDLMIGAIESNLFADQISWKSDQPVWLNQWPLKQEKLQALQQLVTEQLQLGHLEESNSPWNTPVFVIKKKSGKWRLLQDLRAVNATMHDMGALQPGLPSPVAVPKGWEIIIIDLQDCFFNIKLHPEDCKRFAFSVPSPNFKRPYQRFQWKVLPQGMKNSPTLCQKFVDKAILTVRDKYQDSYIVHYMDDILLAHPSRSIVDEILTSMIQALNKHGLVVSTEKIQKYDNLKYLGTHIQGDSVSYQKLQIRTDKLRTLNDFQKLLGNINWIRPFLKLTTGELKPLFEILNGDSNPISTRKLTPEACKALQLMNERLSTARVKRLDLSQPWSLCILKTEYTPTACLWQDGVVEWIHLPHISPKVITPYDIFCTQLIIKGRHRSKELFSKDPDYIVVPYTKVQFDLLLQEKEDWPISLLGFLGEVHFHLPKDPLLTFTLQTAIIFPHMTSTTPLEKGIVIFTDGSANGRSVTYIQGREPIIKENTQNTAQQAEIVAVITAFEEVSQPFNLYTDSKYVTGLFPEIETATLSPRTKIYTELKHLQRLIHKRQEKFYIGHIRGHTGLPGPLAQGNAYADSLTRILTAAGKRTADGSEFEKRTADGSEFESPKKKAKVE

SEQ ID NO: 6398 - protein, 2091 aa, synthetic construct
MPAAKRVKLDGGDKKYSIGLDIGTNSVGWAVITDEYKVPSKKFKVLGNTDRHSIKKNLIGALLFDSGETAEATRLKRTARRRYTRRKNRICYLQEIFSNEMAKVDDSFFHRLEESFLVEEDKKHERHPIFGNIVDEVAYHEKYPTIYHLRKKLVDSTDKADLRLIYLALAHMIKFRGHFLIEGDLNPDNSDVDKLFIQLVQTYNQLFEENPINASGVDAKAILSARLSKSRRLENLIAQLPGEKKNGLFGNLIALSLGLTPNFKSNFDLAEDAKLQLSKDTYDDDLDNLLAQIGDQYADLFLAAKNLSDAILLSDILRVNTEITKAPLSASMIKRYDEHHQDLTLLKALVRQQLPEKYKEIFFDQSKNGYAGYIDGGASQEEFYKFIKPILEKMDGTEELLVKLNREDLLRKQRTFDNGSIPHQIHLGELHAILRRQEDFYPFLKDNREKIEKILTFRIPYYVGPLARGNSRFAWMTRKSEETITPWNFEEVVDKGASAQSFIERMTNFDKNLPNEKVLPKHSLLYEYFTVYNELTKVKYVTEGMRKPAFLSGEQKKAIVDLLFKTNRKVTVKQLKEDYFKKIECFDSVEISGVEDRFNASLGTYHDLLKIIKDKDFLDNEENEDILEDIVLTLTLFEDREMIEERLKTYAHLFDDKVMKQLKRRRYTGWGRLSRKLINGIRDKQSGKTILDFLKSDGFANRNFMQLIHDDSLTFKEDIQKAQVSGQGDSLHEHIANLAGSPAIKKGILQTVKVVDELVKVMGRHKPENIVIEMARENQTTQKGQKNSRERMKRIEEGIKELGSQILKEHPVENTQLQNEKLYLYYLQNGRDMYVDQELDINRLSDYDVDHIVPQSFLKDDSIDNKVLTRSDKARGKSDNVPSEEVVKKMKNYWRQLLNAKLITQRKFDNLTKAERGGLSELDKAGFIKRQLVETRQITKHVAQILDSRMNTKYDENDKLIREVKVITLKSKLVSDFRKDFQFYKVREINNYHHAHDAYLNAVVGTALIKKYPKLESEFVYGDYKVYDVRKMIAKSEQEIGKATAKYFFYSNIMNFFKTEITLANGEIRKRPLIETNGETGEIVWDKGRDFATVRKVLSMPQVNIVKKTEVQTGGFSKESILPKRNSDKLIARKKDWDPKKYGGFDSPTVAYSVLVVAKVEKGKSKKLKSVKELLGITIMERSSFEKNPIDFLEAKGYKEVKKDLIIKLPKYSLFELENGRKRMLASAGELQKGNELALPSKYVNFLYLASHYEKLKGSPEDNEQKQLFVEQHKHYLDEIIEQISEFSKRVILADANLDKVLSAYNKHRDKPIREQAENIIHLFTLTNLGAPAAFKYFDTTIDRKRYTSTKEVLDATLIHQSITGLYETRIDLSQLGGDGGEAAAKEAAAKEAAAKGGIPWLMKKPLQLTTLVPLQEYEERLLKQTMLTGSYKEKLQSLFLKYDALWQHWENQVGHRRIKPHHIATGTVNPRPQKQYPINPKAKASIQTVINDLLKQGVLIQQNSIMNTPVYPVPKPDGKWRMVLDYREVNKTIPLIAAQNQHSAGILSSIFRGKYKTTLDLSNGFWAHSITPESYWLTAFTWLGQQYCWTRLPQGFLNSPALFNADVVDLLKEVPNVQVYVDDIYISHDDPREHLEQLEKVFSLLLNAGYVVSLKKSEIAQHEVEFLGFNITKEGRGLTETFKQKLLNITPPRDLKQLQSILGKLNFARNFIPNFSELVKPLYNIIATAPGKYITWTTDNSQQLQNIISMLNSAENLEERNPEVRLIMKVNTSPSAGYIRFYNEFAKRPIMYLNYVYTKAEVKFTNTEKLLTTIHKGLIKALDLGMGQEILVYSPIVSMTKIQKTPLPERKALPIRWITWMSYLEDPRIQFHYDKTLPELQQVPTVTDDIIAKIKHPSEFSMVFYTDGSAIKHPNVNKSHNAGMGIAQVQFKPEFTVINTWSIPLGDHTAQLAEVAAVEFACKKALKIDGPVLIVTDSFYVAESVNKELPYWQSNGFFNNKKKPLKHVSKWKSIADCIQLKPDIIIIHEKGHQPTASTFHTEGNNLADKLATQGSYVVNAGKRTADGSEFEKRTADGSEFESPKKKAKVE

SEQ ID NO: 6399 - protein, 2180 aa, synthetic construct
MPAAKRVKLDGGDKKYSIGLDIGTNSVGWAVITDEYKVPSKKFKVLGNTDRHSIKKNLIGALLFDSGETAEATRLKRTARRRYTRRKNRICYLQEIFSNEMAKVDDSFFHRLEESFLVEEDKKHERHPIFGNIVDEVAYHEKYPTIYHLRKKLVDSTDKADLRLIYLALAHMIKFRGHFLIEGDLNPDNSDVDKLFIQLVQTYNQLFEENPINASGVDAKAILSARLSKSRRLENLIAQLPGEKKNGLFGNLIALSLGLTPNFKSNFDLAEDAKLQLSKDTYDDDLDNLLAQIGDQYADLFLAAKNLSDAILLSDILRVNTEITKAPLSASMIKRYDEHHQDLTLLKALVRQQLPEKYKEIFFDQSKNGYAGYIDGGASQEEFYKFIKPILEKMDGTEELLVKLNREDLLRKQRTFDNGSIPHQIHLGELHAILRRQEDFYPFLKDNREKIEKILTFRIPYYVGPLARGNSRFAWMTRKSEETITPWNFEEVVDKGASAQSFIERMTNFDKNLPNEKVLPKHSLLYEYFTVYNELTKVKYVTEGMRKPAFLSGEQKKAIVDLLFKTNRKVTVKQLKEDYFKKIECFDSVEISGVEDRFNASLGTYHDLLKIIKDKDFLDNEENEDILEDIVLTLTLFEDREMIEERLKTYAHLFDDKVMKQLKRRRYTGWGRLSRKLINGIRDKQSGKTILDFLKSDGFANRNFMQLIHDDSLTFKEDIQKAQVSGQGDSLHEHIANLAGSPAIKKGILQTVKVVDELVKVMGRHKPENIVIEMARENQTTQKGQKNSRERMKRIEEGIKELGSQILKEHPVENTQLQNEKLYLYYLQNGRDMYVDQELDINRLSDYDVDHIVPQSFLKDDSIDNKVLTRSDKARGKSDNVPSEEVVKKMKNYWRQLLNAKLITQRKFDNLTKAERGGLSELDKAGFIKRQLVETRQITKHVAQILDSRMNTKYDENDKLIREVKVITLKSKLVSDFRKDFQFYKVREINNYHHAHDAYLNAVVGTALIKKYPKLESEFVYGDYKVYDVRKMIAKSEQEIGKATAKYFFYSNIMNFFKTEITLANGEIRKRPLIETNGETGEIVWDKGRDFATVRKVLSMPQVNIVKKTEVQTGGFSKESILPKRNSDKLIARKKDWDPKKYGGFDSPTVAYSVLVVAKVEKGKSKKLKSVKELLGITIMERSSFEKNPIDFLEAKGYKEVKKDLIIKLPKYSLFELENGRKRMLASAGELQKGNELALPSKYVNFLYLASHYEKLKGSPEDNEQKQLFVEQHKHYLDEIIEQISEFSKRVILADANLDKVLSAYNKHRDKPIREQAENIIHLFTLTNLGAPAAFKYFDTTIDRKRYTSTKEVLDATLIHQSITGLYETRIDLSQLGGDGGEAAAKEAAAKEAAAKGGMDPLQLLQPLEAEIKGTKLKAHWNSGATITCVPQAFLEEEVPIKNIWIKTIHGEKEQPVYYLTFKIQGRKVEAEVISSPYDYILVSPSDIPWLMKKPLQLTTLVPLQEYEERLLKQTMLTGSYKEKLQSLFLKYDALWQHWENQVGHRRIKPHHIATGTVNPRPQKQYPINPKAKASIQTVINDLLKQGVLIQQNSIMNTPVYPVPKPDGKWRMVLDYREVNKTIPLIAAQNQHSAGILSSIFRGKYKTTLDLSNGFWAHSITPESYWLTAFTWLGQQYCWTRLPQGFLNSPALFNADVVDLLKEVPNVQVYVDDIYISHDDPREHLEQLEKVFSLLLNAGYVVSLKKSEIAQHEVEFLGFNITKEGRGLTETFKQKLLNITPPRDLKQLQSILGKLNFARNFIPNFSELVKPLYNIIATAPGKYITWTTDNSQQLQNIISMLNSAENLEERNPEVRLIMKVNTSPSAGYIRFYNEFAKRPIMYLNYVYTKAEVKFTNTEKLLTTIHKGLIKALDLGMGQEILVYSPIVSMTKIQKTPLPERKALPIRWITWMSYLEDPRIQFHYDKTLPELQQVPTVTDDIIAKIKHPSEFSMVFYTDGSAIKHPNVNKSHNAGMGIAQVQFKPEFTVINTWSIPLGDHTAQLAEVAAVEFACKKALKIDGPVLIVTDSFYVAESVNKELPYWQSNGFFNNKKKPLKHVSKWKSIADCIQLKPDIIIIHEKGHQPTASTFHTEGNNLADKLATQGSYVVNAGKRTADGSEFEKRTADGSEFESPKKKAKVE

SEQ ID NO: 6400 - protein, 2180 aa, synthetic construct
MPAAKRVKLDGGDKKYSIGLDIGTNSVGWAVITDEYKVPSKKFKVLGNTDRHSIKKNLIGALLFDSGETAEATRLKRTARRRYTRRKNRICYLQEIFSNEMAKVDDSFFHRLEESFLVEEDKKHERHPIFGNIVDEVAYHEKYPTIYHLRKKLVDSTDKADLRLIYLALAHMIKFRGHFLIEGDLNPDNSDVDKLFIQLVQTYNQLFEENPINASGVDAKAILSARLSKSRRLENLIAQLPGEKKNGLFGNLIALSLGLTPNFKSNFDLAEDAKLQLSKDTYDDDLDNLLAQIGDQYADLFLAAKNLSDAILLSDILRVNTEITKAPLSASMIKRYDEHHQDLTLLKALVRQQLPEKYKEIFFDQSKNGYAGYIDGGASQEEFYKFIKPILEKMDGTEELLVKLNREDLLRKQRTFDNGSIPHQIHLGELHAILRRQEDFYPFLKDNREKIEKILTFRIPYYVGPLARGNSRFAWMTRKSEETITPWNFEEVVDKGASAQSFIERMTNFDKNLPNEKVLPKHSLLYEYFTVYNELTKVKYVTEGMRKPAFLSGEQKKAIVDLLFKTNRKVTVKQLKEDYFKKIECFDSVEISGVEDRFNASLGTYHDLLKIIKDKDFLDNEENEDILEDIVLTLTLFEDREMIEERLKTYAHLFDDKVMKQLKRRRYTGWGRLSRKLINGIRDKQSGKTILDFLKSDGFANRNFMQLIHDDSLTFKEDIQKAQVSGQGDSLHEHIANLAGSPAIKKGILQTVKVVDELVKVMGRHKPENIVIEMARENQTTQKGQKNSRERMKRIEEGIKELGSQILKEHPVENTQLQNEKLYLYYLQNGRDMYVDQELDINRLSDYDVDHIVPQSFLKDDSIDNKVLTRSDKARGKSDNVPSEEVVKKMKNYWRQLLNAKLITQRKFDNLTKAERGGLSELDKAGFIKRQLVETRQITKHVAQILDSRMNTKYDENDKLIREVKVITLKSKLVSDFRKDFQFYKVREINNYHHAHDAYLNAVVGTALIKKYPKLESEFVYGDYKVYDVRKMIAKSEQEIGKATAKYFFYSNIMNFFKTEITLANGEIRKRPLIETNGETGEIVWDKGRDFATVRKVLSMPQVNIVKKTEVQTGGFSKESILPKRNSDKLIARKKDWDPKKYGGFDSPTVAYSVLVVAKVEKGKSKKLKSVKELLGITIMERSSFEKNPIDFLEAKGYKEVKKDLIIKLPKYSLFELENGRKRMLASAGELQKGNELALPSKYVNFLYLASHYEKLKGSPEDNEQKQLFVEQHKHYLDEIIEQISEFSKRVILADANLDKVLSAYNKHRDKPIREQAENIIHLFTLTNLGAPAAFKYFDTTIDRKRYTSTKEVLDATLIHQSITGLYETRIDLSQLGGDGGEAAAKEAAAKEAAAKGGMNPLQLLQPLPAEVKGTKLLAHWNSGATITCIPESFLEDEQPIKQTLIKTIHGEKQQNVYYLTFKVKGRKVEAEVIASPYEYILLSPTDVPWLTQQPLQLTILVPLQEYQDRILNKTALPEEQKQQLKALFTKYDNLWQHWENQVGHRKIRPHNIATGDYPPRPQKQYPINPKAKPSIQIVIDDLLKQGVLTPQNSTMNTPVYPVPKPDGRWRMVLDYREVNKTIPLTAAQNQHSAGILATIVRQKYKTTLDLANGFWAHPITPDSYWLTAFTWQGKQYCWTRLPQGFLNSPALFTADAVDLLKEVPNVQVYVDDIYLSHDNPHEHIQQLEKVFQILLQAGYVVSLKKSEIGQRTVEFLGFNITKEGRGLTDTFKTKLLNVTPPKDLKQLQSILGLLNFARNFIPNFAELVQTLYNLIASSKGKYIEWTEDNTKQLNKVIEALNTASNLEERLPDQRLVIKVNTSPSAGYVRYYNESGKKPIMYLNYVFSKAELKFSMLEKLLTTMHKALIKAMDLAMGQEILVYSPIVSMTKIQKTPLPERKALPIRWITWMTYLEDPRIQFHYDKTLPELKHIPDVYTSSIPPLKHPSQYEGVFCTDGSAIKSPDPTKSNNAGMGIVHAIYNPEYKILNQWSIPLGHHTAQMAEIAAVEFACKKALKVPGPVLVITDSFYVAESANKELPYWKSNGFVNNKKEPLKHISKWKSIAECLSIKPDITIQHEKGHQPINTSIHTEGNALADKLATQGSYVVNAGKRTADGSEFEKRTADGSEFESPKKKAKVE

SEQ ID NO: 6401 - protein, 2098 aa, synthetic construct
MPAAKRVKLDGGDKKYSIGLDIGTNSVGWAVITDEYKVPSKKFKVLGNTDRHSIKKNLIGALLFDSGETAEATRLKRTARRRYTRRKNRICYLQEIFSNEMAKVDDSFFHRLEESFLVEEDKKHERHPIFGNIVDEVAYHEKYPTIYHLRKKLVDSTDKADLRLIYLALAHMIKFRGHFLIEGDLNPDNSDVDKLFIQLVQTYNQLFEENPINASGVDAKAILSARLSKSRRLENLIAQLPGEKKNGLFGNLIALSLGLTPNFKSNFDLAEDAKLQLSKDTYDDDLDNLLAQIGDQYADLFLAAKNLSDAILLSDILRVNTEITKAPLSASMIKRYDEHHQDLTLLKALVRQQLPEKYKEIFFDQSKNGYAGYIDGGASQEEFYKFIKPILEKMDGTEELLVKLNREDLLRKQRTFDNGSIPHQIHLGELHAILRRQEDFYPFLKDNREKIEKILTFRIPYYVGPLARGNSRFAWMTRKSEETITPWNFEEVVDKGASAQSFIERMTNFDKNLPNEKVLPKHSLLYEYFTVYNELTKVKYVTEGMRKPAFLSGEQKKAIVDLLFKTNRKVTVKQLKEDYFKKIECFDSVEISGVEDRFNASLGTYHDLLKIIKDKDFLDNEENEDILEDIVLTLTLFEDREMIEERLKTYAHLFDDKVMKQLKRRRYTGWGRLSRKLINGIRDKQSGKTILDFLKSDGFANRNFMQLIHDDSLTFKEDIQKAQVSGQGDSLHEHIANLAGSPAIKKGILQTVKVVDELVKVMGRHKPENIVIEMARENQTTQKGQKNSRERMKRIEEGIKELGSQILKEHPVENTQLQNEKLYLYYLQNGRDMYVDQELDINRLSDYDVDHIVPQSFLKDDSIDNKVLTRSDKARGKSDNVPSEEVVKKMKNYWRQLLNAKLITQRKFDNLTKAERGGLSELDKAGFIKRQLVETRQITKHVAQILDSRMNTKYDENDKLIREVKVITLKSKLVSDFRKDFQFYKVREINNYHHAHDAYLNAVVGTALIKKYPKLESEFVYGDYKVYDVRKMIAKSEQEIGKATAKYFFYSNIMNFFKTEITLANGEIRKRPLIETNGETGEIVWDKGRDFATVRKVLSMPQVNIVKKTEVQTGGFSKESILPKRNSDKLIARKKDWDPKKYGGFDSPTVAYSVLVVAKVEKGKSKKLKSVKELLGITIMERSSFEKNPIDFLEAKGYKEVKKDLIIKLPKYSLFELENGRKRMLASAGELQKGNELALPSKYVNFLYLASHYEKLKGSPEDNEQKQLFVEQHKHYLDEIIEQISEFSKRVILADANLDKVLSAYNKHRDKPIREQAENIIHLFTLTNLGAPAAFKYFDTTIDRKRYTSTKEVLDATLIHQSITGLYETRIDLSQLGGDGGEAAAKEAAAKEAAAKGGVLNLEEEYRLHEKPVPSSIDPSWLQLFPTVWAERAGMGLANQVPPVVVELRSGASPVAVRQYPMSKEAREGIRPHIQRFLDLGVLVPCQSPWNTPLLPVKKPGTNDYRPVQDLREINKRVQDIHPTVPNPYNLLSSLPPSHTWYSVLDLKDAFFCLKLHPNSQPLFAFEWRDPEKGNTGQLTWTRLPQGFKNSPTLFNEALHRDLAPFRALNPQVVLLQYVDDLLVAAPTYRDCKEGTQKLLQELSKLGYRVSAKKAQLCQKEVTYLGYLLKEGKRWLTPARKATVMKIPPPTTPRQVREFLGTAGFCRLWIPGFASLAAPLYPLTKPSIPFIWTEEHQKAFDRIKEALLSAPALALPDLTKPFTLYVDERAGVARGVLTQTLGPWRRPVAYLSKKLDPVASGWPTCLKAVAAVALLLKDADKLTLGQNVTVIASHSLESIVRQPPDRWMTNARMTHYQSLLLNERVSFAPPAVLNPATLLPVESEATPVHRCSEILAEETGTRRDLKDQPLPGVPAWYTDGSSFIAEGKRRAGAAIVDGKRTVWASSLPEGTSAQKAELVALTQALRLAEGKDINIYTDSRYAFATAHIHGAIYKQRGWLTSAGKDIKNKEEILALLEAIHLPKRVAIIHCPGHQKGNDPVATGNRRADEAAKQAALSTRVLAETTKPAGKRTADGSEFEKRTADGSEFESPKKKAKVE

SEQ ID NO: 6402 - protein, 2100 aa, synthetic construct; identical to SEQ ID NO: 4506

SEQ ID NO: 6403 - protein, 2107 aa, synthetic construct
MPAAKRVKLDGGDKKYSIGLDIGTNSVGWAVITDEYKVPSKKFKVLGNTDRHSIKKNLIGALLFDSGETAEATRLKRTARRRYTRRKNRICYLQEIFSNEMAKVDDSFFHRLEESFLVEEDKKHERHPIFGNIVDEVAYHEKYPTIYHLRKKLVDSTDKADLRLIYLALAHMIKFRGHFLIEGDLNPDNSDVDKLFIQLVQTYNQLFEENPINASGVDAKAILSARLSKSRRLENLIAQLPGEKKNGLFGNLIALSLGLTPNFKSNFDLAEDAKLQLSKDTYDDDLDNLLAQIGDQYADLFLAAKNLSDAILLSDILRVNTEITKAPLSASMIKRYDEHHQDLTLLKALVRQQLPEKYKEIFFDQSKNGYAGYIDGGASQEEFYKFIKPILEKMDGTEELLVKLNREDLLRKQRTFDNGSIPHQIHLGELHAILRRQEDFYPFLKDNREKIEKILTFRIPYYVGPLARGNSRFAWMTRKSEETITPWNFEEVVDKGASAQSFIERMTNFDKNLPNEKVLPKHSLLYEYFTVYNELTKVKYVTEGMRKPAFLSGEQKKAIVDLLFKTNRKVTVKQLKEDYFKKIECFDSVEISGVEDRFNASLGTYHDLLKIIKDKDFLDNEENEDILEDIVLTLTLFEDREMIEERLKTYAHLFDDKVMKQLKRRRYTGWGRLSRKLINGIRDKQSGKTILDFLKSDGFANRNFMQLIHDDSLTFKEDIQKAQVSGQGDSLHEHIANLAGSPAIKKGILQTVKVVDELVKVMGRHKPENIVIEMARENQTTQKGQKNSRERMKRIEEGIKELGSQILKEHPVENTQLQNEKLYLYYLQNGRDMYVDQELDINRLSDYDVDHIVPQSFLKDDSIDNKVLTRSDKARGKSDNVPSEEVVKKMKNYWRQLLNAKLITQRKFDNLTKAERGGLSELDKAGFIKRQLVETRQITKHVAQILDSRMNTKYDENDKLIREVKVITLKSKLVSDFRKDFQFYKVREINNYHHAHDAYLNAVVGTALIKKYPKLESEFVYGDYKVYDVRKMIAKSEQEIGKATAKYFFYSNIMNFFKTEITLANGEIRKRPLIETNGETGEIVWDKGRDFATVRKVLSMPQVNIVKKTEVQTGGFSKESILPKRNSDKLIARKKDWDPKKYGGFDSPTVAYSVLVVAKVEKGKSKKLKSVKELLGITIMERSSFEKNPIDFLEAKGYKEVKKDLIIKLPKYSLFELENGRKRMLASAGELQKGNELALPSKYVNFLYLASHYEKLKGSPEDNEQKQLFVEQHKHYLDEIIEQISEFSKRVILADANLDKVLSAYNKHRDKPIREQAENIIHLFTLTNLGAPAAFKYFDTTIDRKRYTSTKEVLDATLIHQSITGLYETRIDLSQLGGDGGEAAAKEAAAKEAAAKEAAAKGGTAPLEEEYRLFLEAPIQNVTLLEQWKREIPKVWAEINPPGLASTQAPIHVQLLSTALPVRVRQYPITLEAKRSLRETIRKFRAAGILRPVHSPWNTPLLPVRKSGTSEYRMVQDLREVNKRVETIHPTVPNPYTLLSLLPPDRIWYSVLDLKDAFFCIPLAPESQLIFAFEWADAEEGESGQLTWTRLPQGFKNSPTLFDEALNRDLQGFRLDHPSVSLLQYVDDLLIAADTQAACLSATRDLLMTLAELGYRVSGKKAQLCQEEVTYLGFKIHKGSRSLSNSRTQAILQIPVPKTKRQVREFLGTIGYCRLWIPGFAELAQPLYAATRGGNDPLVWGEKEEEAFQSLKLALTQPPALALPSLDKPFQLFVEETSGAAKGVLTQALGPWKRPVAYLSKRLDPVAAGWPRCLRAIAAAALLTREASKLTFGQDIEITSSHNLESLLRSPPDKWLTNARITQYQVLLLDPPRVRFKQTAALNPATLLPETDDTLPIHHCLDTLDSLTSTRPDLTDQPLAQAEATLFTDGSSYIRDGKRYAGAAVVTLDSVIWAEPLPIGTSAQKAELIALTKALEWSKDKSVNIYTDSRYAFATLHVHGMIYRERGLLTAGGKAIKNAPEILALLTAVWLPKRVAVMHCKGHQKDDAPTSTGNRRADEVAREVAIRPLSTQATISAGKRTADGSEFEKRTADGSEFESPKKKAKVE

SEQ ID NO: 6404 - protein, 2107 aa, synthetic construct
MPAAKRVKLDGGDKKYSIGLDIGTNSVGWAVITDEYKVPSKKFKVLGNTDRHSIKKNLIGALLFDSGETAEATRLKRTARRRYTRRKNRICYLQEIFSNEMAKVDDSFFHRLEESFLVEEDKKHERHPIFGNIVDEVAYHEKYPTIYHLRKKLVDSTDKADLRLIYLALAHMIKFRGHFLIEGDLNPDNSDVDKLFIQLVQTYNQLFEENPINASGVDAKAILSARLSKSRRLENLIAQLPGEKKNGLFGNLIALSLGLTPNFKSNFDLAEDAKLQLSKDTYDDDLDNLLAQIGDQYADLFLAAKNLSDAILLSDILRVNTEITKAPLSASMIKRYDEHHQDLTLLKALVRQQLPEKYKEIFFDQSKNGYAGYIDGGASQEEFYKFIKPILEKMDGTEELLVKLNREDLLRKQRTFDNGSIPHQIHLGELHAILRRQEDFYPFLKDNREKIEKILTFRIPYYVGPLARGNSRFAWMTRKSEETITPWNFEEVVDKGASAQSFIERMTNFDKNLPNEKVLPKHSLLYEYFTVYNELTKVKYVTEGMRKPAFLSGEQKKAIVDLLFKTNRKVTVKQLKEDYFKKIECFDSVEISGVEDRFNASLGTYHDLLKIIKDKDFLDNEENEDILEDIVLTLTLFEDREMIEERLKTYAHLFDDKVMKQLKRRRYTGWGRLSRKLINGIRDKQSGKTILDFLKSDGFANRNFMQLIHDDSLTFKEDIQKAQVSGQGDSLHEHIANLAGSPAIKKGILQTVKVVDELVKVMGRHKPENIVIEMARENQTTQKGQKNSRERMKRIEEGIKELGSQILKEHPVENTQLQNEKLYLYYLQNGRDMYVDQELDINRLSDYDVDHIVPQSFLKDDSIDNKVLTRSDKARGKSDNVPSEEVVKKMKNYWRQLLNAKLITQRKFDNLTKAERGGLSELDKAGFIKRQLVETRQITKHVAQILDSRMNTKYDENDKLIREVKVITLKSKLVSDFRKDFQFYKVREINNYHHAHDAYLNAVVGTALIKKYPKLESEFVYGDYKVYDVRKMIAKSEQEIGKATAKYFFYSNIMNFFKTEITLANGEIRKRPLIETNGETGEIVWDKGRDFATVRKVLSMPQVNIVKKTEVQTGGFSKESILPKRNSDKLIARKKDWDPKKYGGFDSPTVAYSVLVVAKVEKGKSKKLKSVKELLGITIMERSSFEKNPIDFLEAKGYKEVKKDLIIKLPKYSLFELENGRKRMLASAGELQKGNELALPSKYVNFLYLASHYEKLKGSPEDNEQKQLFVEQHKHYLDEIIEQISEFSKRVILADANLDKVLSAYNKHRDKPIREQAENIIHLFTLTNLGAPAAFKYFDTTIDRKRYTSTKEVLDATLIHQSITGLYETRIDLSQLGGDGGEAAAKEAAAKEAAAKEAAAKGGTAPLEEEYRLFLEAPIQNVTLLEQWKREIPKVWAEINPPGLASTQAPIHVQLLSTALPVRVRQYPITLEAKRSLRETIRKFRAAGILRPVHSPWNTPLLPVRKSGTSEYRMVQDLREVNKRVETIHPTVPNPYTLLSLLPPDRIWYSVLDLKDAFFCIPLAPESQLIFAFEWADAEEGESGQLTWTRLPQGFKNSPTLFNEALNRDLQGFRLDHPSVSLLQYVDDLLIAADTQAACLSATRDLLMTLAELGYRVSGKKAQLCQEEVTYLGFKIHKGSRSLSNSRTQAILQIPVPKTKRQVREFLGKIGYCRLFIPGFAELAQPLYAATRPGNDPLVWGEKEEEAFQSLKLALTQPPALALPSLDKPFQLFVEETSGAAKGVLTQALGPWKRPVAYLSKRLDPVAAGWPRCLRAIAAAALLTREASKLTFGQDIEITSSHNLESLLRSPPDKWLTNARITQYQVLLLDPPRVRFKQTAALNPATLLPETDDTLPIHHCLDTLDSLTSTRPDLTDQPLAQAEATLFTDGSSYIRDGKRYAGAAVVTLDSVIWAEPLPIGTSAQKAELIALTKALEWSKDKSVNIYTDSRYAFATLHVHGMIYRERGWLTAGGKAIKNAPEILALLTAVWLPKRVAVMHCKGHQKDDAPTSTGNRRADEVAREVAIRPLSTQATISAGKRTADGSEFEKRTADGSEFESPKKKAKVE

SEQ ID NO: 6405 - protein, 2096 aa, synthetic construct
MPAAKRVKLDGGDKKYSIGLDIGTNSVGWAVITDEYKVPSKKFKVLGNTDRHSIKKNLIGALLFDSGETAEATRLKRTARRRYTRRKNRICYLQEIFSNEMAKVDDSFFHRLEESFLVEEDKKHERHPIFGNIVDEVAYHEKYPTIYHLRKKLVDSTDKADLRLIYLALAHMIKFRGHFLIEGDLNPDNSDVDKLFIQLVQTYNQLFEENPINASGVDAKAILSARLSKSRRLENLIAQLPGEKKNGLFGNLIALSLGLTPNFKSNFDLAEDAKLQLSKDTYDDDLDNLLAQIGDQYADLFLAAKNLSDAILLSDILRVNTEITKAPLSASMIKRYDEHHQDLTLLKALVRQQLPEKYKEIFFDQSKNGYAGYIDGGASQEEFYKFIKPILEKMDGTEELLVKLNREDLLRKQRTFDNGSIPHQIHLGELHAILRRQEDFYPFLKDNREKIEKILTFRIPYYVGPLARGNSRFAWMTRKSEETITPWNFEEVVDKGASAQSFIERMTNFDKNLPNEKVLPKHSLLYEYFTVYNELTKVKYVTEGMRKPAFLSGEQKKAIVDLLFKTNRKVTVKQLKEDYFKKIECFDSVEISGVEDRFNASLGTYHDLLKIIKDKDFLDNEENEDILEDIVLTLTLFEDREMIEERLKTYAHLFDDKVMKQLKRRRYTGWGRLSRKLINGIRDKQSGKTILDFLKSDGFANRNFMQLIHDDSLTFKEDIQKAQVSGQGDSLHEHIANLAGSPAIKKGILQTVKVVDELVKVMGRHKPENIVIEMARENQTTQKGQKNSRERMKRIEEGIKELGSQILKEHPVENTQLQNEKLYLYYLQNGRDMYVDQELDINRLSDYDVDHIVPQSFLKDDSIDNKVLTRSDKARGKSDNVPSEEVVKKMKNYWRQLLNAKLITQRKFDNLTKAERGGLSELDKAGFIKRQLVETRQITKHVAQILDSRMNTKYDENDKLIREVKVITLKSKLVSDFRKDFQFYKVREINNYHHAHDAYLNAVVGTALIKKYPKLESEFVYGDYKVYDVRKMIAKSEQEIGKATAKYFFYSNIMNFFKTEITLANGEIRKRPLIETNGETGEIVWDKGRDFATVRKVLSMPQVNIVKKTEVQTGGFSKESILPKRNSDKLIARKKDWDPKKYGGFDSPTVAYSVLVVAKVEKGKSKKLKSVKELLGITIMERSSFEKNPIDFLEAKGYKEVKKDLIIKLPKYSLFELENGRKRMLASAGELQKGNELALPSKYVNFLYLASHYEKLKGSPEDNEQKQLFVEQHKHYLDEIIEQISEFSKRVILADANLDKVLSAYNKHRDKPIREQAENIIHLFTLTNLGAPAAFKYFDTTIDRKRYTSTKEVLDATLIHQSITGLYETRIDLSQLGGDGGEAAAKEAAAKEAAAKEAAAKGGVPWILKKPLELTIKLDLEEQQGTLLNNSILSKKGKEELKQLFEKYSALWQSWENQVGHRRIRPHKIATGTVKPTPQKQYHINPKAKPDIQIVINDLLKQGVLIQKESTMNTPVYPVPKPNGRWRMVLDYRAVNKVTPLIAVQNQHSYGILGSLFKGRYKTTIDLSNGFWAHPIVPEDYWITAFTWQGKQYCWTVLPQGFLNSPGLFNGDVVDLLQGIPNVEVYVDDVYISHDSEKEHLEYLDILFNRLKEAGYIISLKKSNIANSIVDFLGFQITNEGRGLTDTFKEKLENITAPTTLKQLQSILGLLNFARNFIPDFTELIAPLYALIPKSPKNYVPWQIEHSTTLETLITKLNGAEYLQGRKGDKTLIMKVNASYTTGYIRYYNEGEKKPISYVSIVFSKTELKFTELEKLLTTVHKGLLKALDLSMGQNIHVYSPIVSMQNIQKTPQTAKKALASRWLSWLSYLEDPRIRFFYDPQMPALKDLPAVDTGKDNKKHPSNFQHIFYTDGSAITSPTKEGHLNAGMGIVYFINKDGNLQKQQEWSISLGNHTAQFAEIAAFEFALKKCLPLGGNILVVTDSNYVAKAYNEELDVWASNGFVNNRKKPLKHISKWKSVADLKRLRPDVVVTHEPGHQKLDSSPHAYGNNLADQLATQASFKVHAGKRTADGSEFEKRTADGSEFESPKKKAKVE

SEQ ID NO: 6406 - protein, 2185 aa, synthetic construct
MPAAKRVKLDGGDKKYSIGLDIGTNSVGWAVITDEYKVPSKKFKVLGNTDRHSIKKNLIGALLFDSGETAEATRLKRTARRRYTRRKNRICYLQEIFSNEMAKVDDSFFHRLEESFLVEEDKKHERHPIFGNIVDEVAYHEKYPTIYHLRKKLVDSTDKADLRLIYLALAHMIKFRGHFLIEGDLNPDNSDVDKLFIQLVQTYNQLFEENPINASGVDAKAILSARLSKSRRLENLIAQLPGEKKNGLFGNLIALSLGLTPNFKSNFDLAEDAKLQLSKDTYDDDLDNLLAQIGDQYADLFLAAKNLSDAILLSDILRVNTEITKAPLSASMIKRYDEHHQDLTLLKALVRQQLPEKYKEIFFDQSKNGYAGYIDGGASQEEFYKFIKPILEKMDGTEELLVKLNREDLLRKQRTFDNGSIPHQIHLGELHAILRRQEDFYPFLKDNREKIEKILTFRIPYYVGPLARGNSRFAWMTRKSEETITPWNFEEVVDKGASAQSFIERMTNFDKNLPNEKVLPKHSLLYEYFTVYNELTKVKYVTEGMRKPAFLSGEQKKAIVDLLFKTNRKVTVKQLKEDYFKKIECFDSVEISGVEDRFNASLGTYHDLLKIIKDKDFLDNEENEDILEDIVLTLTLFEDREMIEERLKTYAHLFDDKVMKQLKRRRYTGWGRLSRKLINGIRDKQSGKTILDFLKSDGFANRNFMQLIHDDSLTFKEDIQKAQVSGQGDSLHEHIANLAGSPAIKKGILQTVKVVDELVKVMGRHKPENIVIEMARENQTTQKGQKNSRERMKRIEEGIKELGSQILKEHPVENTQLQNEKLYLYYLQNGRDMYVDQELDINRLSDYDVDHIVPQSFLKDDSIDNKVLTRSDKARGKSDNVPSEEVVKKMKNYWRQLLNAKLITQRKFDNLTKAERGGLSELDKAGFIKRQLVETRQITKHVAQILDSRMNTKYDENDKLIREVKVITLKSKLVSDFRKDFQFYKVREINNYHHAHDAYLNAVVGTALIKKYPKLESEFVYGDYKVYDVRKMIAKSEQEIGKATAKYFFYSNIMNFFKTEITLANGEIRKRPLIETNGETGEIVWDKGRDFATVRKVLSMPQVNIVKKTEVQTGGFSKESILPKRNSDKLIARKKDWDPKKYGGFDSPTVAYSVLVVAKVEKGKSKKLKSVKELLGITIMERSSFEKNPIDFLEAKGYKEVKKDLIIKLPKYSLFELENGRKRMLASAGELQKGNELALPSKYVNFLYLASHYEKLKGSPEDNEQKQLFVEQHKHYLDEIIEQISEFSKRVILADANLDKVLSAYNKHRDKPIREQAENIIHLFTLTNLGAPAAFKYFDTTIDRKRYTSTKEVLDATLIHQSITGLYETRIDLSQLGGDGGEAAAKEAAAKEAAAKEAAAKGGMNPLQLLQPLPAEIKGTKLLAHWNSGATITCIPESFLEDEQPIKKTLIKTIHGEKQQNVYYVTFKVKGRKVEAEVIASPYEYILLSPTDVPWLTQQPLQLTILVPLQEYQEKILSKTALPEDQKQQLKTLFVKYDNLWQHWENQVGHRKIRPHNIATGDYPPRPQKQYPINPKAKPSIQIVIDDLLKQGVLTPQNSTMNTPVYPVPKPDGRWRMVLDYREVNKTIPLTAAQNQHSAGILATIVRQKYKTTLDLANGFWAHPITPESYWLTAFTWQGKQYCWTRLPQGFLNSPALFTADVVDLLKEIPNVQVYVDDIYLSHDDPKEHVQQLEKVFQILLQAGYVVSLKKSEIGQKTVEFLGFNITKEGRGLTDTFKTKLLNITPPKDLKQLQSILGLLNFARNFIPNFAELVQPLYNLIASAKGKYIEWSEENTKQLNMVIEALNTASNLEERLPEQRLVIKVNTSPSAGYVRYYNETGKKPIMYLNYVFSKAELKFSMLEKLLTTMHKALIKAMDLAMGQEILVYSPIVSMTKIQKTPLPERKALPIRWITWMTYLEDPRIQFHYDKTLPELKHIPDVYTSSQSPVKHPSQYEGVFYTDGSAIKSPDPTKSNNAGMGIVHATYKPEYQVLNQWSIPLGNHTAQMAEIAAVEFACKKALKIPGPVLVITDSFYVAESANKELPYWKSNGFVNNKKKPLKHISKWKSIAECLSMKPDITIQHEKGISLQIPVFILKGNALADKLATQGSYVVNAGKRTADGSEFEKRTADGSEFESPKKKAKVE

SEQ ID NO: 6407 - protein, 2103 aa, synthetic construct
MPAAKRVKLDGGDKKYSIGLDIGTNSVGWAVITDEYKVPSKKFKVLGNTDRHSIKKNLIGALLFDSGETAEATRLKRTARRRYTRRKNRICYLQEIFSNEMAKVDDSFFHRLEESFLVEEDKKHERHPIFGNIVDEVAYHEKYPTIYHLRKKLVDSTDKADLRLIYLALAHMIKFRGHFLIEGDLNPDNSDVDKLFIQLVQTYNQLFEENPINASGVDAKAILSARLSKSRRLENLIAQLPGEKKNGLFGNLIALSLGLTPNFKSNFDLAEDAKLQLSKDTYDDDLDNLLAQIGDQYADLFLAAKNLSDAILLSDILRVNTEITKAPLSASMIKRYDEHHQDLTLLKALVRQQLPEKYKEIFFDQSKNGYAGYIDGGASQEEFYKFIKPILEKMDGTEELLVKLNREDLLRKQRTFDNGSIPHQIHLGELHAILRRQEDFYPFLKDNREKIEKILTFRIPYYVGPLARGNSRFAWMTRKSEETITPWNFEEVVDKGASAQSFIERMTNFDKNLPNEKVLPKHSLLYEYFTVYNELTKVKYVTEGMRKPAFLSGEQKKAIVDLLFKTNRKVTVKQLKEDYFKKIECFDSVEISGVEDRFNASLGTYHDLLKIIKDKDFLDNEENEDILEDIVLTLTLFEDREMIEERLKTYAHLFDDKVMKQLKRRRYTGWGRLSRKLINGIRDKQSGKTILDFLKSDGFANRNFMQLIHDDSLTFKEDIQKAQVSGQGDSLHEHIANLAGSPAIKKGILQTVKVVDELVKVMGRHKPENIVIEMARENQTTQKGQKNSRERMKRIEEGIKELGSQILKEHPVENTQLQNEKLYLYYLQNGRDMYVDQELDINRLSDYDVDHIVPQSFLKDDSIDNKVLTRSDKARGKSDNVPSEEVVKKMKNYWRQLLNAKLITQRKFDNLTKAERGGLSELDKAGFIKRQLVETRQITKHVAQILDSRMNTKYDENDKLIREVKVITLKSKLVSDFRKDFQFYKVREINNYHHAHDAYLNAVVGTALIKKYPKLESEFVYGDYKVYDVRKMIAKSEQEIGKATAKYFFYSNIMNFFKTEITLANGEIRKRPLIETNGETGEIVWDKGRDFATVRKVLSMPQVNIVKKTEVQTGGFSKESILPKRNSDKLIARKKDWDPKKYGGFDSPTVAYSVLVVAKVEKGKSKKLKSVKELLGITIMERSSFEKNPIDFLEAKGYKEVKKDLIIKLPKYSLFELENGRKRMLASAGELQKGNELALPSKYVNFLYLASHYEKLKGSPEDNEQKQLFVEQHKHYLDEIIEQISEFSKRVILADANLDKVLSAYNKHRDKPIREQAENIIHLFTLTNLGAPAAFKYFDTTIDRKRYTSTKEVLDATLIHQSITGLYETRIDLSQLGGDGGEAAAKEAAAKEAAAKEAAAKGGVLNLEEEYRLHEKPVPSSIDPSWLQLFPTVWAERAGMGLANQVPPVVVELRSGASPVAVRQYPMSKEAREGIRPHIQKFLDLGVLVPCRSPWNTPLLPVKKPGTNDYRPVQDLREINKRVQDIHPTVPNPYNLLSSLPPSYTWYSVLDLKDAFFCLRLHPNSQPLFAFEWKDPEKGNTGQLTWTRLPQGFKNSPTLFNEALHRDLAPFRALNPQVVLLQYVDDLLVAAPTYEDCKKGTQKLLQELSKLGYRVSAKKAQLCQREVTYLGYLLKEGKRWLTPARKATVMKIPVPTTPRQVREFLGKAGFCRLFIPGFASLAAPLYPLTKPSIPFIWTEEHQQAFDHIKKALLSAPALALPDLTKPFTLYIDERAGVARGVLTQTLGPWRRPVAYLSKKLDPVASGWPTCLKAVAAVALLLKDADKLTLGQNVTVIASHSLESIVRQPPDRWMTNARMTHYQSLLLNERVSFAPPAVLNPATLLPVESEATPVHRCSEILAEETGTRRDLEDQPLPGVPTWYTDGSSFITEGKRRAGAPIVDGKRTVWASSLPEGTSAQKAELVALTQALRLAEGKNINIYTDSRYAFATAHIHGAIYKQRGWLTSAGKDIKNKEEILALLEAIHLPRRVAIIHCPGHQRGSNPVATGNRRADEAAKQAALSTRVLAGTTKPAGKRTADGSEFEKRTADGSEFESPKKKAKVE

SEQ ID NO: 6408 - protein, 2136 aa, synthetic construct
MPAAKRVKLDGGDKKYSIGLDIGTNSVGWAVITDEYKVPSKKFKVLGNTDRHSIKKNLIGALLFDSGETAEATRLKRTARRRYTRRKNRICYLQEIFSNEMAKVDDSFFHRLEESFLVEEDKKHERHPIFGNIVDEVAYHEKYPTIYHLRKKLVDSTDKADLRLIYLALAHMIKFRGHFLIEGDLNPDNSDVDKLFIQLVQTYNQLFEENPINASGVDAKAILSARLSKSRRLENLIAQLPGEKKNGLFGNLIALSLGLTPNFKSNFDLAEDAKLQLSKDTYDDDLDNLLAQIGDQYADLFLAAKNLSDAILLSDILRVNTEITKAPLSASMIKRYDEHHQDLTLLKALVRQQLPEKYKEIFFDQSKNGYAGYIDGGASQEEFYKFIKPILEKMDGTEELLVKLNREDLLRKQRTFDNGSIPHQIHLGELHAILRRQEDFYPFLKDNREKIEKILTFRIPYYVGPLARGNSRFAWMTRKSEETITPWNFEEVVDKGASAQSFIERMTNFDKNLPNEKVLPKHSLLYEYFTVYNELTKVKYVTEGMRKPAFLSGEQKKAIVDLLFKTNRKVTVKQLKEDYFKKIECFDSVEISGVEDRFNASLGTYHDLLKIIKDKDFLDNEENEDILEDIVLTLTLFEDREMIEERLKTYAHLFDDKVMKQLKRRRYTGWGRLSRKLINGIRDKQSGKTILDFLKSDGFANRNFMQLIHDDSLTFKEDIQKAQVSGQGDSLHEHIANLAGSPAIKKGILQTVKVVDELVKVMGRHKPENIVIEMARENQTTQKGQKNSRERMKRIEEGIKELGSQILKEHPVENTQLQNEKLYLYYLQNGRDMYVDQELDINRLSDYDVDHIVPQSFLKDDSIDNKVLTRSDKARGKSDNVPSEEVVKKMKNYWRQLLNAKLITQRKFDNLTKAERGGLSELDKAGFIKRQLVETRQITKHVAQILDSRMNTKYDENDKLIREVKVITLKSKLVSDFRKDFQFYKVREINNYHHAHDAYLNAVVGTALIKKYPKLESEFVYGDYKVYDVRKMIAKSEQEIGKATAKYFFYSNIMNFFKTEITLANGEIRKRPLIETNGETGEIVWDKGRDFATVRKVLSMPQVNIVKKTEVQTGGFSKESILPKRNSDKLIARKKDWDPKKYGGFDSPTVAYSVLVVAKVEKGKSKKLKSVKELLGITIMERSSFEKNPIDFLEAKGYKEVKKDLIIKLPKYSLFELENGRKRMLASAGELQKGNELALPSKYVNFLYLASHYEKLKGSPEDNEQKQLFVEQHKHYLDEIIEQISEFSKRVILADANLDKVLSAYNKHRDKPIREQAENIIHLFTLTNLGAPAAFKYFDTTIDRKRYTSTKEVLDATLIHQSITGLYETRIDLSQLGGDGGEAAAKEAAAKEAAAKEAAAKGGLLGRDLLTKLKAQIQFSTEGPQVTWEDRPAMCLVLNLEEEYRLHEKPVPPSIDPSWLQLFPMVWAEKAGMGLANQVPPVVVELKSDASPVAVRQYPMSKEAREGIRPHIQRFLDLGILVPCQSPWNTPLLPVKKPGTNDYRPVQDLREVNKRVQDIHPTVPNPYNLLSSLPPSHTWYSVLDLKDAFFCLKLHPNSQPLFAFEWRDPEKGNTGQLTWTRLPQGFKNSPTLFDEALHRDLASFRALNPQVVMLQYVDDLLVAAPTYRDCKEGTRRLLQELSKLGYRVSAKKAQLCREEVTYLGYLLKGGKRWLTPARKATVMKIPTPTTPRQVREFLGTAGFCRLWIPGFASLAAPLYPLTREKVPFTWTEAHQEAFGRIKEALLSAPALALPDLTKPFALYVDEKEGVARGVLTQTLGPWRRPVAYLSKKLDPVASGWPTCLKAIAAVALLLKDADKLTLGQNVLVIAPHNLESIVRQPPDRWMTNARMTHYQSLLLNERVSFAPPAILNPATLLPVESDDTPIHICSEILAEETGTRPDLRDQPLPGVPAWYTDGSSFIMDGRRQAGAAIVDNKRTVWASNLPEGTSAQKAELIALTQALRLAEGKSINIYTDSRYAFATAHVHGAIYKQRGLLTSAGKDIKNKEEILALLEAIHLPKRVAIIHCPGHQRGTDPVATGNRKADEAAKQAAQSTRILTETTKNAGKRTADGSEFEKRTADGSEFESPKKKAKVE

SEQ ID NO: 6409 - protein, 2136 aa, synthetic construct
MPAAKRVKLDGGDKKYSIGLDIGTNSVGWAVITDEYKVPSKKFKVLGNTDRHSIKKNLIGALLFDSGETAEATRLKRTARRRYTRRKNRICYLQEIFSNEMAKVDDSFFHRLEESFLVEEDKKHERHPIFGNIVDEVAYHEKYPTIYHLRKKLVDSTDKADLRLIYLALAHMIKFRGHFLIEGDLNPDNSDVDKLFIQLVQTYNQLFEENPINASGVDAKAILSARLSKSRRLENLIAQLPGEKKNGLFGNLIALSLGLTPNFKSNFDLAEDAKLQLSKDTYDDDLDNLLAQIGDQYADLFLAAKNLSDAILLSDILRVNTEITKAPLSASMIKRYDEHHQDLTLLKALVRQQLPEKYKEIFFDQSKNGYAGYIDGGASQEEFYKFIKPILEKMDGTEELLVKLNREDLLRKQRTFDNGSIPHQIHLGELHAILRRQEDFYPFLKDNREKIEKILTFRIPYYVGPLARGNSRFAWMTRKSEETITPWNFEEVVDKGASAQSFIERMTNFDKNLPNEKVLPKHSLLYEYFTVYNELTKVKYVTEGMRKPAFLSGEQKKAIVDLLFKTNRKVTVKQLKEDYFKKIECFDSVEISGVEDRFNASLGTYHDLLKIIKDKDFLDNEENEDILEDIVLTLTLFEDREMIEERLKTYAHLFDDKVMKQLKRRRYTGWGRLSRKLINGIRDKQSGKTILDFLKSDGFANRNFMQLIHDDSLTFKEDIQKAQVSGQGDSLHEHIANLAGSPAIKKGILQTVKVVDELVKVMGRHKPENIVIEMARENQTTQKGQKNSRERMKRIEEGIKELGSQILKEHPVENTQLQNEKLYLYYLQNGRDMYVDQELDINRLSDYDVDHIVPQSFLKDDSIDNKVLTRSDKARGKSDNVPSEEVVKKMKNYWRQLLNAKLITQRKFDNLTKAERGGLSELDKAGFIKRQLVETRQITKHVAQILDSRMNTKYDENDKLIREVKVITLKSKLVSDFRKDFQFYKVREINNYHHAHDAYLNAVVGTALIKKYPKLESEFVYGDYKVYDVRKMIAKSEQEIGKATAKYFFYSNIMNFFKTEITLANGEIRKRPLIETNGETGEIVWDKGRDFATVRKVLSMPQVNIVKKTEVQTGGFSKESILPKRNSDKLIARKKDWDPKKYGGFDSPTVAYSVLVVAKVEKGKSKKLKSVKELLGITIMERSSFEKNPIDFLEAKGYKEVKKDLIIKLPKYSLFELENGRKRMLASAGELQKGNELALPSKYVNFLYLASHYEKLKGSPEDNEQKQLFVEQHKHYLDEIIEQISEFSKRVILADANLDKVLSAYNKHRDKPIREQAENIIHLFTLTNLGAPAAFKYFDTTIDRKRYTSTKEVLDATLIHQSITGLYETRIDLSQLGGDGGEAAAKEAAAKEAAAKEAAAKGGLLGRDLLTKLKAQIQFSTEGPQVTWEDRPAMCLVLNLEEEYRLHEKPVPPSIDPSWLQLFPMVWAEKAGMGLANQVPPVVVELKSDASPVAVRQYPMSKEAREGIRPHIQRFLDLGILVPCQSPWNTPLLPVKKPGTNDYRPVQDLREVNKRVQDIHPTVPNPYNLLSSLPPSHTWYSVLDLKDAFFCLKLHPNSQPLFAFEWRDPEKGNTGQLTWTRLPQGFKNSPTLFNEALHRDLASFRALNPQVVMLQYVDDLLVAAPTYRDCKEGTRRLLQELSKLGYRVSAKKAQLCREEVTYLGYLLKGGKRWLTPARKATVMKIPTPTTPRQVREFLGTAGFCRLWIPGFASLAAPLYPLTRPKVPFTWTEAHQEAFGRIKEALLSAPALALPDLTKPFALYVDEKEGVARGVLTQTLGPWRRPVAYLSKKLDPVASGWPTCLKAIAAVALLLKDADKLTLGQNVLVIAPHNLESIVRQPPDRWMTNARMTHYQSLLLNERVSFAPPAILNPATLLPVESDDTPIHICSEILAEETGTRPDLRDQPLPGVPAWYTDGSSFIMDGRRQAGAAIVDNKRTVWASNLPEGTSAQKAELIALTQALRLAEGKSINIYTDSRYAFATAHVHGAIYKQRGWLTSAGKDIKNKEEILALLEAIHLPKRVAIIHCPGHQRGTDPVATGNRKADEAAKQAAQSTRILTETTKNAGKRTADGSEFEKRTADGSEFESPKKKAKVE

SEQ ID NO: 6410 - protein, 2227 aa, synthetic construct
MPAAKRVKLDGGDKKYSIGLDIGTNSVGWAVITDEYKVPSKKFKVLGNTDRHSIKKNLIGALLFDSGETAEATRLKRTARRRYTRRKNRICYLQEIFSNEMAKVDDSFFHRLEESFLVEEDKKHERHPIFGNIVDEVAYHEKYPTIYHLRKKLVDSTDKADLRLIYLALAHMIKFRGHFLIEGDLNPDNSDVDKLFIQLVQTYNQLFEENPINASGVDAKAILSARLSKSRRLENLIAQLPGEKKNGLFGNLIALSLGLTPNFKSNFDLAEDAKLQLSKDTYDDDLDNLLAQIGDQYADLFLAAKNLSDAILLSDILRVNTEITKAPLSASMIKRYDEHHQDLTLLKALVRQQLPEKYKEIFFDQSKNGYAGYIDGGASQEEFYKFIKPILEKMDGTEELLVKLNREDLLRKQRTFDNGSIPHQIHLGELHAILRRQEDFYPFLKDNREKIEKILTFRIPYYVGPLARGNSRFAWMTRKSEETITPWNFEEVVDKGASAQSFIERMTNFDKNLPNEKVLPKHSLLYEYFTVYNELTKVKYVTEGMRKPAFLSGEQKKAIVDLLFKTNRKVTVKQLKEDYFKKIECFDSVEISGVEDRFNASLGTYHDLLKIIKDKDFLDNEENEDILEDIVLTLTLFEDREMIEERLKTYAHLFDDKVMKQLKRRRYTGWGRLSRKLINGIRDKQSGKTILDFLKSDGFANRNFMQLIHDDSLTFKEDIQKAQVSGQGDSLHEHIANLAGSPAIKKGILQTVKVVDELVKVMGRHKPENIVIEMARENQTTQKGQKNSRERMKRIEEGIKELGSQILKEHPVENTQLQNEKLYLYYLQNGRDMYVDQELDINRLSDYDVDHIVPQSFLKDDSIDNKVLTRSDKARGKSDNVPSEEVVKKMKNYWRQLLNAKLITQRKFDNLTKAERGGLSELDKAGFIKRQLVETRQITKHVAQILDSRMNTKYDENDKLIREVKVITLKSKLVSDFRKDFQFYKVREINNYHHAHDAYLNAVVGTALIKKYPKLESEFVYGDYKVYDVRKMIAKSEQEIGKATAKYFFYSNIMNFFKTEITLANGEIRKRPLIETNGETGEIVWDKGRDFATVRKVLSMPQVNIVKKTEVQTGGFSKESILPKRNSDKLIARKKDWDPKKYGGFDSPTVAYSVLVVAKVEKGKSKKLKSVKELLGITIMERSSFEKNPIDFLEAKGYKEVKKDLIIKLPKYSLFELENGRKRMLASAGELQKGNELALPSKYVNFLYLASHYEKLKGSPEDNEQKQLFVEQHKHYLDEIIEQISEFSKRVILADANLDKVLSAYNKHRDKPIREQAENIIHLFTLTNLGAPAAFKYFDTTIDRKRYTSTKEVLDATLIHQSITGLYETRIDLSQLGGDGGEAAAKEAAAKEAAAKEAAAKGGTLGDQGSRGSDPLPEPRVTLTVEGIPTEFLVNTGAEHSVLTKPMGKMGSKRTVVAGATGSKVYPWTTKRLLKIGQKQVTHSFLVIPECPAPLLGRDLLTKLKAQIQFSTEGPQVTWEDRPAMCLVLNLEEEYRLHEKPVPPSIDPSWLQLFPMVWAEKAGMGLANQVPPVVVELKSDASPVAVRQYPMSKEAREGIRPHIQRFLDLGILVPCQSPWNTPLLPVKKPGTNDYRPVQDLREVNKRVQDIHPTVPNPYNLLSSLPPSHTWYSVLDLKDAFFCLKLHPNSQPLFAFEWRDPEKGNTGQLTWTRLPQGFKNSPTLFNEALHRDLASFRALNPQVVMLQYVDDLLVAAPTYRDCKEGTRRLLQELSKLGYRVSAKKAQLCREEVTYLGYLLKGGKRWLTPARKATVMKIPTPTTPRQVREFLGTAGFCRLWIPGFASLAAPLYPLTRPKVPFTWTEAHQEAFGRIKEALLSAPALALPDLTKPFALYVDEKEGVARGVLTQTLGPWRRPVAYLSKKLDPVASGWPTCLKAIAAVALLLKDADKLTLGQNVLVIAPHNLESIVRQPPDRWMTNARMTHYQSLLLNERVSFAPPAILNPATLLPVESDDTPIHICSEILAEETGTRPDLRDQPLPGVPAWYTDGSSFIMDGRRQAGAAIVDNKRTVWASNLPEGTSAQKAELIALTQALRLAEGKSINIYTDSRYAFATAHVHGAIYKQRGWLTSAGKDIKNKEEILALLEAIHLPKRVAIIHCPGHQRGTDPVATGNRKADEAAKQAAQSTRILTETTKNAGKRTADGSEFEKRTADGSEFESPKKKAKVE

SEQ ID NO: 6411 - protein, 2105 aa, synthetic construct
MPAAKRVKLDGGDKKYSIGLDIGTNSVGWAVITDEYKVPSKKFKVLGNTDRHSIKKNLIGALLFDSGETAEATRLKRTARRRYTRRKNRICYLQEIFSNEMAKVDDSFFHRLEESFLVEEDKKHERHPIFGNIVDEVAYHEKYPTIYHLRKKLVDSTDKADLRLIYLALAHMIKFRGHFLIEGDLNPDNSDVDKLFIQLVQTYNQLFEENPINASGVDAKAILSARLSKSRRLENLIAQLPGEKKNGLFGNLIALSLGLTPNFKSNFDLAEDAKLQLSKDTYDDDLDNLLAQIGDQYADLFLAAKNLSDAILLSDILRVNTEITKAPLSASMIKRYDEHHQDLTLLKALVRQQLPEKYKEIFFDQSKNGYAGYIDGGASQEEFYKFIKPILEKMDGTEELLVKLNREDLLRKQRTFDNGSIPHQIHLGELHAILRRQEDFYPFLKDNREKIEKILTFRIPYYVGPLARGNSRFAWMTRKSEETITPWNFEEVVDKGASAQSFIERMTNFDKNLPNEKVLPKHSLLYEYFTVYNELTKVKYVTEGMRKPAFLSGEQKKAIVDLLFKTNRKVTVKQLKEDYFKKIECFDSVEISGVEDRFNASLGTYHDLLKIIKDKDFLDNEENEDILEDIVLTLTLFEDREMIEERLKTYAHLFDDKVMKQLKRRRYTGWGRLSRKLINGIRDKQSGKTILDFLKSDGFANRNFMQLIHDDSLTFKEDIQKAQVSGQGDSLHEHIANLAGSPAIKKGILQTVKVVDELVKVMGRHKPENIVIEMARENQTTQKGQKNSRERMKRIEEGIKELGSQILKEHPVENTQLQNEKLYLYYLQNGRDMYVDQELDINRLSDYDVDHIVPQSFLKDDSIDNKVLTRSDKARGKSDNVPSEEVVKKMKNYWRQLLNAKLITQRKFDNLTKAERGGLSELDKAGFIKRQLVETRQITKHVAQILDSRMNTKYDENDKLIREVKVITLKSKLVSDFRKDFQFYKVREINNYHHAHDAYLNAVVGTALIKKYPKLESEFVYGDYKVYDVRKMIAKSEQEIGKATAKYFFYSNIMNFFKTEITLANGEIRKRPLIETNGETGEIVWDKGRDFATVRKVLSMPQVNIVKKTEVQTGGFSKESILPKRNSDKLIARKKDWDPKKYGGFDSPTVAYSVLVVAKVEKGKSKKLKSVKELLGITIMERSSFEKNPIDFLEAKGYKEVKKDLIIKLPKYSLFELENGRKRMLASAGELQKGNELALPSKYVNFLYLASHYEKLKGSPEDNEQKQLFVEQHKHYLDEIIEQISEFSKRVILADANLDKVLSAYNKHRDKPIREQAENIIHLFTLTNLGAPAAFKYFDTTIDRKRYTSTKEVLDATLIHQSITGLYETRIDLSQLGGDGGEAAAKEAAAKEAAAKEAAAKGGTLNIEDEHRLHETSKEPDVSLGSTWLSDFPQAWAETGGMGLAVRQAPLIIPLKATSTPVSIKQYPMSQEARLGIKPHIQRLLDQGILVPCQSPWNTPLLPVKKPGTNDYRPVQDLREVNKRVEDIHPTVPNPYNLLSGLPPSHQWYTVLDLKDAFFCLRLHPTSQPLFAFEWRDPEMGISGQLTWTRLPQGFKNSPTLFDEALHRDLADFRIQHPDLILLQYVDDLLLAATSELDCQQGTRALLQTLGNLGYRASAKKAQICQKQVKYLGYLLKEGQRWLTEARKETVMGQPTPKTPRQLREFLGTAGFCRLWIPGFAEMAAPLYPLTKTGTLFNWGPDQQKAYQEIKQALLTAPALGLPDLTKPFELFVDEKQGYAKGVLTQKLGPWRRPVAYLSKKLDPVAAGWPPCLRMVAAIAVLTKDAGKLTMGQPLVILAPHAVEALVKQPPDRWLSNARMTHYQALLLDTDRVQFGPVVALNPATLLPLPEEGLQHNCLDILAEAHGTRPDLTDQPLPDADHTWYTDGSSLLQEGQRKAGAAVTTETEVIWAKALPAGTSAQRAELIALTQALKMAEGKKLNVYTDSRYAFATAHIHGEIYRRRGLLTSEGKEIKNKDEILALLKALFLPKRLSIIHCPGHQKGHSAEARGNRMADQAARKAAITETPDTSTLLAGKRTADGSEFEKRTADGSEFESPKKKAKVE

SEQ ID NO: 6412 - protein, 2099 aa, synthetic construct
MPAAKRVKLDGGDKKYSIGLDIGTNSVGWAVITDEYKVPSKKFKVLGNTDRHSIKKNLIGALLFDSGETAEATRLKRTARRRYTRRKNRICYLQEIFSNEMAKVDDSFFHRLEESFLVEEDKKHERHPIFGNIVDEVAYHEKYPTIYHLRKKLVDSTDKADLRLIYLALAHMIKFRGHFLIEGDLNPDNSDVDKLFIQLVQTYNQLFEENPINASGVDAKAILSARLSKSRRLENLIAQLPGEKKNGLFGNLIALSLGLTPNFKSNFDLAEDAKLQLSKDTYDDDLDNLLAQIGDQYADLFLAAKNLSDAILLSDILRVNTEITKAPLSASMIKRYDEHHQDLTLLKALVRQQLPEKYKEIFFDQSKNGYAGYIDGGASQEEFYKFIKPILEKMDGTEELLVKLNREDLLRKQRTFDNGSIPHQIHLGELHAILRRQEDFYPFLKDNREKIEKILTFRIPYYVGPLARGNSRFAWMTRKSEETITPWNFEEVVDKGASAQSFIERMTNFDKNLPNEKVLPKHSLLYEYFTVYNELTKVKYVTEGMRKPAFLSGEQKKAIVDLLFKTNRKVTVKQLKEDYFKKIECFDSVEISGVEDRFNASLGTYHDLLKIIKDKDFLDNEENEDILEDIVLTLTLFEDREMIEERLKTYAHLFDDKVMKQLKRRRYTGWGRLSRKLINGIRDKQSGKTILDFLKSDGFANRNFMQLIHDDSLTFKEDIQKAQVSGQGDSLHEHIANLAGSPAIKKGILQTVKVVDELVKVMGRHKPENIVIEMARENQTTQKGQKNSRERMKRIEEGIKELGSQILKEHPVENTQLQNEKLYLYYLQNGRDMYVDQELDINRLSDYDVDHIVPQSFLKDDSIDNKVLTRSDKARGKSDNVPSEEVVKKMKNYWRQLLNAKLITQRKFDNLTKAERGGLSELDKAGFIKRQLVETRQITKHVAQILDSRMNTKYDENDKLIREVKVITLKSKLVSDFRKDFQFYKVREINNYHHAHDAYLNAVVGTALIKKYPKLESEFVYGDYKVYDVRKMIAKSEQEIGKATAKYFFYSNIMNFFKTEITLANGEIRKRPLIETNGETGEIVWDKGRDFATVRKVLSMPQVNIVKKTEVQTGGFSKESILPKRNSDKLIARKKDWDPKKYGGFDSPTVAYSVLVVAKVEKGKSKKLKSVKELLGITIMERSSFEKNPIDFLEAKGYKEVKKDLIIKLPKYSLFELENGRKRMLASAGELQKGNELALPSKYVNFLYLASHYEKLKGSPEDNEQKQLFVEQHKHYLDEIIEQISEFSKRVILADANLDKVLSAYNKHRDKPIREQAENIIHLFTLTNLGAPAAFKYFDTTIDRKRYTSTKEVLDATLIHQSITGLYETRIDLSQLGGDGGEAAAKEAAAKEAAAKEAAAKGGTLQLDDEYRLYSPLVKPDQNIQFWLEQFPQAWAETAGMGLAKQVPPQVIQLKASATPVSVRQYPLSKEAQEGIRPHVQRLIQQGILVPVQSPWNTPLLPVRKPGTNDYRPVQDLREVNKRVQDIHPTVPNPYNLLCALPPQRSWYTVLDLKDAFFCLRLHPTSQPLFAFEWRDPGTGRTGQLTWTRLPQGFKNSPTIFDEALHRDLANFRIQHPQVTLLQYVDDLLLAGATKQDCLEGTKALLLELSDLGYRASAKKAQICRREVTYLGYSLRDGQRWLTEARKKTVVQIPAPTTAKQVREFLGTAGFCRLWIPGFATLAAPLYPLTKEKGEFSWAPEHQKAFDAIKKALLSAPALALPDVTKPFTLYVDERKGVARGVLTQTLGPWRRPVAYLSKKLDPVASGWPVCLKAIAAVAILVKDADKLTLGQNITVIAPHALENIVRQPPDRWMTNARMTHYQSLLLTERVTFAPPAALNPATLLPEETDEPVTHDCHQLLIEETGVRKDLTDIPLTGEVLTWFTDGSSYVVEGKRMAGAAVVDGTRTIWASSLPEGTSAQKAELMALTQALRLAEGKSINIYTDSRYAFATAHVHGAIYKQRGLLTSAGREIKNKEEILSLLEALHLPKRLAIIHCPGHQKAKDPISRGNQMADRVAKQAAQGVNLLAGKRTADGSEFEKRTADGSEFESPKKKAKVE

SEQ ID NO: 6413 - protein, 2099 aa, synthetic construct; identical to SEQ ID NO: 6412

SEQ ID NO: 6414 - protein, 2096 aa, synthetic construct
MPAAKRVKLDGGDKKYSIGLDIGTNSVGWAVITDEYKVPSKKFKVLGNTDRHSIKKNLIGALLFDSGETAEATRLKRTARRRYTRRKNRICYLQEIFSNEMAKVDDSFFHRLEESFLVEEDKKHERHPIFGNIVDEVAYHEKYPTIYHLRKKLVDSTDKADLRLIYLALAHMIKFRGHFLIEGDLNPDNSDVDKLFIQLVQTYNQLFEENPINASGVDAKAILSARLSKSRRLENLIAQLPGEKKNGLFGNLIALSLGLTPNFKSNFDLAEDAKLQLSKDTYDDDLDNLLAQIGDQYADLFLAAKNLSDAILLSDILRVNTEITKAPLSASMIKRYDEHHQDLTLLKALVRQQLPEKYKEIFFDQSKNGYAGYIDGGASQEEFYKFIKPILEKMDGTEELLVKLNREDLLRKQRTFDNGSIPHQIHLGELHAILRRQEDFYPFLKDNREKIEKILTFRIPYYVGPLARGNSRFAWMTRKSEETITPWNFEEVVDKGASAQSFIERMTNFDKNLPNEKVLPKHSLLYEYFTVYNELTKVKYVTEGMRKPAFLSGEQKKAIVDLLFKTNRKVTVKQLKEDYFKKIECFDSVEISGVEDRFNASLGTYHDLLKIIKDKDFLDNEENEDILEDIVLTLTLFEDREMIEERLKTYAHLFDDKVMKQLKRRRYTGWGRLSRKLINGIRDKQSGKTILDFLKSDGFANRNFMQLIHDDSLTFKEDIQKAQVSGQGDSLHEHIANLAGSPAIKKGILQTVKVVDELVKVMGRHKPENIVIEMARENQTTQKGQKNSRERMKRIEEGIKELGSQILKEHPVENTQLQNEKLYLYYLQNGRDMYVDQELDINRLSDYDVDHIVPQSFLKDDSIDNKVLTRSDKARGKSDNVPSEEVVKKMKNYWRQLLNAKLITQRKFDNLTKAERGGLSELDKAGFIKRQLVETRQITKHVAQILDSRMNTKYDENDKLIREVKVITLKSKLVSDFRKDFQFYKVREINNYHHAHDAYLNAVVGTALIKKYPKLESEFVYGDYKVYDVRKMIAKSEQEIGKATAKYFFYSNIMNFFKTEITLANGEIRKRPLIETNGETGEIVWDKGRDFATVRKVLSMPQVNIVKKTEVQTGGFSKESILPKRNSDKLIARKKDWDPKKYGGFDSPTVAYSVLVVAKVEKGKSKKLKSVKELLGITIMERSSFEKNPIDFLEAKGYKEVKKDLIIKLPKYSLFELENGRKRMLASAGELQKGNELALPSKYVNFLYLASHYEKLKGSPEDNEQKQLFVEQHKHYLDEIIEQISEFSKRVILADANLDKVLSAYNKHRDKPIREQAENIIHLFTLTNLGAPAAFKYFDTTIDRKRYTSTKEVLDATLIHQSITGLYETRIDLSQLGGDGGEAAAKEAAAKEAAAKEAAAKGGVPWLMKKPLQLTVLVPLHEYQERLLQQTALPKEQKELLQKLFLKYDALWQHWENQVGHRRIKPHNIATGTLAPRPQKQYPINPKAKPSIQIVIDDLLKQGVLIQQNSTMNTPVYPVPKPDGKWRMVLDYREVNKTIPLIAAQNQHSAGILSSIYRGKYKTTLDLTNGFWAHPITPESYWLTAFTWQGKQYCWTRLPQGFLNSPALFNADVVDLLKEIPNVQAYVDDIYISHDDPQEHLEQLEKIFSILLNAGYVVSLKKSEIAQREVEFLGFNITKEGRGLTDTFKQKLLNITPPKDLKQLQSILGKLNFARNFIPNYSELVKPLYTIVAPANGKFISWTEDNSNQLQHIISVLNQADNLEERNPETRLIIKVNSSPSAGYIRYYNEGSKRPIMYVNYIFSKAEAKFTQTEKLLTTMHKGLIKAMDLAMGQEILVYSPIVSMTKIQRTPLPERKALPVRWITWMTYLEDPRIQFHYDKSLPELQQIPNVTEDVIAKTKHPSEFAMVFYTDGSAIKHPDVNKSHSAGMGIAQVQFIPEYKIVHQWSIPLGDHTAQLAEIAAVEFACKKALKISGPVLIVTDSFYVAESANKELPYWKSNGFLNNKKKPLRHVSKWKSIAECLQLKPDIIIMHEKGHQQPMTTLHTEGNNLADKLATQGSYVVHAGKRTADGSEFEKRTADGSEFESPKKKAKVE

SEQ ID NO: 6415 - protein, 2185 aa, synthetic construct
MPAAKRVKLDGGDKKYSIGLDIGTNSVGWAVITDEYKVPSKKFKVLGNTDRHSIKKNLIGALLFDSGETAEATRLKRTARRRYTRRKNRICYLQEIFSNEMAKVDDSFFHRLEESFLVEEDKKHERHPIFGNIVDEVAYHEKYPTIYHLRKKLVDSTDKADLRLIYLALAHMIKFRGHFLIEGDLNPDNSDVDKLFIQLVQTYNQLFEENPINASGVDAKAILSARLSKSRRLENLIAQLPGEKKNGLFGNLIALSLGLTPNFKSNFDLAEDAKLQLSKDTYDDDLDNLLAQIGDQYADLFLAAKNLSDAILLSDILRVNTEITKAPLSASMIKRYDEHHQDLTLLKALVRQQLPEKYKEIFFDQSKNGYAGYIDGGASQEEFYKFIKPILEKMDGTEELLVKLNREDLLRKQRTFDNGSIPHQIHLGELHAILRRQEDFYPFLKDNREKIEKILTFRIPYYVGPLARGNSRFAWMTRKSEETITPWNFEEVVDKGASAQSFIERMTNFDKNLPNEKVLPKHSLLYEYFTVYNELTKVKYVTEGMRKPAFLSGEQKKAIVDLLFKTNRKVTVKQLKEDYFKKIECFDSVEISGVEDRFNASLGTYHDLLKIIKDKDFLDNEENEDILEDIVLTLTLFEDREMIEERLKTYAHLFDDKVMKQLKRRRYTGWGRLSRKLINGIRDKQSGKTILDFLKSDGFANRNFMQLIHDDSLTFKEDIQKAQVSGQGDSLHEHIANLAGSPAIKKGILQTVKVVDELVKVMGRHKPENIVIEMARENQTTQKGQKNSRERMKRIEEGIKELGSQILKEHPVENTQLQNEKLYLYYLQNGRDMYVDQELDINRLSDYDVDHIVPQSFLKDDSIDNKVLTRSDKARGKSDNVPSEEVVKKMKNYWRQLLNAKLITQRKFDNLTKAERGGLSELDKAGFIKRQLVETRQITKHVAQILDSRMNTKYDENDKLIREVKVITLKSKLVSDFRKDFQFYKVREINNYHHAHDAYLNAVVGTALIKKYPKLESEFVYGDYKVYDVRKMIAKSEQEIGKATAKYFFYSNIMNFFKTEITLANGEIRKRPLIETNGETGEIVWDKGRDFATVRKVLSMPQVNIVKKTEVQTGGFSKESILPKRNSDKLIARKKDWDPKKYGGFDSPTVAYSVLVVAKVEKGKSKKLKSVKELLGITIMERSSFEKNPIDFLEAKGYKEVKKDLIIKLPKYSLFELENGRKRMLASAGELQKGNELALPSKYVNFLYLASHYEKLKGSPEDNEQKQLFVEQHKHYLDEIIEQISEFSKRVILADANLDKVLSAYNKHRDKPIREQAENIIHLFTLTNLGAPAAFKYFDTTIDRKRYTSTKEVLDATLIHQSITGLYETRIDLSQLGGDGGEAAAKEAAAKEAAAKEAAAKGGMDPLQLLQPLEAEIKGTKLKAHWNSGATITCVPEAFLEDERPIQTMLIKTIHGEKQQDVYYLTFKVQGRKVEAEVLASPYDYILLNPSDVPWLMKKPLQLTVLVPLHEYQERLLQQTALPKEQKELLQKLFLKYDALWQHWENQVGHRRIKPHNIATGTLAPRPQKQYPINPKAKPSIQIVIDDLLKQGVLIQQNSTMNTPVYPVPKPDGKWRMVLDYREVNKTIPLIAAQNQHSAGILSSIYRGKYKTTLDLTNGFWAHPITPESYWLTAFTWQGKQYCWTRLPQGFLNSPALFNADVVDLLKEIPNVQAYVDDIYISHDDPQEHLEQLEKIFSILLNAGYVVSLKKSEIAQREVEFLGFNITKEGRGLTDTFKQKLLNITPPKDLKQLQSILGLLNFARNFIPNYSELVKPLYTIVAPANGKFISWTEDNSNQLQHIISVLNQADNLEERNPETRLIIKVNSSPSAGYIRYYNEGSKRPIMYVNYIFSKAEAKFTQTEKLLTTMHKGLIKAMDLAMGQEILVYSPIVSMTKIQRTPLPERKALPVRWITWMTYLEDPRIQFHYDKSLPELQQIPNVTEDVIAKTKHPSEFAMVFYTDGSAIKHPDVNKSHSAGMGIAQVQFIPEYKIVHQWSIPLGDHTAQLAEIAAVEFACKKALKISGPVLIVTDSFYVAESANKELPYWKSNGFLNNKKKPLRHVSKWKSIAECLQLKPDIIIMHEKGHQQPMTTLHTEGNNLADKLATQGSYVVHAGKRTADGSEFEKRTADGSEFESPKKKAKVE

SEQ ID NO: 6416 - protein, 2185 aa, synthetic construct
MPAAKRVKLDGGDKKYSIGLDIGTNSVGWAVITDEYKVPSKKFKVLGNTDRHSIKKNLIGALLFDSGETAEATRLKRTARRRYTRRKNRICYLQEIFSNEMAKVDDSFFHRLEESFLVEEDKKHERHPIFGNIVDEVAYHEKYPTIYHLRKKLVDSTDKADLRLIYLALAHMIKFRGHFLIEGDLNPDNSDVDKLFIQLVQTYNQLFEENPINASGVDAKAILSARLSKSRRLENLIAQLPGEKKNGLFGNLIALSLGLTPNFKSNFDLAEDAKLQLSKDTYDDDLDNLLAQIGDQYADLFLAAKNLSDAILLSDILRVNTEITKAPLSASMIKRYDEHHQDLTLLKALVRQQLPEKYKEIFFDQSKNGYAGYIDGGASQEEFYKFIKPILEKMDGTEELLVKLNREDLLRKQRTFDNGSIPHQIHLGELHAILRRQEDFYPFLKDNREKIEKILTFRIPYYVGPLARGNSRFAWMTRKSEETITPWNFEEVVDKGASAQSFIERMTNFDKNLPNEKVLPKHSLLYEYFTVYNELTKVKYVTEGMRKPAFLSGEQKKAIVDLLFKTNRKVTVKQLKEDYFKKIECFDSVEISGVEDRFNASLGTYHDLLKIIKDKDFLDNEENEDILEDIVLTLTLFEDREMIEERLKTYAHLFDDKVMKQLKRRRYTGWGRLSRKLINGIRDKQSGKTILDFLKSDGFANRNFMQLIHDDSLTFKEDIQKAQVSGQGDSLHEHIANLAGSPAIKKGILQTVKVVDELVKVMGRHKPENIVIEMARENQTTQKGQKNSRERMKRIEEGIKELGSQILKEHPVENTQLQNEKLYLYYLQNGRDMYVDQELDINRLSDYDVDHIVPQSFLKDDSIDNKVLTRSDKARGKSDNVPSEEVVKKMKNYWRQLLNAKLITQRKFDNLTKAERGGLSELDKAGFIKRQLVETRQITKHVAQILDSRMNTKYDENDKLIREVKVITLKSKLVSDFRKDFQFYKVREINNYHHAHDAYLNAVVGTALIKKYPKLESEFVYGDYKVYDVRKMIAKSEQEIGKATAKYFFYSNIMNFFKTEITLANGEIRKRPLIETNGETGEIVWDKGRDFATVRKVLSMPQVNIVKKTEVQTGGFSKESILPKRNSDKLIARKKDWDPKKYGGFDSPTVAYSVLVVAKVEKGKSKKLKSVKELLGITIMERSSFEKNPIDFLEAKGYKEVKKDLIIKLPKYSLFELENGRKRMLASAGELQKGNELALPSKYVNFLYLASHYEKLKGSPEDNEQKQLFVEQHKHYLDEIIEQISEFSKRVILADANLDKVLSAYNKHRDKPIREQAENIIHLFTLTNLGAPAAFKYFDTTIDRKRYTSTKEVLDATLIHQSITGLYETRIDLSQLGGDGGEAAAKEAAAKEAAAKEAAAKGGMDPLQLLQPLEAEIKGTKLKAHWNSGATITCVPEAFLEDERPIQTMLIKTIHGEKQQDVYYLTFKVQGRKVEAEVLASPYDYILLNPSDVPWLMKKPLQLTVLVPLHEYQERLLQQTALPKEQKELLQKLFLKYDALWQHWENQVGHRRIKPHNIATGTLAPRPQKQYPINPKAKPSIQIVIDDLLKQGVLIQQNSTMNTPVYPVPKPDGKWRMVLDYREVNKTIPLIAAQNQHSAGILSSIYRGKYKTTLDLTNGFWAHPITPESYWLTAFTWQGKQYCWTRLPQGFLNSPALFNADVVDLLKEIPNVQAYVDDIYISHDDPQEHLEQLEKIFSILLNAGYVVSLKKSEIAQREVEFLGFNITKEGRGLTDTFKQKLLNITPPKDLKQLQSILGKLNFARNFIPNYSELVKPLYTIVAPANGKFISWTEDNSNQLQHIISVLNQADNLEERNPETRLIIKVNSSPSAGYIRYYNEGSKRPIMYVNYIFSKAEAKFTQTEKLLTTMHKGLIKAMDLAMGQEILVYSPIVSMTKIQRTPLPERKALPVRWITWMTYLEDPRIQFHYDKSLPELQQIPNVTEDVIAKTKHPSEFAMVFYTDGSAIKHPDVNKSHSAGMGIAQVQFIPEYKIVHQWSIPLGDHTAQLAEIAAVEFACKKALKISGPVLIVTDSFYVAESANKELPYWKSNGFLNNKKKPLRHVSKWKSIAECLQLKPDIIIMHEKGHQQPMTTLHTEGNNLADKLATQGSYVVHAGKRTADGSEFEKRTADGSEFESPKKKAKVE

SEQ ID NO: 6417 - protein, 2185 aa, synthetic construct
MPAAKRVKLDGGDKKYSIGLDIGTNSVGWAVITDEYKVPSKKFKVLGNTDRHSIKKNLIGALLFDSGETAEATRLKRTARRRYTRRKNRICYLQEIFSNEMAKVDDSFFHRLEESFLVEEDKKHERHPIFGNIVDEVAYHEKYPTIYHLRKKLVDSTDKADLRLIYLALAHMIKFRGHFLIEGDLNPDNSDVDKLFIQLVQTYNQLFEENPINASGVDAKAILSARLSKSRRLENLIAQLPGEKKNGLFGNLIALSLGLTPNFKSNFDLAEDAKLQLSKDTYDDDLDNLLAQIGDQYADLFLAAKNLSDAILLSDILRVNTEITKAPLSASMIKRYDEHHQDLTLLKALVRQQLPEKYKEIFFDQSKNGYAGYIDGGASQEEFYKFIKPILEKMDGTEELLVKLNREDLLRKQRTFDNGSIPHQIHLGELHAILRRQEDFYPFLKDNREKIEKILTFRIPYYVGPLARGNSRFAWMTRKSEETITPWNFEEVVDKGASAQSFIERMTNFDKNLPNEKVLPKHSLLYEYFTVYNELTKVKYVTEGMRKPAFLSGEQKKAIVDLLFKTNRKVTVKQLKEDYFKKIECFDSVEISGVEDRFNASLGTYHDLLKIIKDKDFLDNEENEDILEDIVLTLTLFEDREMIEERLKTYAHLFDDKVMKQLKRRRYTGWGRLSRKLINGIRDKQSGKTILDFLKSDGFANRNFMQLIHDDSLTFKEDIQKAQVSGQGDSLHEHIANLAGSPAIKKGILQTVKVVDELVKVMGRHKPENIVIEMARENQTTQKGQKNSRERMKRIEEGIKELGSQILKEHPVENTQLQNEKLYLYYLQNGRDMYVDQELDINRLSDYDVDHIVPQSFLKDDSIDNKVLTRSDKARGKSDNVPSEEVVKKMKNYWRQLLNAKLITQRKFDNLTKAERGGLSELDKAGFIKRQLVETRQITKHVAQILDSRMNTKYDENDKLIREVKVITLKSKLVSDFRKDFQFYKVREINNYHHAHDAYLNAVVGTALIKKYPKLESEFVYGDYKVYDVRKMIAKSEQEIGKATAKYFFYSNIMNFFKTEITLANGEIRKRPLIETNGETGEIVWDKGRDFATVRKVLSMPQVNIVKKTEVQTGGFSKESILPKRNSDKLIARKKDWDPKKYGGFDSPTVAYSVLVVAKVEKGKSKKLKSVKELLGITIMERSSFEKNPIDFLEAKGYKEVKKDLIIKLPKYSLFELENGRKRMLASAGELQKGNELALPSKYVNFLYLASHYEKLKGSPEDNEQKQLFVEQHKHYLDEIIEQISEFSKRVILADANLDKVLSAYNKHRDKPIREQAENIIHLFTLTNLGAPAAFKYFDTTIDRKRYTSTKEVLDATLIHQSITGLYETRIDLSQLGGDGGEAAAKEAAAKEAAAKEAAAKGGMDPLQLLQPLEAEIKGTKLKAHWNSGATITCVPQAFLEEEVPIKNIWIKTIHGEKEQPVYYLTFKIQGRKVEAEVISSPYDYILVSPSDIPWLMKKPLQLTTLVPLQEYEERLLKQTMLTGSYKEKLQSLFLKYDALWQHWENQVGHRRIKPHHIATGTVNPRPQKQYPINPKAKASIQTVINDLLKQGVLIQQNSIMNTPVYPVPKPDGKWRMVLDYREVNKTIPLIAAQNQHSAGILSSIFRGKYKTTLDLSNGFWAHSITPESYWLTAFTWLGQQYCWTRLPQGFLNSPALFNADVVDLLKEVPNVQVYVDDIYISHDDPREHLEQLEKVFSLLLNAGYVVSLKKSEIAQHEVEFLGFNITKEGRGLTETFKQKLLNITPPRDLKQLQSILGLLNFARNFIPNFSELVKPLYNIIATAPGKYITWTTDNSQQLQNIISMLNSAENLEERNPEVRLIMKVNTSPSAGYIRFYNEFAKRPIMYLNYVYTKAEVKFTNTEKLLTTIHKGLIKALDLGMGQEILVYSPIVSMTKIQKTPLPERKALPIRWITWMSYLEDPRIQFHYDKTLPELQQVPTVTDDIIAKIKHPSEFSMVFYTDGSAIKHPNVNKSHNAGMGIAQVQFKPEFTVINTWSIPLGDHTAQLAEVAAVEFACKKALKIDGPVLIVTDSFYVAESVNKELPYWQSNGFFNNKKKPLKHVSKWKSIADCIQLKPDIIIIHEKGHQPTASTFHTEGNNLADKLATQGSYVVNAGKRTADGSEFEKRTADGSEFESPKKKAKVE

SEQ ID NO: 6418 - protein, 2185 aa, synthetic construct
MPAAKRVKLDGGDKKYSIGLDIGTNSVGWAVITDEYKVPSKKFKVLGNTDRHSIKKNLIGALLFDSGETAEATRLKRTARRRYTRRKNRICYLQEIFSNEMAKVDDSFFHRLEESFLVEEDKKHERHPIFGNIVDEVAYHEKYPTIYHLRKKLVDSTDKADLRLIYLALAHMIKFRGHFLIEGDLNPDNSDVDKLFIQLVQTYNQLFEENPINASGVDAKAILSARLSKSRRLENLIAQLPGEKKNGLFGNLIALSLGLTPNFKSNFDLAEDAKLQLSKDTYDDDLDNLLAQIGDQYADLFLAAKNLSDAILLSDILRVNTEITKAPLSASMIKRYDEHHQDLTLLKALVRQQLPEKYKEIFFDQSKNGYAGYIDGGASQEEFYKFIKPILEKMDGTEELLVKLNREDLLRKQRTFDNGSIPHQIHLGELHAILRRQEDFYPFLKDNREKIEKILTFRIPYYVGPLARGNSRFAWMTRKSEETITPWNFEEVVDKGASAQSFIERMTNFDKNLPNEKVLPKHSLLYEYFTVYNELTKVKYVTEGMRKPAFLSGEQKKAIVDLLFKTNRKVTVKQLKEDYFKKIECFDSVEISGVEDRFNASLGTYHDLLKIIKDKDFLDNEENEDILEDIVLTLTLFEDREMIEERLKTYAHLFDDKVMKQLKRRRYTGWGRLSRKLINGIRDKQSGKTILDFLKSDGFANRNFMQLIHDDSLTFKEDIQKAQVSGQGDSLHEHIANLAGSPAIKKGILQTVKVVDELVKVMGRHKPENIVIEMARENQTTQKGQKNSRERMKRIEEGIKELGSQILKEHPVENTQLQNEKLYLYYLQNGRDMYVDQELDINRLSDYDVDHIVPQSFLKDDSIDNKVLTRSDKARGKSDNVPSEEVVKKMKNYWRQLLNAKLITQRKFDNLTKAERGGLSELDKAGFIKRQLVETRQITKHVAQILDSRMNTKYDENDKLIREVKVITLKSKLVSDFRKDFQFYKVREINNYHHAHDAYLNAVVGTALIKKYPKLESEFVYGDYKVYDVRKMIAKSEQEIGKATAKYFFYSNIMNFFKTEITLANGEIRKRPLIETNGETGEIVWDKGRDFATVRKVLSMPQVNIVKKTEVQTGGFSKESILPKRNSDKLIARKKDWDPKKYGGFDSPTVAYSVLVVAKVEKGKSKKLKSVKELLGITIMERSSFEKNPIDFLEAKGYKEVKKDLIIKLPKYSLFELENGRKRMLASAGELQKGNELALPSKYVNFLYLASHYEKLKGSPEDNEQKQLFVEQHKHYLDEIIEQISEFSKRVILADANLDKVLSAYNKHRDKPIREQAENIIHLFTLTNLGAPAAFKYFDTTIDRKRYTSTKEVLDATLIHQSITGLYETRIDLSQLGGDGGEAAAKEAAAKEAAAKEAAAKGGMDPLQLLQPLEAEIKGTKLKAHWNSGATITCVPQAFLEEEVPIKNIWIKTIHGEKEQPVYYLTFKIQGRKVEAEVISSPYDYILVSPSDIPWLMKKPLQLTTLVPLQEYEERLLKQTMLTGSYKEKLQSLFLKYDALWQHWENQVGHRRIKPHHIATGTVNPRPQKQYPINPKAKASIQTVINDLLKQGVLIQQNSIMNTPVYPVPKPDGKWRMVLDYREVNKTIPLIAAQNQHSAGILSSIFRGKYKTTLDLSNGFWAHSITPESYWLTAFTWLGQQYCWTRLPQGFLNSPALFNADVVDLLKEVPNVQVYVDDIYISHDDPREHLEQLEKVFSLLLNAGYVVSLKKSEIAQHEVEFLGFNITKEGRGLTETFKQKLLNITPPRDLKQLQSILGKLNFARNFIPNFSELVKPLYNIIATAPGKYITWTTDNSQQLQNIISMLNSAENLEERNPEVRLIMKVNTSPSAGYIRFYNEFAKRPIMYLNYVYTKAEVKFTNTEKLLTTIHKGLIKALDLGMGQEILVYSPIVSMTKIQKTPLPERKALPIRWITWMSYLEDPRIQFHYDKTLPELQQVPTVTDDIIAKIKHPSEFSMVFYTDGSAIKHPNVNKSHNAGMGIAQVQFKPEFTVINTWSIPLGDHTAQLAEVAAVEFACKKALKIDGPVLIVTDSFYVAESVNKELPYWQSNGFFNNKKKPLKHVSKWKSIADCIQLKPDIIIIHEKGHQPTASTFHTEGNNLADKLATQGSYVVNAGKRTADGSEFEKRTADGSEFESPKKKAKVE

SEQ ID NO: 6419 - protein, 2105 aa, synthetic construct
MPAAKRVKLDGGDKKYSIGLDIGTNSVGWAVITDEYKVPSKKFKVLGNTDRHSIKKNLIGALLFDSGETAEATRLKRTARRRYTRRKNRICYLQEIFSNEMAKVDDSFFHRLEESFLVEEDKKHERHPIFGNIVDEVAYHEKYPTIYHLRKKLVDSTDKADLRLIYLALAHMIKFRGHFLIEGDLNPDNSDVDKLFIQLVQTYNQLFEENPINASGVDAKAILSARLSKSRRLENLIAQLPGEKKNGLFGNLIALSLGLTPNFKSNFDLAEDAKLQLSKDTYDDDLDNLLAQIGDQYADLFLAAKNLSDAILLSDILRVNTEITKAPLSASMIKRYDEHHQDLTLLKALVRQQLPEKYKEIFFDQSKNGYAGYIDGGASQEEFYKFIKPILEKMDGTEELLVKLNREDLLRKQRTFDNGSIPHQIHLGELHAILRRQEDFYPFLKDNREKIEKILTFRIPYYVGPLARGNSRFAWMTRKSEETITPWNFEEVVDKGASAQSFIERMTNFDKNLPNEKVLPKHSLLYEYFTVYNELTKVKYVTEGMRKPAFLSGEQKKAIVDLLFKTNRKVTVKQLKEDYFKKIECFDSVEISGVEDRFNASLGTYHDLLKIIKDKDFLDNEENEDILEDIVLTLTLFEDREMIEERLKTYAHLFDDKVMKQLKRRRYTGWGRLSRKLINGIRDKQSGKTILDFLKSDGFANRNFMQLIHDDSLTFKEDIQKAQVSGQGDSLHEHIANLAGSPAIKKGILQTVKVVDELVKVMGRHKPENIVIEMARENQTTQKGQKNSRERMKRIEEGIKELGSQILKEHPVENTQLQNEKLYLYYLQNGRDMYVDQELDINRLSDYDVDHIVPQSFLKDDSIDNKVLTRSDKARGKSDNVPSEEVVKKMKNYWRQLLNAKLITQRKFDNLTKAERGGLSELDKAGFIKRQLVETRQITKHVAQILDSRMNTKYDENDKLIREVKVITLKSKLVSDFRKDFQFYKVREINNYHHAHDAYLNAVVGTALIKKYPKLESEFVYGDYKVYDVRKMIAKSEQEIGKATAKYFFYSNIMNFFKTEITLANGEIRKRPLIETNGETGEIVWDKGRDFATVRKVLSMPQVNIVKKTEVQTGGFSKESILPKRNSDKLIARKKDWDPKKYGGFDSPTVAYSVLVVAKVEKGKSKKLKSVKELLGITIMERSSFEKNPIDFLEAKGYKEVKKDLIIKLPKYSLFELENGRKRMLASAGELQKGNELALPSKYVNFLYLASHYEKLKGSPEDNEQKQLFVEQHKHYLDEIIEQISEFSKRVILADANLDKVLSAYNKHRDKPIREQAENIIHLFTLTNLGAPAAFKYFDTTIDRKRYTSTKEVLDATLIHQSITGLYETRIDLSQLGGDGGEAAAKEAAAKEAAAKEAAAKGGTLNIEDEYRLHETSKEPDVPLGSTWLSDFPQAWAETGGMGLAVRQAPLIIPLKATSTPVSIKQYPMSQEARLGIKPHIQRLLDQGILVPCQSPWNTPLLPVKKPGTNDYRPVQDLREVNKRVEDIHPTVPNPYNLLSGLPPSHQWYTVLDLKDAFFCLRLHPTSQPLFAFEWRDPEMGISGQLTWTRLPQGFKNSPTLFDEALHRDLADFRIQHPDLILLQYVDDLLLAATSEQDCQRGTRALLQTLGNLGYRASAKKAQICQKQVKYLGYLLKEGQRWLTEARKETVMGQPTPKTPRQLREFLGTAGFCRLWIPGFAEMAAPLYPLTKTGTLFNWGPDQQKAYQEIKQALLTAPALGLPDLTKPFELFVDEKQGYAKGVLTQKLGPWRRPVAYLSKKLDPVAAGWPPCLRMVAAIAVLTKDAGKLTMGQPLVILAPHAVEALVKQPPDRWLSNARMTHYQAMLLDTDRVQFGPVVALNPATLLPLPEKEAPHDCLEILAETHGTRPDLTDQPIPDADYTWYTDGSSFLQEGQRRAGAAVTTETEVIWARALPAGTSAQRAELIALTQALKMAEGKKLNVYTDSRYAFATAHVHGEIYRRRGLLTSEGREIKNKNEILALLKALFLPKRLSIIHCPGHQKGNSAEARGNRMADQAAREAAMKAVLETSTLLAGKRTADGSEFEKRTADGSEFESPKKKAKVE

SEQ ID NO: 6420 - protein, 2112 aa, synthetic construct
MPAAKRVKLDGGDKKYSIGLDIGTNSVGWAVITDEYKVPSKKFKVLGNTDRHSIKKNLIGALLFDSGETAEATRLKRTARRRYTRRKNRICYLQEIFSNEMAKVDDSFFHRLEESFLVEEDKKHERHPIFGNIVDEVAYHEKYPTIYHLRKKLVDSTDKADLRLIYLALAHMIKFRGHFLIEGDLNPDNSDVDKLFIQLVQTYNQLFEENPINASGVDAKAILSARLSKSRRLENLIAQLPGEKKNGLFGNLIALSLGLTPNFKSNFDLAEDAKLQLSKDTYDDDLDNLLAQIGDQYADLFLAAKNLSDAILLSDILRVNTEITKAPLSASMIKRYDEHHQDLTLLKALVRQQLPEKYKEIFFDQSKNGYAGYIDGGASQEEFYKFIKPILEKMDGTEELLVKLNREDLLRKQRTFDNGSIPHQIHLGELHAILRRQEDFYPFLKDNREKIEKILTFRIPYYVGPLARGNSRFAWMTRKSEETITPWNFEEVVDKGASAQSFIERMTNFDKNLPNEKVLPKHSLLYEYFTVYNELTKVKYVTEGMRKPAFLSGEQKKAIVDLLFKTNRKVTVKQLKEDYFKKIECFDSVEISGVEDRFNASLGTYHDLLKIIKDKDFLDNEENEDILEDIVLTLTLFEDREMIEERLKTYAHLFDDKVMKQLKRRRYTGWGRLSRKLINGIRDKQSGKTILDFLKSDGFANRNFMQLIHDDSLTFKEDIQKAQVSGQGDSLHEHIANLAGSPAIKKGILQTVKVVDELVKVMGRHKPENIVIEMARENQTTQKGQKNSRERMKRIEEGIKELGSQILKEHPVENTQLQNEKLYLYYLQNGRDMYVDQELDINRLSDYDVDHIVPQSFLKDDSIDNKVLTRSDKARGKSDNVPSEEVVKKMKNYWRQLLNAKLITQRKFDNLTKAERGGLSELDKAGFIKRQLVETRQITKHVAQILDSRMNTKYDENDKLIREVKVITLKSKLVSDFRKDFQFYKVREINNYHHAHDAYLNAVVGTALIKKYPKLESEFVYGDYKVYDVRKMIAKSEQEIGKATAKYFFYSNIMNFFKTEITLANGEIRKRPLIETNGETGEIVWDKGRDFATVRKVLSMPQVNIVKKTEVQTGGFSKESILPKRNSDKLIARKKDWDPKKYGGFDSPTVAYSVLVVAKVEKGKSKKLKSVKELLGITIMERSSFEKNPIDFLEAKGYKEVKKDLIIKLPKYSLFELENGRKRMLASAGELQKGNELALPSKYVNFLYLASHYEKLKGSPEDNEQKQLFVEQHKHYLDEIIEQISEFSKRVILADANLDKVLSAYNKHRDKPIREQAENIIHLFTLTNLGAPAAFKYFDTTIDRKRYTSTKEVLDATLIHQSITGLYETRIDLSQLGGDGGEAAAKEAAAKEAAAKEAAAKEAAAKGGTAPLEEEYRLFLEAPIQNVTLLEQWKREIPKVWAEINPPGLASTQAPIHVQLLSTALPVRVRQYPITLEAKRSLRETIRKFRAAGILRPVHSPWNTPLLPVRKSGTSEYRMVQDLREVNKRVETIHPTVPNPYTLLSLLPPDRIWYSVLDLKDAFFCIPLAPESQLIFAFEWADAEEGESGQLTWTRLPQGFKNSPTLFDEALNRDLQGFRLDHPSVSLLQYVDDLLIAADTQAACLSATRDLLMTLAELGYRVSGKKAQLCQEEVTYLGFKIHKGSRSLSNSRTQAILQIPVPKTKRQVREFLGTIGYCRLWIPGFAELAQPLYAATRGGNDPLVWGEKEEEAFQSLKLALTQPPALALPSLDKPFQLFVEETSGAAKGVLTQALGPWKRPVAYLSKRLDPVAAGWPRCLRAIAAAALLTREASKLTFGQDIEITSSHNLESLLRSPPDKWLTNARITQYQVLLLDPPRVRFKQTAALNPATLLPETDDTLPIHHCLDTLDSLTSTRPDLTDQPLAQAEATLFTDGSSYIRDGKRYAGAAVVTLDSVIWAEPLPIGTSAQKAELIALTKALEWSKDKSVNIYTDSRYAFATLHVHGMIYRERGLLTAGGKAIKNAPEILALLTAVWLPKRVAVMHCKGHQKDDAPTSTGNRRADEVAREVAIRPLSTQATISAGKRTADGSEFEKRTADGSEFESPKKKAKVE

SEQ ID NO: 6421 - protein, 2112 aa, synthetic construct
MPAAKRVKLDGGDKKYSIGLDIGTNSVGWAVITDEYKVPSKKFKVLGNTDRHSIKKNLIGALLFDSGETAEATRLKRTARRRYTRRKNRICYLQEIFSNEMAKVDDSFFHRLEESFLVEEDKKHERHPIFGNIVDEVAYHEKYPTIYHLRKKLVDSTDKADLRLIYLALAHMIKFRGHFLIEGDLNPDNSDVDKLFIQLVQTYNQLFEENPINASGVDAKAILSARLSKSRRLENLIAQLPGEKKNGLFGNLIALSLGLTPNFKSNFDLAEDAKLQLSKDTYDDDLDNLLAQIGDQYADLFLAAKNLSDAILLSDILRVNTEITKAPLSASMIKRYDEHHQDLTLLKALVRQQLPEKYKEIFFDQSKNGYAGYIDGGASQEEFYKFIKPILEKMDGTEELLVKLNREDLLRKQRTFDNGSIPHQIHLGELHAILRRQEDFYPFLKDNREKIEKILTFRIPYYVGPLARGNSRFAWMTRKSEETITPWNFEEVVDKGASAQSFIERMTNFDKNLPNEKVLPKHSLLYEYFTVYNELTKVKYVTEGMRKPAFLSGEQKKAIVDLLFKTNRKVTVKQLKEDYFKKIECFDSVEISGVEDRFNASLGTYHDLLKIIKDKDFLDNEENEDILEDIVLTLTLFEDREMIEERLKTYAHLFDDKVMKQLKRRRYTGWGRLSRKLINGIRDKQSGKTILDFLKSDGFANRNFMQLIHDDSLTFKEDIQKAQVSGQGDSLHEHIANLAGSPAIKKGILQTVKVVDELVKVMGRHKPENIVIEMARENQTTQKGQKNSRERMKRIEEGIKELGSQILKEHPVENTQLQNEKLYLYYLQNGRDMYVDQELDINRLSDYDVDHIVPQSFLKDDSIDNKVLTRSDKARGKSDNVPSEEVVKKMKNYWRQLLNAKLITQRKFDNLTKAERGGLSELDKAGFIKRQLVETRQITKHVAQILDSRMNTKYDENDKLIREVKVITLKSKLVSDFRKDFQFYKVREINNYHHAHDAYLNAVVGTALIKKYPKLESEFVYGDYKVYDVRKMIAKSEQEIGKATAKYFFYSNIMNFFKTEITLANGEIRKRPLIETNGETGEIVWDKGRDFATVRKVLSMPQVNIVKKTEVQTGGFSKESILPKRNSDKLIARKKDWDPKKYGGFDSPTVAYSVLVVAKVEKGKSKKLKSVKELLGITIMERSSFEKNPIDFLEAKGYKEVKKDLIIKLPKYSLFELENGRKRMLASAGELQKGNELALPSKYVNFLYLASHYEKLKGSPEDNEQKQLFVEQHKHYLDEIIEQISEFSKRVILADANLDKVLSAYNKHRDKPIREQAENIIHLFTLTNLGAPAAFKYFDTTIDRKRYTSTKEVLDATLIHQSITGLYETRIDLSQLGGDGGEAAAKEAAAKEAAAKEAAAKEAAAKGGTAPLEEEYRLFLEAPIQNVTLLEQWKREIPKVWAEINPPGLASTQAPIHVQLLSTALPVRVRQYPITLEAKRSLRETIRKFRAAGILRPVHSPWNTPLLPVRKSGTSEYRMVQDLREVNKRVETIHPTVPNPYTLLSLLPPDRIWYSVLDLKDAFFCIPLAPESQLIFAFEWADAEEGESGQLTWTRLPQGFKNSPTLFNEALNRDLQGFRLDHPSVSLLQYVDDLLIAADTQAACLSATRDLLMTLAELGYRVSGKKAQLCQEEVTYLGFKIHKGSRSLSNSRTQAILQIPVPKTKRQVREFLGTIGYCRLWIPGFAELAQPLYAATRPGNDPLVWGEKEEEAFQSLKLALTQPPALALPSLDKPFQLFVEETSGAAKGVLTQALGPWKRPVAYLSKRLDPVAAGWPRCLRAIAAAALLTREASKLTFGQDIEITSSHNLESLLRSPPDKWLTNARITQYQVLLLDPPRVRFKQTAALNPATLLPETDDTLPIHHCLDTLDSLTSTRPDLTDQPLAQAEATLFTDGSSYIRDGKRYAGAAVVTLDSVIWAEPLPIGTSAQKAELIALTKALEWSKDKSVNIYTDSRYAFATLHVHGMIYRERGWLTAGGKAIKNAPEILALLTAVWLPKRVAVMHCKGHQKDDAPTSTGNRRADEVAREVAIRPLSTQATISAGKRTADGSEFEKRTADGSEFESPKKKAKVE

SEQ ID NO: 6422 - protein, 2187 aa, synthetic construct
MPAAKRVKLDGGDKKYSIGLDIGTNSVGWAVITDEYKVPSKKFKVLGNTDRHSIKKNLIGALLFDSGETAEATRLKRTARRRYTRRKNRICYLQEIFSNEMAKVDDSFFHRLEESFLVEEDKKHERHPIFGNIVDEVAYHEKYPTIYHLRKKLVDSTDKADLRLIYLALAHMIKFRGHFLIEGDLNPDNSDVDKLFIQLVQTYNQLFEENPINASGVDAKAILSARLSKSRRLENLIAQLPGEKKNGLFGNLIALSLGLTPNFKSNFDLAEDAKLQLSKDTYDDDLDNLLAQIGDQYADLFLAAKNLSDAILLSDILRVNTEITKAPLSASMIKRYDEHHQDLTLLKALVRQQLPEKYKEIFFDQSKNGYAGYIDGGASQEEFYKFIKPILEKMDGTEELLVKLNREDLLRKQRTFDNGSIPHQIHLGELHAILRRQEDFYPFLKDNREKIEKILTFRIPYYVGPLARGNSRFAWMTRKSEETITPWNFEEVVDKGASAQSFIERMTNFDKNLPNEKVLPKHSLLYEYFTVYNELTKVKYVTEGMRKPAFLSGEQKKAIVDLLFKTNRKVTVKQLKEDYFKKIECFDSVEISGVEDRFNASLGTYHDLLKIIKDKDFLDNEENEDILEDIVLTLTLFEDREMIEERLKTYAHLFDDKVMKQLKRRRYTGWGRLSRKLINGIRDKQSGKTILDFLKSDGFANRNFMQLIHDDSLTFKEDIQKAQVSGQGDSLHEHIANLAGSPAIKKGILQTVKVVDELVKVMGRHKPENIVIEMARENQTTQKGQKNSRERMKRIEEGIKELGSQILKEHPVENTQLQNEKLYLYYLQNGRDMYVDQELDINRLSDYDVDHIVPQSFLKDDSIDNKVLTRSDKARGKSDNVPSEEVVKKMKNYWRQLLNAKLITQRKFDNLTKAERGGLSELDKAGFIKRQLVETRQITKHVAQILDSRMNTKYDENDKLIREVKVITLKSKLVSDFRKDFQFYKVREINNYHHAHDAYLNAVVGTALIKKYPKLESEFVYGDYKVYDVRKMIAKSEQEIGKATAKYFFYSNIMNFFKTEITLANGEIRKRPLIETNGETGEIVWDKGRDFATVRKVLSMPQVNIVKKTEVQTGGFSKESILPKRNSDKLIARKKDWDPKKYGGFDSPTVAYSVLVVAKVEKGKSKKLKSVKELLGITIMERSSFEKNPIDFLEAKGYKEVKKDLIIKLPKYSLFELENGRKRMLASAGELQKGNELALPSKYVNFLYLASHYEKLKGSPEDNEQKQLFVEQHKHYLDEIIEQISEFSKRVILADANLDKVLSAYNKHRDKPIREQAENIIHLFTLTNLGAPAAFKYFDTTIDRKRYTSTKEVLDATLIHQSITGLYETRIDLSQLGGDGGEAAAKEAAAKEAAAKEAAAKEAAAKGGMDLLKPLTVERKGVKIKGYWNSQADITCVPKDLLQGEEPVRQQNVTTIHGTQEGDVYYVNLKIDGRRINTEVIGTTLDYAIITPGDVPWILKKPLELTIKLDLEEQQGTLLNNSILSKKGKEELKQLFEKYSALWQSWENQVGHRRIRPHKIATGTVKPTPQKQYHINPKAKPDIQIVINDLLKQGVLIQKESTMNTPVYPVPKPNGRWRMVLDYRAVNKVTPLIAVQNQHSYGILGSLFKGRYKTTIDLSNGFWAHPIVPEDYWITAFTWQGKQYCWTVLPQGFLNSPGLFTGDVVDLLQGIPNVEVYVDDVYISHDSEKEHLEYLDILFNRLKEAGYIISLKKSNIANSIVDFLGFQITNEGRGLTDTFKEKLENITAPTTLKQLQSILGLLNFARNFIPDFTELIAPLYALIPKSTKNYVPWQIEHSTTLETLITKLNGAEYLQGRKGDKTLIMKVNASYTTGYIRYYNEGEKKPISYVSIVFSKTELKFTELEKLLTTVHKGLLKALDLSMGQNIHVYSPIVSMQNIQKTPQTAKKALASRWLSWLSYLEDPRIRFFYDPQMPALKDLPAVDTGKDNKKHPSNFQHIFYTDGSAITSPTKEGHLNAGMGIVYFINKDGNLQKQQEWSISLGNHTAQFAEIAAFEFALKKCLPLGGNILVVTDSNYVAKAYNEELDVWASNGFVNNRKKPLKHISKWKSVADLKRLRPDVVVTHEPGHQKLDSSPHAYGNNLADQLATQASFKVHAGKRTADGSEFEKRTADGSEFESPKKKAKVE

SEQ ID NO: 6423 - protein, 2101 aa, synthetic construct
MPAAKRVKLDGGDKKYSIGLDIGTNSVGWAVITDEYKVPSKKFKVLGNTDRHSIKKNLIGALLFDSGETAEATRLKRTARRRYTRRKNRICYLQEIFSNEMAKVDDSFFHRLEESFLVEEDKKHERHPIFGNIVDEVAYHEKYPTIYHLRKKLVDSTDKADLRLIYLALAHMIKFRGHFLIEGDLNPDNSDVDKLFIQLVQTYNQLFEENPINASGVDAKAILSARLSKSRRLENLIAQLPGEKKNGLFGNLIALSLGLTPNFKSNFDLAEDAKLQLSKDTYDDDLDNLLAQIGDQYADLFLAAKNLSDAILLSDILRVNTEITKAPLSASMIKRYDEHHQDLTLLKALVRQQLPEKYKEIFFDQSKNGYAGYIDGGASQEEFYKFIKPILEKMDGTEELLVKLNREDLLRKQRTFDNGSIPHQIHLGELHAILRRQEDFYPFLKDNREKIEKILTFRIPYYVGPLARGNSRFAWMTRKSEETITPWNFEEVVDKGASAQSFIERMTNFDKNLPNEKVLPKHSLLYEYFTVYNELTKVKYVTEGMRKPAFLSGEQKKAIVDLLFKTNRKVTVKQLKEDYFKKIECFDSVEISGVEDRFNASLGTYHDLLKIIKDKDFLDNEENEDILEDIVLTLTLFEDREMIEERLKTYAHLFDDKVMKQLKRRRYTGWGRLSRKLINGIRDKQSGKTILDFLKSDGFANRNFMQLIHDDSLTFKEDIQKAQVSGQGDSLHEHIANLAGSPAIKKGILQTVKVVDELVKVMGRHKPENIVIEMARENQTTQKGQKNSRERMKRIEEGIKELGSQILKEHPVENTQLQNEKLYLYYLQNGRDMYVDQELDINRLSDYDVDHIVPQSFLKDDSIDNKVLTRSDKARGKSDNVPSEEVVKKMKNYWRQLLNAKLITQRKFDNLTKAERGGLSELDKAGFIKRQLVETRQITKHVAQILDSRMNTKYDENDKLIREVKVITLKSKLVSDFRKDFQFYKVREINNYHHAHDAYLNAVVGTALIKKYPKLESEFVYGDYKVYDVRKMIAKSEQEIGKATAKYFFYSNIMNFFKTEITLANGEIRKRPLIETNGETGEIVWDKGRDFATVRKVLSMPQVNIVKKTEVQTGGFSKESILPKRNSDKLIARKKDWDPKKYGGFDSPTVAYSVLVVAKVEKGKSKKLKSVKELLGITIMERSSFEKNPIDFLEAKGYKEVKKDLIIKLPKYSLFELENGRKRMLASAGELQKGNELALPSKYVNFLYLASHYEKLKGSPEDNEQKQLFVEQHKHYLDEIIEQISEFSKRVILADANLDKVLSAYNKHRDKPIREQAENIIHLFTLTNLGAPAAFKYFDTTIDRKRYTSTKEVLDATLIHQSITGLYETRIDLSQLGGDGGEAAAKEAAAKEAAAKEAAAKEAAAKGGVPWILKKPLELTIKLDLEEQQGTLLNNSILSKKGKEELKQLFEKYSALWQSWENQVGHRRIRPHKIATGTVKPTPQKQYHINPKAKPDIQIVINDLLKQGVLIQKESTMNTPVYPVPKPNGRWRMVLDYRAVNKVTPLIAVQNQHSYGILGSLFKGRYKTTIDLSNGFWAHPIVPEDYWITAFTWQGKQYCWTVLPQGFLNSPGLFTGDVVDLLQGIPNVEVYVDDVYISHDSEKEHLEYLDILFNRLKEAGYIISLKKSNIANSIVDFLGFQITNEGRGLTDTFKEKLENITAPTTLKQLQSILGLLNFARNFIPDFTELIAPLYALIPKSTKNYVPWQIEHSTTLETLITKLNGAEYLQGRKGDKTLIMKVNASYTTGYIRYYNEGEKKPISYVSIVFSKTELKFTELEKLLTTVHKGLLKALDLSMGQNIHVYSPIVSMQNIQKTPQTAKKALASRWLSWLSYLEDPRIRFFYDPQMPALKDLPAVDTGKDNKKHPSNFQHIFYTDGSAITSPTKEGHLNAGMGIVYFINKDGNLQKQQEWSISLGNHTAQFAEIAAFEFALKKCLPLGGNILVVTDSNYVAKAYNEELDVWASNGFVNNRKKPLKHISKWKSVADLKRLRPDVVVTHEPGHQKLDSSPHAYGNNLADQLATQASFKVHAGKRTADGSEFEKRTADGSEFESPKKKAKVE

SEQ ID NO: 6424 - protein, 2101 aa, synthetic construct
MPAAKRVKLDGGDKKYSIGLDIGTNSVGWAVITDEYKVPSKKFKVLGNTDRHSIKKNLIGALLFDSGETAEATRLKRTARRRYTRRKNRICYLQEIFSNEMAKVDDSFFHRLEESFLVEEDKKHERHPIFGNIVDEVAYHEKYPTIYHLRKKLVDSTDKADLRLIYLALAHMIKFRGHFLIEGDLNPDNSDVDKLFIQLVQTYNQLFEENPINASGVDAKAILSARLSKSRRLENLIAQLPGEKKNGLFGNLIALSLGLTPNFKSNFDLAEDAKLQLSKDTYDDDLDNLLAQIGDQYADLFLAAKNLSDAILLSDILRVNTEITKAPLSASMIKRYDEHHQDLTLLKALVRQQLPEKYKEIFFDQSKNGYAGYIDGGASQEEFYKFIKPILEKMDGTEELLVKLNREDLLRKQRTFDNGSIPHQIHLGELHAILRRQEDFYPFLKDNREKIEKILTFRIPYYVGPLARGNSRFAWMTRKSEETITPWNFEEVVDKGASAQSFIERMTNFDKNLPNEKVLPKHSLLYEYFTVYNELTKVKYVTEGMRKPAFLSGEQKKAIVDLLFKTNRKVTVKQLKEDYFKKIECFDSVEISGVEDRFNASLGTYHDLLKIIKDKDFLDNEENEDILEDIVLTLTLFEDREMIEERLKTYAHLFDDKVMKQLKRRRYTGWGRLSRKLINGIRDKQSGKTILDFLKSDGFANRNFMQLIHDDSLTFKEDIQKAQVSGQGDSLHEHIANLAGSPAIKKGILQTVKVVDELVKVMGRHKPENIVIEMARENQTTQKGQKNSRERMKRIEEGIKELGSQILKEHPVENTQLQNEKLYLYYLQNGRDMYVDQELDINRLSDYDVDHIVPQSFLKDDSIDNKVLTRSDKARGKSDNVPSEEVVKKMKNYWRQLLNAKLITQRKFDNLTKAERGGLSELDKAGFIKRQLVETRQITKHVAQILDSRMNTKYDENDKLIREVKVITLKSKLVSDFRKDFQFYKVREINNYHHAHDAYLNAVVGTALIKKYPKLESEFVYGDYKVYDVRKMIAKSEQEIGKATAKYFFYSNIMNFFKTEITLANGEIRKRPLIETNGETGEIVWDKGRDFATVRKVLSMPQVNIVKKTEVQTGGFSKESILPKRNSDKLIARKKDWDPKKYGGFDSPTVAYSVLVVAKVEKGKSKKLKSVKELLGITIMERSSFEKNPIDFLEAKGYKEVKKDLIIKLPKYSLFELENGRKRMLASAGELQKGNELALPSKYVNFLYLASHYEKLKGSPEDNEQKQLFVEQHKHYLDEIIEQISEFSKRVILADANLDKVLSAYNKHRDKPIREQAENIIHLFTLTNLGAPAAFKYFDTTIDRKRYTSTKEVLDATLIHQSITGLYETRIDLSQLGGDGGEAAAKEAAAKEAAAKEAAAKEAAAKGGVPWILKKPLELTIKLDLEEQQGTLLNNSILSKKGKEELKQLFEKYSALWQSWENQVGHRRIRPHKIATGTVKPTPQKQYHINPKAKPDIQIVINDLLKQGVLIQKESTMNTPVYPVPKPNGRWRMVLDYRAVNKVTPLIAVQNQHSYGILGSLFKGRYKTTIDLSNGFWAHPIVPEDYWITAFTWQGKQYCWTVLPQGFLNSPGLFNGDVVDLLQGIPNVEVYVDDVYISHDSEKEHLEYLDILFNRLKEAGYIISLKKSNIANSIVDFLGFQITNEGRGLTDTFKEKLENITAPTTLKQLQSILGLLNFARNFIPDFTELIAPLYALIPKSPKNYVPWQIEHSTTLETLITKLNGAEYLQGRKGDKTLIMKVNASYTTGYIRYYNEGEKKPISYVSIVFSKTELKFTELEKLLTTVHKGLLKALDLSMGQNIHVYSPIVSMQNIQKTPQTAKKALASRWLSWLSYLEDPRIRFFYDPQMPALKDLPAVDTGKDNKKHPSNFQHIFYTDGSAITSPTKEGHLNAGMGIVYFINKDGNLQKQQEWSISLGNHTAQFAEIAAFEFALKKCLPLGGNILVVTDSNYVAKAYNEELDVWASNGFVNNRKKPLKHISKWKSVADLKRLRPDVVVTHEPGHQKLDSSPHAYGNNLADQLATQASFKVHAGKRTADGSEFEKRTADGSEFESPKKKAKVE

SEQ ID NO: 6425 - protein, 2109 aa, synthetic construct
MPAAKRVKLDGGDKKYSIGLDIGTNSVGWAVITDEYKVPSKKFKVLGNTDRHSIKKNLIGALLFDSGETAEATRLKRTARRRYTRRKNRICYLQEIFSNEMAKVDDSFFHRLEESFLVEEDKKHERHPIFGNIVDEVAYHEKYPTIYHLRKKLVDSTDKADLRLIYLALAHMIKFRGHFLIEGDLNPDNSDVDKLFIQLVQTYNQLFEENPINASGVDAKAILSARLSKSRRLENLIAQLPGEKKNGLFGNLIALSLGLTPNFKSNFDLAEDAKLQLSKDTYDDDLDNLLAQIGDQYADLFLAAKNLSDAILLSDILRVNTEITKAPLSASMIKRYDEHHQDLTLLKALVRQQLPEKYKEIFFDQSKNGYAGYIDGGASQEEFYKFIKPILEKMDGTEELLVKLNREDLLRKQRTFDNGSIPHQIHLGELHAILRRQEDFYPFLKDNREKIEKILTFRIPYYVGPLARGNSRFAWMTRKSEETITPWNFEEVVDKGASAQSFIERMTNFDKNLPNEKVLPKHSLLYEYFTVYNELTKVKYVTEGMRKPAFLSGEQKKAIVDLLFKTNRKVTVKQLKEDYFKKIECFDSVEISGVEDRFNASLGTYHDLLKIIKDKDFLDNEENEDILEDIVLTLTLFEDREMIEERLKTYAHLFDDKVMKQLKRRRYTGWGRLSRKLINGIRDKQSGKTILDFLKSDGFANRNFMQLIHDDSLTFKEDIQKAQVSGQGDSLHEHIANLAGSPAIKKGILQTVKVVDELVKVMGRHKPENIVIEMARENQTTQKGQKNSRERMKRIEEGIKELGSQILKEHPVENTQLQNEKLYLYYLQNGRDMYVDQELDINRLSDYDVDHIVPQSFLKDDSIDNKVLTRSDKARGKSDNVPSEEVVKKMKNYWRQLLNAKLITQRKFDNLTKAERGGLSELDKAGFIKRQLVETRQITKHVAQILDSRMNTKYDENDKLIREVKVITLKSKLVSDFRKDFQFYKVREINNYHHAHDAYLNAVVGTALIKKYPKLESEFVYGDYKVYDVRKMIAKSEQEIGKATAKYFFYSNIMNFFKTEITLANGEIRKRPLIETNGETGEIVWDKGRDFATVRKVLSMPQVNIVKKTEVQTGGFSKESILPKRNSDKLIARKKDWDPKKYGGFDSPTVAYSVLVVAKVEKGKSKKLKSVKELLGITIMERSSFEKNPIDFLEAKGYKEVKKDLIIKLPKYSLFELENGRKRMLASAGELQKGNELALPSKYVNFLYLASHYEKLKGSPEDNEQKQLFVEQHKHYLDEIIEQISEFSKRVILADANLDKVLSAYNKHRDKPIREQAENIIHLFTLTNLGAPAAFKYFDTTIDRKRYTSTKEVLDATLIHQSITGLYETRIDLSQLGGDGGEAAAKEAAAKEAAAKEAAAKEAAAKGGTLQLEEEYRLFEPESTQKQEMDIWLKNFPQAWAETGGMGTAHCQAPVLIQLKATATPISIRQYPMPHEAYQGIKPHIRRMLDQGILKPCQSPWNTPLLPVKKPGTEDYRPVQDLREVNKRVEDIHPTVPNPYNLLSTLPPSHPWYTVLDLKDAFFCLRLHSESQLLFAFEWRDPEIGLSGQLTWTRLPQGFKNSPTLFNEALHSDLADFRVRYPALVLLQYVDDLLLAAATRTECLEGTKALLETLGNKGYRASAKKAQICLQEVTYLGYSLKDGQRWLTKARKEAILSIPVPKNSRQVREFLGKAGYCRLFIPGFAELAAPLYPLTRPGTLFQWGTEQQLAFEDIKKALLSSPALGLPDITKPFELFIDENSGFAKGVLVQKLGPWKRPVAYLSKKLDTVASGWPPCLRMVAAIAILVKDAGKLTLGQPLTILTSHPVEALVRQPPNKWLSNARMTHYQAMLLDAERVHFGPTVSLNPATLLPLPSGGNHHDCLQILAETHGTRPDLTDQPLPDADLTWYTDGSSFIRNGEREAGAAVTTESEVIWAAPLPPGTSAQRAELIALTQALKMAEGKKLTVYTDSRYAFATTHVHGEIYRRRGWLTSEGKEIKNKNEILALLEALFLPKRLSIIHCPGHQKGDSPQAKGNRLADDTAKKAATETHSSLTVLPAGKRTADGSEFEKRTADGSEFESPKKKAKVE

SEQ ID NO: 6426 - protein, 2101 aa, synthetic construct
MPAAKRVKLDGGDKKYSIGLDIGTNSVGWAVITDEYKVPSKKFKVLGNTDRHSIKKNLIGALLFDSGETAEATRLKRTARRRYTRRKNRICYLQEIFSNEMAKVDDSFFHRLEESFLVEEDKKHERHPIFGNIVDEVAYHEKYPTIYHLRKKLVDSTDKADLRLIYLALAHMIKFRGHFLIEGDLNPDNSDVDKLFIQLVQTYNQLFEENPINASGVDAKAILSARLSKSRRLENLIAQLPGEKKNGLFGNLIALSLGLTPNFKSNFDLAEDAKLQLSKDTYDDDLDNLLAQIGDQYADLFLAAKNLSDAILLSDILRVNTEITKAPLSASMIKRYDEHHQDLTLLKALVRQQLPEKYKEIFFDQSKNGYAGYIDGGASQEEFYKFIKPILEKMDGTEELLVKLNREDLLRKQRTFDNGSIPHQIHLGELHAILRRQEDFYPFLKDNREKIEKILTFRIPYYVGPLARGNSRFAWMTRKSEETITPWNFEEVVDKGASAQSFIERMTNFDKNLPNEKVLPKHSLLYEYFTVYNELTKVKYVTEGMRKPAFLSGEQKKAIVDLLFKTNRKVTVKQLKEDYFKKIECFDSVEISGVEDRFNASLGTYHDLLKIIKDKDFLDNEENEDILEDIVLTLTLFEDREMIEERLKTYAHLFDDKVMKQLKRRRYTGWGRLSRKLINGIRDKQSGKTILDFLKSDGFANRNFMQLIHDDSLTFKEDIQKAQVSGQGDSLHEHIANLAGSPAIKKGILQTVKVVDELVKVMGRHKPENIVIEMARENQTTQKGQKNSRERMKRIEEGIKELGSQILKEHPVENTQLQNEKLYLYYLQNGRDMYVDQELDINRLSDYDVDHIVPQSFLKDDSIDNKVLTRSDKARGKSDNVPSEEVVKKMKNYWRQLLNAKLITQRKFDNLTKAERGGLSELDKAGFIKRQLVETRQITKHVAQILDSRMNTKYDENDKLIREVKVITLKSKLVSDFRKDFQFYKVREINNYHHAHDAYLNAVVGTALIKKYPKLESEFVYGDYKVYDVRKMIAKSEQEIGKATAKYFFYSNIMNFFKTEITLANGEIRKRPLIETNGETGEIVWDKGRDFATVRKVLSMPQVNIVKKTEVQTGGFSKESILPKRNSDKLIARKKDWDPKKYGGFDSPTVAYSVLVVAKVEKGKSKKLKSVKELLGITIMERSSFEKNPIDFLEAKGYKEVKKDLIIKLPKYSLFELENGRKRMLASAGELQKGNELALPSKYVNFLYLASHYEKLKGSPEDNEQKQLFVEQHKHYLDEIIEQISEFSKRVILADANLDKVLSAYNKHRDKPIREQAENIIHLFTLTNLGAPAAFKYFDTTIDRKRYTSTKEVLDATLIHQSITGLYETRIDLSQLGGDGGEAAAKEAAAKEAAAKEAAAKEAAAKGGVPWLTQQPLQLTILVPLQEYQEKILSKTALPEDQKQQLKTLFVKYDNLWQHWENQVGHRKIRPHNIATGDYPPRPQKQYPINPKAKPSIQIVIDDLLKQGVLTPQNSTMNTPVYPVPKPDGRWRMVLDYREVNKTIPLTAAQNQHSAGILATIVRQKYKTTLDLANGFWAHPITPESYWLTAFTWQGKQYCWTRLPQGFLNSPALFNADVVDLLKEIPNVQVYVDDIYLSHDDPKEHVQQLEKVFQILLQAGYVVSLKKSEIGQKTVEFLGFNITKEGRGLTDTFKTKLLNITPPKDLKQLQSILGLLNFARNFIPNFAELVQPLYNLIAPAKGKYIEWSEENTKQLNMVIEALNTASNLEERLPEQRLVIKVNTSPSAGYVRYYNETGKKPIMYLNYVFSKAELKFSMLEKLLTTMHKALIKAMDLAMGQEILVYSPIVSMTKIQKTPLPERKALPIRWITWMTYLEDPRIQFHYDKTLPELKHIPDVYTSSQSPVKHPSQYEGVFYTDGSAIKSPDPTKSNNAGMGIVHATYKPEYQVLNQWSIPLGNHTAQMAEIAAVEFACKKALKIPGPVLVITDSFYVAESANKELPYWKSNGFVNNKKKPLKHISKWKSIAECLSMKPDITIQHEKGISLQIPVFILKGNALADKLATQGSYVVNAGKRTADGSEFEKRTADGSEFESPKKKAKVE

SEQ ID NO: 6427 - protein, 2101 aa, synthetic construct
MPAAKRVKLDGGDKKYSIGLDIGTNSVGWAVITDEYKVPSKKFKVLGNTDRHSIKKNLIGALLFDSGETAEATRLKRTARRRYTRRKNRICYLQEIFSNEMAKVDDSFFHRLEESFLVEEDKKHERHPIFGNIVDEVAYHEKYPTIYHLRKKLVDSTDKADLRLIYLALAHMIKFRGHFLIEGDLNPDNSDVDKLFIQLVQTYNQLFEENPINASGVDAKAILSARLSKSRRLENLIAQLPGEKKNGLFGNLIALSLGLTPNFKSNFDLAEDAKLQLSKDTYDDDLDNLLAQIGDQYADLFLAAKNLSDAILLSDILRVNTEITKAPLSASMIKRYDEHHQDLTLLKALVRQQLPEKYKEIFFDQSKNGYAGYIDGGASQEEFYKFIKPILEKMDGTEELLVKLNREDLLRKQRTFDNGSIPHQIHLGELHAILRRQEDFYPFLKDNREKIEKILTFRIPYYVGPLARGNSRFAWMTRKSEETITPWNFEEVVDKGASAQSFIERMTNFDKNLPNEKVLPKHSLLYEYFTVYNELTKVKYVTEGMRKPAFLSGEQKKAIVDLLFKTNRKVTVKQLKEDYFKKIECFDSVEISGVEDRFNASLGTYHDLLKIIKDKDFLDNEENEDILEDIVLTLTLFEDREMIEERLKTYAHLFDDKVMKQLKRRRYTGWGRLSRKLINGIRDKQSGKTILDFLKSDGFANRNFMQLIHDDSLTFKEDIQKAQVSGQGDSLHEHIANLAGSPAIKKGILQTVKVVDELVKVMGRHKPENIVIEMARENQTTQKGQKNSRERMKRIEEGIKELGSQILKEHPVENTQLQNEKLYLYYLQNGRDMYVDQELDINRLSDYDVDHIVPQSFLKDDSIDNKVLTRSDKARGKSDNVPSEEVVKKMKNYWRQLLNAKLITQRKFDNLTKAERGGLSELDKAGFIKRQLVETRQITKHVAQILDSRMNTKYDENDKLIREVKVITLKSKLVSDFRKDFQFYKVREINNYHHAHDAYLNAVVGTALIKKYPKLESEFVYGDYKVYDVRKMIAKSEQEIGKATAKYFFYSNIMNFFKTEITLANGEIRKRPLIETNGETGEIVWDKGRDFATVRKVLSMPQVNIVKKTEVQTGGFSKESILPKRNSDKLIARKKDWDPKKYGGFDSPTVAYSVLVVAKVEKGKSKKLKSVKELLGITIMERSSFEKNPIDFLEAKGYKEVKKDLIIKLPKYSLFELENGRKRMLASAGELQKGNELALPSKYVNFLYLASHYEKLKGSPEDNEQKQLFVEQHKHYLDEIIEQISEFSKRVILADANLDKVLSAYNKHRDKPIREQAENIIHLFTLTNLGAPAAFKYFDTTIDRKRYTSTKEVLDATLIHQSITGLYETRIDLSQLGGDGGEAAAKEAAAKEAAAKEAAAKEAAAKGGVPWLTQQPLQLTILVPLQEYQEKILSKTALPEDQKQQLKTLFVKYDNLWQHWENQVGHRKIRPHNIATGDYPPRPQKQYPINPKAKPSIQIVIDDLLKQGVLTPQNSTMNTPVYPVPKPDGRWRMVLDYREVNKTIPLTAAQNQHSAGILATIVRQKYKTTLDLANGFWAHPITPESYWLTAFTWQGKQYCWTRLPQGFLNSPALFNADVVDLLKEIPNVQVYVDDIYLSHDDPKEHVQQLEKVFQILLQAGYVVSLKKSEIGQKTVEFLGFNITKEGRGLTDTFKTKLLNITPPKDLKQLQSILGKLNFARNFIPNFAELVQPLYNLIAPAKGKYIEWSEENTKQLNMVIEALNTASNLEERLPEQRLVIKVNTSPSAGYVRYYNETGKKPIMYLNYVFSKAELKFSMLEKLLTTMHKALIKAMDLAMGQEILVYSPIVSMTKIQKTPLPERKALPIRWITWMTYLEDPRIQFHYDKTLPELKHIPDVYTSSQSPVKHPSQYEGVFYTDGSAIKSPDPTKSNNAGMGIVHATYKPEYQVLNQWSIPLGNHTAQMAEIAAVEFACKKALKIPGPVLVITDSFYVAESANKELPYWKSNGFVNNKKKPLKHISKWKSIAECLSMKPDITIQHEKGISLQIPVFILKGNALADKLATQGSYVVNAGKRTADGSEFEKRTADGSEFESPKKKAKVE

SEQ ID NO: 6428 - protein, 2190 aa, synthetic construct
MPAAKRVKLDGGDKKYSIGLDIGTNSVGWAVITDEYKVPSKKFKVLGNTDRHSIKKNLIGALLFDSGETAEATRLKRTARRRYTRRKNRICYLQEIFSNEMAKVDDSFFHRLEESFLVEEDKKHERHPIFGNIVDEVAYHEKYPTIYHLRKKLVDSTDKADLRLIYLALAHMIKFRGHFLIEGDLNPDNSDVDKLFIQLVQTYNQLFEENPINASGVDAKAILSARLSKSRRLENLIAQLPGEKKNGLFGNLIALSLGLTPNFKSNFDLAEDAKLQLSKDTYDDDLDNLLAQIGDQYADLFLAAKNLSDAILLSDILRVNTEITKAPLSASMIKRYDEHHQDLTLLKALVRQQLPEKYKEIFFDQSKNGYAGYIDGGASQEEFYKFIKPILEKMDGTEELLVKLNREDLLRKQRTFDNGSIPHQIHLGELHAILRRQEDFYPFLKDNREKIEKILTFRIPYYVGPLARGNSRFAWMTRKSEETITPWNFEEVVDKGASAQSFIERMTNFDKNLPNEKVLPKHSLLYEYFTVYNELTKVKYVTEGMRKPAFLSGEQKKAIVDLLFKTNRKVTVKQLKEDYFKKIECFDSVEISGVEDRFNASLGTYHDLLKIIKDKDFLDNEENEDILEDIVLTLTLFEDREMIEERLKTYAHLFDDKVMKQLKRRRYTGWGRLSRKLINGIRDKQSGKTILDFLKSDGFANRNFMQLIHDDSLTFKEDIQKAQVSGQGDSLHEHIANLAGSPAIKKGILQTVKVVDELVKVMGRHKPENIVIEMARENQTTQKGQKNSRERMKRIEEGIKELGSQILKEHPVENTQLQNEKLYLYYLQNGRDMYVDQELDINRLSDYDVDHIVPQSFLKDDSIDNKVLTRSDKARGKSDNVPSEEVVKKMKNYWRQLLNAKLITQRKFDNLTKAERGGLSELDKAGFIKRQLVETRQITKHVAQILDSRMNTKYDENDKLIREVKVITLKSKLVSDFRKDFQFYKVREINNYHHAHDAYLNAVVGTALIKKYPKLESEFVYGDYKVYDVRKMIAKSEQEIGKATAKYFFYSNIMNFFKTEITLANGEIRKRPLIETNGETGEIVWDKGRDFATVRKVLSMPQVNIVKKTEVQTGGFSKESILPKRNSDKLIARKKDWDPKKYGGFDSPTVAYSVLVVAKVEKGKSKKLKSVKELLGITIMERSSFEKNPIDFLEAKGYKEVKKDLIIKLPKYSLFELENGRKRMLASAGELQKGNELALPSKYVNFLYLASHYEKLKGSPEDNEQKQLFVEQHKHYLDEIIEQISEFSKRVILADANLDKVLSAYNKHRDKPIREQAENIIHLFTLTNLGAPAAFKYFDTTIDRKRYTSTKEVLDATLIHQSITGLYETRIDLSQLGGDGGEAAAKEAAAKEAAAKEAAAKEAAAKGGMNPLQLLQPLPAEIKGTKLLAHWNSGATITCIPESFLEDEQPIKKTLIKTIHGEKQQNVYYVTFKVKGRKVEAEVIASPYEYILLSPTDVPWLTQQPLQLTILVPLQEYQEKILSKTALPEDQKQQLKTLFVKYDNLWQHWENQVGHRKIRPHNIATGDYPPRPQKQYPINPKAKPSIQIVIDDLLKQGVLTPQNSTMNTPVYPVPKPDGRWRMVLDYREVNKTIPLTAAQNQHSAGILATIVRQKYKTTLDLANGFWAHPITPESYWLTAFTWQGKQYCWTRLPQGFLNSPALFNADVVDLLKEIPNVQVYVDDIYLSHDDPKEHVQQLEKVFQILLQAGYVVSLKKSEIGQKTVEFLGFNITKEGRGLTDTFKTKLLNITPPKDLKQLQSILGLLNFARNFIPNFAELVQPLYNLIAPAKGKYIEWSEENTKQLNMVIEALNTASNLEERLPEQRLVIKVNTSPSAGYVRYYNETGKKPIMYLNYVFSKAELKFSMLEKLLTTMHKALIKAMDLAMGQEILVYSPIVSMTKIQKTPLPERKALPIRWITWMTYLEDPRIQFHYDKTLPELKHIPDVYTSSQSPVKHPSQYEGVFYTDGSAIKSPDPTKSNNAGMGIVHATYKPEYQVLNQWSIPLGNHTAQMAEIAAVEFACKKALKIPGPVLVITDSFYVAESANKELPYWKSNGFVNNKKKPLKHISKWKSIAECLSMKPDITIQHEKGISLQIPVFILKGNALADKLATQGSYVVNAGKRTADGSEFEKRTADGSEFESPKKKAKVE

SEQ ID NO: 6429 - protein, 2190 aa, synthetic construct
MPAAKRVKLDGGDKKYSIGLDIGTNSVGWAVITDEYKVPSKKFKVLGNTDRHSIKKNLIGALLFDSGETAEATRLKRTARRRYTRRKNRICYLQEIFSNEMAKVDDSFFHRLEESFLVEEDKKHERHPIFGNIVDEVAYHEKYPTIYHLRKKLVDSTDKADLRLIYLALAHMIKFRGHFLIEGDLNPDNSDVDKLFIQLVQTYNQLFEENPINASGVDAKAILSARLSKSRRLENLIAQLPGEKKNGLFGNLIALSLGLTPNFKSNFDLAEDAKLQLSKDTYDDDLDNLLAQIGDQYADLFLAAKNLSDAILLSDILRVNTEITKAPLSASMIKRYDEHHQDLTLLKALVRQQLPEKYKEIFFDQSKNGYAGYIDGGASQEEFYKFIKPILEKMDGTEELLVKLNREDLLRKQRTFDNGSIPHQIHLGELHAILRRQEDFYPFLKDNREKIEKILTFRIPYYVGPLARGNSRFAWMTRKSEETITPWNFEEVVDKGASAQSFIERMTNFDKNLPNEKVLPKHSLLYEYFTVYNELTKVKYVTEGMRKPAFLSGEQKKAIVDLLFKTNRKVTVKQLKEDYFKKIECFDSVEISGVEDRFNASLGTYHDLLKIIKDKDFLDNEENEDILEDIVLTLTLFEDREMIEERLKTYAHLFDDKVMKQLKRRRYTGWGRLSRKLINGIRDKQSGKTILDFLKSDGFANRNFMQLIHDDSLTFKEDIQKAQVSGQGDSLHEHIANLAGSPAIKKGILQTVKVVDELVKVMGRHKPENIVIEMARENQTTQKGQKNSRERMKRIEEGIKELGSQILKEHPVENTQLQNEKLYLYYLQNGRDMYVDQELDINRLSDYDVDHIVPQSFLKDDSIDNKVLTRSDKARGKSDNVPSEEVVKKMKNYWRQLLNAKLITQRKFDNLTKAERGGLSELDKAGFIKRQLVETRQITKHVAQILDSRMNTKYDENDKLIREVKVITLKSKLVSDFRKDFQFYKVREINNYHHAHDAYLNAVVGTALIKKYPKLESEFVYGDYKVYDVRKMIAKSEQEIGKATAKYFFYSNIMNFFKTEITLANGEIRKRPLIETNGETGEIVWDKGRDFATVRKVLSMPQVNIVKKTEVQTGGFSKESILPKRNSDKLIARKKDWDPKKYGGFDSPTVAYSVLVVAKVEKGKSKKLKSVKELLGITIMERSSFEKNPIDFLEAKGYKEVKKDLIIKLPKYSLFELENGRKRMLASAGELQKGNELALPSKYVNFLYLASHYEKLKGSPEDNEQKQLFVEQHKHYLDEIIEQISEFSKRVILADANLDKVLSAYNKHRDKPIREQAENIIHLFTLTNLGAPAAFKYFDTTIDRKRYTSTKEVLDATLIHQSITGLYETRIDLSQLGGDGGEAAAKEAAAKEAAAKEAAAKEAAAKGGMNPLQLLQPLPAEIKGTKLLAHWNSGATITCIPESFLEDEQPIKKTLIKTIHGEKQQNVYYVTFKVKGRKVEAEVIASPYEYILLSPTDVPWLTQQPLQLTILVPLQEYQEKILSKTALPEDQKQQLKTLFVKYDNLWQHWENQVGHRKIRPHNIATGDYPPRPQKQYPINPKAKPSIQIVIDDLLKQGVLTPQNSTMNTPVYPVPKPDGRWRMVLDYREVNKTIPLTAAQNQHSAGILATIVRQKYKTTLDLANGFWAHPITPESYWLTAFTWQGKQYCWTRLPQGFLNSPALFNADVVDLLKEIPNVQVYVDDIYLSHDDPKEHVQQLEKVFQILLQAGYVVSLKKSEIGQKTVEFLGFNITKEGRGLTDTFKTKLLNITPPKDLKQLQSILGKLNFARNFIPNFAELVQPLYNLIAPAKGKYIEWSEENTKQLNMVIEALNTASNLEERLPEQRLVIKVNTSPSAGYVRYYNETGKKPIMYLNYVFSKAELKFSMLEKLLTTMHKALIKAMDLAMGQEILVYSPIVSMTKIQKTPLPERKALPIRWITWMTYLEDPRIQFHYDKTLPELKHIPDVYTSSQSPVKHPSQYEGVFYTDGSAIKSPDPTKSNNAGMGIVHATYKPEYQVLNQWSIPLGNHTAQMAEIAAVEFACKKALKIPGPVLVITDSFYVAESANKELPYWKSNGFVNNKKKPLKHISKWKSIAECLSMKPDITIQHEKGISLQIPVFILKGNALADKLATQGSYVVNAGKRTADGSEFEKRTADGSEFESPKKKAKVE

SEQ ID NO: 6430 - protein, 2108 aa, synthetic construct
MPAAKRVKLDGGDKKYSIGLDIGTNSVGWAVITDEYKVPSKKFKVLGNTDRHSIKKNLIGALLFDSGETAEATRLKRTARRRYTRRKNRICYLQEIFSNEMAKVDDSFFHRLEESFLVEEDKKHERHPIFGNIVDEVAYHEKYPTIYHLRKKLVDSTDKADLRLIYLALAHMIKFRGHFLIEGDLNPDNSDVDKLFIQLVQTYNQLFEENPINASGVDAKAILSARLSKSRRLENLIAQLPGEKKNGLFGNLIALSLGLTPNFKSNFDLAEDAKLQLSKDTYDDDLDNLLAQIGDQYADLFLAAKNLSDAILLSDILRVNTEITKAPLSASMIKRYDEHHQDLTLLKALVRQQLPEKYKEIFFDQSKNGYAGYIDGGASQEEFYKFIKPILEKMDGTEELLVKLNREDLLRKQRTFDNGSIPHQIHLGELHAILRRQEDFYPFLKDNREKIEKILTFRIPYYVGPLARGNSRFAWMTRKSEETITPWNFEEVVDKGASAQSFIERMTNFDKNLPNEKVLPKHSLLYEYFTVYNELTKVKYVTEGMRKPAFLSGEQKKAIVDLLFKTNRKVTVKQLKEDYFKKIECFDSVEISGVEDRFNASLGTYHDLLKIIKDKDFLDNEENEDILEDIVLTLTLFEDREMIEERLKTYAHLFDDKVMKQLKRRRYTGWGRLSRKLINGIRDKQSGKTILDFLKSDGFANRNFMQLIHDDSLTFKEDIQKAQVSGQGDSLHEHIANLAGSPAIKKGILQTVKVVDELVKVMGRHKPENIVIEMARENQTTQKGQKNSRERMKRIEEGIKELGSQILKEHPVENTQLQNEKLYLYYLQNGRDMYVDQELDINRLSDYDVDHIVPQSFLKDDSIDNKVLTRSDKARGKSDNVPSEEVVKKMKNYWRQLLNAKLITQRKFDNLTKAERGGLSELDKAGFIKRQLVETRQITKHVAQILDSRMNTKYDENDKLIREVKVITLKSKLVSDFRKDFQFYKVREINNYHHAHDAYLNAVVGTALIKKYPKLESEFVYGDYKVYDVRKMIAKSEQEIGKATAKYFFYSNIMNFFKTEITLANGEIRKRPLIETNGETGEIVWDKGRDFATVRKVLSMPQVNIVKKTEVQTGGFSKESILPKRNSDKLIARKKDWDPKKYGGFDSPTVAYSVLVVAKVEKGKSKKLKSVKELLGITIMERSSFEKNPIDFLEAKGYKEVKKDLIIKLPKYSLFELENGRKRMLASAGELQKGNELALPSKYVNFLYLASHYEKLKGSPEDNEQKQLFVEQHKHYLDEIIEQISEFSKRVILADANLDKVLSAYNKHRDKPIREQAENIIHLFTLTNLGAPAAFKYFDTTIDRKRYTSTKEVLDATLIHQSITGLYETRIDLSQLGGDGGEAAAKEAAAKEAAAKEAAAKEAAAKGGVLNLEEEYRLHEKPVPSSIDPSWLQLFPTVWAERAGMGLANQVPPVVVELRSGASPVAVRQYPMSKEAREGIRPHIQKFLDLGVLVPCRSPWNTPLLPVKKPGTNDYRPVQDLREINKRVQDIHPTVPNPYNLLSSLPPSYTWYSVLDLKDAFFCLRLHPNSQPLFAFEWKDPEKGNTGQLTWTRLPQGFKNSPTLFNEALHRDLAPFRALNPQVVLLQYVDDLLVAAPTYEDCKKGTQKLLQELSKLGYRVSAKKAQLCQREVTYLGYLLKEGKRWLTPARKATVMKIPVPTTPRQVREFLGTAGFCRLWIPGFASLAAPLYPLTKPSIPFIWTEEHQQAFDHIKKALLSAPALALPDLTKPFTLYIDERAGVARGVLTQTLGPWRRPVAYLSKKLDPVASGWPTCLKAVAAVALLLKDADKLTLGQNVTVIASHSLESIVRQPPDRWMTNARMTHYQSLLLNERVSFAPPAVLNPATLLPVESEATPVHRCSEILAEETGTRRDLEDQPLPGVPTWYTDGSSFITEGKRRAGAPIVDGKRTVWASSLPEGTSAQKAELVALTQALRLAEGKNINIYTDSRYAFATAHIHGAIYKQRGWLTSAGKDIKNKEEILALLEAIHLPRRVAIIHCPGHQRGSNPVATGNRRADEAAKQAALSTRVLAGTTKPAGKRTADGSEFEKRTADGSEFESPKKKAKVE

SEQ ID NO: 6431 - protein, 2108 aa, synthetic construct
MPAAKRVKLDGGDKKYSIGLDIGTNSVGWAVITDEYKVPSKKFKVLGNTDRHSIKKNLIGALLFDSGETAEATRLKRTARRRYTRRKNRICYLQEIFSNEMAKVDDSFFHRLEESFLVEEDKKHERHPIFGNIVDEVAYHEKYPTIYHLRKKLVDSTDKADLRLIYLALAHMIKFRGHFLIEGDLNPDNSDVDKLFIQLVQTYNQLFEENPINASGVDAKAILSARLSKSRRLENLIAQLPGEKKNGLFGNLIALSLGLTPNFKSNFDLAEDAKLQLSKDTYDDDLDNLLAQIGDQYADLFLAAKNLSDAILLSDILRVNTEITKAPLSASMIKRYDEHHQDLTLLKALVRQQLPEKYKEIFFDQSKNGYAGYIDGGASQEEFYKFIKPILEKMDGTEELLVKLNREDLLRKQRTFDNGSIPHQIHLGELHAILRRQEDFYPFLKDNREKIEKILTFRIPYYVGPLARGNSRFAWMTRKSEETITPWNFEEVVDKGASAQSFIERMTNFDKNLPNEKVLPKHSLLYEYFTVYNELTKVKYVTEGMRKPAFLSGEQKKAIVDLLFKTNRKVTVKQLKEDYFKKIECFDSVEISGVEDRFNASLGTYHDLLKIIKDKDFLDNEENEDILEDIVLTLTLFEDREMIEERLKTYAHLFDDKVMKQLKRRRYTGWGRLSRKLINGIRDKQSGKTILDFLKSDGFANRNFMQLIHDDSLTFKEDIQKAQVSGQGDSLHEHIANLAGSPAIKKGILQTVKVVDELVKVMGRHKPENIVIEMARENQTTQKGQKNSRERMKRIEEGIKELGSQILKEHPVENTQLQNEKLYLYYLQNGRDMYVDQELDINRLSDYDVDHIVPQSFLKDDSIDNKVLTRSDKARGKSDNVPSEEVVKKMKNYWRQLLNAKLITQRKFDNLTKAERGGLSELDKAGFIKRQLVETRQITKHVAQILDSRMNTKYDENDKLIREVKVITLKSKLVSDFRKDFQFYKVREINNYHHAHDAYLNAVVGTALIKKYPKLESEFVYGDYKVYDVRKMIAKSEQEIGKATAKYFFYSNIMNFFKTEITLANGEIRKRPLIETNGETGEIVWDKGRDFATVRKVLSMPQVNIVKKTEVQTGGFSKESILPKRNSDKLIARKKDWDPKKYGGFDSPTVAYSVLVVAKVEKGKSKKLKSVKELLGITIMERSSFEKNPIDFLEAKGYKEVKKDLIIKLPKYSLFELENGRKRMLASAGELQKGNELALPSKYVNFLYLASHYEKLKGSPEDNEQKQLFVEQHKHYLDEIIEQISEFSKRVILADANLDKVLSAYNKHRDKPIREQAENIIHLFTLTNLGAPAAFKYFDTTIDRKRYTSTKEVLDATLIHQSITGLYETRIDLSQLGGDGGEAAAKEAAAKEAAAKEAAAKEAAAKGGVLNLEEEYRLHEKPVPSSIDPSWLQLFPTVWAERAGMGLANQVPPVVVELRSGASPVAVRQYPMSKEAREGIRPHIQKFLDLGVLVPCRSPWNTPLLPVKKPGTNDYRPVQDLREINKRVQDIHPTVPNPYNLLSSLPPSYTWYSVLDLKDAFFCLRLHPNSQPLFAFEWKDPEKGNTGQLTWTRLPQGFKNSPTLFNEALHRDLAPFRALNPQVVLLQYVDDLLVAAPTYEDCKKGTQKLLQELSKLGYRVSAKKAQLCQREVTYLGYLLKEGKRWLTPARKATVMKIPVPTTPRQVREFLGKAGFCRLFIPGFASLAAPLYPLTKPSIPFIWTEEHQQAFDHIKKALLSAPALALPDLTKPFTLYIDERAGVARGVLTQTLGPWRRPVAYLSKKLDPVASGWPTCLKAVAAVALLLKDADKLTLGQNVTVIASHSLESIVRQPPDRWMTNARMTHYQSLLLNERVSFAPPAVLNPATLLPVESEATPVHRCSEILAEETGTRRDLEDQPLPGVPTWYTDGSSFITEGKRRAGAPIVDGKRTVWASSLPEGTSAQKAELVALTQALRLAEGKNINIYTDSRYAFATAHIHGAIYKQRGWLTSAGKDIKNKEEILALLEAIHLPRRVAIIHCPGHQRGSNPVATGNRRADEAAKQAALSTRVLAGTTKPAGKRTADGSEFEKRTADGSEFESPKKKAKVE

SEQ ID NO: 6432 - protein, 2232 aa, synthetic construct
MPAAKRVKLDGGDKKYSIGLDIGTNSVGWAVITDEYKVPSKKFKVLGNTDRHSIKKNLIGALLFDSGETAEATRLKRTARRRYTRRKNRICYLQEIFSNEMAKVDDSFFHRLEESFLVEEDKKHERHPIFGNIVDEVAYHEKYPTIYHLRKKLVDSTDKADLRLIYLALAHMIKFRGHFLIEGDLNPDNSDVDKLFIQLVQTYNQLFEENPINASGVDAKAILSARLSKSRRLENLIAQLPGEKKNGLFGNLIALSLGLTPNFKSNFDLAEDAKLQLSKDTYDDDLDNLLAQIGDQYADLFLAAKNLSDAILLSDILRVNTEITKAPLSASMIKRYDEHHQDLTLLKALVRQQLPEKYKEIFFDQSKNGYAGYIDGGASQEEFYKFIKPILEKMDGTEELLVKLNREDLLRKQRTFDNGSIPHQIHLGELHAILRRQEDFYPFLKDNREKIEKILTFRIPYYVGPLARGNSRFAWMTRKSEETITPWNFEEVVDKGASAQSFIERMTNFDKNLPNEKVLPKHSLLYEYFTVYNELTKVKYVTEGMRKPAFLSGEQKKAIVDLLFKTNRKVTVKQLKEDYFKKIECFDSVEISGVEDRFNASLGTYHDLLKIIKDKDFLDNEENEDILEDIVLTLTLFEDREMIEERLKTYAHLFDDKVMKQLKRRRYTGWGRLSRKLINGIRDKQSGKTILDFLKSDGFANRNFMQLIHDDSLTFKEDIQKAQVSGQGDSLHEHIANLAGSPAIKKGILQTVKVVDELVKVMGRHKPENIVIEMARENQTTQKGQKNSRERMKRIEEGIKELGSQILKEHPVENTQLQNEKLYLYYLQNGRDMYVDQELDINRLSDYDVDHIVPQSFLKDDSIDNKVLTRSDKARGKSDNVPSEEVVKKMKNYWRQLLNAKLITQRKFDNLTKAERGGLSELDKAGFIKRQLVETRQITKHVAQILDSRMNTKYDENDKLIREVKVITLKSKLVSDFRKDFQFYKVREINNYHHAHDAYLNAVVGTALIKKYPKLESEFVYGDYKVYDVRKMIAKSEQEIGKATAKYFFYSNIMNFFKTEITLANGEIRKRPLIETNGETGEIVWDKGRDFATVRKVLSMPQVNIVKKTEVQTGGFSKESILPKRNSDKLIARKKDWDPKKYGGFDSPTVAYSVLVVAKVEKGKSKKLKSVKELLGITIMERSSFEKNPIDFLEAKGYKEVKKDLIIKLPKYSLFELENGRKRMLASAGELQKGNELALPSKYVNFLYLASHYEKLKGSPEDNEQKQLFVEQHKHYLDEIIEQISEFSKRVILADANLDKVLSAYNKHRDKPIREQAENIIHLFTLTNLGAPAAFKYFDTTIDRKRYTSTKEVLDATLIHQSITGLYETRIDLSQLGGDGGEAAAKEAAAKEAAAKEAAAKEAAAKGGTLGDQGSRGSDPLPEPRVTLTVEGIPTEFLVNTGAEHSVLTKPMGKMGSKRTVVAGATGSKVYPWTTKRLLKIGQKQVTHSFLVIPECPAPLLGRDLLTKLKAQIQFSTEGPQVTWEDRPAMCLVLNLEEEYRLHEKPVPPSIDPSWLQLFPMVWAEKAGMGLANQVPPVVVELKSDASPVAVRQYPMSKEAREGIRPHIQRFLDLGILVPCQSPWNTPLLPVKKPGTNDYRPVQDLREVNKRVQDIHPTVPNPYNLLSSLPPSHTWYSVLDLKDAFFCLKLHPNSQPLFAFEWRDPEKGNTGQLTWTRLPQGFKNSPTLFNEALHRDLASFRALNPQVVMLQYVDDLLVAAPTYRDCKEGTRRLLQELSKLGYRVSAKKAQLCREEVTYLGYLLKGGKRWLTPARKATVMKIPTPTTPRQVREFLGTAGFCRLWIPGFASLAAPLYPLTRPKVPFTWTEAHQEAFGRIKEALLSAPALALPDLTKPFALYVDEKEGVARGVLTQTLGPWRRPVAYLSKKLDPVASGWPTCLKAIAAVALLLKDADKLTLGQNVLVIAPHNLESIVRQPPDRWMTNARMTHYQSLLLNERVSFAPPAILNPATLLPVESDDTPIHICSEILAEETGTRPDLRDQPLPGVPAWYTDGSSFIMDGRRQAGAAIVDNKRTVWASNLPEGTSAQKAELIALTQALRLAEGKSINIYTDSRYAFATAHVHGAIYKQRGWLTSAGKDIKNKEEILALLEAIHLPKRVAIIHCPGHQRGTDPVATGNRKADEAAKQAAQSTRILTETTKNAGKRTADGSEFEKRTADGSEFESPKKKAKVE

SEQ ID NO: 6433 - protein, 2110 aa, synthetic construct
MPAAKRVKLDGGDKKYSIGLDIGTNSVGWAVITDEYKVPSKKFKVLGNTDRHSIKKNLIGALLFDSGETAEATRLKRTARRRYTRRKNRICYLQEIFSNEMAKVDDSFFHRLEESFLVEEDKKHERHPIFGNIVDEVAYHEKYPTIYHLRKKLVDSTDKADLRLIYLALAHMIKFRGHFLIEGDLNPDNSDVDKLFIQLVQTYNQLFEENPINASGVDAKAILSARLSKSRRLENLIAQLPGEKKNGLFGNLIALSLGLTPNFKSNFDLAEDAKLQLSKDTYDDDLDNLLAQIGDQYADLFLAAKNLSDAILLSDILRVNTEITKAPLSASMIKRYDEHHQDLTLLKALVRQQLPEKYKEIFFDQSKNGYAGYIDGGASQEEFYKFIKPILEKMDGTEELLVKLNREDLLRKQRTFDNGSIPHQIHLGELHAILRRQEDFYPFLKDNREKIEKILTFRIPYYVGPLARGNSRFAWMTRKSEETITPWNFEEVVDKGASAQSFIERMTNFDKNLPNEKVLPKHSLLYEYFTVYNELTKVKYVTEGMRKPAFLSGEQKKAIVDLLFKTNRKVTVKQLKEDYFKKIECFDSVEISGVEDRFNASLGTYHDLLKIIKDKDFLDNEENEDILEDIVLTLTLFEDREMIEERLKTYAHLFDDKVMKQLKRRRYTGWGRLSRKLINGIRDKQSGKTILDFLKSDGFANRNFMQLIHDDSLTFKEDIQKAQVSGQGDSLHEHIANLAGSPAIKKGILQTVKVVDELVKVMGRHKPENIVIEMARENQTTQKGQKNSRERMKRIEEGIKELGSQILKEHPVENTQLQNEKLYLYYLQNGRDMYVDQELDINRLSDYDVDHIVPQSFLKDDSIDNKVLTRSDKARGKSDNVPSEEVVKKMKNYWRQLLNAKLITQRKFDNLTKAERGGLSELDKAGFIKRQLVETRQITKHVAQILDSRMNTKYDENDKLIREVKVITLKSKLVSDFRKDFQFYKVREINNYHHAHDAYLNAVVGTALIKKYPKLESEFVYGDYKVYDVRKMIAKSEQEIGKATAKYFFYSNIMNFFKTEITLANGEIRKRPLIETNGETGEIVWDKGRDFATVRKVLSMPQVNIVKKTEVQTGGFSKESILPKRNSDKLIARKKDWDPKKYGGFDSPTVAYSVLVVAKVEKGKSKKLKSVKELLGITIMERSSFEKNPIDFLEAKGYKEVKKDLIIKLPKYSLFELENGRKRMLASAGELQKGNELALPSKYVNFLYLASHYEKLKGSPEDNEQKQLFVEQHKHYLDEIIEQISEFSKRVILADANLDKVLSAYNKHRDKPIREQAENIIHLFTLTNLGAPAAFKYFDTTIDRKRYTSTKEVLDATLIHQSITGLYETRIDLSQLGGDGGEAAAKEAAAKEAAAKEAAAKEAAAKGGTLNLEDEYRLYETSAEPEVSPGSTWLSDFPQAWAETGGMGLAVRQAPLIIPLKATSTPVSIKQYPMSQEAKLGIKPHIQRLLDQGILVPCQSPWNTPLLPVKKPGTNDYRPVQDLREVNKRVEDIHPTVPNPYNLLSGLPPSHRWYTVLDLKDAFFCLRLHPTSQPLFAFEWRDPGMGISGQLTWTRLPQGFKNSPTLFNEALHRDLADFRIQHPDLILLQYVDDILLAATSELDCQQGTRALLLTLGNLGYRASAKKAQLCQKQVKYLGYLLKEGQRWLTEARKETVMGQPTPKTPRQLREFLGTAGFCRLWIPGFAEMAAPLYPLTKPGTLFNWGPDQQKAYQEIKQALLTAPALGLPDLTKPFELFVDEKQGYAKGVLTQKLGPWRRPVAYLSKKLDPVAAGWPPCLRMVAAIAVLRKDAGKLTMGQPLVILAPHAVEALVKQPPDRWLSNARMTHYQAMLLDTDRVQFGPVVALNPATLLPLPEEGAPHDCLEILAETHGTRPDLTDQPIPDADHTWYTDGSSFLQEGQRKAGAAVTTETEVIWARALPAGTSAQRAELIALTQALKMAEGKRLNVYTDSRYAFATAHIHGEIYRRRGWLTSEGREIKNKSEILALLKALFLPKRLSIIHCLGHQKGDSAEARGNRLADQAAREAAIKTPPDTSTLLAGKRTADGSEFEKRTADGSEFESPKKKAKVE

SEQ ID NO: 6434 - protein, 2110 aa, synthetic construct; identical to SEQ ID NO: 4507

SEQ ID NO: 6435 - protein, 2110 aa, synthetic construct
MPAAKRVKLDGGDKKYSIGLDIGTNSVGWAVITDEYKVPSKKFKVLGNTDRHSIKKNLIGALLFDSGETAEATRLKRTARRRYTRRKNRICYLQEIFSNEMAKVDDSFFHRLEESFLVEEDKKHERHPIFGNIVDEVAYHEKYPTIYHLRKKLVDSTDKADLRLIYLALAHMIKFRGHFLIEGDLNPDNSDVDKLFIQLVQTYNQLFEENPINASGVDAKAILSARLSKSRRLENLIAQLPGEKKNGLFGNLIALSLGLTPNFKSNFDLAEDAKLQLSKDTYDDDLDNLLAQIGDQYADLFLAAKNLSDAILLSDILRVNTEITKAPLSASMIKRYDEHHQDLTLLKALVRQQLPEKYKEIFFDQSKNGYAGYIDGGASQEEFYKFIKPILEKMDGTEELLVKLNREDLLRKQRTFDNGSIPHQIHLGELHAILRRQEDFYPFLKDNREKIEKILTFRIPYYVGPLARGNSRFAWMTRKSEETITPWNFEEVVDKGASAQSFIERMTNFDKNLPNEKVLPKHSLLYEYFTVYNELTKVKYVTEGMRKPAFLSGEQKKAIVDLLFKTNRKVTVKQLKEDYFKKIECFDSVEISGVEDRFNASLGTYHDLLKIIKDKDFLDNEENEDILEDIVLTLTLFEDREMIEERLKTYAHLFDDKVMKQLKRRRYTGWGRLSRKLINGIRDKQSGKTILDFLKSDGFANRNFMQLIHDDSLTFKEDIQKAQVSGQGDSLHEHIANLAGSPAIKKGILQTVKVVDELVKVMGRHKPENIVIEMARENQTTQKGQKNSRERMKRIEEGIKELGSQILKEHPVENTQLQNEKLYLYYLQNGRDMYVDQELDINRLSDYDVDHIVPQSFLKDDSIDNKVLTRSDKARGKSDNVPSEEVVKKMKNYWRQLLNAKLITQRKFDNLTKAERGGLSELDKAGFIKRQLVETRQITKHVAQILDSRMNTKYDENDKLIREVKVITLKSKLVSDFRKDFQFYKVREINNYHHAHDAYLNAVVGTALIKKYPKLESEFVYGDYKVYDVRKMIAKSEQEIGKATAKYFFYSNIMNFFKTEITLANGEIRKRPLIETNGETGEIVWDKGRDFATVRKVLSMPQVNIVKKTEVQTGGFSKESILPKRNSDKLIARKKDWDPKKYGGFDSPTVAYSVLVVAKVEKGKSKKLKSVKELLGITIMERSSFEKNPIDFLEAKGYKEVKKDLIIKLPKYSLFELENGRKRMLASAGELQKGNELALPSKYVNFLYLASHYEKLKGSPEDNEQKQLFVEQHKHYLDEIIEQISEFSKRVILADANLDKVLSAYNKHRDKPIREQAENIIHLFTLTNLGAPAAFKYFDTTIDRKRYTSTKEVLDATLIHQSITGLYETRIDLSQLGGDGGEAAAKEAAAKEAAAKEAAAKEAAAKGGTLNIEDEYRLHETSKGPDVPLGSTWLSDFPQAWAETGGMGLAVRQAPLIIPLKATSTPVSIKQYPMSQEARLGIKPHIQRLLDQGILVPCQSPWNTPLLPVKKPGTNDYRPVQDLREVNKRVEDIHPTVPNPYNLLSGLPPSHQWYTVLDLKDAFFCLRLHPTSQSLFAFEWRDPEMGISGQLTWTRLPQGFKNSPTLFDEALHRDLADFRIQHPDLILLQYVDDLLLAATSELDCQQGTRALLQTLGDLGYRASAKKAQICQKQVKYLGYLLKEGQRWLTEARKETVMGQPTPKTPRQLREFLGTAGFCRLWIPGFAEMAAPLYPLTKTGTLFEWGPDQQKAYQEIKQALLTAPALGLPDLTKPFELFVDEKQGYAKGVLTQKLGPWRRPVAYLSKKLDPVAAGWPPCLRMVAAIAVLTKDAGKLTMGQPLVILAPHAVEALVKQPPDRWLSNARMTHYQALLLDTDRVQFGPIVALNPATLLPLPEEGLQHDCLDILAEAHGTRPDLTDQPLPDADHTWYTDGSSFLQEGQRKAGAAVTTETEVVWAKALPAGTSAQRAELIALTQALKMAEGKKLNVYTDSRYAFATAHIHGEIYRRRGLLTSEGKEIKNKDEILALLKALFLPKRLSIIHCPGHQKGNRAEARGNRMADQAAREVATRETPETSTLLAGKRTADGSEFEKRTADGSEFESPKKKAKVE

SEQ ID NO: 6436 - protein, 2110 aa, synthetic construct
MPAAKRVKLDGGDKKYSIGLDIGTNSVGWAVITDEYKVPSKKFKVLGNTDRHSIKKNLIGALLFDSGETAEATRLKRTARRRYTRRKNRICYLQEIFSNEMAKVDDSFFHRLEESFLVEEDKKHERHPIFGNIVDEVAYHEKYPTIYHLRKKLVDSTDKADLRLIYLALAHMIKFRGHFLIEGDLNPDNSDVDKLFIQLVQTYNQLFEENPINASGVDAKAILSARLSKSRRLENLIAQLPGEKKNGLFGNLIALSLGLTPNFKSNFDLAEDAKLQLSKDTYDDDLDNLLAQIGDQYADLFLAAKNLSDAILLSDILRVNTEITKAPLSASMIKRYDEHHQDLTLLKALVRQQLPEKYKEIFFDQSKNGYAGYIDGGASQEEFYKFIKPILEKMDGTEELLVKLNREDLLRKQRTFDNGSIPHQIHLGELHAILRRQEDFYPFLKDNREKIEKILTFRIPYYVGPLARGNSRFAWMTRKSEETITPWNFEEVVDKGASAQSFIERMTNFDKNLPNEKVLPKHSLLYEYFTVYNELTKVKYVTEGMRKPAFLSGEQKKAIVDLLFKTNRKVTVKQLKEDYFKKIECFDSVEISGVEDRFNASLGTYHDLLKIIKDKDFLDNEENEDILEDIVLTLTLFEDREMIEERLKTYAHLFDDKVMKQLKRRRYTGWGRLSRKLINGIRDKQSGKTILDFLKSDGFANRNFMQLIHDDSLTFKEDIQKAQVSGQGDSLHEHIANLAGSPAIKKGILQTVKVVDELVKVMGRHKPENIVIEMARENQTTQKGQKNSRERMKRIEEGIKELGSQILKEHPVENTQLQNEKLYLYYLQNGRDMYVDQELDINRLSDYDVDHIVPQSFLKDDSIDNKVLTRSDKARGKSDNVPSEEVVKKMKNYWRQLLNAKLITQRKFDNLTKAERGGLSELDKAGFIKRQLVETRQITKHVAQILDSRMNTKYDENDKLIREVKVITLKSKLVSDFRKDFQFYKVREINNYHHAHDAYLNAVVGTALIKKYPKLESEFVYGDYKVYDVRKMIAKSEQEIGKATAKYFFYSNIMNFFKTEITLANGEIRKRPLIETNGETGEIVWDKGRDFATVRKVLSMPQVNIVKKTEVQTGGFSKESILPKRNSDKLIARKKDWDPKKYGGFDSPTVAYSVLVVAKVEKGKSKKLKSVKELLGITIMERSSFEKNPIDFLEAKGYKEVKKDLIIKLPKYSLFELENGRKRMLASAGELQKGNELALPSKYVNFLYLASHYEKLKGSPEDNEQKQLFVEQHKHYLDEIIEQISEFSKRVILADANLDKVLSAYNKHRDKPIREQAENIIHLFTLTNLGAPAAFKYFDTTIDRKRYTSTKEVLDATLIHQSITGLYETRIDLSQLGGDGGEAAAKEAAAKEAAAKEAAAKEAAAKGGTLNIEDEHRLHETSKEPDVSLGSTWLSDFPQAWAETGGMGLAVRQAPLIIPLKATSTPVSIKQYPMSQEARLGIKPHIQRLLDQGILVPCQSPWNTPLLPVKKPGTNDYRPVQDLREVNKRVEDIHPTVPNPYNLLSGLPPSHQWYTVLDLKDAFFCLRLHPTSQPLFAFEWRDPEMGISGQLTWTRLPQGFKNSPTLFDEALHRDLADFRIQHPDLILLQYVDDLLLAATSELDCQQGTRALLQTLGNLGYRASAKKAQICQKQVKYLGYLLKEGQRWLTEARKETVMGQPTPKTPRQLREFLGTAGFCRLWIPGFAEMAAPLYPLTKTGTLFNWGPDQQKAYQEIKQALLTAPALGLPDLTKPFELFVDEKQGYAKGVLTQKLGPWRRPVAYLSKKLDPVAAGWPPCLRMVAAIAVLTKDAGKLTMGQPLVILAPHAVEALVKQPPDRWLSNARMTHYQALLLDTDRVQFGPVVALNPATLLPLPEEGLQHNCLDILAEAHGTRPDLTDQPLPDADHTWYTDGSSLLQEGQRKAGAAVTTETEVIWAKALPAGTSAQRAELIALTQALKMAEGKKLNVYTDSRYAFATAHIHGEIYRRRGLLTSEGKEIKNKDEILALLKALFLPKRLSIIHCPGHQKGHSAEARGNRMADQAARKAAITETPDTSTLLAGKRTADGSEFEKRTADGSEFESPKKKAKVE

SEQ ID NO: 6437 - protein, 2190 aa, synthetic construct
MPAAKRVKLDGGDKKYSIGLDIGTNSVGWAVITDEYKVPSKKFKVLGNTDRHSIKKNLIGALLFDSGETAEATRLKRTARRRYTRRKNRICYLQEIFSNEMAKVDDSFFHRLEESFLVEEDKKHERHPIFGNIVDEVAYHEKYPTIYHLRKKLVDSTDKADLRLIYLALAHMIKFRGHFLIEGDLNPDNSDVDKLFIQLVQTYNQLFEENPINASGVDAKAILSARLSKSRRLENLIAQLPGEKKNGLFGNLIALSLGLTPNFKSNFDLAEDAKLQLSKDTYDDDLDNLLAQIGDQYADLFLAAKNLSDAILLSDILRVNTEITKAPLSASMIKRYDEHHQDLTLLKALVRQQLPEKYKEIFFDQSKNGYAGYIDGGASQEEFYKFIKPILEKMDGTEELLVKLNREDLLRKQRTFDNGSIPHQIHLGELHAILRRQEDFYPFLKDNREKIEKILTFRIPYYVGPLARGNSRFAWMTRKSEETITPWNFEEVVDKGASAQSFIERMTNFDKNLPNEKVLPKHSLLYEYFTVYNELTKVKYVTEGMRKPAFLSGEQKKAIVDLLFKTNRKVTVKQLKEDYFKKIECFDSVEISGVEDRFNASLGTYHDLLKIIKDKDFLDNEENEDILEDIVLTLTLFEDREMIEERLKTYAHLFDDKVMKQLKRRRYTGWGRLSRKLINGIRDKQSGKTILDFLKSDGFANRNFMQLIHDDSLTFKEDIQKAQVSGQGDSLHEHIANLAGSPAIKKGILQTVKVVDELVKVMGRHKPENIVIEMARENQTTQKGQKNSRERMKRIEEGIKELGSQILKEHPVENTQLQNEKLYLYYLQNGRDMYVDQELDINRLSDYDVDHIVPQSFLKDDSIDNKVLTRSDKARGKSDNVPSEEVVKKMKNYWRQLLNAKLITQRKFDNLTKAERGGLSELDKAGFIKRQLVETRQITKHVAQILDSRMNTKYDENDKLIREVKVITLKSKLVSDFRKDFQFYKVREINNYHHAHDAYLNAVVGTALIKKYPKLESEFVYGDYKVYDVRKMIAKSEQEIGKATAKYFFYSNIMNFFKTEITLANGEIRKRPLIETNGETGEIVWDKGRDFATVRKVLSMPQVNIVKKTEVQTGGFSKESILPKRNSDKLIARKKDWDPKKYGGFDSPTVAYSVLVVAKVEKGKSKKLKSVKELLGITIMERSSFEKNPIDFLEAKGYKEVKKDLIIKLPKYSLFELENGRKRMLASAGELQKGNELALPSKYVNFLYLASHYEKLKGSPEDNEQKQLFVEQHKHYLDEIIEQISEFSKRVILADANLDKVLSAYNKHRDKPIREQAENIIHLFTLTNLGAPAAFKYFDTTIDRKRYTSTKEVLDATLIHQSITGLYETRIDLSQLGGDGGEAAAKEAAAKEAAAKEAAAKEAAAKGGMDPLQLLQPLEAEIKGTKLKAHWNSGATITCVPEAFLEDERPIQTMLIKTIHGEKQQDVYYLTFKVQGRKVEAEVLASPYDYILLNPSDVPWLMKKPLQLTVLVPLHEYQERLLQQTALPKEQKELLQKLFLKYDALWQHWENQVGHRRIKPHNIATGTLAPRPQKQYPINPKAKPSIQIVIDDLLKQGVLIQQNSTMNTPVYPVPKPDGKWRMVLDYREVNKTIPLIAAQNQHSAGILSSIYRGKYKTTLDLTNGFWAHPITPESYWLTAFTWQGKQYCWTRLPQGFLNSPALFTADVVDLLKEIPNVQAYVDDIYISHDDPQEHLEQLEKIFSILLNAGYVVSLKKSEIAQREVEFLGFNITKEGRGLTDTFKQKLLNITPPKDLKQLQSILGLLNFARNFIPNYSELVKPLYTIVANANGKFISWTEDNSNQLQHIISVLNQADNLEERNPETRLIIKVNSSPSAGYIRYYNEGSKRPIMYVNYIFSKAEAKFTQTEKLLTTMHKGLIKAMDLAMGQEILVYSPIVSMTKIQRTPLPERKALPVRWITWMTYLEDPRIQFHYDKSLPELQQIPNVTEDVIAKTKHPSEFAMVFYTDGSAIKHPDVNKSHSAGMGIAQVQFIPEYKIVHQWSIPLGDHTAQLAEIAAVEFACKKALKISGPVLIVTDSFYVAESANKELPYWKSNGFLNNKKKPLRHVSKWKSIAECLQLKPDIIIMHEKGHQQPMTTLHTEGNNLADKLATQGSYVVHAGKRTADGSEFEKRTADGSEFESPKKKAKVE

SEQ ID NO: 6438 - protein, 2110 aa, synthetic construct
MPAAKRVKLDGGDKKYSIGLDIGTNSVGWAVITDEYKVPSKKFKVLGNTDRHSIKKNLIGALLFDSGETAEATRLKRTARRRYTRRKNRICYLQEIFSNEMAKVDDSFFHRLEESFLVEEDKKHERHPIFGNIVDEVAYHEKYPTIYHLRKKLVDSTDKADLRLIYLALAHMIKFRGHFLIEGDLNPDNSDVDKLFIQLVQTYNQLFEENPINASGVDAKAILSARLSKSRRLENLIAQLPGEKKNGLFGNLIALSLGLTPNFKSNFDLAEDAKLQLSKDTYDDDLDNLLAQIGDQYADLFLAAKNLSDAILLSDILRVNTEITKAPLSASMIKRYDEHHQDLTLLKALVRQQLPEKYKEIFFDQSKNGYAGYIDGGASQEEFYKFIKPILEKMDGTEELLVKLNREDLLRKQRTFDNGSIPHQIHLGELHAILRRQEDFYPFLKDNREKIEKILTFRIPYYVGPLARGNSRFAWMTRKSEETITPWNFEEVVDKGASAQSFIERMTNFDKNLPNEKVLPKHSLLYEYFTVYNELTKVKYVTEGMRKPAFLSGEQKKAIVDLLFKTNRKVTVKQLKEDYFKKIECFDSVEISGVEDRFNASLGTYHDLLKIIKDKDFLDNEENEDILEDIVLTLTLFEDREMIEERLKTYAHLFDDKVMKQLKRRRYTGWGRLSRKLINGIRDKQSGKTILDFLKSDGFANRNFMQLIHDDSLTFKEDIQKAQVSGQGDSLHEHIANLAGSPAIKKGILQTVKVVDELVKVMGRHKPENIVIEMARENQTTQKGQKNSRERMKRIEEGIKELGSQILKEHPVENTQLQNEKLYLYYLQNGRDMYVDQELDINRLSDYDVDHIVPQSFLKDDSIDNKVLTRSDKARGKSDNVPSEEVVKKMKNYWRQLLNAKLITQRKFDNLTKAERGGLSELDKAGFIKRQLVETRQITKHVAQILDSRMNTKYDENDKLIREVKVITLKSKLVSDFRKDFQFYKVREINNYHHAHDAYLNAVVGTALIKKYPKLESEFVYGDYKVYDVRKMIAKSEQEIGKATAKYFFYSNIMNFFKTEITLANGEIRKRPLIETNGETGEIVWDKGRDFATVRKVLSMPQVNIVKKTEVQTGGFSKESILPKRNSDKLIARKKDWDPKKYGGFDSPTVAYSVLVVAKVEKGKSKKLKSVKELLGITIMERSSFEKNPIDFLEAKGYKEVKKDLIIKLPKYSLFELENGRKRMLASAGELQKGNELALPSKYVNFLYLASHYEKLKGSPEDNEQKQLFVEQHKHYLDEIIEQISEFSKRVILADANLDKVLSAYNKHRDKPIREQAENIIHLFTLTNLGAPAAFKYFDTTIDRKRYTSTKEVLDATLIHQSITGLYETRIDLSQLGGDGGEAAAKEAAAKEAAAKEAAAKEAAAKGGTLNIEDEYRLHETSKEPDVPLGSTWLSDFPQAWAETGGMGLAVRQAPLIIPLKATSTPVSIKQYPMSQEARLGIKPHIQRLLDQGILVPCQSPWNTPLLPVKKPGTNDYRPVQDLREVNKRVEDIHPTVPNPYNLLSGLPPSHQWYTVLDLKDAFFCLRLHPTSQPLFAFEWRDPEMGISGQLTWTRLPQGFKNSPTLFDEALHRDLADFRIQHPDLILLQYVDDLLLAATSEQDCQRGTRALLQTLGNLGYRASAKKAQICQKQVKYLGYLLKEGQRWLTEARKETVMGQPTPKTPRQLREFLGTAGFCRLWIPGFAEMAAPLYPLTKTGTLFNWGPDQQKAYQEIKQALLTAPALGLPDLTKPFELFVDEKQGYAKGVLTQKLGPWRRPVAYLSKKLDPVAAGWPPCLRMVAAIAVLTKDAGKLTMGQPLVILAPHAVEALVKQPPDRWLSNARMTHYQAMLLDTDRVQFGPVVALNPATLLPLPEKEAPHDCLEILAETHGTRPDLTDQPIPDADYTWYTDGSSFLQEGQRRAGAAVTTETEVIWARALPAGTSAQRAELIALTQALKMAEGKKLNVYTDSRYAFATAHVHGEIYRRRGLLTSEGREIKNKNEILALLKALFLPKRLSIIHCPGHQKGNSAEARGNRMADQAAREAAMKAVLETSTLLAGKRTADGSEFEKRTADGSEFESPKKKAKVE

SEQ ID NO: 6439 - protein, 2110 aa, synthetic construct
MPAAKRVKLDGGDKKYSIGLDIGTNSVGWAVITDEYKVPSKKFKVLGNTDRHSIKKNLIGALLFDSGETAEATRLKRTARRRYTRRKNRICYLQEIFSNEMAKVDDSFFHRLEESFLVEEDKKHERHPIFGNIVDEVAYHEKYPTIYHLRKKLVDSTDKADLRLIYLALAHMIKFRGHFLIEGDLNPDNSDVDKLFIQLVQTYNQLFEENPINASGVDAKAILSARLSKSRRLENLIAQLPGEKKNGLFGNLIALSLGLTPNFKSNFDLAEDAKLQLSKDTYDDDLDNLLAQIGDQYADLFLAAKNLSDAILLSDILRVNTEITKAPLSASMIKRYDEHHQDLTLLKALVRQQLPEKYKEIFFDQSKNGYAGYIDGGASQEEFYKFIKPILEKMDGTEELLVKLNREDLLRKQRTFDNGSIPHQIHLGELHAILRRQEDFYPFLKDNREKIEKILTFRIPYYVGPLARGNSRFAWMTRKSEETITPWNFEEVVDKGASAQSFIERMTNFDKNLPNEKVLPKHSLLYEYFTVYNELTKVKYVTEGMRKPAFLSGEQKKAIVDLLFKTNRKVTVKQLKEDYFKKIECFDSVEISGVEDRFNASLGTYHDLLKIIKDKDFLDNEENEDILEDIVLTLTLFEDREMIEERLKTYAHLFDDKVMKQLKRRRYTGWGRLSRKLINGIRDKQSGKTILDFLKSDGFANRNFMQLIHDDSLTFKEDIQKAQVSGQGDSLHEHIANLAGSPAIKKGILQTVKVVDELVKVMGRHKPENIVIEMARENQTTQKGQKNSRERMKRIEEGIKELGSQILKEHPVENTQLQNEKLYLYYLQNGRDMYVDQELDINRLSDYDVDHIVPQSFLKDDSIDNKVLTRSDKARGKSDNVPSEEVVKKMKNYWRQLLNAKLITQRKFDNLTKAERGGLSELDKAGFIKRQLVETRQITKHVAQILDSRMNTKYDENDKLIREVKVITLKSKLVSDFRKDFQFYKVREINNYHHAHDAYLNAVVGTALIKKYPKLESEFVYGDYKVYDVRKMIAKSEQEIGKATAKYFFYSNIMNFFKTEITLANGEIRKRPLIETNGETGEIVWDKGRDFATVRKVLSMPQVNIVKKTEVQTGGFSKESILPKRNSDKLIARKKDWDPKKYGGFDSPTVAYSVLVVAKVEKGKSKKLKSVKELLGITIMERSSFEKNPIDFLEAKGYKEVKKDLIIKLPKYSLFELENGRKRMLASAGELQKGNELALPSKYVNFLYLASHYEKLKGSPEDNEQKQLFVEQHKHYLDEIIEQISEFSKRVILADANLDKVLSAYNKHRDKPIREQAENIIHLFTLTNLGAPAAFKYFDTTIDRKRYTSTKEVLDATLIHQSITGLYETRIDLSQLGGDGGEAAAKEAAAKEAAAKEAAAKEAAAKGGTLNIEDEYRLHETSKEPDVPLGSTWLSDFPQAWAETGGMGLAVRQAPLIIPLKATSTPVSIKQYPMSQEARLGIKPHIQRLLDQGILVPCQSPWNTPLLPVKKPGTNDYRPVQDLREVNKRVEDIHPTVPNPYNLLSGLPPSHQWYTVLDLKDAFFCLRLHPTSQPLFAFEWRDPEMGISGQLTWTRLPQGFKNSPTLFNEALHRDLADFRIQHPDLILLQYVDDLLLAATSEQDCQRGTRALLQTLGNLGYRASAKKAQICQKQVKYLGYLLKEGQRWLTEARKETVMGQPTPKTPRQLREFLGTAGFCRLWIPGFAEMAAPLYPLTKPGTLFNWGPDQQKAYQEIKQALLTAPALGLPDLTKPFELFVDEKQGYAKGVLTQKLGPWRRPVAYLSKKLDPVAAGWPPCLRMVAAIAVLTKDAGKLTMGQPLVILAPHAVEALVKQPPDRWLSNARMTHYQAMLLDTDRVQFGPVVALNPATLLPLPEKEAPHDCLEILAETHGTRPDLTDQPIPDADYTWYTDGSSFLQEGQRRAGAAVTTETEVIWARALPAGTSAQRAELIALTQALKMAEGKKLNVYTDSRYAFATAHVHGEIYRRRGWLTSEGREIKNKNEILALLKALFLPKRLSIIHCPGHQKGNSAEARGNRMADQAAREAAMKAVLETSTLLAGKRTADGSEFEKRTADGSEFESPKKKAKVE

SEQ ID NO: 6440 - protein, 2117 aa, synthetic construct
MPAAKRVKLDGGDKKYSIGLDIGTNSVGWAVITDEYKVPSKKFKVLGNTDRHSIKKNLIGALLFDSGETAEATRLKRTARRRYTRRKNRICYLQEIFSNEMAKVDDSFFHRLEESFLVEEDKKHERHPIFGNIVDEVAYHEKYPTIYHLRKKLVDSTDKADLRLIYLALAHMIKFRGHFLIEGDLNPDNSDVDKLFIQLVQTYNQLFEENPINASGVDAKAILSARLSKSRRLENLIAQLPGEKKNGLFGNLIALSLGLTPNFKSNFDLAEDAKLQLSKDTYDDDLDNLLAQIGDQYADLFLAAKNLSDAILLSDILRVNTEITKAPLSASMIKRYDEHHQDLTLLKALVRQQLPEKYKEIFFDQSKNGYAGYIDGGASQEEFYKFIKPILEKMDGTEELLVKLNREDLLRKQRTFDNGSIPHQIHLGELHAILRRQEDFYPFLKDNREKIEKILTFRIPYYVGPLARGNSRFAWMTRKSEETITPWNFEEVVDKGASAQSFIERMTNFDKNLPNEKVLPKHSLLYEYFTVYNELTKVKYVTEGMRKPAFLSGEQKKAIVDLLFKTNRKVTVKQLKEDYFKKIECFDSVEISGVEDRFNASLGTYHDLLKIIKDKDFLDNEENEDILEDIVLTLTLFEDREMIEERLKTYAHLFDDKVMKQLKRRRYTGWGRLSRKLINGIRDKQSGKTILDFLKSDGFANRNFMQLIHDDSLTFKEDIQKAQVSGQGDSLHEHIANLAGSPAIKKGILQTVKVVDELVKVMGRHKPENIVIEMARENQTTQKGQKNSRERMKRIEEGIKELGSQILKEHPVENTQLQNEKLYLYYLQNGRDMYVDQELDINRLSDYDVDHIVPQSFLKDDSIDNKVLTRSDKARGKSDNVPSEEVVKKMKNYWRQLLNAKLITQRKFDNLTKAERGGLSELDKAGFIKRQLVETRQITKHVAQILDSRMNTKYDENDKLIREVKVITLKSKLVSDFRKDFQFYKVREINNYHHAHDAYLNAVVGTALIKKYPKLESEFVYGDYKVYDVRKMIAKSEQEIGKATAKYFFYSNIMNFFKTEITLANGEIRKRPLIETNGETGEIVWDKGRDFATVRKVLSMPQVNIVKKTEVQTGGFSKESILPKRNSDKLIARKKDWDPKKYGGFDSPTVAYSVLVVAKVEKGKSKKLKSVKELLGITIMERSSFEKNPIDFLEAKGYKEVKKDLIIKLPKYSLFELENGRKRMLASAGELQKGNELALPSKYVNFLYLASHYEKLKGSPEDNEQKQLFVEQHKHYLDEIIEQISEFSKRVILADANLDKVLSAYNKHRDKPIREQAENIIHLFTLTNLGAPAAFKYFDTTIDRKRYTSTKEVLDATLIHQSITGLYETRIDLSQLGGDGGEAAAKEAAAKEAAAKEAAAKEAAAKEAAAKGGTAPLEEEYRLFLEAPIQNVTLLEQWKREIPKVWAEINPPGLASTQAPIHVQLLSTALPVRVRQYPITLEAKRSLRETIRKFRAAGILRPVHSPWNTPLLPVRKSGTSEYRMVQDLREVNKRVETIHPTVPNPYTLLSLLPPDRIWYSVLDLKDAFFCIPLAPESQLIFAFEWADAEEGESGQLTWTRLPQGFKNSPTLFDEALNRDLQGFRLDHPSVSLLQYVDDLLIAADTQAACLSATRDLLMTLAELGYRVSGKKAQLCQEEVTYLGFKIHKGSRSLSNSRTQAILQIPVPKTKRQVREFLGTIGYCRLWIPGFAELAQPLYAATRGGNDPLVWGEKEEEAFQSLKLALTQPPALALPSLDKPFQLFVEETSGAAKGVLTQALGPWKRPVAYLSKRLDPVAAGWPRCLRAIAAAALLTREASKLTFGQDIEITSSHNLESLLRSPPDKWLTNARITQYQVLLLDPPRVRFKQTAALNPATLLPETDDTLPIHHCLDTLDSLTSTRPDLTDQPLAQAEATLFTDGSSYIRDGKRYAGAAVVTLDSVIWAEPLPIGTSAQKAELIALTKALEWSKDKSVNIYTDSRYAFATLHVHGMIYRERGLLTAGGKAIKNAPEILALLTAVWLPKRVAVMHCKGHQKDDAPTSTGNRRADEVAREVAIRPLSTQATISAGKRTADGSEFEKRTADGSEFESPKKKAKVE

SEQ ID NO: 6441 - protein, 2117 aa, synthetic construct
MPAAKRVKLDGGDKKYSIGLDIGTNSVGWAVITDEYKVPSKKFKVLGNTDRHSIKKNLIGALLFDSGETAEATRLKRTARRRYTRRKNRICYLQEIFSNEMAKVDDSFFHRLEESFLVEEDKKHERHPIFGNIVDEVAYHEKYPTIYHLRKKLVDSTDKADLRLIYLALAHMIKFRGHFLIEGDLNPDNSDVDKLFIQLVQTYNQLFEENPINASGVDAKAILSARLSKSRRLENLIAQLPGEKKNGLFGNLIALSLGLTPNFKSNFDLAEDAKLQLSKDTYDDDLDNLLAQIGDQYADLFLAAKNLSDAILLSDILRVNTEITKAPLSASMIKRYDEHHQDLTLLKALVRQQLPEKYKEIFFDQSKNGYAGYIDGGASQEEFYKFIKPILEKMDGTEELLVKLNREDLLRKQRTFDNGSIPHQIHLGELHAILRRQEDFYPFLKDNREKIEKILTFRIPYYVGPLARGNSRFAWMTRKSEETITPWNFEEVVDKGASAQSFIERMTNFDKNLPNEKVLPKHSLLYEYFTVYNELTKVKYVTEGMRKPAFLSGEQKKAIVDLLFKTNRKVTVKQLKEDYFKKIECFDSVEISGVEDRFNASLGTYHDLLKIIKDKDFLDNEENEDILEDIVLTLTLFEDREMIEERLKTYAHLFDDKVMKQLKRRRYTGWGRLSRKLINGIRDKQSGKTILDFLKSDGFANRNFMQLIHDDSLTFKEDIQKAQVSGQGDSLHEHIANLAGSPAIKKGILQTVKVVDELVKVMGRHKPENIVIEMARENQTTQKGQKNSRERMKRIEEGIKELGSQILKEHPVENTQLQNEKLYLYYLQNGRDMYVDQELDINRLSDYDVDHIVPQSFLKDDSIDNKVLTRSDKARGKSDNVPSEEVVKKMKNYWRQLLNAKLITQRKFDNLTKAERGGLSELDKAGFIKRQLVETRQITKHVAQILDSRMNTKYDENDKLIREVKVITLKSKLVSDFRKDFQFYKVREINNYHHAHDAYLNAVVGTALIKKYPKLESEFVYGDYKVYDVRKMIAKSEQEIGKATAKYFFYSNIMNFFKTEITLANGEIRKRPLIETNGETGEIVWDKGRDFATVRKVLSMPQVNIVKKTEVQTGGFSKESILPKRNSDKLIARKKDWDPKKYGGFDSPTVAYSVLVVAKVEKGKSKKLKSVKELLGITIMERSSFEKNPIDFLEAKGYKEVKKDLIIKLPKYSLFELENGRKRMLASAGELQKGNELALPSKYVNFLYLASHYEKLKGSPEDNEQKQLFVEQHKHYLDEIIEQISEFSKRVILADANLDKVLSAYNKHRDKPIREQAENIIHLFTLTNLGAPAAFKYFDTTIDRKRYTSTKEVLDATLIHQSITGLYETRIDLSQLGGDGGEAAAKEAAAKEAAAKEAAAKEAAAKEAAAKGGTAPLEEEYRLFLEAPIQNVTLLEQWKREIPKVWAEINPPGLASTQAPIHVQLLSTALPVRVRQYPITLEAKRSLRETIRKFRAAGILRPVHSPWNTPLLPVRKSGTSEYRMVQDLREVNKRVETIHPTVPNPYTLLSLLPPDRIWYSVLDLKDAFFCIPLAPESQLIFAFEWADAEEGESGQLTWTRLPQGFKNSPTLFNEALNRDLQGFRLDHPSVSLLQYVDDLLIAADTQAACLSATRDLLMTLAELGYRVSGKKAQLCQEEVTYLGFKIHKGSRSLSNSRTQAILQIPVPKTKRQVREFLGTIGYCRLWIPGFAELAQPLYAATRPGNDPLVWGEKEEEAFQSLKLALTQPPALALPSLDKPFQLFVEETSGAAKGVLTQALGPWKRPVAYLSKRLDPVAAGWPRCLRAIAAAALLTREASKLTFGQDIEITSSHNLESLLRSPPDKWLTNARITQYQVLLLDPPRVRFKQTAALNPATLLPETDDTLPIHHCLDTLDSLTSTRPDLTDQPLAQAEATLFTDGSSYIRDGKRYAGAAVVTLDSVIWAEPLPIGTSAQKAELIALTKALEWSKDKSVNIYTDSRYAFATLHVHGMIYRERGWLTAGGKAIKNAPEILALLTAVWLPKRVAVMHCKGHQKDDAPTSTGNRRADEVAREVAIRPLSTQATISAGKRTADGSEFEKRTADGSEFESPKKKAKVE

SEQ ID NO: 6442 - protein, 2121 aa, synthetic construct
MPAAKRVKLDGGDKKYSIGLDIGTNSVGWAVITDEYKVPSKKFKVLGNTDRHSIKKNLIGALLFDSGETAEATRLKRTARRRYTRRKNRICYLQEIFSNEMAKVDDSFFHRLEESFLVEEDKKHERHPIFGNIVDEVAYHEKYPTIYHLRKKLVDSTDKADLRLIYLALAHMIKFRGHFLIEGDLNPDNSDVDKLFIQLVQTYNQLFEENPINASGVDAKAILSARLSKSRRLENLIAQLPGEKKNGLFGNLIALSLGLTPNFKSNFDLAEDAKLQLSKDTYDDDLDNLLAQIGDQYADLFLAAKNLSDAILLSDILRVNTEITKAPLSASMIKRYDEHHQDLTLLKALVRQQLPEKYKEIFFDQSKNGYAGYIDGGASQEEFYKFIKPILEKMDGTEELLVKLNREDLLRKQRTFDNGSIPHQIHLGELHAILRRQEDFYPFLKDNREKIEKILTFRIPYYVGPLARGNSRFAWMTRKSEETITPWNFEEVVDKGASAQSFIERMTNFDKNLPNEKVLPKHSLLYEYFTVYNELTKVKYVTEGMRKPAFLSGEQKKAIVDLLFKTNRKVTVKQLKEDYFKKIECFDSVEISGVEDRFNASLGTYHDLLKIIKDKDFLDNEENEDILEDIVLTLTLFEDREMIEERLKTYAHLFDDKVMKQLKRRRYTGWGRLSRKLINGIRDKQSGKTILDFLKSDGFANRNFMQLIHDDSLTFKEDIQKAQVSGQGDSLHEHIANLAGSPAIKKGILQTVKVVDELVKVMGRHKPENIVIEMARENQTTQKGQKNSRERMKRIEEGIKELGSQILKEHPVENTQLQNEKLYLYYLQNGRDMYVDQELDINRLSDYDVDHIVPQSFLKDDSIDNKVLTRSDKARGKSDNVPSEEVVKKMKNYWRQLLNAKLITQRKFDNLTKAERGGLSELDKAGFIKRQLVETRQITKHVAQILDSRMNTKYDENDKLIREVKVITLKSKLVSDFRKDFQFYKVREINNYHHAHDAYLNAVVGTALIKKYPKLESEFVYGDYKVYDVRKMIAKSEQEIGKATAKYFFYSNIMNFFKTEITLANGEIRKRPLIETNGETGEIVWDKGRDFATVRKVLSMPQVNIVKKTEVQTGGFSKESILPKRNSDKLIARKKDWDPKKYGGFDSPTVAYSVLVVAKVEKGKSKKLKSVKELLGITIMERSSFEKNPIDFLEAKGYKEVKKDLIIKLPKYSLFELENGRKRMLASAGELQKGNELALPSKYVNFLYLASHYEKLKGSPEDNEQKQLFVEQHKHYLDEIIEQISEFSKRVILADANLDKVLSAYNKHRDKPIREQAENIIHLFTLTNLGAPAAFKYFDTTIDRKRYTSTKEVLDATLIHQSITGLYETRIDLSQLGGDGGEAAAKEAAAKEAAAKEAAAKEAAAKEAAAKGGTVSLQDEHRLFDIPVTTSLPDVWLQDFPQAWAETGGLGRAKCQAPIIIDLKPTAVPVSIKQYPMSLEAHMGIRQHIIKFLELGVLRPCRSPWNTPLLPVKKPGTQDYRPVQDLREINKRTVDIHPTVPNPYNLLSTLKPDYSWYTVLDLKDAFFCLPLAPQSQELFAFEWKDPERGISGQLTWTRLPQGFKNSPTLFDEALHRDLTDFRTQHPEVTLLQYVDDLLLAAPTKKACTQGTRHLLQELGEKGYRASAKKAQICQTKVTYLGYILSEGKRWLTPGRIETVARIPPPRNPREVREFLGTAGFCRLWIPGFAELAAPLYALTKESTPFTWQTEHQLAFEALKKALLSAPALGLPDTSKPFTLFLDERQGIAKGVLTQKLGPWKRPVAYLSKKLDPVAAGWPPCLRIMAATAMLVKDSAKLTLGQPLTVITPHTLEAIVRQPPDRWITNARLTHYQALLLDTDRVQFGPPVTLNPATLLPVPENQPSPHDCRQVLAETHGTREDLKDQELPDADHTWYTDGSSYLDSGTRRAGAAVVDGHNTIWAQSLPPGTSAQKAELIALTKALELSKGKKANIYTDSRYAFATAHTHGSIYERRGLLTSEGKEIKNKAEIIALLKALFLPQEVAIIHCPGHQKGQDPVAVGNRQADRVARQAAMAEVLTLATEPDNTSHITAGKRTADGSEFEKRTADGSEFESPKKKAKVE

SEQ ID NO: 6443 - protein, 2192 aa, synthetic construct
MPAAKRVKLDGGDKKYSIGLDIGTNSVGWAVITDEYKVPSKKFKVLGNTDRHSIKKNLIGALLFDSGETAEATRLKRTARRRYTRRKNRICYLQEIFSNEMAKVDDSFFHRLEESFLVEEDKKHERHPIFGNIVDEVAYHEKYPTIYHLRKKLVDSTDKADLRLIYLALAHMIKFRGHFLIEGDLNPDNSDVDKLFIQLVQTYNQLFEENPINASGVDAKAILSARLSKSRRLENLIAQLPGEKKNGLFGNLIALSLGLTPNFKSNFDLAEDAKLQLSKDTYDDDLDNLLAQIGDQYADLFLAAKNLSDAILLSDILRVNTEITKAPLSASMIKRYDEHHQDLTLLKALVRQQLPEKYKEIFFDQSKNGYAGYIDGGASQEEFYKFIKPILEKMDGTEELLVKLNREDLLRKQRTFDNGSIPHQIHLGELHAILRRQEDFYPFLKDNREKIEKILTFRIPYYVGPLARGNSRFAWMTRKSEETITPWNFEEVVDKGASAQSFIERMTNFDKNLPNEKVLPKHSLLYEYFTVYNELTKVKYVTEGMRKPAFLSGEQKKAIVDLLFKTNRKVTVKQLKEDYFKKIECFDSVEISGVEDRFNASLGTYHDLLKIIKDKDFLDNEENEDILEDIVLTLTLFEDREMIEERLKTYAHLFDDKVMKQLKRRRYTGWGRLSRKLINGIRDKQSGKTILDFLKSDGFANRNFMQLIHDDSLTFKEDIQKAQVSGQGDSLHEHIANLAGSPAIKKGILQTVKVVDELVKVMGRHKPENIVIEMARENQTTQKGQKNSRERMKRIEEGIKELGSQILKEHPVENTQLQNEKLYLYYLQNGRDMYVDQELDINRLSDYDVDHIVPQSFLKDDSIDNKVLTRSDKARGKSDNVPSEEVVKKMKNYWRQLLNAKLITQRKFDNLTKAERGGLSELDKAGFIKRQLVETRQITKHVAQILDSRMNTKYDENDKLIREVKVITLKSKLVSDFRKDFQFYKVREINNYHHAHDAYLNAVVGTALIKKYPKLESEFVYGDYKVYDVRKMIAKSEQEIGKATAKYFFYSNIMNFFKTEITLANGEIRKRPLIETNGETGEIVWDKGRDFATVRKVLSMPQVNIVKKTEVQTGGFSKESILPKRNSDKLIARKKDWDPKKYGGFDSPTVAYSVLVVAKVEKGKSKKLKSVKELLGITIMERSSFEKNPIDFLEAKGYKEVKKDLIIKLPKYSLFELENGRKRMLASAGELQKGNELALPSKYVNFLYLASHYEKLKGSPEDNEQKQLFVEQHKHYLDEIIEQISEFSKRVILADANLDKVLSAYNKHRDKPIREQAENIIHLFTLTNLGAPAAFKYFDTTIDRKRYTSTKEVLDATLIHQSITGLYETRIDLSQLGGDGGEAAAKEAAAKEAAAKEAAAKEAAAKEAAAKGGMDLLKPLTVERKGVKIKGYWNSQADITCVPKDLLQGEEPVRQQNVTTIHGTQEGDVYYVNLKIDGRRINTEVIGTTLDYAIITPGDVPWILKKPLELTIKLDLEEQQGTLLNNSILSKKGKEELKQLFEKYSALWQSWENQVGHRRIRPHKIATGTVKPTPQKQYHINPKAKPDIQIVINDLLKQGVLIQKESTMNTPVYPVPKPNGRWRMVLDYRAVNKVTPLIAVQNQHSYGILGSLFKGRYKTTIDLSNGFWAHPIVPEDYWITAFTWQGKQYCWTVLPQGFLNSPGLFTGDVVDLLQGIPNVEVYVDDVYISHDSEKEHLEYLDILFNRLKEAGYIISLKKSNIANSIVDFLGFQITNEGRGLTDTFKEKLENITAPTTLKQLQSILGLLNFARNFIPDFTELIAPLYALIPKSTKNYVPWQIEHSTTLETLITKLNGAEYLQGRKGDKTLIMKVNASYTTGYIRYYNEGEKKPISYVSIVFSKTELKFTELEKLLTTVHKGLLKALDLSMGQNIHVYSPIVSMQNIQKTPQTAKKALASRWLSWLSYLEDPRIRFFYDPQMPALKDLPAVDTGKDNKKHPSNFQHIFYTDGSAITSPTKEGHLNAGMGIVYFINKDGNLQKQQEWSISLGNHTAQFAEIAAFEFALKKCLPLGGNILVVTDSNYVAKAYNEELDVWASNGFVNNRKKPLKHISKWKSVADLKRLRPDVVVTHEPGHQKLDSSPHAYGNNLADQLATQASFKVHAGKRTADGSEFEKRTADGSEFESPKKKAKVE

SEQ ID NO: 6444 - protein, 2106 aa, synthetic construct
MPAAKRVKLDGGDKKYSIGLDIGTNSVGWAVITDEYKVPSKKFKVLGNTDRHSIKKNLIGALLFDSGETAEATRLKRTARRRYTRRKNRICYLQEIFSNEMAKVDDSFFHRLEESFLVEEDKKHERHPIFGNIVDEVAYHEKYPTIYHLRKKLVDSTDKADLRLIYLALAHMIKFRGHFLIEGDLNPDNSDVDKLFIQLVQTYNQLFEENPINASGVDAKAILSARLSKSRRLENLIAQLPGEKKNGLFGNLIALSLGLTPNFKSNFDLAEDAKLQLSKDTYDDDLDNLLAQIGDQYADLFLAAKNLSDAILLSDILRVNTEITKAPLSASMIKRYDEHHQDLTLLKALVRQQLPEKYKEIFFDQSKNGYAGYIDGGASQEEFYKFIKPILEKMDGTEELLVKLNREDLLRKQRTFDNGSIPHQIHLGELHAILRRQEDFYPFLKDNREKIEKILTFRIPYYVGPLARGNSRFAWMTRKSEETITPWNFEEVVDKGASAQSFIERMTNFDKNLPNEKVLPKHSLLYEYFTVYNELTKVKYVTEGMRKPAFLSGEQKKAIVDLLFKTNRKVTVKQLKEDYFKKIECFDSVEISGVEDRFNASLGTYHDLLKIIKDKDFLDNEENEDILEDIVLTLTLFEDREMIEERLKTYAHLFDDKVMKQLKRRRYTGWGRLSRKLINGIRDKQSGKTILDFLKSDGFANRNFMQLIHDDSLTFKEDIQKAQVSGQGDSLHEHIANLAGSPAIKKGILQTVKVVDELVKVMGRHKPENIVIEMARENQTTQKGQKNSRERMKRIEEGIKELGSQILKEHPVENTQLQNEKLYLYYLQNGRDMYVDQELDINRLSDYDVDHIVPQSFLKDDSIDNKVLTRSDKARGKSDNVPSEEVVKKMKNYWRQLLNAKLITQRKFDNLTKAERGGLSELDKAGFIKRQLVETRQITKHVAQILDSRMNTKYDENDKLIREVKVITLKSKLVSDFRKDFQFYKVREINNYHHAHDAYLNAVVGTALIKKYPKLESEFVYGDYKVYDVRKMIAKSEQEIGKATAKYFFYSNIMNFFKTEITLANGEIRKRPLIETNGETGEIVWDKGRDFATVRKVLSMPQVNIVKKTEVQTGGFSKESILPKRNSDKLIARKKDWDPKKYGGFDSPTVAYSVLVVAKVEKGKSKKLKSVKELLGITIMERSSFEKNPIDFLEAKGYKEVKKDLIIKLPKYSLFELENGRKRMLASAGELQKGNELALPSKYVNFLYLASHYEKLKGSPEDNEQKQLFVEQHKHYLDEIIEQISEFSKRVILADANLDKVLSAYNKHRDKPIREQAENIIHLFTLTNLGAPAAFKYFDTTIDRKRYTSTKEVLDATLIHQSITGLYETRIDLSQLGGDGGEAAAKEAAAKEAAAKEAAAKEAAAKEAAAKGGVPWILKKPLELTIKLDLEEQQGTLLNNSILSKKGKEELKQLFEKYSALWQSWENQVGHRRIRPHKIATGTVKPTPQKQYHINPKAKPDIQIVINDLLKQGVLIQKESTMNTPVYPVPKPNGRWRMVLDYRAVNKVTPLIAVQNQHSYGILGSLFKGRYKTTIDLSNGFWAHPIVPEDYWITAFTWQGKQYCWTVLPQGFLNSPGLFTGDVVDLLQGIPNVEVYVDDVYISHDSEKEHLEYLDILFNRLKEAGYIISLKKSNIANSIVDFLGFQITNEGRGLTDTFKEKLENITAPTTLKQLQSILGLLNFARNFIPDFTELIAPLYALIPKSTKNYVPWQIEHSTTLETLITKLNGAEYLQGRKGDKTLIMKVNASYTTGYIRYYNEGEKKPISYVSIVFSKTELKFTELEKLLTTVHKGLLKALDLSMGQNIHVYSPIVSMQNIQKTPQTAKKALASRWLSWLSYLEDPRIRFFYDPQMPALKDLPAVDTGKDNKKHPSNFQHIFYTDGSAITSPTKEGHLNAGMGIVYFINKDGNLQKQQEWSISLGNHTAQFAEIAAFEFALKKCLPLGGNILVVTDSNYVAKAYNEELDVWASNGFVNNRKKPLKHISKWKSVADLKRLRPDVVVTHEPGHQKLDSSPHAYGNNLADQLATQASFKVHAGKRTADGSEFEKRTADGSEFESPKKKAKVE

SEQ ID NO: 6445 - protein, 2192 aa, synthetic construct
MPAAKRVKLDGGDKKYSIGLDIGTNSVGWAVITDEYKVPSKKFKVLGNTDRHSIKKNLIGALLFDSGETAEATRLKRTARRRYTRRKNRICYLQEIFSNEMAKVDDSFFHRLEESFLVEEDKKHERHPIFGNIVDEVAYHEKYPTIYHLRKKLVDSTDKADLRLIYLALAHMIKFRGHFLIEGDLNPDNSDVDKLFIQLVQTYNQLFEENPINASGVDAKAILSARLSKSRRLENLIAQLPGEKKNGLFGNLIALSLGLTPNFKSNFDLAEDAKLQLSKDTYDDDLDNLLAQIGDQYADLFLAAKNLSDAILLSDILRVNTEITKAPLSASMIKRYDEHHQDLTLLKALVRQQLPEKYKEIFFDQSKNGYAGYIDGGASQEEFYKFIKPILEKMDGTEELLVKLNREDLLRKQRTFDNGSIPHQIHLGELHAILRRQEDFYPFLKDNREKIEKILTFRIPYYVGPLARGNSRFAWMTRKSEETITPWNFEEVVDKGASAQSFIERMTNFDKNLPNEKVLPKHSLLYEYFTVYNELTKVKYVTEGMRKPAFLSGEQKKAIVDLLFKTNRKVTVKQLKEDYFKKIECFDSVEISGVEDRFNASLGTYHDLLKIIKDKDFLDNEENEDILEDIVLTLTLFEDREMIEERLKTYAHLFDDKVMKQLKRRRYTGWGRLSRKLINGIRDKQSGKTILDFLKSDGFANRNFMQLIHDDSLTFKEDIQKAQVSGQGDSLHEHIANLAGSPAIKKGILQTVKVVDELVKVMGRHKPENIVIEMARENQTTQKGQKNSRERMKRIEEGIKELGSQILKEHPVENTQLQNEKLYLYYLQNGRDMYVDQELDINRLSDYDVDHIVPQSFLKDDSIDNKVLTRSDKARGKSDNVPSEEVVKKMKNYWRQLLNAKLITQRKFDNLTKAERGGLSELDKAGFIKRQLVETRQITKHVAQILDSRMNTKYDENDKLIREVKVITLKSKLVSDFRKDFQFYKVREINNYHHAHDAYLNAVVGTALIKKYPKLESEFVYGDYKVYDVRKMIAKSEQEIGKATAKYFFYSNIMNFFKTEITLANGEIRKRPLIETNGETGEIVWDKGRDFATVRKVLSMPQVNIVKKTEVQTGGFSKESILPKRNSDKLIARKKDWDPKKYGGFDSPTVAYSVLVVAKVEKGKSKKLKSVKELLGITIMERSSFEKNPIDFLEAKGYKEVKKDLIIKLPKYSLFELENGRKRMLASAGELQKGNELALPSKYVNFLYLASHYEKLKGSPEDNEQKQLFVEQHKHYLDEIIEQISEFSKRVILADANLDKVLSAYNKHRDKPIREQAENIIHLFTLTNLGAPAAFKYFDTTIDRKRYTSTKEVLDATLIHQSITGLYETRIDLSQLGGDGGEAAAKEAAAKEAAAKEAAAKEAAAKEAAAKGGMDLLKPLTVERKGVKIKGYWNSQADITCVPKDLLQGEEPVRQQNVTTIHGTQEGDVYYVNLKIDGRRINTEVIGTTLDYAIITPGDVPWILKKPLELTIKLDLEEQQGTLLNNSILSKKGKEELKQLFEKYSALWQSWENQVGHRRIRPHKIATGTVKPTPQKQYHINPKAKPDIQIVINDLLKQGVLIQKESTMNTPVYPVPKPNGRWRMVLDYRAVNKVTPLIAVQNQHSYGILGSLFKGRYKTTIDLSNGFWAHPIVPEDYWITAFTWQGKQYCWTVLPQGFLNSPGLFNGDVVDLLQGIPNVEVYVDDVYISHDSEKEHLEYLDILFNRLKEAGYIISLKKSNIANSIVDFLGFQITNEGRGLTDTFKEKLENITAPTTLKQLQSILGLLNFARNFIPDFTELIAPLYALIPKSPKNYVPWQIEHSTTLETLITKLNGAEYLQGRKGDKTLIMKVNASYTTGYIRYYNEGEKKPISYVSIVFSKTELKFTELEKLLTTVHKGLLKALDLSMGQNIHVYSPIVSMQNIQKTPQTAKKALASRWLSWLSYLEDPRIRFFYDPQMPALKDLPAVDTGKDNKKHPSNFQHIFYTDGSAITSPTKEGHLNAGMGIVYFINKDGNLQKQQEWSISLGNHTAQFAEIAAFEFALKKCLPLGGNILVVTDSNYVAKAYNEELDVWASNGFVNNRKKPLKHISKWKSVADLKRLRPDVVVTHEPGHQKLDSSPHAYGNNLADQLATQASFKVHAGKRTADGSEFEKRTADGSEFESPKKKAKVE

SEQ ID NO: 6446 - protein, 2192 aa, synthetic construct
MPAAKRVKLDGGDKKYSIGLDIGTNSVGWAVITDEYKVPSKKFKVLGNTDRHSIKKNLIGALLFDSGETAEATRLKRTARRRYTRRKNRICYLQEIFSNEMAKVDDSFFHRLEESFLVEEDKKHERHPIFGNIVDEVAYHEKYPTIYHLRKKLVDSTDKADLRLIYLALAHMIKFRGHFLIEGDLNPDNSDVDKLFIQLVQTYNQLFEENPINASGVDAKAILSARLSKSRRLENLIAQLPGEKKNGLFGNLIALSLGLTPNFKSNFDLAEDAKLQLSKDTYDDDLDNLLAQIGDQYADLFLAAKNLSDAILLSDILRVNTEITKAPLSASMIKRYDEHHQDLTLLKALVRQQLPEKYKEIFFDQSKNGYAGYIDGGASQEEFYKFIKPILEKMDGTEELLVKLNREDLLRKQRTFDNGSIPHQIHLGELHAILRRQEDFYPFLKDNREKIEKILTFRIPYYVGPLARGNSRFAWMTRKSEETITPWNFEEVVDKGASAQSFIERMTNFDKNLPNEKVLPKHSLLYEYFTVYNELTKVKYVTEGMRKPAFLSGEQKKAIVDLLFKTNRKVTVKQLKEDYFKKIECFDSVEISGVEDRFNASLGTYHDLLKIIKDKDFLDNEENEDILEDIVLTLTLFEDREMIEERLKTYAHLFDDKVMKQLKRRRYTGWGRLSRKLINGIRDKQSGKTILDFLKSDGFANRNFMQLIHDDSLTFKEDIQKAQVSGQGDSLHEHIANLAGSPAIKKGILQTVKVVDELVKVMGRHKPENIVIEMARENQTTQKGQKNSRERMKRIEEGIKELGSQILKEHPVENTQLQNEKLYLYYLQNGRDMYVDQELDINRLSDYDVDHIVPQSFLKDDSIDNKVLTRSDKARGKSDNVPSEEVVKKMKNYWRQLLNAKLITQRKFDNLTKAERGGLSELDKAGFIKRQLVETRQITKHVAQILDSRMNTKYDENDKLIREVKVITLKSKLVSDFRKDFQFYKVREINNYHHAHDAYLNAVVGTALIKKYPKLESEFVYGDYKVYDVRKMIAKSEQEIGKATAKYFFYSNIMNFFKTEITLANGEIRKRPLIETNGETGEIVWDKGRDFATVRKVLSMPQVNIVKKTEVQTGGFSKESILPKRNSDKLIARKKDWDPKKYGGFDSPTVAYSVLVVAKVEKGKSKKLKSVKELLGITIMERSSFEKNPIDFLEAKGYKEVKKDLIIKLPKYSLFELENGRKRMLASAGELQKGNELALPSKYVNFLYLASHYEKLKGSPEDNEQKQLFVEQHKHYLDEIIEQISEFSKRVILADANLDKVLSAYNKHRDKPIREQAENIIHLFTLTNLGAPAAFKYFDTTIDRKRYTSTKEVLDATLIHQSITGLYETRIDLSQLGGDGGEAAAKEAAAKEAAAKEAAAKEAAAKEAAAKGGMDLLKPLTVERKGVKIKGYWNSQADITCVPKDLLQGEEPVRQQNVTTIHGTQEGDVYYVNLKIDGRRINTEVIGTTLDYAIITPGDVPWILKKPLELTIKLDLEEQQGTLLNNSILSKKGKEELKQLFEKYSALWQSWENQVGHRRIRPHKIATGTVKPTPQKQYHINPKAKPDIQIVINDLLKQGVLIQKESTMNTPVYPVPKPNGRWRMVLDYRAVNKVTPLIAVQNQHSYGILGSLFKGRYKTTIDLSNGFWAHPIVPEDYWITAFTWQGKQYCWTVLPQGFLNSPGLFNGDVVDLLQGIPNVEVYVDDVYISHDSEKEHLEYLDILFNRLKEAGYIISLKKSNIANSIVDFLGFQITNEGRGLTDTFKEKLENITAPTTLKQLQSILGKLNFARNFIPDFTELIAPLYALIPKSPKNYVPWQIEHSTTLETLITKLNGAEYLQGRKGDKTLIMKVNASYTTGYIRYYNEGEKKPISYVSIVFSKTELKFTELEKLLTTVHKGLLKALDLSMGQNIHVYSPIVSMQNIQKTPQTAKKALASRWLSWLSYLEDPRIRFFYDPQMPALKDLPAVDTGKDNKKHPSNFQHIFYTDGSAITSPTKEGHLNAGMGIVYFINKDGNLQKQQEWSISLGNHTAQFAEIAAFEFALKKCLPLGGNILVVTDSNYVAKAYNEELDVWASNGFVNNRKKPLKHISKWKSVADLKRLRPDVVVTHEPGHQKLDSSPHAYGNNLADQLATQASFKVHAGKRTADGSEFEKRTADGSEFESPKKKAKVE

SEQ ID NO: 6447 - protein, 2195 aa, synthetic construct
MPAAKRVKLDGGDKKYSIGLDIGTNSVGWAVITDEYKVPSKKFKVLGNTDRHSIKKNLIGALLFDSGETAEATRLKRTARRRYTRRKNRICYLQEIFSNEMAKVDDSFFHRLEESFLVEEDKKHERHPIFGNIVDEVAYHEKYPTIYHLRKKLVDSTDKADLRLIYLALAHMIKFRGHFLIEGDLNPDNSDVDKLFIQLVQTYNQLFEENPINASGVDAKAILSARLSKSRRLENLIAQLPGEKKNGLFGNLIALSLGLTPNFKSNFDLAEDAKLQLSKDTYDDDLDNLLAQIGDQYADLFLAAKNLSDAILLSDILRVNTEITKAPLSASMIKRYDEHHQDLTLLKALVRQQLPEKYKEIFFDQSKNGYAGYIDGGASQEEFYKFIKPILEKMDGTEELLVKLNREDLLRKQRTFDNGSIPHQIHLGELHAILRRQEDFYPFLKDNREKIEKILTFRIPYYVGPLARGNSRFAWMTRKSEETITPWNFEEVVDKGASAQSFIERMTNFDKNLPNEKVLPKHSLLYEYFTVYNELTKVKYVTEGMRKPAFLSGEQKKAIVDLLFKTNRKVTVKQLKEDYFKKIECFDSVEISGVEDRFNASLGTYHDLLKIIKDKDFLDNEENEDILEDIVLTLTLFEDREMIEERLKTYAHLFDDKVMKQLKRRRYTGWGRLSRKLINGIRDKQSGKTILDFLKSDGFANRNFMQLIHDDSLTFKEDIQKAQVSGQGDSLHEHIANLAGSPAIKKGILQTVKVVDELVKVMGRHKPENIVIEMARENQTTQKGQKNSRERMKRIEEGIKELGSQILKEHPVENTQLQNEKLYLYYLQNGRDMYVDQELDINRLSDYDVDHIVPQSFLKDDSIDNKVLTRSDKARGKSDNVPSEEVVKKMKNYWRQLLNAKLITQRKFDNLTKAERGGLSELDKAGFIKRQLVETRQITKHVAQILDSRMNTKYDENDKLIREVKVITLKSKLVSDFRKDFQFYKVREINNYHHAHDAYLNAVVGTALIKKYPKLESEFVYGDYKVYDVRKMIAKSEQEIGKATAKYFFYSNIMNFFKTEITLANGEIRKRPLIETNGETGEIVWDKGRDFATVRKVLSMPQVNIVKKTEVQTGGFSKESILPKRNSDKLIARKKDWDPKKYGGFDSPTVAYSVLVVAKVEKGKSKKLKSVKELLGITIMERSSFEKNPIDFLEAKGYKEVKKDLIIKLPKYSLFELENGRKRMLASAGELQKGNELALPSKYVNFLYLASHYEKLKGSPEDNEQKQLFVEQHKHYLDEIIEQISEFSKRVILADANLDKVLSAYNKHRDKPIREQAENIIHLFTLTNLGAPAAFKYFDTTIDRKRYTSTKEVLDATLIHQSITGLYETRIDLSQLGGDGGEAAAKEAAAKEAAAKEAAAKEAAAKEAAAKGGMNPLQLLQPLPAEIKGTKLLAHWNSGATITCIPESFLEDEQPIKKTLIKTIHGEKQQNVYYVTFKVKGRKVEAEVIASPYEYILLSPTDVPWLTQQPLQLTILVPLQEYQEKILSKTALPEDQKQQLKTLFVKYDNLWQHWENQVGHRKIRPHNIATGDYPPRPQKQYPINPKAKPSIQIVIDDLLKQGVLTPQNSTMNTPVYPVPKPDGRWRMVLDYREVNKTIPLTAAQNQHSAGILATIVRQKYKTTLDLANGFWAHPITPESYWLTAFTWQGKQYCWTRLPQGFLNSPALFTADVVDLLKEIPNVQVYVDDIYLSHDDPKEHVQQLEKVFQILLQAGYVVSLKKSEIGQKTVEFLGFNITKEGRGLTDTFKTKLLNITPPKDLKQLQSILGLLNFARNFIPNFAELVQPLYNLIASAKGKYIEWSEENTKQLNMVIEALNTASNLEERLPEQRLVIKVNTSPSAGYVRYYNETGKKPIMYLNYVFSKAELKFSMLEKLLTTMHKALIKAMDLAMGQEILVYSPIVSMTKIQKTPLPERKALPIRWITWMTYLEDPRIQFHYDKTLPELKHIPDVYTSSQSPVKHPSQYEGVFYTDGSAIKSPDPTKSNNAGMGIVHATYKPEYQVLNQWSIPLGNHTAQMAEIAAVEFACKKALKIPGPVLVITDSFYVAESANKELPYWKSNGFVNNKKKPLKHISKWKSIAECLSMKPDITIQHEKGISLQIPVFILKGNALADKLATQGSYVVNAGKRTADGSEFEKRTADGSEFESPKKKAKVE

SEQ ID NO: 6448 - protein, 2106 aa, synthetic construct
MPAAKRVKLDGGDKKYSIGLDIGTNSVGWAVITDEYKVPSKKFKVLGNTDRHSIKKNLIGALLFDSGETAEATRLKRTARRRYTRRKNRICYLQEIFSNEMAKVDDSFFHRLEESFLVEEDKKHERHPIFGNIVDEVAYHEKYPTIYHLRKKLVDSTDKADLRLIYLALAHMIKFRGHFLIEGDLNPDNSDVDKLFIQLVQTYNQLFEENPINASGVDAKAILSARLSKSRRLENLIAQLPGEKKNGLFGNLIALSLGLTPNFKSNFDLAEDAKLQLSKDTYDDDLDNLLAQIGDQYADLFLAAKNLSDAILLSDILRVNTEITKAPLSASMIKRYDEHHQDLTLLKALVRQQLPEKYKEIFFDQSKNGYAGYIDGGASQEEFYKFIKPILEKMDGTEELLVKLNREDLLRKQRTFDNGSIPHQIHLGELHAILRRQEDFYPFLKDNREKIEKILTFRIPYYVGPLARGNSRFAWMTRKSEETITPWNFEEVVDKGASAQSFIERMTNFDKNLPNEKVLPKHSLLYEYFTVYNELTKVKYVTEGMRKPAFLSGEQKKAIVDLLFKTNRKVTVKQLKEDYFKKIECFDSVEISGVEDRFNASLGTYHDLLKIIKDKDFLDNEENEDILEDIVLTLTLFEDREMIEERLKTYAHLFDDKVMKQLKRRRYTGWGRLSRKLINGIRDKQSGKTILDFLKSDGFANRNFMQLIHDDSLTFKEDIQKAQVSGQGDSLHEHIANLAGSPAIKKGILQTVKVVDELVKVMGRHKPENIVIEMARENQTTQKGQKNSRERMKRIEEGIKELGSQILKEHPVENTQLQNEKLYLYYLQNGRDMYVDQELDINRLSDYDVDHIVPQSFLKDDSIDNKVLTRSDKARGKSDNVPSEEVVKKMKNYWRQLLNAKLITQRKFDNLTKAERGGLSELDKAGFIKRQLVETRQITKHVAQILDSRMNTKYDENDKLIREVKVITLKSKLVSDFRKDFQFYKVREINNYHHAHDAYLNAVVGTALIKKYPKLESEFVYGDYKVYDVRKMIAKSEQEIGKATAKYFFYSNIMNFFKTEITLANGEIRKRPLIETNGETGEIVWDKGRDFATVRKVLSMPQVNIVKKTEVQTGGFSKESILPKRNSDKLIARKKDWDPKKYGGFDSPTVAYSVLVVAKVEKGKSKKLKSVKELLGITIMERSSFEKNPIDFLEAKGYKEVKKDLIIKLPKYSLFELENGRKRMLASAGELQKGNELALPSKYVNFLYLASHYEKLKGSPEDNEQKQLFVEQHKHYLDEIIEQISEFSKRVILADANLDKVLSAYNKHRDKPIREQAENIIHLFTLTNLGAPAAFKYFDTTIDRKRYTSTKEVLDATLIHQSITGLYETRIDLSQLGGDGGEAAAKEAAAKEAAAKEAAAKEAAAKEAAAKGGVPWLTQQPLQLTILVPLQEYQEKILSKTALPEDQKQQLKTLFVKYDNLWQHWENQVGHRKIRPHNIATGDYPPRPQKQYPINPKAKPSIQIVIDDLLKQGVLTPQNSTMNTPVYPVPKPDGRWRMVLDYREVNKTIPLTAAQNQHSAGILATIVRQKYKTTLDLANGFWAHPITPESYWLTAFTWQGKQYCWTRLPQGFLNSPALFNADVVDLLKEIPNVQVYVDDIYLSHDDPKEHVQQLEKVFQILLQAGYVVSLKKSEIGQKTVEFLGFNITKEGRGLTDTFKTKLLNITPPKDLKQLQSILGKLNFARNFIPNFAELVQPLYNLIAPAKGKYIEWSEENTKQLNMVIEALNTASNLEERLPEQRLVIKVNTSPSAGYVRYYNETGKKPIMYLNYVFSKAELKFSMLEKLLTTMHKALIKAMDLAMGQEILVYSPIVSMTKIQKTPLPERKALPIRWITWMTYLEDPRIQFHYDKTLPELKHIPDVYTSSQSPVKHPSQYEGVFYTDGSAIKSPDPTKSNNAGMGIVHATYKPEYQVLNQWSIPLGNHTAQMAEIAAVEFACKKALKIPGPVLVITDSFYVAESANKELPYWKSNGFVNNKKKPLKHISKWKSIAECLSMKPDITIQHEKGISLQIPVFILKGNALADKLATQGSYVVNAGKRTADGSEFEKRTADGSEFESPKKKAKVE

SEQ ID NO: 6449 - protein, 2195 aa, synthetic construct
MPAAKRVKLDGGDKKYSIGLDIGTNSVGWAVITDEYKVPSKKFKVLGNTDRHSIKKNLIGALLFDSGETAEATRLKRTARRRYTRRKNRICYLQEIFSNEMAKVDDSFFHRLEESFLVEEDKKHERHPIFGNIVDEVAYHEKYPTIYHLRKKLVDSTDKADLRLIYLALAHMIKFRGHFLIEGDLNPDNSDVDKLFIQLVQTYNQLFEENPINASGVDAKAILSARLSKSRRLENLIAQLPGEKKNGLFGNLIALSLGLTPNFKSNFDLAEDAKLQLSKDTYDDDLDNLLAQIGDQYADLFLAAKNLSDAILLSDILRVNTEITKAPLSASMIKRYDEHHQDLTLLKALVRQQLPEKYKEIFFDQSKNGYAGYIDGGASQEEFYKFIKPILEKMDGTEELLVKLNREDLLRKQRTFDNGSIPHQIHLGELHAILRRQEDFYPFLKDNREKIEKILTFRIPYYVGPLARGNSRFAWMTRKSEETITPWNFEEVVDKGASAQSFIERMTNFDKNLPNEKVLPKHSLLYEYFTVYNELTKVKYVTEGMRKPAFLSGEQKKAIVDLLFKTNRKVTVKQLKEDYFKKIECFDSVEISGVEDRFNASLGTYHDLLKIIKDKDFLDNEENEDILEDIVLTLTLFEDREMIEERLKTYAHLFDDKVMKQLKRRRYTGWGRLSRKLINGIRDKQSGKTILDFLKSDGFANRNFMQLIHDDSLTFKEDIQKAQVSGQGDSLHEHIANLAGSPAIKKGILQTVKVVDELVKVMGRHKPENIVIEMARENQTTQKGQKNSRERMKRIEEGIKELGSQILKEHPVENTQLQNEKLYLYYLQNGRDMYVDQELDINRLSDYDVDHIVPQSFLKDDSIDNKVLTRSDKARGKSDNVPSEEVVKKMKNYWRQLLNAKLITQRKFDNLTKAERGGLSELDKAGFIKRQLVETRQITKHVAQILDSRMNTKYDENDKLIREVKVITLKSKLVSDFRKDFQFYKVREINNYHHAHDAYLNAVVGTALIKKYPKLESEFVYGDYKVYDVRKMIAKSEQEIGKATAKYFFYSNIMNFFKTEITLANGEIRKRPLIETNGETGEIVWDKGRDFATVRKVLSMPQVNIVKKTEVQTGGFSKESILPKRNSDKLIARKKDWDPKKYGGFDSPTVAYSVLVVAKVEKGKSKKLKSVKELLGITIMERSSFEKNPIDFLEAKGYKEVKKDLIIKLPKYSLFELENGRKRMLASAGELQKGNELALPSKYVNFLYLASHYEKLKGSPEDNEQKQLFVEQHKHYLDEIIEQISEFSKRVILADANLDKVLSAYNKHRDKPIREQAENIIHLFTLTNLGAPAAFKYFDTTIDRKRYTSTKEVLDATLIHQSITGLYETRIDLSQLGGDGGEAAAKEAAAKEAAAKEAAAKEAAAKEAAAKGGMNPLQLLQPLPAEIKGTKLLAHWNSGATITCIPESFLEDEQPIKKTLIKTIHGEKQQNVYYVTFKVKGRKVEAEVIASPYEYILLSPTDVPWLTQQPLQLTILVPLQEYQEKILSKTALPEDQKQQLKTLFVKYDNLWQHWENQVGHRKIRPHNIATGDYPPRPQKQYPINPKAKPSIQIVIDDLLKQGVLTPQNSTMNTPVYPVPKPDGRWRMVLDYREVNKTIPLTAAQNQHSAGILATIVRQKYKTTLDLANGFWAHPITPESYWLTAFTWQGKQYCWTRLPQGFLNSPALFNADVVDLLKEIPNVQVYVDDIYLSHDDPKEHVQQLEKVFQILLQAGYVVSLKKSEIGQKTVEFLGFNITKEGRGLTDTFKTKLLNITPPKDLKQLQSILGLLNFARNFIPNFAELVQPLYNLIAPAKGKYIEWSEENTKQLNMVIEALNTASNLEERLPEQRLVIKVNTSPSAGYVRYYNETGKKPIMYLNYVFSKAELKFSMLEKLLTTMHKALIKAMDLAMGQEILVYSPIVSMTKIQKTPLPERKALPIRWITWMTYLEDPRIQFHYDKTLPELKHIPDVYTSSQSPVKHPSQYEGVFYTDGSAIKSPDPTKSNNAGMGIVHATYKPEYQVLNQWSIPLGNHTAQMAEIAAVEFACKKALKIPGPVLVITDSFYVAESANKELPYWKSNGFVNNKKKPLKHISKWKSIAECLSMKPDITIQHEKGISLQIPVFILKGNALADKLATQGSYVVNAGKRTADGSEFEKRTADGSEFESPKKKAKVE

SEQ ID NO: 6450 - protein, 2113 aa, synthetic construct
MPAAKRVKLDGGDKKYSIGLDIGTNSVGWAVITDEYKVPSKKFKVLGNTDRHSIKKNLIGALLFDSGETAEATRLKRTARRRYTRRKNRICYLQEIFSNEMAKVDDSFFHRLEESFLVEEDKKHERHPIFGNIVDEVAYHEKYPTIYHLRKKLVDSTDKADLRLIYLALAHMIKFRGHFLIEGDLNPDNSDVDKLFIQLVQTYNQLFEENPINASGVDAKAILSARLSKSRRLENLIAQLPGEKKNGLFGNLIALSLGLTPNFKSNFDLAEDAKLQLSKDTYDDDLDNLLAQIGDQYADLFLAAKNLSDAILLSDILRVNTEITKAPLSASMIKRYDEHHQDLTLLKALVRQQLPEKYKEIFFDQSKNGYAGYIDGGASQEEFYKFIKPILEKMDGTEELLVKLNREDLLRKQRTFDNGSIPHQIHLGELHAILRRQEDFYPFLKDNREKIEKILTFRIPYYVGPLARGNSRFAWMTRKSEETITPWNFEEVVDKGASAQSFIERMTNFDKNLPNEKVLPKHSLLYEYFTVYNELTKVKYVTEGMRKPAFLSGEQKKAIVDLLFKTNRKVTVKQLKEDYFKKIECFDSVEISGVEDRFNASLGTYHDLLKIIKDKDFLDNEENEDILEDIVLTLTLFEDREMIEERLKTYAHLFDDKVMKQLKRRRYTGWGRLSRKLINGIRDKQSGKTILDFLKSDGFANRNFMQLIHDDSLTFKEDIQKAQVSGQGDSLHEHIANLAGSPAIKKGILQTVKVVDELVKVMGRHKPENIVIEMARENQTTQKGQKNSRERMKRIEEGIKELGSQILKEHPVENTQLQNEKLYLYYLQNGRDMYVDQELDINRLSDYDVDHIVPQSFLKDDSIDNKVLTRSDKARGKSDNVPSEEVVKKMKNYWRQLLNAKLITQRKFDNLTKAERGGLSELDKAGFIKRQLVETRQITKHVAQILDSRMNTKYDENDKLIREVKVITLKSKLVSDFRKDFQFYKVREINNYHHAHDAYLNAVVGTALIKKYPKLESEFVYGDYKVYDVRKMIAKSEQEIGKATAKYFFYSNIMNFFKTEITLANGEIRKRPLIETNGETGEIVWDKGRDFATVRKVLSMPQVNIVKKTEVQTGGFSKESILPKRNSDKLIARKKDWDPKKYGGFDSPTVAYSVLVVAKVEKGKSKKLKSVKELLGITIMERSSFEKNPIDFLEAKGYKEVKKDLIIKLPKYSLFELENGRKRMLASAGELQKGNELALPSKYVNFLYLASHYEKLKGSPEDNEQKQLFVEQHKHYLDEIIEQISEFSKRVILADANLDKVLSAYNKHRDKPIREQAENIIHLFTLTNLGAPAAFKYFDTTIDRKRYTSTKEVLDATLIHQSITGLYETRIDLSQLGGDGGEAAAKEAAAKEAAAKEAAAKEAAAKEAAAKGGVLNLEEEYRLHEKPVPSSIDPSWLQLFPTVWAERAGMGLANQVPPVVVELRSGASPVAVRQYPMSKEAREGIRPHIQKFLDLGVLVPCRSPWNTPLLPVKKPGTNDYRPVQDLREINKRVQDIHPTVPNPYNLLSSLPPSYTWYSVLDLKDAFFCLRLHPNSQPLFAFEWKDPEKGNTGQLTWTRLPQGFKNSPTLFDEALHRDLAPFRALNPQVVLLQYVDDLLVAAPTYEDCKKGTQKLLQELSKLGYRVSAKKAQLCQREVTYLGYLLKEGKRWLTPARKATVMKIPVPTTPRQVREFLGTAGFCRLWIPGFASLAAPLYPLTKESIPFIWTEEHQQAFDHIKKALLSAPALALPDLTKPFTLYIDERAGVARGVLTQTLGPWRRPVAYLSKKLDPVASGWPTCLKAVAAVALLLKDADKLTLGQNVTVIASHSLESIVRQPPDRWMTNARMTHYQSLLLNERVSFAPPAVLNPATLLPVESEATPVHRCSEILAEETGTRRDLEDQPLPGVPTWYTDGSSFITEGKRRAGAPIVDGKRTVWASSLPEGTSAQKAELVALTQALRLAEGKNINIYTDSRYAFATAHIHGAIYKQRGLLTSAGKDIKNKEEILALLEAIHLPRRVAIIHCPGHQRGSNPVATGNRRADEAAKQAALSTRVLAGTTKPAGKRTADGSEFEKRTADGSEFESPKKKAKVE

SEQ ID NO: 6451 - protein, 2113 aa, synthetic construct
MPAAKRVKLDGGDKKYSIGLDIGTNSVGWAVITDEYKVPSKKFKVLGNTDRHSIKKNLIGALLFDSGETAEATRLKRTARRRYTRRKNRICYLQEIFSNEMAKVDDSFFHRLEESFLVEEDKKHERHPIFGNIVDEVAYHEKYPTIYHLRKKLVDSTDKADLRLIYLALAHMIKFRGHFLIEGDLNPDNSDVDKLFIQLVQTYNQLFEENPINASGVDAKAILSARLSKSRRLENLIAQLPGEKKNGLFGNLIALSLGLTPNFKSNFDLAEDAKLQLSKDTYDDDLDNLLAQIGDQYADLFLAAKNLSDAILLSDILRVNTEITKAPLSASMIKRYDEHHQDLTLLKALVRQQLPEKYKEIFFDQSKNGYAGYIDGGASQEEFYKFIKPILEKMDGTEELLVKLNREDLLRKQRTFDNGSIPHQIHLGELHAILRRQEDFYPFLKDNREKIEKILTFRIPYYVGPLARGNSRFAWMTRKSEETITPWNFEEVVDKGASAQSFIERMTNFDKNLPNEKVLPKHSLLYEYFTVYNELTKVKYVTEGMRKPAFLSGEQKKAIVDLLFKTNRKVTVKQLKEDYFKKIECFDSVEISGVEDRFNASLGTYHDLLKIIKDKDFLDNEENEDILEDIVLTLTLFEDREMIEERLKTYAHLFDDKVMKQLKRRRYTGWGRLSRKLINGIRDKQSGKTILDFLKSDGFANRNFMQLIHDDSLTFKEDIQKAQVSGQGDSLHEHIANLAGSPAIKKGILQTVKVVDELVKVMGRHKPENIVIEMARENQTTQKGQKNSRERMKRIEEGIKELGSQILKEHPVENTQLQNEKLYLYYLQNGRDMYVDQELDINRLSDYDVDHIVPQSFLKDDSIDNKVLTRSDKARGKSDNVPSEEVVKKMKNYWRQLLNAKLITQRKFDNLTKAERGGLSELDKAGFIKRQLVETRQITKHVAQILDSRMNTKYDENDKLIREVKVITLKSKLVSDFRKDFQFYKVREINNYHHAHDAYLNAVVGTALIKKYPKLESEFVYGDYKVYDVRKMIAKSEQEIGKATAKYFFYSNIMNFFKTEITLANGEIRKRPLIETNGETGEIVWDKGRDFATVRKVLSMPQVNIVKKTEVQTGGFSKESILPKRNSDKLIARKKDWDPKKYGGFDSPTVAYSVLVVAKVEKGKSKKLKSVKELLGITIMERSSFEKNPIDFLEAKGYKEVKKDLIIKLPKYSLFELENGRKRMLASAGELQKGNELALPSKYVNFLYLASHYEKLKGSPEDNEQKQLFVEQHKHYLDEIIEQISEFSKRVILADANLDKVLSAYNKHRDKPIREQAENIIHLFTLTNLGAPAAFKYFDTTIDRKRYTSTKEVLDATLIHQSITGLYETRIDLSQLGGDGGEAAAKEAAAKEAAAKEAAAKEAAAKEAAAKGGVLNLEEEYRLHEKPVPSSIDPSWLQLFPTVWAERAGMGLANQVPPVVVELRSGASPVAVRQYPMSKEAREGIRPHIQKFLDLGVLVPCRSPWNTPLLPVKKPGTNDYRPVQDLREINKRVQDIHPTVPNPYNLLSSLPPSYTWYSVLDLKDAFFCLRLHPNSQPLFAFEWKDPEKGNTGQLTWTRLPQGFKNSPTLFNEALHRDLAPFRALNPQVVLLQYVDDLLVAAPTYEDCKKGTQKLLQELSKLGYRVSAKKAQLCQREVTYLGYLLKEGKRWLTPARKATVMKIPVPTTPRQVREFLGTAGFCRLWIPGFASLAAPLYPLTKPSIPFIWTEEHQQAFDHIKKALLSAPALALPDLTKPFTLYIDERAGVARGVLTQTLGPWRRPVAYLSKKLDPVASGWPTCLKAVAAVALLLKDADKLTLGQNVTVIASHSLESIVRQPPDRWMTNARMTHYQSLLLNERVSFAPPAVLNPATLLPVESEATPVHRCSEILAEETGTRRDLEDQPLPGVPTWYTDGSSFITEGKRRAGAPIVDGKRTVWASSLPEGTSAQKAELVALTQALRLAEGKNINIYTDSRYAFATAHIHGAIYKQRGWLTSAGKDIKNKEEILALLEAIHLPRRVAIIHCPGHQRGSNPVATGNRRADEAAKQAALSTRVLAGTTKPAGKRTADGSEFEKRTADGSEFESPKKKAKVE

SEQ ID NO: 6452 - protein, 2237 aa, synthetic construct
MPAAKRVKLDGGDKKYSIGLDIGTNSVGWAVITDEYKVPSKKFKVLGNTDRHSIKKNLIGALLFDSGETAEATRLKRTARRRYTRRKNRICYLQEIFSNEMAKVDDSFFHRLEESFLVEEDKKHERHPIFGNIVDEVAYHEKYPTIYHLRKKLVDSTDKADLRLIYLALAHMIKFRGHFLIEGDLNPDNSDVDKLFIQLVQTYNQLFEENPINASGVDAKAILSARLSKSRRLENLIAQLPGEKKNGLFGNLIALSLGLTPNFKSNFDLAEDAKLQLSKDTYDDDLDNLLAQIGDQYADLFLAAKNLSDAILLSDILRVNTEITKAPLSASMIKRYDEHHQDLTLLKALVRQQLPEKYKEIFFDQSKNGYAGYIDGGASQEEFYKFIKPILEKMDGTEELLVKLNREDLLRKQRTFDNGSIPHQIHLGELHAILRRQEDFYPFLKDNREKIEKILTFRIPYYVGPLARGNSRFAWMTRKSEETITPWNFEEVVDKGASAQSFIERMTNFDKNLPNEKVLPKHSLLYEYFTVYNELTKVKYVTEGMRKPAFLSGEQKKAIVDLLFKTNRKVTVKQLKEDYFKKIECFDSVEISGVEDRFNASLGTYHDLLKIIKDKDFLDNEENEDILEDIVLTLTLFEDREMIEERLKTYAHLFDDKVMKQLKRRRYTGWGRLSRKLINGIRDKQSGKTILDFLKSDGFANRNFMQLIHDDSLTFKEDIQKAQVSGQGDSLHEHIANLAGSPAIKKGILQTVKVVDELVKVMGRHKPENIVIEMARENQTTQKGQKNSRERMKRIEEGIKELGSQILKEHPVENTQLQNEKLYLYYLQNGRDMYVDQELDINRLSDYDVDHIVPQSFLKDDSIDNKVLTRSDKARGKSDNVPSEEVVKKMKNYWRQLLNAKLITQRKFDNLTKAERGGLSELDKAGFIKRQLVETRQITKHVAQILDSRMNTKYDENDKLIREVKVITLKSKLVSDFRKDFQFYKVREINNYHHAHDAYLNAVVGTALIKKYPKLESEFVYGDYKVYDVRKMIAKSEQEIGKATAKYFFYSNIMNFFKTEITLANGEIRKRPLIETNGETGEIVWDKGRDFATVRKVLSMPQVNIVKKTEVQTGGFSKESILPKRNSDKLIARKKDWDPKKYGGFDSPTVAYSVLVVAKVEKGKSKKLKSVKELLGITIMERSSFEKNPIDFLEAKGYKEVKKDLIIKLPKYSLFELENGRKRMLASAGELQKGNELALPSKYVNFLYLASHYEKLKGSPEDNEQKQLFVEQHKHYLDEIIEQISEFSKRVILADANLDKVLSAYNKHRDKPIREQAENIIHLFTLTNLGAPAAFKYFDTTIDRKRYTSTKEVLDATLIHQSITGLYETRIDLSQLGGDGGEAAAKEAAAKEAAAKEAAAKEAAAKEAAAKGGTLGDQGSRGSDPLPEPRVTLTVEGIPTEFLVNTGAEHSVLTKPMGKMGSKRTVVAGATGSKVYPWTTKRLLKIGQKQVTHSFLVIPECPAPLLGRDLLTKLKAQIQFSTEGPQVTWEDRPAMCLVLNLEEEYRLHEKPVPPSIDPSWLQLFPMVWAEKAGMGLANQVPPVVVELKSDASPVAVRQYPMSKEAREGIRPHIQRFLDLGILVPCQSPWNTPLLPVKKPGTNDYRPVQDLREVNKRVQDIHPTVPNPYNLLSSLPPSHTWYSVLDLKDAFFCLKLHPNSQPLFAFEWRDPEKGNTGQLTWTRLPQGFKNSPTLFDEALHRDLASFRALNPQVVMLQYVDDLLVAAPTYRDCKEGTRRLLQELSKLGYRVSAKKAQLCREEVTYLGYLLKGGKRWLTPARKATVMKIPTPTTPRQVREFLGTAGFCRLWIPGFASLAAPLYPLTREKVPFTWTEAHQEAFGRIKEALLSAPALALPDLTKPFALYVDEKEGVARGVLTQTLGPWRRPVAYLSKKLDPVASGWPTCLKAIAAVALLLKDADKLTLGQNVLVIAPHNLESIVRQPPDRWMTNARMTHYQSLLLNERVSFAPPAILNPATLLPVESDDTPIHICSEILAEETGTRPDLRDQPLPGVPAWYTDGSSFIMDGRRQAGAAIVDNKRTVWASNLPEGTSAQKAELIALTQALRLAEGKSINIYTDSRYAFATAHVHGAIYKQRGLLTSAGKDIKNKEEILALLEAIHLPKRVAIIHCPGHQRGTDPVATGNRKADEAAKQAAQSTRILTETTKNAGKRTADGSEFEKRTADGSEFESPKKKAKVE

SEQ ID NO: 6453 - protein, 2237 aa, synthetic construct
MPAAKRVKLDGGDKKYSIGLDIGTNSVGWAVITDEYKVPSKKFKVLGNTDRHSIKKNLIGALLFDSGETAEATRLKRTARRRYTRRKNRICYLQEIFSNEMAKVDDSFFHRLEESFLVEEDKKHERHPIFGNIVDEVAYHEKYPTIYHLRKKLVDSTDKADLRLIYLALAHMIKFRGHFLIEGDLNPDNSDVDKLFIQLVQTYNQLFEENPINASGVDAKAILSARLSKSRRLENLIAQLPGEKKNGLFGNLIALSLGLTPNFKSNFDLAEDAKLQLSKDTYDDDLDNLLAQIGDQYADLFLAAKNLSDAILLSDILRVNTEITKAPLSASMIKRYDEHHQDLTLLKALVRQQLPEKYKEIFFDQSKNGYAGYIDGGASQEEFYKFIKPILEKMDGTEELLVKLNREDLLRKQRTFDNGSIPHQIHLGELHAILRRQEDFYPFLKDNREKIEKILTFRIPYYVGPLARGNSRFAWMTRKSEETITPWNFEEVVDKGASAQSFIERMTNFDKNLPNEKVLPKHSLLYEYFTVYNELTKVKYVTEGMRKPAFLSGEQKKAIVDLLFKTNRKVTVKQLKEDYFKKIECFDSVEISGVEDRFNASLGTYHDLLKIIKDKDFLDNEENEDILEDIVLTLTLFEDREMIEERLKTYAHLFDDKVMKQLKRRRYTGWGRLSRKLINGIRDKQSGKTILDFLKSDGFANRNFMQLIHDDSLTFKEDIQKAQVSGQGDSLHEHIANLAGSPAIKKGILQTVKVVDELVKVMGRHKPENIVIEMARENQTTQKGQKNSRERMKRIEEGIKELGSQILKEHPVENTQLQNEKLYLYYLQNGRDMYVDQELDINRLSDYDVDHIVPQSFLKDDSIDNKVLTRSDKARGKSDNVPSEEVVKKMKNYWRQLLNAKLITQRKFDNLTKAERGGLSELDKAGFIKRQLVETRQITKHVAQILDSRMNTKYDENDKLIREVKVITLKSKLVSDFRKDFQFYKVREINNYHHAHDAYLNAVVGTALIKKYPKLESEFVYGDYKVYDVRKMIAKSEQEIGKATAKYFFYSNIMNFFKTEITLANGEIRKRPLIETNGETGEIVWDKGRDFATVRKVLSMPQVNIVKKTEVQTGGFSKESILPKRNSDKLIARKKDWDPKKYGGFDSPTVAYSVLVVAKVEKGKSKKLKSVKELLGITIMERSSFEKNPIDFLEAKGYKEVKKDLIIKLPKYSLFELENGRKRMLASAGELQKGNELALPSKYVNFLYLASHYEKLKGSPEDNEQKQLFVEQHKHYLDEIIEQISEFSKRVILADANLDKVLSAYNKHRDKPIREQAENIIHLFTLTNLGAPAAFKYFDTTIDRKRYTSTKEVLDATLIHQSITGLYETRIDLSQLGGDGGEAAAKEAAAKEAAAKEAAAKEAAAKEAAAKGGTLGDQGSRGSDPLPEPRVTLTVEGIPTEFLVNTGAEHSVLTKPMGKMGSKRTVVAGATGSKVYPWTTKRLLKIGQKQVTHSFLVIPECPAPLLGRDLLTKLKAQIQFSTEGPQVTWEDRPAMCLVLNLEEEYRLHEKPVPPSIDPSWLQLFPMVWAEKAGMGLANQVPPVVVELKSDASPVAVRQYPMSKEAREGIRPHIQRFLDLGILVPCQSPWNTPLLPVKKPGTNDYRPVQDLREVNKRVQDIHPTVPNPYNLLSSLPPSHTWYSVLDLKDAFFCLKLHPNSQPLFAFEWRDPEKGNTGQLTWTRLPQGFKNSPTLFNEALHRDLASFRALNPQVVMLQYVDDLLVAAPTYRDCKEGTRRLLQELSKLGYRVSAKKAQLCREEVTYLGYLLKGGKRWLTPARKATVMKIPTPTTPRQVREFLGTAGFCRLWIPGFASLAAPLYPLTRPKVPFTWTEAHQEAFGRIKEALLSAPALALPDLTKPFALYVDEKEGVARGVLTQTLGPWRRPVAYLSKKLDPVASGWPTCLKAIAAVALLLKDADKLTLGQNVLVIAPHNLESIVRQPPDRWMTNARMTHYQSLLLNERVSFAPPAILNPATLLPVESDDTPIHICSEILAEETGTRPDLRDQPLPGVPAWYTDGSSFIMDGRRQAGAAIVDNKRTVWASNLPEGTSAQKAELIALTQALRLAEGKSINIYTDSRYAFATAHVHGAIYKQRGWLTSAGKDIKNKEEILALLEAIHLPKRVAIIHCPGHQRGTDPVATGNRKADEAAKQAAQSTRILTETTKNAGKRTADGSEFEKRTADGSEFESPKKKAKVE

SEQ ID NO: 6454 - protein, 2115 aa, synthetic construct
MPAAKRVKLDGGDKKYSIGLDIGTNSVGWAVITDEYKVPSKKFKVLGNTDRHSIKKNLIGALLFDSGETAEATRLKRTARRRYTRRKNRICYLQEIFSNEMAKVDDSFFHRLEESFLVEEDKKHERHPIFGNIVDEVAYHEKYPTIYHLRKKLVDSTDKADLRLIYLALAHMIKFRGHFLIEGDLNPDNSDVDKLFIQLVQTYNQLFEENPINASGVDAKAILSARLSKSRRLENLIAQLPGEKKNGLFGNLIALSLGLTPNFKSNFDLAEDAKLQLSKDTYDDDLDNLLAQIGDQYADLFLAAKNLSDAILLSDILRVNTEITKAPLSASMIKRYDEHHQDLTLLKALVRQQLPEKYKEIFFDQSKNGYAGYIDGGASQEEFYKFIKPILEKMDGTEELLVKLNREDLLRKQRTFDNGSIPHQIHLGELHAILRRQEDFYPFLKDNREKIEKILTFRIPYYVGPLARGNSRFAWMTRKSEETITPWNFEEVVDKGASAQSFIERMTNFDKNLPNEKVLPKHSLLYEYFTVYNELTKVKYVTEGMRKPAFLSGEQKKAIVDLLFKTNRKVTVKQLKEDYFKKIECFDSVEISGVEDRFNASLGTYHDLLKIIKDKDFLDNEENEDILEDIVLTLTLFEDREMIEERLKTYAHLFDDKVMKQLKRRRYTGWGRLSRKLINGIRDKQSGKTILDFLKSDGFANRNFMQLIHDDSLTFKEDIQKAQVSGQGDSLHEHIANLAGSPAIKKGILQTVKVVDELVKVMGRHKPENIVIEMARENQTTQKGQKNSRERMKRIEEGIKELGSQILKEHPVENTQLQNEKLYLYYLQNGRDMYVDQELDINRLSDYDVDHIVPQSFLKDDSIDNKVLTRSDKARGKSDNVPSEEVVKKMKNYWRQLLNAKLITQRKFDNLTKAERGGLSELDKAGFIKRQLVETRQITKHVAQILDSRMNTKYDENDKLIREVKVITLKSKLVSDFRKDFQFYKVREINNYHHAHDAYLNAVVGTALIKKYPKLESEFVYGDYKVYDVRKMIAKSEQEIGKATAKYFFYSNIMNFFKTEITLANGEIRKRPLIETNGETGEIVWDKGRDFATVRKVLSMPQVNIVKKTEVQTGGFSKESILPKRNSDKLIARKKDWDPKKYGGFDSPTVAYSVLVVAKVEKGKSKKLKSVKELLGITIMERSSFEKNPIDFLEAKGYKEVKKDLIIKLPKYSLFELENGRKRMLASAGELQKGNELALPSKYVNFLYLASHYEKLKGSPEDNEQKQLFVEQHKHYLDEIIEQISEFSKRVILADANLDKVLSAYNKHRDKPIREQAENIIHLFTLTNLGAPAAFKYFDTTIDRKRYTSTKEVLDATLIHQSITGLYETRIDLSQLGGDGGEAAAKEAAAKEAAAKEAAAKEAAAKEAAAKGGTLNLEDEYRLYETSAEPEVSPGSTWLSDFPQAWAETGGMGLAVRQAPLIIPLKATSTPVSIKQYPMSQEAKLGIKPHIQRLLDQGILVPCQSPWNTPLLPVKKPGTNDYRPVQDLREVNKRVEDIHPTVPNPYNLLSGLPPSHRWYTVLDLKDAFFCLRLHPTSQPLFAFEWRDPGMGISGQLTWTRLPQGFKNSPTLFNEALHRDLADFRIQHPDLILLQYVDDILLAATSELDCQQGTRALLLTLGNLGYRASAKKAQLCQKQVKYLGYLLKEGQRWLTEARKETVMGQPTPKTPRQLREFLGTAGFCRLWIPGFAEMAAPLYPLTKPGTLFNWGPDQQKAYQEIKQALLTAPALGLPDLTKPFELFVDEKQGYAKGVLTQKLGPWRRPVAYLSKKLDPVAAGWPPCLRMVAAIAVLRKDAGKLTMGQPLVILAPHAVEALVKQPPDRWLSNARMTHYQAMLLDTDRVQFGPVVALNPATLLPLPEEGAPHDCLEILAETHGTRPDLTDQPIPDADHTWYTDGSSFLQEGQRKAGAAVTTETEVIWARALPAGTSAQRAELIALTQALKMAEGKRLNVYTDSRYAFATAHIHGEIYRRRGWLTSEGREIKNKSEILALLKALFLPKRLSIIHCLGHQKGDSAEARGNRLADQAAREAAIKTPPDTSTLLAGKRTADGSEFEKRTADGSEFESPKKKAKVE

SEQ ID NO: 6455 - protein, 2115 aa, synthetic construct
MPAAKRVKLDGGDKKYSIGLDIGTNSVGWAVITDEYKVPSKKFKVLGNTDRHSIKKNLIGALLFDSGETAEATRLKRTARRRYTRRKNRICYLQEIFSNEMAKVDDSFFHRLEESFLVEEDKKHERHPIFGNIVDEVAYHEKYPTIYHLRKKLVDSTDKADLRLIYLALAHMIKFRGHFLIEGDLNPDNSDVDKLFIQLVQTYNQLFEENPINASGVDAKAILSARLSKSRRLENLIAQLPGEKKNGLFGNLIALSLGLTPNFKSNFDLAEDAKLQLSKDTYDDDLDNLLAQIGDQYADLFLAAKNLSDAILLSDILRVNTEITKAPLSASMIKRYDEHHQDLTLLKALVRQQLPEKYKEIFFDQSKNGYAGYIDGGASQEEFYKFIKPILEKMDGTEELLVKLNREDLLRKQRTFDNGSIPHQIHLGELHAILRRQEDFYPFLKDNREKIEKILTFRIPYYVGPLARGNSRFAWMTRKSEETITPWNFEEVVDKGASAQSFIERMTNFDKNLPNEKVLPKHSLLYEYFTVYNELTKVKYVTEGMRKPAFLSGEQKKAIVDLLFKTNRKVTVKQLKEDYFKKIECFDSVEISGVEDRFNASLGTYHDLLKIIKDKDFLDNEENEDILEDIVLTLTLFEDREMIEERLKTYAHLFDDKVMKQLKRRRYTGWGRLSRKLINGIRDKQSGKTILDFLKSDGFANRNFMQLIHDDSLTFKEDIQKAQVSGQGDSLHEHIANLAGSPAIKKGILQTVKVVDELVKVMGRHKPENIVIEMARENQTTQKGQKNSRERMKRIEEGIKELGSQILKEHPVENTQLQNEKLYLYYLQNGRDMYVDQELDINRLSDYDVDHIVPQSFLKDDSIDNKVLTRSDKARGKSDNVPSEEVVKKMKNYWRQLLNAKLITQRKFDNLTKAERGGLSELDKAGFIKRQLVETRQITKHVAQILDSRMNTKYDENDKLIREVKVITLKSKLVSDFRKDFQFYKVREINNYHHAHDAYLNAVVGTALIKKYPKLESEFVYGDYKVYDVRKMIAKSEQEIGKATAKYFFYSNIMNFFKTEITLANGEIRKRPLIETNGETGEIVWDKGRDFATVRKVLSMPQVNIVKKTEVQTGGFSKESILPKRNSDKLIARKKDWDPKKYGGFDSPTVAYSVLVVAKVEKGKSKKLKSVKELLGITIMERSSFEKNPIDFLEAKGYKEVKKDLIIKLPKYSLFELENGRKRMLASAGELQKGNELALPSKYVNFLYLASHYEKLKGSPEDNEQKQLFVEQHKHYLDEIIEQISEFSKRVILADANLDKVLSAYNKHRDKPIREQAENIIHLFTLTNLGAPAAFKYFDTTIDRKRYTSTKEVLDATLIHQSITGLYETRIDLSQLGGDGGEAAAKEAAAKEAAAKEAAAKEAAAKEAAAKGGTLGIEDEYRLHETSTEPDVSLGSTWLSDFPQAWAETGGMGLAVRQAPLIIPLKATSTPVSIQQYPMSHEARLGIKPHIQRLLDQGILVPCQSPWNTPLLPVKKPGTNDYRPVQDLREVNKRVEDIHPTVPNPYNLLSGLPPSHQWYTVLDLKDAFFCLRLHPTSQPLFAFEWRDPGMGISGQLTWTRLPQGFKNSPTLFDEALHRDLADFRIQHPDLILLQYVDDILLAATSELDCQQGTRALLQTLGDLGYRASAKKAQICQKQVKYLGYLLREGQRWLTEARKETVMGQPVPKTPRQLREFLGTAGFCRLWIPGFAEMAAPLYPLTKTGTLFSWGPDQQKAYQEIKQALLTAPALGLPDLTKPFELFVDEKQGYAKGVLTQKLGPWRRPVAYLSKKLDPVAAGWPPCLRMVAAIAVLTKDAGKLTMGQPLVILAPHAVEALVKQPPDRWLSNARMTHYQAMLLDTDRVQFGPVVALNPATLLPLPEEGAPHDCLEILAETHGTRPDLTDQPIPDADHTWYTDGSSFLQEGQRKAGAAVTTETEVIWAGALPAGTSAQRAELIALTQALKMAEGKRLNVYTDSRYAFATAHIHGEIYRRRGLLTSEGREIKNKSEILALLKALFLPKRLSIIHCLGHQKGDSAEARGNRLADQAAREAAIKTPPDTSTLLAGKRTADGSEFEKRTADGSEFESPKKKAKVE

SEQ ID NO: 6456 - protein, 2115 aa, synthetic construct; identical to SEQ ID NO: 6455

SEQ ID NO: 6457 - protein, 2115 aa, synthetic construct
MPAAKRVKLDGGDKKYSIGLDIGTNSVGWAVITDEYKVPSKKFKVLGNTDRHSIKKNLIGALLFDSGETAEATRLKRTARRRYTRRKNRICYLQEIFSNEMAKVDDSFFHRLEESFLVEEDKKHERHPIFGNIVDEVAYHEKYPTIYHLRKKLVDSTDKADLRLIYLALAHMIKFRGHFLIEGDLNPDNSDVDKLFIQLVQTYNQLFEENPINASGVDAKAILSARLSKSRRLENLIAQLPGEKKNGLFGNLIALSLGLTPNFKSNFDLAEDAKLQLSKDTYDDDLDNLLAQIGDQYADLFLAAKNLSDAILLSDILRVNTEITKAPLSASMIKRYDEHHQDLTLLKALVRQQLPEKYKEIFFDQSKNGYAGYIDGGASQEEFYKFIKPILEKMDGTEELLVKLNREDLLRKQRTFDNGSIPHQIHLGELHAILRRQEDFYPFLKDNREKIEKILTFRIPYYVGPLARGNSRFAWMTRKSEETITPWNFEEVVDKGASAQSFIERMTNFDKNLPNEKVLPKHSLLYEYFTVYNELTKVKYVTEGMRKPAFLSGEQKKAIVDLLFKTNRKVTVKQLKEDYFKKIECFDSVEISGVEDRFNASLGTYHDLLKIIKDKDFLDNEENEDILEDIVLTLTLFEDREMIEERLKTYAHLFDDKVMKQLKRRRYTGWGRLSRKLINGIRDKQSGKTILDFLKSDGFANRNFMQLIHDDSLTFKEDIQKAQVSGQGDSLHEHIANLAGSPAIKKGILQTVKVVDELVKVMGRHKPENIVIEMARENQTTQKGQKNSRERMKRIEEGIKELGSQILKEHPVENTQLQNEKLYLYYLQNGRDMYVDQELDINRLSDYDVDHIVPQSFLKDDSIDNKVLTRSDKARGKSDNVPSEEVVKKMKNYWRQLLNAKLITQRKFDNLTKAERGGLSELDKAGFIKRQLVETRQITKHVAQILDSRMNTKYDENDKLIREVKVITLKSKLVSDFRKDFQFYKVREINNYHHAHDAYLNAVVGTALIKKYPKLESEFVYGDYKVYDVRKMIAKSEQEIGKATAKYFFYSNIMNFFKTEITLANGEIRKRPLIETNGETGEIVWDKGRDFATVRKVLSMPQVNIVKKTEVQTGGFSKESILPKRNSDKLIARKKDWDPKKYGGFDSPTVAYSVLVVAKVEKGKSKKLKSVKELLGITIMERSSFEKNPIDFLEAKGYKEVKKDLIIKLPKYSLFELENGRKRMLASAGELQKGNELALPSKYVNFLYLASHYEKLKGSPEDNEQKQLFVEQHKHYLDEIIEQISEFSKRVILADANLDKVLSAYNKHRDKPIREQAENIIHLFTLTNLGAPAAFKYFDTTIDRKRYTSTKEVLDATLIHQSITGLYETRIDLSQLGGDGGEAAAKEAAAKEAAAKEAAAKEAAAKEAAAKGGTLNIEDEYRLHETSKEPDVSLGSTWLSDFPQAWAETGGMGLAVRQAPLIIPLKATSTPVSIKQYPMSQEARLGIKPHIQRLLDQGILVPCQSPWNTPLLPVKKPGTNDYRPVQDLREVNKRVEDIHPTVPNPYNLLSGLPPSHQWYTVLDLKDAFFCLRLHPTSQPLFAFEWRDPEMGISGQLTWTRLPQGFKNSPTLFDEALHRDLAGFRIQHPDLILLQYVDDLLLAATSELDCQQGTRALLQTLGDLGYRASAKKAQICQKQVKYLGYLLKEGQRWLTEARKETVMGQPIPKTPRQLREFLGTAGFCRLWIPGFAEMAAPLYPLTKTGTLFNWGPDQQKAFQEIKQALLTAPALGLPDLTKPFELFVDEKQGYAKGVLTQKLGPWRRPVAYLSKKLDPVAAGWPPCLRMVAAIAVLTKDAGKLTMGQPLVILAPHAVEALVKQPPDRWLSNARMTHYQALLLDTDRVQFGPVVALNPATLLPLPEEGLQHDCLDILAEAHGTRSDLMDQPLPDADHTWYTDGSSFLQEGQRKAGAAVTTETEVIWARALPAGTSAQRAELIALTQALKMAEGKKLNVYTDSRYAFATAHIHGEIYRRRGLLTSEGKEIKNKDEILALLKALFLPKRLSIIHCPGHQKGNSAEARGNRMADQAAREVATRETPETSTLLAGKRTADGSEFEKRTADGSEFESPKKKAKVE

SEQ ID NO: 6458 - protein, 2115 aa, synthetic construct
MPAAKRVKLDGGDKKYSIGLDIGTNSVGWAVITDEYKVPSKKFKVLGNTDRHSIKKNLIGALLFDSGETAEATRLKRTARRRYTRRKNRICYLQEIFSNEMAKVDDSFFHRLEESFLVEEDKKHERHPIFGNIVDEVAYHEKYPTIYHLRKKLVDSTDKADLRLIYLALAHMIKFRGHFLIEGDLNPDNSDVDKLFIQLVQTYNQLFEENPINASGVDAKAILSARLSKSRRLENLIAQLPGEKKNGLFGNLIALSLGLTPNFKSNFDLAEDAKLQLSKDTYDDDLDNLLAQIGDQYADLFLAAKNLSDAILLSDILRVNTEITKAPLSASMIKRYDEHHQDLTLLKALVRQQLPEKYKEIFFDQSKNGYAGYIDGGASQEEFYKFIKPILEKMDGTEELLVKLNREDLLRKQRTFDNGSIPHQIHLGELHAILRRQEDFYPFLKDNREKIEKILTFRIPYYVGPLARGNSRFAWMTRKSEETITPWNFEEVVDKGASAQSFIERMTNFDKNLPNEKVLPKHSLLYEYFTVYNELTKVKYVTEGMRKPAFLSGEQKKAIVDLLFKTNRKVTVKQLKEDYFKKIECFDSVEISGVEDRFNASLGTYHDLLKIIKDKDFLDNEENEDILEDIVLTLTLFEDREMIEERLKTYAHLFDDKVMKQLKRRRYTGWGRLSRKLINGIRDKQSGKTILDFLKSDGFANRNFMQLIHDDSLTFKEDIQKAQVSGQGDSLHEHIANLAGSPAIKKGILQTVKVVDELVKVMGRHKPENIVIEMARENQTTQKGQKNSRERMKRIEEGIKELGSQILKEHPVENTQLQNEKLYLYYLQNGRDMYVDQELDINRLSDYDVDHIVPQSFLKDDSIDNKVLTRSDKARGKSDNVPSEEVVKKMKNYWRQLLNAKLITQRKFDNLTKAERGGLSELDKAGFIKRQLVETRQITKHVAQILDSRMNTKYDENDKLIREVKVITLKSKLVSDFRKDFQFYKVREINNYHHAHDAYLNAVVGTALIKKYPKLESEFVYGDYKVYDVRKMIAKSEQEIGKATAKYFFYSNIMNFFKTEITLANGEIRKRPLIETNGETGEIVWDKGRDFATVRKVLSMPQVNIVKKTEVQTGGFSKESILPKRNSDKLIARKKDWDPKKYGGFDSPTVAYSVLVVAKVEKGKSKKLKSVKELLGITIMERSSFEKNPIDFLEAKGYKEVKKDLIIKLPKYSLFELENGRKRMLASAGELQKGNELALPSKYVNFLYLASHYEKLKGSPEDNEQKQLFVEQHKHYLDEIIEQISEFSKRVILADANLDKVLSAYNKHRDKPIREQAENIIHLFTLTNLGAPAAFKYFDTTIDRKRYTSTKEVLDATLIHQSITGLYETRIDLSQLGGDGGEAAAKEAAAKEAAAKEAAAKEAAAKEAAAKGGTLNIEDEHRLHETSKEPDVSLGSTWLSDFPQAWAETGGMGLAVRQAPLIIPLKATSTPVSIKQYPMSQEARLGIKPHIQRLLDQGILVPCQSPWNTPLLPVKKPGTNDYRPVQDLREVNKRVEDIHPTVPNPYNLLSGLPPSHQWYTVLDLKDAFFCLRLHPTSQPLFAFEWRDPEMGISGQLTWTRLPQGFKNSPTLFDEALHRDLADFRIQHPDLILLQYVDDLLLAATSELDCQQGTRALLQTLGNLGYRASAKKAQICQKQVKYLGYLLKEGQRWLTEARKETVMGQPTPKTPRQLREFLGTAGFCRLWIPGFAEMAAPLYPLTKTGTLFNWGPDQQKAYQEIKQALLTAPALGLPDLTKPFELFVDEKQGYAKGVLTQKLGPWRRPVAYLSKKLDPVAAGWPPCLRMVAAIAVLTKDAGKLTMGQPLVILAPHAVEALVKQPPDRWLSNARMTHYQALLLDTDRVQFGPVVALNPATLLPLPEEGLQHNCLDILAEAHGTRPDLTDQPLPDADHTWYTDGSSLLQEGQRKAGAAVTTETEVIWAKALPAGTSAQRAELIALTQALKMAEGKKLNVYTDSRYAFATAHIHGEIYRRRGLLTSEGKEIKNKDEILALLKALFLPKRLSIIHCPGHQKGHSAEARGNRMADQAARKAAITETPDTSTLLAGKRTADGSEFEKRTADGSEFESPKKKAKVE

SEQ ID NO: 6459 - protein, 2115 aa, synthetic construct; identical to SEQ ID NO: 6458

SEQ ID NO: 6460 - protein, 2115 aa, synthetic construct
MPAAKRVKLDGGDKKYSIGLDIGTNSVGWAVITDEYKVPSKKFKVLGNTDRHSIKKNLIGALLFDSGETAEATRLKRTARRRYTRRKNRICYLQEIFSNEMAKVDDSFFHRLEESFLVEEDKKHERHPIFGNIVDEVAYHEKYPTIYHLRKKLVDSTDKADLRLIYLALAHMIKFRGHFLIEGDLNPDNSDVDKLFIQLVQTYNQLFEENPINASGVDAKAILSARLSKSRRLENLIAQLPGEKKNGLFGNLIALSLGLTPNFKSNFDLAEDAKLQLSKDTYDDDLDNLLAQIGDQYADLFLAAKNLSDAILLSDILRVNTEITKAPLSASMIKRYDEHHQDLTLLKALVRQQLPEKYKEIFFDQSKNGYAGYIDGGASQEEFYKFIKPILEKMDGTEELLVKLNREDLLRKQRTFDNGSIPHQIHLGELHAILRRQEDFYPFLKDNREKIEKILTFRIPYYVGPLARGNSRFAWMTRKSEETITPWNFEEVVDKGASAQSFIERMTNFDKNLPNEKVLPKHSLLYEYFTVYNELTKVKYVTEGMRKPAFLSGEQKKAIVDLLFKTNRKVTVKQLKEDYFKKIECFDSVEISGVEDRFNASLGTYHDLLKIIKDKDFLDNEENEDILEDIVLTLTLFEDREMIEERLKTYAHLFDDKVMKQLKRRRYTGWGRLSRKLINGIRDKQSGKTILDFLKSDGFANRNFMQLIHDDSLTFKEDIQKAQVSGQGDSLHEHIANLAGSPAIKKGILQTVKVVDELVKVMGRHKPENIVIEMARENQTTQKGQKNSRERMKRIEEGIKELGSQILKEHPVENTQLQNEKLYLYYLQNGRDMYVDQELDINRLSDYDVDHIVPQSFLKDDSIDNKVLTRSDKARGKSDNVPSEEVVKKMKNYWRQLLNAKLITQRKFDNLTKAERGGLSELDKAGFIKRQLVETRQITKHVAQILDSRMNTKYDENDKLIREVKVITLKSKLVSDFRKDFQFYKVREINNYHHAHDAYLNAVVGTALIKKYPKLESEFVYGDYKVYDVRKMIAKSEQEIGKATAKYFFYSNIMNFFKTEITLANGEIRKRPLIETNGETGEIVWDKGRDFATVRKVLSMPQVNIVKKTEVQTGGFSKESILPKRNSDKLIARKKDWDPKKYGGFDSPTVAYSVLVVAKVEKGKSKKLKSVKELLGITIMERSSFEKNPIDFLEAKGYKEVKKDLIIKLPKYSLFELENGRKRMLASAGELQKGNELALPSKYVNFLYLASHYEKLKGSPEDNEQKQLFVEQHKHYLDEIIEQISEFSKRVILADANLDKVLSAYNKHRDKPIREQAENIIHLFTLTNLGAPAAFKYFDTTIDRKRYTSTKEVLDATLIHQSITGLYETRIDLSQLGGDGGEAAAKEAAAKEAAAKEAAAKEAAAKEAAAKGGTLNIEDEYRLHEISTEPDVSPGSTWLSDFPQAWAETGGMGLAVRQAPLIIPLKATSTPVSIKQYPMSQEAKLGIKPHIQRLLDQGILVPCQSPWNTPLLPVKKPGTNDYRPVQGLREVNKRVEDIHPTVPNPYNLLSGLPTSHRWYTVLDLKDAFFCLRLHPTSQPLFASEWRDPGMGISGQLTWTRLPQGFKNSPTLFDEALHRGLADFRIQHPDLILLQYVDDLLLAATSELDCQQGTRALLKTLGNLGYRASAKKAQICQKQVKYLGYLLREGQRWLTEARKETVMGQPTPKTPRQLREFLGTAGFCRLWIPRFAEMAAPLYPLTKTGTLFNWGPDQQKAYHEIKQALLTAPALGLPDLTKPFELFVDEKQGYAKGVLTQKLGPWRRPVAYLSKKLDPVAAGWPPCLRMVAAIAVLTKDAGKLTMGQPLVILAPHAVEALVKQPPDRWLSNARMTHYQAMLLDTDRVQFGPVVALNPATLLPLPEEGAPHDCLEILAETHGTEPDLTDQPIPDADHTWYTDGSSFLQEGQRKAGAAVTTETEVIWARALPAGTSAQRAELIALTQALKMAEGKRLNVYTDSRYAFATAHIHGEIYKRRGLLTSEGREIKNKSEILALLKALFLPKRLSIIHCLGHQKGDSAEARGNRLADQAAREAAIKTPPDTSTLLAGKRTADGSEFEKRTADGSEFESPKKKAKVE

SEQ ID NO: 6461 - protein, 2115 aa, synthetic construct
MPAAKRVKLDGGDKKYSIGLDIGTNSVGWAVITDEYKVPSKKFKVLGNTDRHSIKKNLIGALLFDSGETAEATRLKRTARRRYTRRKNRICYLQEIFSNEMAKVDDSFFHRLEESFLVEEDKKHERHPIFGNIVDEVAYHEKYPTIYHLRKKLVDSTDKADLRLIYLALAHMIKFRGHFLIEGDLNPDNSDVDKLFIQLVQTYNQLFEENPINASGVDAKAILSARLSKSRRLENLIAQLPGEKKNGLFGNLIALSLGLTPNFKSNFDLAEDAKLQLSKDTYDDDLDNLLAQIGDQYADLFLAAKNLSDAILLSDILRVNTEITKAPLSASMIKRYDEHHQDLTLLKALVRQQLPEKYKEIFFDQSKNGYAGYIDGGASQEEFYKFIKPILEKMDGTEELLVKLNREDLLRKQRTFDNGSIPHQIHLGELHAILRRQEDFYPFLKDNREKIEKILTFRIPYYVGPLARGNSRFAWMTRKSEETITPWNFEEVVDKGASAQSFIERMTNFDKNLPNEKVLPKHSLLYEYFTVYNELTKVKYVTEGMRKPAFLSGEQKKAIVDLLFKTNRKVTVKQLKEDYFKKIECFDSVEISGVEDRFNASLGTYHDLLKIIKDKDFLDNEENEDILEDIVLTLTLFEDREMIEERLKTYAHLFDDKVMKQLKRRRYTGWGRLSRKLINGIRDKQSGKTILDFLKSDGFANRNFMQLIHDDSLTFKEDIQKAQVSGQGDSLHEHIANLAGSPAIKKGILQTVKVVDELVKVMGRHKPENIVIEMARENQTTQKGQKNSRERMKRIEEGIKELGSQILKEHPVENTQLQNEKLYLYYLQNGRDMYVDQELDINRLSDYDVDHIVPQSFLKDDSIDNKVLTRSDKARGKSDNVPSEEVVKKMKNYWRQLLNAKLITQRKFDNLTKAERGGLSELDKAGFIKRQLVETRQITKHVAQILDSRMNTKYDENDKLIREVKVITLKSKLVSDFRKDFQFYKVREINNYHHAHDAYLNAVVGTALIKKYPKLESEFVYGDYKVYDVRKMIAKSEQEIGKATAKYFFYSNIMNFFKTEITLANGEIRKRPLIETNGETGEIVWDKGRDFATVRKVLSMPQVNIVKKTEVQTGGFSKESILPKRNSDKLIARKKDWDPKKYGGFDSPTVAYSVLVVAKVEKGKSKKLKSVKELLGITIMERSSFEKNPIDFLEAKGYKEVKKDLIIKLPKYSLFELENGRKRMLASAGELQKGNELALPSKYVNFLYLASHYEKLKGSPEDNEQKQLFVEQHKHYLDEIIEQISEFSKRVILADANLDKVLSAYNKHRDKPIREQAENIIHLFTLTNLGAPAAFKYFDTTIDRKRYTSTKEVLDATLIHQSITGLYETRIDLSQLGGDGGEAAAKEAAAKEAAAKEAAAKEAAAKEAAAKGGTLNIEDEYRLHEISTEPDVSPGSTWLSDFPQAWAETGGMGLAVRQAPLIIPLKATSTPVSIKQYPMSQEAKLGIKPHIQRLLDQGILVPCQSPWNTPLLPVKKPGTNDYRPVQGLREVNKRVEDIHPTVPNPYNLLSGLPTSHRWYTVLDLKDAFFCLRLHPTSQPLFASEWRDPGMGISGQLTWTRLPQGFKNSPTLFNEALHRGLADFRIQHPDLILLQYVDDLLLAATSELDCQQGTRALLKTLGNLGYRASAKKAQICQKQVKYLGYLLREGQRWLTEARKETVMGQPTPKTPRQLREFLGKAGFCRLFIPRFAEMAAPLYPLTKPGTLFNWGPDQQKAYHEIKQALLTAPALGLPDLTKPFELFVDEKQGYAKGVLTQKLGPWRRPVAYLSKKLDPVAAGWPPCLRMVAAIAVLTKDAGKLTMGQPLVILAPHAVEALVKQPPDRWLSNARMTHYQAMLLDTDRVQFGPVVALNPATLLPLPEEGAPHDCLEILAETHGTEPDLTDQPIPDADHTWYTDGSSFLQEGQRKAGAAVTTETEVIWARALPAGTSAQRAELIALTQALKMAEGKRLNVYTDSRYAFATAHIHGEIYKRRGWLTSEGREIKNKSEILALLKALFLPKRLSIIHCLGHQKGDSAEARGNRLADQAAREAAIKTPPDTSTLLAGKRTADGSEFEKRTADGSEFESPKKKAKVE

SEQ ID NO: 6462 - protein, 2195 aa, synthetic construct
MPAAKRVKLDGGDKKYSIGLDIGTNSVGWAVITDEYKVPSKKFKVLGNTDRHSIKKNLIGALLFDSGETAEATRLKRTARRRYTRRKNRICYLQEIFSNEMAKVDDSFFHRLEESFLVEEDKKHERHPIFGNIVDEVAYHEKYPTIYHLRKKLVDSTDKADLRLIYLALAHMIKFRGHFLIEGDLNPDNSDVDKLFIQLVQTYNQLFEENPINASGVDAKAILSARLSKSRRLENLIAQLPGEKKNGLFGNLIALSLGLTPNFKSNFDLAEDAKLQLSKDTYDDDLDNLLAQIGDQYADLFLAAKNLSDAILLSDILRVNTEITKAPLSASMIKRYDEHHQDLTLLKALVRQQLPEKYKEIFFDQSKNGYAGYIDGGASQEEFYKFIKPILEKMDGTEELLVKLNREDLLRKQRTFDNGSIPHQIHLGELHAILRRQEDFYPFLKDNREKIEKILTFRIPYYVGPLARGNSRFAWMTRKSEETITPWNFEEVVDKGASAQSFIERMTNFDKNLPNEKVLPKHSLLYEYFTVYNELTKVKYVTEGMRKPAFLSGEQKKAIVDLLFKTNRKVTVKQLKEDYFKKIECFDSVEISGVEDRFNASLGTYHDLLKIIKDKDFLDNEENEDILEDIVLTLTLFEDREMIEERLKTYAHLFDDKVMKQLKRRRYTGWGRLSRKLINGIRDKQSGKTILDFLKSDGFANRNFMQLIHDDSLTFKEDIQKAQVSGQGDSLHEHIANLAGSPAIKKGILQTVKVVDELVKVMGRHKPENIVIEMARENQTTQKGQKNSRERMKRIEEGIKELGSQILKEHPVENTQLQNEKLYLYYLQNGRDMYVDQELDINRLSDYDVDHIVPQSFLKDDSIDNKVLTRSDKARGKSDNVPSEEVVKKMKNYWRQLLNAKLITQRKFDNLTKAERGGLSELDKAGFIKRQLVETRQITKHVAQILDSRMNTKYDENDKLIREVKVITLKSKLVSDFRKDFQFYKVREINNYHHAHDAYLNAVVGTALIKKYPKLESEFVYGDYKVYDVRKMIAKSEQEIGKATAKYFFYSNIMNFFKTEITLANGEIRKRPLIETNGETGEIVWDKGRDFATVRKVLSMPQVNIVKKTEVQTGGFSKESILPKRNSDKLIARKKDWDPKKYGGFDSPTVAYSVLVVAKVEKGKSKKLKSVKELLGITIMERSSFEKNPIDFLEAKGYKEVKKDLIIKLPKYSLFELENGRKRMLASAGELQKGNELALPSKYVNFLYLASHYEKLKGSPEDNEQKQLFVEQHKHYLDEIIEQISEFSKRVILADANLDKVLSAYNKHRDKPIREQAENIIHLFTLTNLGAPAAFKYFDTTIDRKRYTSTKEVLDATLIHQSITGLYETRIDLSQLGGDGGEAAAKEAAAKEAAAKEAAAKEAAAKEAAAKGGMDPLQLLQPLEAEIKGTKLKAHWNSGATITCVPEAFLEDERPIQTMLIKTIHGEKQQDVYYLTFKVQGRKVEAEVLASPYDYILLNPSDVPWLMKKPLQLTVLVPLHEYQERLLQQTALPKEQKELLQKLFLKYDALWQHWENQVGHRRIKPHNIATGTLAPRPQKQYPINPKAKPSIQIVIDDLLKQGVLIQQNSTMNTPVYPVPKPDGKWRMVLDYREVNKTIPLIAAQNQHSAGILSSIYRGKYKTTLDLTNGFWAHPITPESYWLTAFTWQGKQYCWTRLPQGFLNSPALFTADVVDLLKEIPNVQAYVDDIYISHDDPQEHLEQLEKIFSILLNAGYVVSLKKSEIAQREVEFLGFNITKEGRGLTDTFKQKLLNITPPKDLKQLQSILGLLNFARNFIPNYSELVKPLYTIVANANGKFISWTEDNSNQLQHIISVLNQADNLEERNPETRLIIKVNSSPSAGYIRYYNEGSKRPIMYVNYIFSKAEAKFTQTEKLLTTMHKGLIKAMDLAMGQEILVYSPIVSMTKIQRTPLPERKALPVRWITWMTYLEDPRIQFHYDKSLPELQQIPNVTEDVIAKTKHPSEFAMVFYTDGSAIKHPDVNKSHSAGMGIAQVQFIPEYKIVHQWSIPLGDHTAQLAEIAAVEFACKKALKISGPVLIVTDSFYVAESANKELPYWKSNGFLNNKKKPLRHVSKWKSIAECLQLKPDIIIMHEKGHQQPMTTLHTEGNNLADKLATQGSYVVHAGKRTADGSEFEKRTADGSEFESPKKKAKVE

SEQ ID NO: 6463 - protein, 2106 aa, synthetic construct
MPAAKRVKLDGGDKKYSIGLDIGTNSVGWAVITDEYKVPSKKFKVLGNTDRHSIKKNLIGALLFDSGETAEATRLKRTARRRYTRRKNRICYLQEIFSNEMAKVDDSFFHRLEESFLVEEDKKHERHPIFGNIVDEVAYHEKYPTIYHLRKKLVDSTDKADLRLIYLALAHMIKFRGHFLIEGDLNPDNSDVDKLFIQLVQTYNQLFEENPINASGVDAKAILSARLSKSRRLENLIAQLPGEKKNGLFGNLIALSLGLTPNFKSNFDLAEDAKLQLSKDTYDDDLDNLLAQIGDQYADLFLAAKNLSDAILLSDILRVNTEITKAPLSASMIKRYDEHHQDLTLLKALVRQQLPEKYKEIFFDQSKNGYAGYIDGGASQEEFYKFIKPILEKMDGTEELLVKLNREDLLRKQRTFDNGSIPHQIHLGELHAILRRQEDFYPFLKDNREKIEKILTFRIPYYVGPLARGNSRFAWMTRKSEETITPWNFEEVVDKGASAQSFIERMTNFDKNLPNEKVLPKHSLLYEYFTVYNELTKVKYVTEGMRKPAFLSGEQKKAIVDLLFKTNRKVTVKQLKEDYFKKIECFDSVEISGVEDRFNASLGTYHDLLKIIKDKDFLDNEENEDILEDIVLTLTLFEDREMIEERLKTYAHLFDDKVMKQLKRRRYTGWGRLSRKLINGIRDKQSGKTILDFLKSDGFANRNFMQLIHDDSLTFKEDIQKAQVSGQGDSLHEHIANLAGSPAIKKGILQTVKVVDELVKVMGRHKPENIVIEMARENQTTQKGQKNSRERMKRIEEGIKELGSQILKEHPVENTQLQNEKLYLYYLQNGRDMYVDQELDINRLSDYDVDHIVPQSFLKDDSIDNKVLTRSDKARGKSDNVPSEEVVKKMKNYWRQLLNAKLITQRKFDNLTKAERGGLSELDKAGFIKRQLVETRQITKHVAQILDSRMNTKYDENDKLIREVKVITLKSKLVSDFRKDFQFYKVREINNYHHAHDAYLNAVVGTALIKKYPKLESEFVYGDYKVYDVRKMIAKSEQEIGKATAKYFFYSNIMNFFKTEITLANGEIRKRPLIETNGETGEIVWDKGRDFATVRKVLSMPQVNIVKKTEVQTGGFSKESILPKRNSDKLIARKKDWDPKKYGGFDSPTVAYSVLVVAKVEKGKSKKLKSVKELLGITIMERSSFEKNPIDFLEAKGYKEVKKDLIIKLPKYSLFELENGRKRMLASAGELQKGNELALPSKYVNFLYLASHYEKLKGSPEDNEQKQLFVEQHKHYLDEIIEQISEFSKRVILADANLDKVLSAYNKHRDKPIREQAENIIHLFTLTNLGAPAAFKYFDTTIDRKRYTSTKEVLDATLIHQSITGLYETRIDLSQLGGDGGEAAAKEAAAKEAAAKEAAAKEAAAKEAAAKGGVPWLMKKPLQLTVLVPLHEYQERLLQQTALPKEQKELLQKLFLKYDALWQHWENQVGHRRIKPHNIATGTLAPRPQKQYPINPKAKPSIQIVIDDLLKQGVLIQQNSTMNTPVYPVPKPDGKWRMVLDYREVNKTIPLIAAQNQHSAGILSSIYRGKYKTTLDLTNGFWAHPITPESYWLTAFTWQGKQYCWTRLPQGFLNSPALFTADVVDLLKEIPNVQAYVDDIYISHDDPQEHLEQLEKIFSILLNAGYVVSLKKSEIAQREVEFLGFNITKEGRGLTDTFKQKLLNITPPKDLKQLQSILGLLNFARNFIPNYSELVKPLYTIVANANGKFISWTEDNSNQLQHIISVLNQADNLEERNPETRLIIKVNSSPSAGYIRYYNEGSKRPIMYVNYIFSKAEAKFTQTEKLLTTMHKGLIKAMDLAMGQEILVYSPIVSMTKIQRTPLPERKALPVRWITWMTYLEDPRIQFHYDKSLPELQQIPNVTEDVIAKTKHPSEFAMVFYTDGSAIKHPDVNKSHSAGMGIAQVQFIPEYKIVHQWSIPLGDHTAQLAEIAAVEFACKKALKISGPVLIVTDSFYVAESANKELPYWKSNGFLNNKKKPLRHVSKWKSIAECLQLKPDIIIMHEKGHQQPMTTLHTEGNNLADKLATQGSYVVHAGKRTADGSEFEKRTADGSEFESPKKKAKVE

SEQ ID NO: 6464 - protein, 2106 aa, synthetic construct
MPAAKRVKLDGGDKKYSIGLDIGTNSVGWAVITDEYKVPSKKFKVLGNTDRHSIKKNLIGALLFDSGETAEATRLKRTARRRYTRRKNRICYLQEIFSNEMAKVDDSFFHRLEESFLVEEDKKHERHPIFGNIVDEVAYHEKYPTIYHLRKKLVDSTDKADLRLIYLALAHMIKFRGHFLIEGDLNPDNSDVDKLFIQLVQTYNQLFEENPINASGVDAKAILSARLSKSRRLENLIAQLPGEKKNGLFGNLIALSLGLTPNFKSNFDLAEDAKLQLSKDTYDDDLDNLLAQIGDQYADLFLAAKNLSDAILLSDILRVNTEITKAPLSASMIKRYDEHHQDLTLLKALVRQQLPEKYKEIFFDQSKNGYAGYIDGGASQEEFYKFIKPILEKMDGTEELLVKLNREDLLRKQRTFDNGSIPHQIHLGELHAILRRQEDFYPFLKDNREKIEKILTFRIPYYVGPLARGNSRFAWMTRKSEETITPWNFEEVVDKGASAQSFIERMTNFDKNLPNEKVLPKHSLLYEYFTVYNELTKVKYVTEGMRKPAFLSGEQKKAIVDLLFKTNRKVTVKQLKEDYFKKIECFDSVEISGVEDRFNASLGTYHDLLKIIKDKDFLDNEENEDILEDIVLTLTLFEDREMIEERLKTYAHLFDDKVMKQLKRRRYTGWGRLSRKLINGIRDKQSGKTILDFLKSDGFANRNFMQLIHDDSLTFKEDIQKAQVSGQGDSLHEHIANLAGSPAIKKGILQTVKVVDELVKVMGRHKPENIVIEMARENQTTQKGQKNSRERMKRIEEGIKELGSQILKEHPVENTQLQNEKLYLYYLQNGRDMYVDQELDINRLSDYDVDHIVPQSFLKDDSIDNKVLTRSDKARGKSDNVPSEEVVKKMKNYWRQLLNAKLITQRKFDNLTKAERGGLSELDKAGFIKRQLVETRQITKHVAQILDSRMNTKYDENDKLIREVKVITLKSKLVSDFRKDFQFYKVREINNYHHAHDAYLNAVVGTALIKKYPKLESEFVYGDYKVYDVRKMIAKSEQEIGKATAKYFFYSNIMNFFKTEITLANGEIRKRPLIETNGETGEIVWDKGRDFATVRKVLSMPQVNIVKKTEVQTGGFSKESILPKRNSDKLIARKKDWDPKKYGGFDSPTVAYSVLVVAKVEKGKSKKLKSVKELLGITIMERSSFEKNPIDFLEAKGYKEVKKDLIIKLPKYSLFELENGRKRMLASAGELQKGNELALPSKYVNFLYLASHYEKLKGSPEDNEQKQLFVEQHKHYLDEIIEQISEFSKRVILADANLDKVLSAYNKHRDKPIREQAENIIHLFTLTNLGAPAAFKYFDTTIDRKRYTSTKEVLDATLIHQSITGLYETRIDLSQLGGDGGEAAAKEAAAKEAAAKEAAAKEAAAKEAAAKGGVPWLMKKPLQLTVLVPLHEYQERLLQQTALPKEQKELLQKLFLKYDALWQHWENQVGHRRIKPHNIATGTLAPRPQKQYPINPKAKPSIQIVIDDLLKQGVLIQQNSTMNTPVYPVPKPDGKWRMVLDYREVNKTIPLIAAQNQHSAGILSSIYRGKYKTTLDLTNGFWAHPITPESYWLTAFTWQGKQYCWTRLPQGFLNSPALFNADVVDLLKEIPNVQAYVDDIYISHDDPQEHLEQLEKIFSILLNAGYVVSLKKSEIAQREVEFLGFNITKEGRGLTDTFKQKLLNITPPKDLKQLQSILGKLNFARNFIPNYSELVKPLYTIVAPANGKFISWTEDNSNQLQHIISVLNQADNLEERNPETRLIIKVNSSPSAGYIRYYNEGSKRPIMYVNYIFSKAEAKFTQTEKLLTTMHKGLIKAMDLAMGQEILVYSPIVSMTKIQRTPLPERKALPVRWITWMTYLEDPRIQFHYDKSLPELQQIPNVTEDVIAKTKHPSEFAMVFYTDGSAIKHPDVNKSHSAGMGIAQVQFIPEYKIVHQWSIPLGDHTAQLAEIAAVEFACKKALKISGPVLIVTDSFYVAESANKELPYWKSNGFLNNKKKPLRHVSKWKSIAECLQLKPDIIIMHEKGHQQPMTTLHTEGNNLADKLATQGSYVVHAGKRTADGSEFEKRTADGSEFESPKKKAKVE

SEQ ID NO: 6465 - protein, 2195 aa, synthetic construct
MPAAKRVKLDGGDKKYSIGLDIGTNSVGWAVITDEYKVPSKKFKVLGNTDRHSIKKNLIGALLFDSGETAEATRLKRTARRRYTRRKNRICYLQEIFSNEMAKVDDSFFHRLEESFLVEEDKKHERHPIFGNIVDEVAYHEKYPTIYHLRKKLVDSTDKADLRLIYLALAHMIKFRGHFLIEGDLNPDNSDVDKLFIQLVQTYNQLFEENPINASGVDAKAILSARLSKSRRLENLIAQLPGEKKNGLFGNLIALSLGLTPNFKSNFDLAEDAKLQLSKDTYDDDLDNLLAQIGDQYADLFLAAKNLSDAILLSDILRVNTEITKAPLSASMIKRYDEHHQDLTLLKALVRQQLPEKYKEIFFDQSKNGYAGYIDGGASQEEFYKFIKPILEKMDGTEELLVKLNREDLLRKQRTFDNGSIPHQIHLGELHAILRRQEDFYPFLKDNREKIEKILTFRIPYYVGPLARGNSRFAWMTRKSEETITPWNFEEVVDKGASAQSFIERMTNFDKNLPNEKVLPKHSLLYEYFTVYNELTKVKYVTEGMRKPAFLSGEQKKAIVDLLFKTNRKVTVKQLKEDYFKKIECFDSVEISGVEDRFNASLGTYHDLLKIIKDKDFLDNEENEDILEDIVLTLTLFEDREMIEERLKTYAHLFDDKVMKQLKRRRYTGWGRLSRKLINGIRDKQSGKTILDFLKSDGFANRNFMQLIHDDSLTFKEDIQKAQVSGQGDSLHEHIANLAGSPAIKKGILQTVKVVDELVKVMGRHKPENIVIEMARENQTTQKGQKNSRERMKRIEEGIKELGSQILKEHPVENTQLQNEKLYLYYLQNGRDMYVDQELDINRLSDYDVDHIVPQSFLKDDSIDNKVLTRSDKARGKSDNVPSEEVVKKMKNYWRQLLNAKLITQRKFDNLTKAERGGLSELDKAGFIKRQLVETRQITKHVAQILDSRMNTKYDENDKLIREVKVITLKSKLVSDFRKDFQFYKVREINNYHHAHDAYLNAVVGTALIKKYPKLESEFVYGDYKVYDVRKMIAKSEQEIGKATAKYFFYSNIMNFFKTEITLANGEIRKRPLIETNGETGEIVWDKGRDFATVRKVLSMPQVNIVKKTEVQTGGFSKESILPKRNSDKLIARKKDWDPKKYGGFDSPTVAYSVLVVAKVEKGKSKKLKSVKELLGITIMERSSFEKNPIDFLEAKGYKEVKKDLIIKLPKYSLFELENGRKRMLASAGELQKGNELALPSKYVNFLYLASHYEKLKGSPEDNEQKQLFVEQHKHYLDEIIEQISEFSKRVILADANLDKVLSAYNKHRDKPIREQAENIIHLFTLTNLGAPAAFKYFDTTIDRKRYTSTKEVLDATLIHQSITGLYETRIDLSQLGGDGGEAAAKEAAAKEAAAKEAAAKEAAAKEAAAKGGMDPLQLLQPLEAEIKGTKLKAHWNSGATITCVPQAFLEEEVPIKNIWIKTIHGEKEQPVYYLTFKIQGRKVEAEVISSPYDYILVSPSDIPWLMKKPLQLTTLVPLQEYEERLLKQTMLTGSYKEKLQSLFLKYDALWQHWENQVGHRRIKPHHIATGTVNPRPQKQYPINPKAKASIQTVINDLLKQGVLIQQNSIMNTPVYPVPKPDGKWRMVLDYREVNKTIPLIAAQNQHSAGILSSIFRGKYKTTLDLSNGFWAHSITPESYWLTAFTWLGQQYCWTRLPQGFLNSPALFTADVVDLLKEVPNVQVYVDDIYISHDDPREHLEQLEKVFSLLLNAGYVVSLKKSEIAQHEVEFLGFNITKEGRGLTETFKQKLLNITPPRDLKQLQSILGLLNFARNFIPNFSELVKPLYNIIATANGKYITWTTDNSQQLQNIISMLNSAENLEERNPEVRLIMKVNTSPSAGYIRFYNEFAKRPIMYLNYVYTKAEVKFTNTEKLLTTIHKGLIKALDLGMGQEILVYSPIVSMTKIQKTPLPERKALPIRWITWMSYLEDPRIQFHYDKTLPELQQVPTVTDDIIAKIKHPSEFSMVFYTDGSAIKHPNVNKSHNAGMGIAQVQFKPEFTVINTWSIPLGDHTAQLAEVAAVEFACKKALKIDGPVLIVTDSFYVAESVNKELPYWQSNGFFNNKKKPLKHVSKWKSIADCIQLKPDIIIIHEKGHQPTASTFHTEGNNLADKLATQGSYVVNAGKRTADGSEFEKRTADGSEFESPKKKAKVE

SEQ ID NO: 6466 - protein, 2106 aa, synthetic construct
MPAAKRVKLDGGDKKYSIGLDIGTNSVGWAVITDEYKVPSKKFKVLGNTDRHSIKKNLIGALLFDSGETAEATRLKRTARRRYTRRKNRICYLQEIFSNEMAKVDDSFFHRLEESFLVEEDKKHERHPIFGNIVDEVAYHEKYPTIYHLRKKLVDSTDKADLRLIYLALAHMIKFRGHFLIEGDLNPDNSDVDKLFIQLVQTYNQLFEENPINASGVDAKAILSARLSKSRRLENLIAQLPGEKKNGLFGNLIALSLGLTPNFKSNFDLAEDAKLQLSKDTYDDDLDNLLAQIGDQYADLFLAAKNLSDAILLSDILRVNTEITKAPLSASMIKRYDEHHQDLTLLKALVRQQLPEKYKEIFFDQSKNGYAGYIDGGASQEEFYKFIKPILEKMDGTEELLVKLNREDLLRKQRTFDNGSIPHQIHLGELHAILRRQEDFYPFLKDNREKIEKILTFRIPYYVGPLARGNSRFAWMTRKSEETITPWNFEEVVDKGASAQSFIERMTNFDKNLPNEKVLPKHSLLYEYFTVYNELTKVKYVTEGMRKPAFLSGEQKKAIVDLLFKTNRKVTVKQLKEDYFKKIECFDSVEISGVEDRFNASLGTYHDLLKIIKDKDFLDNEENEDILEDIVLTLTLFEDREMIEERLKTYAHLFDDKVMKQLKRRRYTGWGRLSRKLINGIRDKQSGKTILDFLKSDGFANRNFMQLIHDDSLTFKEDIQKAQVSGQGDSLHEHIANLAGSPAIKKGILQTVKVVDELVKVMGRHKPENIVIEMARENQTTQKGQKNSRERMKRIEEGIKELGSQILKEHPVENTQLQNEKLYLYYLQNGRDMYVDQELDINRLSDYDVDHIVPQSFLKDDSIDNKVLTRSDKARGKSDNVPSEEVVKKMKNYWRQLLNAKLITQRKFDNLTKAERGGLSELDKAGFIKRQLVETRQITKHVAQILDSRMNTKYDENDKLIREVKVITLKSKLVSDFRKDFQFYKVREINNYHHAHDAYLNAVVGTALIKKYPKLESEFVYGDYKVYDVRKMIAKSEQEIGKATAKYFFYSNIMNFFKTEITLANGEIRKRPLIETNGETGEIVWDKGRDFATVRKVLSMPQVNIVKKTEVQTGGFSKESILPKRNSDKLIARKKDWDPKKYGGFDSPTVAYSVLVVAKVEKGKSKKLKSVKELLGITIMERSSFEKNPIDFLEAKGYKEVKKDLIIKLPKYSLFELENGRKRMLASAGELQKGNELALPSKYVNFLYLASHYEKLKGSPEDNEQKQLFVEQHKHYLDEIIEQISEFSKRVILADANLDKVLSAYNKHRDKPIREQAENIIHLFTLTNLGAPAAFKYFDTTIDRKRYTSTKEVLDATLIHQSITGLYETRIDLSQLGGDGGEAAAKEAAAKEAAAKEAAAKEAAAKEAAAKGGIPWLMKKPLQLTTLVPLQEYEERLLKQTMLTGSYKEKLQSLFLKYDALWQHWENQVGHRRIKPHHIATGTVNPRPQKQYPINPKAKASIQTVINDLLKQGVLIQQNSIMNTPVYPVPKPDGKWRMVLDYREVNKTIPLIAAQNQHSAGILSSIFRGKYKTTLDLSNGFWAHSITPESYWLTAFTWLGQQYCWTRLPQGFLNSPALFNADVVDLLKEVPNVQVYVDDIYISHDDPREHLEQLEKVFSLLLNAGYVVSLKKSEIAQHEVEFLGFNITKEGRGLTETFKQKLLNITPPRDLKQLQSILGLLNFARNFIPNFSELVKPLYNIIATAPGKYITWTTDNSQQLQNIISMLNSAENLEERNPEVRLIMKVNTSPSAGYIRFYNEFAKRPIMYLNYVYTKAEVKFTNTEKLLTTIHKGLIKALDLGMGQEILVYSPIVSMTKIQKTPLPERKALPIRWITWMSYLEDPRIQFHYDKTLPELQQVPTVTDDIIAKIKHPSEFSMVFYTDGSAIKHPNVNKSHNAGMGIAQVQFKPEFTVINTWSIPLGDHTAQLAEVAAVEFACKKALKIDGPVLIVTDSFYVAESVNKELPYWQSNGFFNNKKKPLKHVSKWKSIADCIQLKPDIIIIHEKGHQPTASTFHTEGNNLADKLATQGSYVVNAGKRTADGSEFEKRTADGSEFESPKKKAKVE

SEQ ID NO: 6467 - protein, 2113 aa, synthetic construct
MPAAKRVKLDGGDKKYSIGLDIGTNSVGWAVITDEYKVPSKKFKVLGNTDRHSIKKNLIGALLFDSGETAEATRLKRTARRRYTRRKNRICYLQEIFSNEMAKVDDSFFHRLEESFLVEEDKKHERHPIFGNIVDEVAYHEKYPTIYHLRKKLVDSTDKADLRLIYLALAHMIKFRGHFLIEGDLNPDNSDVDKLFIQLVQTYNQLFEENPINASGVDAKAILSARLSKSRRLENLIAQLPGEKKNGLFGNLIALSLGLTPNFKSNFDLAEDAKLQLSKDTYDDDLDNLLAQIGDQYADLFLAAKNLSDAILLSDILRVNTEITKAPLSASMIKRYDEHHQDLTLLKALVRQQLPEKYKEIFFDQSKNGYAGYIDGGASQEEFYKFIKPILEKMDGTEELLVKLNREDLLRKQRTFDNGSIPHQIHLGELHAILRRQEDFYPFLKDNREKIEKILTFRIPYYVGPLARGNSRFAWMTRKSEETITPWNFEEVVDKGASAQSFIERMTNFDKNLPNEKVLPKHSLLYEYFTVYNELTKVKYVTEGMRKPAFLSGEQKKAIVDLLFKTNRKVTVKQLKEDYFKKIECFDSVEISGVEDRFNASLGTYHDLLKIIKDKDFLDNEENEDILEDIVLTLTLFEDREMIEERLKTYAHLFDDKVMKQLKRRRYTGWGRLSRKLINGIRDKQSGKTILDFLKSDGFANRNFMQLIHDDSLTFKEDIQKAQVSGQGDSLHEHIANLAGSPAIKKGILQTVKVVDELVKVMGRHKPENIVIEMARENQTTQKGQKNSRERMKRIEEGIKELGSQILKEHPVENTQLQNEKLYLYYLQNGRDMYVDQELDINRLSDYDVDHIVPQSFLKDDSIDNKVLTRSDKARGKSDNVPSEEVVKKMKNYWRQLLNAKLITQRKFDNLTKAERGGLSELDKAGFIKRQLVETRQITKHVAQILDSRMNTKYDENDKLIREVKVITLKSKLVSDFRKDFQFYKVREINNYHHAHDAYLNAVVGTALIKKYPKLESEFVYGDYKVYDVRKMIAKSEQEIGKATAKYFFYSNIMNFFKTEITLANGEIRKRPLIETNGETGEIVWDKGRDFATVRKVLSMPQVNIVKKTEVQTGGFSKESILPKRNSDKLIARKKDWDPKKYGGFDSPTVAYSVLVVAKVEKGKSKKLKSVKELLGITIMERSSFEKNPIDFLEAKGYKEVKKDLIIKLPKYSLFELENGRKRMLASAGELQKGNELALPSKYVNFLYLASHYEKLKGSPEDNEQKQLFVEQHKHYLDEIIEQISEFSKRVILADANLDKVLSAYNKHRDKPIREQAENIIHLFTLTNLGAPAAFKYFDTTIDRKRYTSTKEVLDATLIHQSITGLYETRIDLSQLGGDGGEAAAKEAAAKEAAAKEAAAKEAAAKEAAAKGGVLNLEEEYRLHEKPVPSSIDPSWLQLFPTVWAERAGMGLANQVPPVVVELRSGASPVAVRQYPMSKEAREGIRPHIQRFLDLGVLVPCQSPWNTPLLPVKKPGTNDYRPVQDLREINKRVQDIHPTVPNPYNLLSSLPPSHTWYSVLDLKDAFFCLKLHPNSQPLFAFEWRDPEKGNTGQLTWTRLPQGFKNSPTLFDEALHRDLAPFRALNPQVVLLQYVDDLLVAAPTYRDCKEGTQKLLQELSKLGYRVSAKKAQLCQKEVTYLGYLLKEGKRWLTPARKATVMKIPPPTTPRQVREFLGTAGFCRLWIPGFASLAAPLYPLTKESIPFIWTEEHQKAFDRIKEALLSAPALALPDLTKPFTLYVDERAGVARGVLTQTLGPWRRPVAYLSKKLDPVASGWPTCLKAVAAVALLLKDADKLTLGQNVTVIASHSLESIVRQPPDRWMTNARMTHYQSLLLNERVSFAPPAVLNPATLLPVESEATPVHRCSEILAEETGTRRDLKDQPLPGVPAWYTDGSSFIAEGKRRAGAAIVDGKRTVWASSLPEGTSAQKAELVALTQALRLAEGKDINIYTDSRYAFATAHIHGAIYKQRGLLTSAGKDIKNKEEILALLEAIHLPKRVAIIHCPGHQKGNDPVATGNRRADEAAKQAALSTRVLAETTKPAGKRTADGSEFEKRTADGSEFESPKKKAKVE

SEQ ID NO: 6468 - protein, 2113 aa, synthetic construct
MPAAKRVKLDGGDKKYSIGLDIGTNSVGWAVITDEYKVPSKKFKVLGNTDRHSIKKNLIGALLFDSGETAEATRLKRTARRRYTRRKNRICYLQEIFSNEMAKVDDSFFHRLEESFLVEEDKKHERHPIFGNIVDEVAYHEKYPTIYHLRKKLVDSTDKADLRLIYLALAHMIKFRGHFLIEGDLNPDNSDVDKLFIQLVQTYNQLFEENPINASGVDAKAILSARLSKSRRLENLIAQLPGEKKNGLFGNLIALSLGLTPNFKSNFDLAEDAKLQLSKDTYDDDLDNLLAQIGDQYADLFLAAKNLSDAILLSDILRVNTEITKAPLSASMIKRYDEHHQDLTLLKALVRQQLPEKYKEIFFDQSKNGYAGYIDGGASQEEFYKFIKPILEKMDGTEELLVKLNREDLLRKQRTFDNGSIPHQIHLGELHAILRRQEDFYPFLKDNREKIEKILTFRIPYYVGPLARGNSRFAWMTRKSEETITPWNFEEVVDKGASAQSFIERMTNFDKNLPNEKVLPKHSLLYEYFTVYNELTKVKYVTEGMRKPAFLSGEQKKAIVDLLFKTNRKVTVKQLKEDYFKKIECFDSVEISGVEDRFNASLGTYHDLLKIIKDKDFLDNEENEDILEDIVLTLTLFEDREMIEERLKTYAHLFDDKVMKQLKRRRYTGWGRLSRKLINGIRDKQSGKTILDFLKSDGFANRNFMQLIHDDSLTFKEDIQKAQVSGQGDSLHEHIANLAGSPAIKKGILQTVKVVDELVKVMGRHKPENIVIEMARENQTTQKGQKNSRERMKRIEEGIKELGSQILKEHPVENTQLQNEKLYLYYLQNGRDMYVDQELDINRLSDYDVDHIVPQSFLKDDSIDNKVLTRSDKARGKSDNVPSEEVVKKMKNYWRQLLNAKLITQRKFDNLTKAERGGLSELDKAGFIKRQLVETRQITKHVAQILDSRMNTKYDENDKLIREVKVITLKSKLVSDFRKDFQFYKVREINNYHHAHDAYLNAVVGTALIKKYPKLESEFVYGDYKVYDVRKMIAKSEQEIGKATAKYFFYSNIMNFFKTEITLANGEIRKRPLIETNGETGEIVWDKGRDFATVRKVLSMPQVNIVKKTEVQTGGFSKESILPKRNSDKLIARKKDWDPKKYGGFDSPTVAYSVLVVAKVEKGKSKKLKSVKELLGITIMERSSFEKNPIDFLEAKGYKEVKKDLIIKLPKYSLFELENGRKRMLASAGELQKGNELALPSKYVNFLYLASHYEKLKGSPEDNEQKQLFVEQHKHYLDEIIEQISEFSKRVILADANLDKVLSAYNKHRDKPIREQAENIIHLFTLTNLGAPAAFKYFDTTIDRKRYTSTKEVLDATLIHQSITGLYETRIDLSQLGGDGGEAAAKEAAAKEAAAKEAAAKEAAAKEAAAKGGVLNLEEEYRLHEKPVPSSIDPSWLQLFPTVWAERAGMGLANQVPPVVVELRSGASPVAVRQYPMSKEAREGIRPHIQRFLDLGVLVPCQSPWNTPLLPVKKPGTNDYRPVQDLREINKRVQDIHPTVPNPYNLLSSLPPSHTWYSVLDLKDAFFCLKLHPNSQPLFAFEWRDPEKGNTGQLTWTRLPQGFKNSPTLFNEALHRDLAPFRALNPQVVLLQYVDDLLVAAPTYRDCKEGTQKLLQELSKLGYRVSAKKAQLCQKEVTYLGYLLKEGKRWLTPARKATVMKIPPPTTPRQVREFLGTAGFCRLWIPGFASLAAPLYPLTKPSIPFIWTEEHQKAFDRIKEALLSAPALALPDLTKPFTLYVDERAGVARGVLTQTLGPWRRPVAYLSKKLDPVASGWPTCLKAVAAVALLLKDADKLTLGQNVTVIASHSLESIVRQPPDRWMTNARMTHYQSLLLNERVSFAPPAVLNPATLLPVESEATPVHRCSEILAEETGTRRDLKDQPLPGVPAWYTDGSSFIAEGKRRAGAAIVDGKRTVWASSLPEGTSAQKAELVALTQALRLAEGKDINIYTDSRYAFATAHIHGAIYKQRGWLTSAGKDIKNKEEILALLEAIHLPKRVAIIHCPGHQKGNDPVATGNRRADEAAKQAALSTRVLAETTKPAGKRTADGSEFEKRTADGSEFESPKKKAKVE

SEQ ID NO: 6469 - protein, 2115 aa, synthetic construct
MPAAKRVKLDGGDKKYSIGLDIGTNSVGWAVITDEYKVPSKKFKVLGNTDRHSIKKNLIGALLFDSGETAEATRLKRTARRRYTRRKNRICYLQEIFSNEMAKVDDSFFHRLEESFLVEEDKKHERHPIFGNIVDEVAYHEKYPTIYHLRKKLVDSTDKADLRLIYLALAHMIKFRGHFLIEGDLNPDNSDVDKLFIQLVQTYNQLFEENPINASGVDAKAILSARLSKSRRLENLIAQLPGEKKNGLFGNLIALSLGLTPNFKSNFDLAEDAKLQLSKDTYDDDLDNLLAQIGDQYADLFLAAKNLSDAILLSDILRVNTEITKAPLSASMIKRYDEHHQDLTLLKALVRQQLPEKYKEIFFDQSKNGYAGYIDGGASQEEFYKFIKPILEKMDGTEELLVKLNREDLLRKQRTFDNGSIPHQIHLGELHAILRRQEDFYPFLKDNREKIEKILTFRIPYYVGPLARGNSRFAWMTRKSEETITPWNFEEVVDKGASAQSFIERMTNFDKNLPNEKVLPKHSLLYEYFTVYNELTKVKYVTEGMRKPAFLSGEQKKAIVDLLFKTNRKVTVKQLKEDYFKKIECFDSVEISGVEDRFNASLGTYHDLLKIIKDKDFLDNEENEDILEDIVLTLTLFEDREMIEERLKTYAHLFDDKVMKQLKRRRYTGWGRLSRKLINGIRDKQSGKTILDFLKSDGFANRNFMQLIHDDSLTFKEDIQKAQVSGQGDSLHEHIANLAGSPAIKKGILQTVKVVDELVKVMGRHKPENIVIEMARENQTTQKGQKNSRERMKRIEEGIKELGSQILKEHPVENTQLQNEKLYLYYLQNGRDMYVDQELDINRLSDYDVDHIVPQSFLKDDSIDNKVLTRSDKARGKSDNVPSEEVVKKMKNYWRQLLNAKLITQRKFDNLTKAERGGLSELDKAGFIKRQLVETRQITKHVAQILDSRMNTKYDENDKLIREVKVITLKSKLVSDFRKDFQFYKVREINNYHHAHDAYLNAVVGTALIKKYPKLESEFVYGDYKVYDVRKMIAKSEQEIGKATAKYFFYSNIMNFFKTEITLANGEIRKRPLIETNGETGEIVWDKGRDFATVRKVLSMPQVNIVKKTEVQTGGFSKESILPKRNSDKLIARKKDWDPKKYGGFDSPTVAYSVLVVAKVEKGKSKKLKSVKELLGITIMERSSFEKNPIDFLEAKGYKEVKKDLIIKLPKYSLFELENGRKRMLASAGELQKGNELALPSKYVNFLYLASHYEKLKGSPEDNEQKQLFVEQHKHYLDEIIEQISEFSKRVILADANLDKVLSAYNKHRDKPIREQAENIIHLFTLTNLGAPAAFKYFDTTIDRKRYTSTKEVLDATLIHQSITGLYETRIDLSQLGGDGGEAAAKEAAAKEAAAKEAAAKEAAAKEAAAKGGTLNIEDEYRLHETSKEPDVPLGSTWLSDFPQAWAETGGMGLAVRQAPLIIPLKATSTPVSIKQYPMSQEARLGIKPHIQRLLDQGILVPCQSPWNTPLLPVKKPGTNDYRPVQDLREVNKRVEDIHPTVPNPYNLLSGLPPSHQWYTVLDLKDAFFCLRLHPTSQPLFAFEWRDPEMGISGQLTWTRLPQGFKNSPTLFDEALHRDLADFRIQHPDLILLQYVDDLLLAATSEQDCQRGTRALLQTLGNLGYRASAKKAQICQKQVKYLGYLLKEGQRWLTEARKETVMGQPTPKTPRQLREFLGTAGFCRLWIPGFAEMAAPLYPLTKTGTLFNWGPDQQKAYQEIKQALLTAPALGLPDLTKPFELFVDEKQGYAKGVLTQKLGPWRRPVAYLSKKLDPVAAGWPPCLRMVAAIAVLTKDAGKLTMGQPLVILAPHAVEALVKQPPDRWLSNARMTHYQAMLLDTDRVQFGPVVALNPATLLPLPEKEAPHDCLEILAETHGTRPDLTDQPIPDADYTWYTDGSSFLQEGQRRAGAAVTTETEVIWARALPAGTSAQRAELIALTQALKMAEGKKLNVYTDSRYAFATAHVHGEIYRRRGLLTSEGREIKNKNEILALLKALFLPKRLSIIHCPGHQKGNSAEARGNRMADQAAREAAMKAVLETSTLLAGKRTADGSEFEKRTADGSEFESPKKKAKVE

SEQ ID NO: 6470 - protein, 2115 aa, synthetic construct
MPAAKRVKLDGGDKKYSIGLDIGTNSVGWAVITDEYKVPSKKFKVLGNTDRHSIKKNLIGALLFDSGETAEATRLKRTARRRYTRRKNRICYLQEIFSNEMAKVDDSFFHRLEESFLVEEDKKHERHPIFGNIVDEVAYHEKYPTIYHLRKKLVDSTDKADLRLIYLALAHMIKFRGHFLIEGDLNPDNSDVDKLFIQLVQTYNQLFEENPINASGVDAKAILSARLSKSRRLENLIAQLPGEKKNGLFGNLIALSLGLTPNFKSNFDLAEDAKLQLSKDTYDDDLDNLLAQIGDQYADLFLAAKNLSDAILLSDILRVNTEITKAPLSASMIKRYDEHHQDLTLLKALVRQQLPEKYKEIFFDQSKNGYAGYIDGGASQEEFYKFIKPILEKMDGTEELLVKLNREDLLRKQRTFDNGSIPHQIHLGELHAILRRQEDFYPFLKDNREKIEKILTFRIPYYVGPLARGNSRFAWMTRKSEETITPWNFEEVVDKGASAQSFIERMTNFDKNLPNEKVLPKHSLLYEYFTVYNELTKVKYVTEGMRKPAFLSGEQKKAIVDLLFKTNRKVTVKQLKEDYFKKIECFDSVEISGVEDRFNASLGTYHDLLKIIKDKDFLDNEENEDILEDIVLTLTLFEDREMIEERLKTYAHLFDDKVMKQLKRRRYTGWGRLSRKLINGIRDKQSGKTILDFLKSDGFANRNFMQLIHDDSLTFKEDIQKAQVSGQGDSLHEHIANLAGSPAIKKGILQTVKVVDELVKVMGRHKPENIVIEMARENQTTQKGQKNSRERMKRIEEGIKELGSQILKEHPVENTQLQNEKLYLYYLQNGRDMYVDQELDINRLSDYDVDHIVPQSFLKDDSIDNKVLTRSDKARGKSDNVPSEEVVKKMKNYWRQLLNAKLITQRKFDNLTKAERGGLSELDKAGFIKRQLVETRQITKHVAQILDSRMNTKYDENDKLIREVKVITLKSKLVSDFRKDFQFYKVREINNYHHAHDAYLNAVVGTALIKKYPKLESEFVYGDYKVYDVRKMIAKSEQEIGKATAKYFFYSNIMNFFKTEITLANGEIRKRPLIETNGETGEIVWDKGRDFATVRKVLSMPQVNIVKKTEVQTGGFSKESILPKRNSDKLIARKKDWDPKKYGGFDSPTVAYSVLVVAKVEKGKSKKLKSVKELLGITIMERSSFEKNPIDFLEAKGYKEVKKDLIIKLPKYSLFELENGRKRMLASAGELQKGNELALPSKYVNFLYLASHYEKLKGSPEDNEQKQLFVEQHKHYLDEIIEQISEFSKRVILADANLDKVLSAYNKHRDKPIREQAENIIHLFTLTNLGAPAAFKYFDTTIDRKRYTSTKEVLDATLIHQSITGLYETRIDLSQLGGDGGEAAAKEAAAKEAAAKEAAAKEAAAKEAAAKGGTLNIEDEYRLHETSKEPDVPLGSTWLSDFPQAWAETGGMGLAVRQAPLIIPLKATSTPVSIKQYPMSQEARLGIKPHIQRLLDQGILVPCQSPWNTPLLPVKKPGTNDYRPVQDLREVNKRVEDIHPTVPNPYNLLSGLPPSHQWYTVLDLKDAFFCLRLHPTSQPLFAFEWRDPEMGISGQLTWTRLPQGFKNSPTLFNEALHRDLADFRIQHPDLILLQYVDDLLLAATSEQDCQRGTRALLQTLGNLGYRASAKKAQICQKQVKYLGYLLKEGQRWLTEARKETVMGQPTPKTPRQLREFLGTAGFCRLWIPGFAEMAAPLYPLTKPGTLFNWGPDQQKAYQEIKQALLTAPALGLPDLTKPFELFVDEKQGYAKGVLTQKLGPWRRPVAYLSKKLDPVAAGWPPCLRMVAAIAVLTKDAGKLTMGQPLVILAPHAVEALVKQPPDRWLSNARMTHYQAMLLDTDRVQFGPVVALNPATLLPLPEKEAPHDCLEILAETHGTRPDLTDQPIPDADYTWYTDGSSFLQEGQRRAGAAVTTETEVIWARALPAGTSAQRAELIALTQALKMAEGKKLNVYTDSRYAFATAHVHGEIYRRRGWLTSEGREIKNKNEILALLKALFLPKRLSIIHCPGHQKGNSAEARGNRMADQAAREAAMKAVLETSTLLAGKRTADGSEFEKRTADGSEFESPKKKAKVE

SEQ ID NO: 6471 - protein, 2094 aa, synthetic construct
MPAAKRVKLDGGDKKYSIGLDIGTNSVGWAVITDEYKVPSKKFKVLGNTDRHSIKKNLIGALLFDSGETAEATRLKRTARRRYTRRKNRICYLQEIFSNEMAKVDDSFFHRLEESFLVEEDKKHERHPIFGNIVDEVAYHEKYPTIYHLRKKLVDSTDKADLRLIYLALAHMIKFRGHFLIEGDLNPDNSDVDKLFIQLVQTYNQLFEENPINASGVDAKAILSARLSKSRRLENLIAQLPGEKKNGLFGNLIALSLGLTPNFKSNFDLAEDAKLQLSKDTYDDDLDNLLAQIGDQYADLFLAAKNLSDAILLSDILRVNTEITKAPLSASMIKRYDEHHQDLTLLKALVRQQLPEKYKEIFFDQSKNGYAGYIDGGASQEEFYKFIKPILEKMDGTEELLVKLNREDLLRKQRTFDNGSIPHQIHLGELHAILRRQEDFYPFLKDNREKIEKILTFRIPYYVGPLARGNSRFAWMTRKSEETITPWNFEEVVDKGASAQSFIERMTNFDKNLPNEKVLPKHSLLYEYFTVYNELTKVKYVTEGMRKPAFLSGEQKKAIVDLLFKTNRKVTVKQLKEDYFKKIECFDSVEISGVEDRFNASLGTYHDLLKIIKDKDFLDNEENEDILEDIVLTLTLFEDREMIEERLKTYAHLFDDKVMKQLKRRRYTGWGRLSRKLINGIRDKQSGKTILDFLKSDGFANRNFMQLIHDDSLTFKEDIQKAQVSGQGDSLHEHIANLAGSPAIKKGILQTVKVVDELVKVMGRHKPENIVIEMARENQTTQKGQKNSRERMKRIEEGIKELGSQILKEHPVENTQLQNEKLYLYYLQNGRDMYVDQELDINRLSDYDVDHIVPQSFLKDDSIDNKVLTRSDKARGKSDNVPSEEVVKKMKNYWRQLLNAKLITQRKFDNLTKAERGGLSELDKAGFIKRQLVETRQITKHVAQILDSRMNTKYDENDKLIREVKVITLKSKLVSDFRKDFQFYKVREINNYHHAHDAYLNAVVGTALIKKYPKLESEFVYGDYKVYDVRKMIAKSEQEIGKATAKYFFYSNIMNFFKTEITLANGEIRKRPLIETNGETGEIVWDKGRDFATVRKVLSMPQVNIVKKTEVQTGGFSKESILPKRNSDKLIARKKDWDPKKYGGFDSPTVAYSVLVVAKVEKGKSKKLKSVKELLGITIMERSSFEKNPIDFLEAKGYKEVKKDLIIKLPKYSLFELENGRKRMLASAGELQKGNELALPSKYVNFLYLASHYEKLKGSPEDNEQKQLFVEQHKHYLDEIIEQISEFSKRVILADANLDKVLSAYNKHRDKPIREQAENIIHLFTLTNLGAPAAFKYFDTTIDRKRYTSTKEVLDATLIHQSITGLYETRIDLSQLGGDGGPAPGGTVSLQDEHRLFDIPVTTSLPDVWLQDFPQAWAETGGLGRAKCQAPIIIDLKPTAVPVSIKQYPMSLEAHMGIRQHIIKFLELGVLRPCRSPWNTPLLPVKKPGTQDYRPVQDLREINKRTVDIHPTVPNPYNLLSTLKPDYSWYTVLDLKDAFFCLPLAPQSQELFAFEWKDPERGISGQLTWTRLPQGFKNSPTLFNEALHRDLTDFRTQHPEVTLLQYVDDLLLAAPTKKACTQGTRHLLQELGEKGYRASAKKAQICQTKVTYLGYILSEGKRWLTPGRIETVARIPPPRNPREVREFLGTAGFCRLWIPGFAELAAPLYALTKPSTPFTWQTEHQLAFEALKKALLSAPALGLPDTSKPFTLFLDERQGIAKGVLTQKLGPWKRPVAYLSKKLDPVAAGWPPCLRIMAATAMLVKDSAKLTLGQPLTVITPHTLEAIVRQPPDRWITNARLTHYQALLLDTDRVQFGPPVTLNPATLLPVPENQPSPHDCRQVLAETHGTREDLKDQELPDADHTWYTDGSSYLDSGTRRAGAAVVDGHNTIWAQSLPPGTSAQKAELIALTKALELSKGKKANIYTDSRYAFATAHTHGSIYERRGWLTSEGKEIKNKAEIIALLKALFLPQEVAIIHCPGHQKGQDPVAVGNRQADRVARQAAMAEVLTLATEPDNTSHITAGKRTADGSEFEKRTADGSEFESPKKKAKVE

SEQ ID NO: 6472 - protein, 2088 aa, synthetic construct
MPAAKRVKLDGGDKKYSIGLDIGTNSVGWAVITDEYKVPSKKFKVLGNTDRHSIKKNLIGALLFDSGETAEATRLKRTARRRYTRRKNRICYLQEIFSNEMAKVDDSFFHRLEESFLVEEDKKHERHPIFGNIVDEVAYHEKYPTIYHLRKKLVDSTDKADLRLIYLALAHMIKFRGHFLIEGDLNPDNSDVDKLFIQLVQTYNQLFEENPINASGVDAKAILSARLSKSRRLENLIAQLPGEKKNGLFGNLIALSLGLTPNFKSNFDLAEDAKLQLSKDTYDDDLDNLLAQIGDQYADLFLAAKNLSDAILLSDILRVNTEITKAPLSASMIKRYDEHHQDLTLLKALVRQQLPEKYKEIFFDQSKNGYAGYIDGGASQEEFYKFIKPILEKMDGTEELLVKLNREDLLRKQRTFDNGSIPHQIHLGELHAILRRQEDFYPFLKDNREKIEKILTFRIPYYVGPLARGNSRFAWMTRKSEETITPWNFEEVVDKGASAQSFIERMTNFDKNLPNEKVLPKHSLLYEYFTVYNELTKVKYVTEGMRKPAFLSGEQKKAIVDLLFKTNRKVTVKQLKEDYFKKIECFDSVEISGVEDRFNASLGTYHDLLKIIKDKDFLDNEENEDILEDIVLTLTLFEDREMIEERLKTYAHLFDDKVMKQLKRRRYTGWGRLSRKLINGIRDKQSGKTILDFLKSDGFANRNFMQLIHDDSLTFKEDIQKAQVSGQGDSLHEHIANLAGSPAIKKGILQTVKVVDELVKVMGRHKPENIVIEMARENQTTQKGQKNSRERMKRIEEGIKELGSQILKEHPVENTQLQNEKLYLYYLQNGRDMYVDQELDINRLSDYDVDHIVPQSFLKDDSIDNKVLTRSDKARGKSDNVPSEEVVKKMKNYWRQLLNAKLITQRKFDNLTKAERGGLSELDKAGFIKRQLVETRQITKHVAQILDSRMNTKYDENDKLIREVKVITLKSKLVSDFRKDFQFYKVREINNYHHAHDAYLNAVVGTALIKKYPKLESEFVYGDYKVYDVRKMIAKSEQEIGKATAKYFFYSNIMNFFKTEITLANGEIRKRPLIETNGETGEIVWDKGRDFATVRKVLSMPQVNIVKKTEVQTGGFSKESILPKRNSDKLIARKKDWDPKKYGGFDSPTVAYSVLVVAKVEKGKSKKLKSVKELLGITIMERSSFEKNPIDFLEAKGYKEVKKDLIIKLPKYSLFELENGRKRMLASAGELQKGNELALPSKYVNFLYLASHYEKLKGSPEDNEQKQLFVEQHKHYLDEIIEQISEFSKRVILADANLDKVLSAYNKHRDKPIREQAENIIHLFTLTNLGAPAAFKYFDTTIDRKRYTSTKEVLDATLIHQSITGLYETRIDLSQLGGDGGPAPGGTLNLEDEYRLYETSAEPEVSPGSTWLSDFPQAWAETGGMGLAVRQAPLIIPLKATSTPVSIKQYPMSQEAKLGIKPHIQRLLDQGILVPCQSPWNTPLLPVKKPGTNDYRPVQDLREVNKRVEDIHPTVPNPYNLLSGLPPSHRWYTVLDLKDAFFCLRLHPTSQPLFAFEWRDPGMGISGQLTWTRLPQGFKNSPTLFNEALHRDLADFRIQHPDLILLQYVDDILLAATSELDCQQGTRALLLTLGNLGYRASAKKAQLCQKQVKYLGYLLKEGQRWLTEARKETVMGQPTPKTPRQLREFLGKAGFCRLFIPGFAEMAAPLYPLTKPGTLFNWGPDQQKAYQEIKQALLTAPALGLPDLTKPFELFVDEKQGYAKGVLTQKLGPWRRPVAYLSKKLDPVAAGWPPCLRMVAAIAVLRKDAGKLTMGQPLVILAPHAVEALVKQPPDRWLSNARMTHYQAMLLDTDRVQFGPVVALNPATLLPLPEEGAPHDCLEILAETHGTRPDLTDQPIPDADHTWYTDGSSFLQEGQRKAGAAVTTETEVIWARALPAGTSAQRAELIALTQALKMAEGKRLNVYTDSRYAFATAHIHGEIYRRRGWLTSEGREIKNKSEILALLKALFLPKRLSIIHCLGHQKGDSAEARGNRLADQAAREAAIKTPPDTSTLLAGKRTADGSEFEKRTADGSEFESPKKKAKVE

SEQ ID NO: 6473 - protein, 2088 aa, synthetic construct
MPAAKRVKLDGGDKKYSIGLDIGTNSVGWAVITDEYKVPSKKFKVLGNTDRHSIKKNLIGALLFDSGETAEATRLKRTARRRYTRRKNRICYLQEIFSNEMAKVDDSFFHRLEESFLVEEDKKHERHPIFGNIVDEVAYHEKYPTIYHLRKKLVDSTDKADLRLIYLALAHMIKFRGHFLIEGDLNPDNSDVDKLFIQLVQTYNQLFEENPINASGVDAKAILSARLSKSRRLENLIAQLPGEKKNGLFGNLIALSLGLTPNFKSNFDLAEDAKLQLSKDTYDDDLDNLLAQIGDQYADLFLAAKNLSDAILLSDILRVNTEITKAPLSASMIKRYDEHHQDLTLLKALVRQQLPEKYKEIFFDQSKNGYAGYIDGGASQEEFYKFIKPILEKMDGTEELLVKLNREDLLRKQRTFDNGSIPHQIHLGELHAILRRQEDFYPFLKDNREKIEKILTFRIPYYVGPLARGNSRFAWMTRKSEETITPWNFEEVVDKGASAQSFIERMTNFDKNLPNEKVLPKHSLLYEYFTVYNELTKVKYVTEGMRKPAFLSGEQKKAIVDLLFKTNRKVTVKQLKEDYFKKIECFDSVEISGVEDRFNASLGTYHDLLKIIKDKDFLDNEENEDILEDIVLTLTLFEDREMIEERLKTYAHLFDDKVMKQLKRRRYTGWGRLSRKLINGIRDKQSGKTILDFLKSDGFANRNFMQLIHDDSLTFKEDIQKAQVSGQGDSLHEHIANLAGSPAIKKGILQTVKVVDELVKVMGRHKPENIVIEMARENQTTQKGQKNSRERMKRIEEGIKELGSQILKEHPVENTQLQNEKLYLYYLQNGRDMYVDQELDINRLSDYDVDHIVPQSFLKDDSIDNKVLTRSDKARGKSDNVPSEEVVKKMKNYWRQLLNAKLITQRKFDNLTKAERGGLSELDKAGFIKRQLVETRQITKHVAQILDSRMNTKYDENDKLIREVKVITLKSKLVSDFRKDFQFYKVREINNYHHAHDAYLNAVVGTALIKKYPKLESEFVYGDYKVYDVRKMIAKSEQEIGKATAKYFFYSNIMNFFKTEITLANGEIRKRPLIETNGETGEIVWDKGRDFATVRKVLSMPQVNIVKKTEVQTGGFSKESILPKRNSDKLIARKKDWDPKKYGGFDSPTVAYSVLVVAKVEKGKSKKLKSVKELLGITIMERSSFEKNPIDFLEAKGYKEVKKDLIIKLPKYSLFELENGRKRMLASAGELQKGNELALPSKYVNFLYLASHYEKLKGSPEDNEQKQLFVEQHKHYLDEIIEQISEFSKRVILADANLDKVLSAYNKHRDKPIREQAENIIHLFTLTNLGAPAAFKYFDTTIDRKRYTSTKEVLDATLIHQSITGLYETRIDLSQLGGDGGPAPGGTLGIEDEYRLHETSTEPDVSLGSTWLSDFPQAWAETGGMGLAVRQAPLIIPLKATSTPVSIQQYPMSHEARLGIKPHIQRLLDQGILVPCQSPWNTPLLPVKKPGTNDYRPVQDLREVNKRVEDIHPTVPNPYNLLSGLPPSHQWYTVLDLKDAFFCLRLHPTSQPLFAFEWRDPGMGISGQLTWTRLPQGFKNSPTLFNEALHRDLADFRIQHPDLILLQYVDDILLAATSELDCQQGTRALLQTLGDLGYRASAKKAQICQKQVKYLGYLLREGQRWLTEARKETVMGQPVPKTPRQLREFLGTAGFCRLWIPGFAEMAAPLYPLTKPGTLFSWGPDQQKAYQEIKQALLTAPALGLPDLTKPFELFVDEKQGYAKGVLTQKLGPWRRPVAYLSKKLDPVAAGWPPCLRMVAAIAVLTKDAGKLTMGQPLVILAPHAVEALVKQPPDRWLSNARMTHYQAMLLDTDRVQFGPVVALNPATLLPLPEEGAPHDCLEILAETHGTRPDLTDQPIPDADHTWYTDGSSFLQEGQRKAGAAVTTETEVIWAGALPAGTSAQRAELIALTQALKMAEGKRLNVYTDSRYAFATAHIHGEIYRRRGWLTSEGREIKNKSEILALLKALFLPKRLSIIHCLGHQKGDSAEARGNRLADQAAREAAIKTPPDTSTLLAGKRTADGSEFEKRTADGSEFESPKKKAKVE

SEQ ID NO: 6474 - protein, 2088 aa, synthetic construct
MPAAKRVKLDGGDKKYSIGLDIGTNSVGWAVITDEYKVPSKKFKVLGNTDRHSIKKNLIGALLFDSGETAEATRLKRTARRRYTRRKNRICYLQEIFSNEMAKVDDSFFHRLEESFLVEEDKKHERHPIFGNIVDEVAYHEKYPTIYHLRKKLVDSTDKADLRLIYLALAHMIKFRGHFLIEGDLNPDNSDVDKLFIQLVQTYNQLFEENPINASGVDAKAILSARLSKSRRLENLIAQLPGEKKNGLFGNLIALSLGLTPNFKSNFDLAEDAKLQLSKDTYDDDLDNLLAQIGDQYADLFLAAKNLSDAILLSDILRVNTEITKAPLSASMIKRYDEHHQDLTLLKALVRQQLPEKYKEIFFDQSKNGYAGYIDGGASQEEFYKFIKPILEKMDGTEELLVKLNREDLLRKQRTFDNGSIPHQIHLGELHAILRRQEDFYPFLKDNREKIEKILTFRIPYYVGPLARGNSRFAWMTRKSEETITPWNFEEVVDKGASAQSFIERMTNFDKNLPNEKVLPKHSLLYEYFTVYNELTKVKYVTEGMRKPAFLSGEQKKAIVDLLFKTNRKVTVKQLKEDYFKKIECFDSVEISGVEDRFNASLGTYHDLLKIIKDKDFLDNEENEDILEDIVLTLTLFEDREMIEERLKTYAHLFDDKVMKQLKRRRYTGWGRLSRKLINGIRDKQSGKTILDFLKSDGFANRNFMQLIHDDSLTFKEDIQKAQVSGQGDSLHEHIANLAGSPAIKKGILQTVKVVDELVKVMGRHKPENIVIEMARENQTTQKGQKNSRERMKRIEEGIKELGSQILKEHPVENTQLQNEKLYLYYLQNGRDMYVDQELDINRLSDYDVDHIVPQSFLKDDSIDNKVLTRSDKARGKSDNVPSEEVVKKMKNYWRQLLNAKLITQRKFDNLTKAERGGLSELDKAGFIKRQLVETRQITKHVAQILDSRMNTKYDENDKLIREVKVITLKSKLVSDFRKDFQFYKVREINNYHHAHDAYLNAVVGTALIKKYPKLESEFVYGDYKVYDVRKMIAKSEQEIGKATAKYFFYSNIMNFFKTEITLANGEIRKRPLIETNGETGEIVWDKGRDFATVRKVLSMPQVNIVKKTEVQTGGFSKESILPKRNSDKLIARKKDWDPKKYGGFDSPTVAYSVLVVAKVEKGKSKKLKSVKELLGITIMERSSFEKNPIDFLEAKGYKEVKKDLIIKLPKYSLFELENGRKRMLASAGELQKGNELALPSKYVNFLYLASHYEKLKGSPEDNEQKQLFVEQHKHYLDEIIEQISEFSKRVILADANLDKVLSAYNKHRDKPIREQAENIIHLFTLTNLGAPAAFKYFDTTIDRKRYTSTKEVLDATLIHQSITGLYETRIDLSQLGGDGGPAPGGTLNIEDEYRLHETSKGPDVPLGSTWLSDFPQAWAETGGMGLAVRQAPLIIPLKATSTPVSIKQYPMSQEARLGIKPHIQRLLDQGILVPCQSPWNTPLLPVKKPGTNDYRPVQDLREVNKRVEDIHPTVPNPYNLLSGLPPSHQWYTVLDLKDAFFCLRLHPTSQSLFAFEWRDPEMGISGQLTWTRLPQGFKNSPTLFDEALHRDLADFRIQHPDLILLQYVDDLLLAATSELDCQQGTRALLQTLGDLGYRASAKKAQICQKQVKYLGYLLKEGQRWLTEARKETVMGQPTPKTPRQLREFLGTAGFCRLWIPGFAEMAAPLYPLTKTGTLFEWGPDQQKAYQEIKQALLTAPALGLPDLTKPFELFVDEKQGYAKGVLTQKLGPWRRPVAYLSKKLDPVAAGWPPCLRMVAAIAVLTKDAGKLTMGQPLVILAPHAVEALVKQPPDRWLSNARMTHYQALLLDTDRVQFGPIVALNPATLLPLPEEGLQHDCLDILAEAHGTRPDLTDQPLPDADHTWYTDGSSFLQEGQRKAGAAVTTETEVVWAKALPAGTSAQRAELIALTQALKMAEGKKLNVYTDSRYAFATAHIHGEIYRRRGLLTSEGKEIKNKDEILALLKALFLPKRLSIIHCPGHQKGNRAEARGNRMADQAAREVATRETPETSTLLAGKRTADGSEFEKRTADGSEFESPKKKAKVE

SEQ ID NO: 6475 - protein, 2088 aa, synthetic construct
MPAAKRVKLDGGDKKYSIGLDIGTNSVGWAVITDEYKVPSKKFKVLGNTDRHSIKKNLIGALLFDSGETAEATRLKRTARRRYTRRKNRICYLQEIFSNEMAKVDDSFFHRLEESFLVEEDKKHERHPIFGNIVDEVAYHEKYPTIYHLRKKLVDSTDKADLRLIYLALAHMIKFRGHFLIEGDLNPDNSDVDKLFIQLVQTYNQLFEENPINASGVDAKAILSARLSKSRRLENLIAQLPGEKKNGLFGNLIALSLGLTPNFKSNFDLAEDAKLQLSKDTYDDDLDNLLAQIGDQYADLFLAAKNLSDAILLSDILRVNTEITKAPLSASMIKRYDEHHQDLTLLKALVRQQLPEKYKEIFFDQSKNGYAGYIDGGASQEEFYKFIKPILEKMDGTEELLVKLNREDLLRKQRTFDNGSIPHQIHLGELHAILRRQEDFYPFLKDNREKIEKILTFRIPYYVGPLARGNSRFAWMTRKSEETITPWNFEEVVDKGASAQSFIERMTNFDKNLPNEKVLPKHSLLYEYFTVYNELTKVKYVTEGMRKPAFLSGEQKKAIVDLLFKTNRKVTVKQLKEDYFKKIECFDSVEISGVEDRFNASLGTYHDLLKIIKDKDFLDNEENEDILEDIVLTLTLFEDREMIEERLKTYAHLFDDKVMKQLKRRRYTGWGRLSRKLINGIRDKQSGKTILDFLKSDGFANRNFMQLIHDDSLTFKEDIQKAQVSGQGDSLHEHIANLAGSPAIKKGILQTVKVVDELVKVMGRHKPENIVIEMARENQTTQKGQKNSRERMKRIEEGIKELGSQILKEHPVENTQLQNEKLYLYYLQNGRDMYVDQELDINRLSDYDVDHIVPQSFLKDDSIDNKVLTRSDKARGKSDNVPSEEVVKKMKNYWRQLLNAKLITQRKFDNLTKAERGGLSELDKAGFIKRQLVETRQITKHVAQILDSRMNTKYDENDKLIREVKVITLKSKLVSDFRKDFQFYKVREINNYHHAHDAYLNAVVGTALIKKYPKLESEFVYGDYKVYDVRKMIAKSEQEIGKATAKYFFYSNIMNFFKTEITLANGEIRKRPLIETNGETGEIVWDKGRDFATVRKVLSMPQVNIVKKTEVQTGGFSKESILPKRNSDKLIARKKDWDPKKYGGFDSPTVAYSVLVVAKVEKGKSKKLKSVKELLGITIMERSSFEKNPIDFLEAKGYKEVKKDLIIKLPKYSLFELENGRKRMLASAGELQKGNELALPSKYVNFLYLASHYEKLKGSPEDNEQKQLFVEQHKHYLDEIIEQISEFSKRVILADANLDKVLSAYNKHRDKPIREQAENIIHLFTLTNLGAPAAFKYFDTTIDRKRYTSTKEVLDATLIHQSITGLYETRIDLSQLGGDGGPAPGGTLNIEDEYRLHEISTEPDVSPGSTWLSDFPQAWAETGGMGLAVRQAPLIIPLKATSTPVSIKQYPMSQEAKLGIKPHIQRLLDQGILVPCQSPWNTPLLPVKKPGTNDYRPVQGLREVNKRVEDIHPTVPNPYNLLSGLPTSHRWYTVLDLKDAFFCLRLHPTSQPLFASEWRDPGMGISGQLTWTRLPQGFKNSPTLFNEALHRGLADFRIQHPDLILLQYVDDLLLAATSELDCQQGTRALLKTLGNLGYRASAKKAQICQKQVKYLGYLLREGQRWLTEARKETVMGQPTPKTPRQLREFLGTAGFCRLWIPRFAEMAAPLYPLTKPGTLFNWGPDQQKAYHEIKQALLTAPALGLPDLTKPFELFVDEKQGYAKGVLTQKLGPWRRPVAYLSKKLDPVAAGWPPCLRMVAAIAVLTKDAGKLTMGQPLVILAPHAVEALVKQPPDRWLSNARMTHYQAMLLDTDRVQFGPVVALNPATLLPLPEEGAPHDCLEILAETHGTEPDLTDQPIPDADHTWYTDGSSFLQEGQRKAGAAVTTETEVIWARALPAGTSAQRAELIALTQALKMAEGKRLNVYTDSRYAFATAHIHGEIYKRRGWLTSEGREIKNKSEILALLKALFLPKRLSIIHCLGHQKGDSAEARGNRLADQAAREAAIKTPPDTSTLLAGKRTADGSEFEKRTADGSEFESPKKKAKVE

SEQ ID NO: 6476 - protein, 2082 aa, synthetic construct
MPAAKRVKLDGGDKKYSIGLDIGTNSVGWAVITDEYKVPSKKFKVLGNTDRHSIKKNLIGALLFDSGETAEATRLKRTARRRYTRRKNRICYLQEIFSNEMAKVDDSFFHRLEESFLVEEDKKHERHPIFGNIVDEVAYHEKYPTIYHLRKKLVDSTDKADLRLIYLALAHMIKFRGHFLIEGDLNPDNSDVDKLFIQLVQTYNQLFEENPINASGVDAKAILSARLSKSRRLENLIAQLPGEKKNGLFGNLIALSLGLTPNFKSNFDLAEDAKLQLSKDTYDDDLDNLLAQIGDQYADLFLAAKNLSDAILLSDILRVNTEITKAPLSASMIKRYDEHHQDLTLLKALVRQQLPEKYKEIFFDQSKNGYAGYIDGGASQEEFYKFIKPILEKMDGTEELLVKLNREDLLRKQRTFDNGSIPHQIHLGELHAILRRQEDFYPFLKDNREKIEKILTFRIPYYVGPLARGNSRFAWMTRKSEETITPWNFEEVVDKGASAQSFIERMTNFDKNLPNEKVLPKHSLLYEYFTVYNELTKVKYVTEGMRKPAFLSGEQKKAIVDLLFKTNRKVTVKQLKEDYFKKIECFDSVEISGVEDRFNASLGTYHDLLKIIKDKDFLDNEENEDILEDIVLTLTLFEDREMIEERLKTYAHLFDDKVMKQLKRRRYTGWGRLSRKLINGIRDKQSGKTILDFLKSDGFANRNFMQLIHDDSLTFKEDIQKAQVSGQGDSLHEHIANLAGSPAIKKGILQTVKVVDELVKVMGRHKPENIVIEMARENQTTQKGQKNSRERMKRIEEGIKELGSQILKEHPVENTQLQNEKLYLYYLQNGRDMYVDQELDINRLSDYDVDHIVPQSFLKDDSIDNKVLTRSDKARGKSDNVPSEEVVKKMKNYWRQLLNAKLITQRKFDNLTKAERGGLSELDKAGFIKRQLVETRQITKHVAQILDSRMNTKYDENDKLIREVKVITLKSKLVSDFRKDFQFYKVREINNYHHAHDAYLNAVVGTALIKKYPKLESEFVYGDYKVYDVRKMIAKSEQEIGKATAKYFFYSNIMNFFKTEITLANGEIRKRPLIETNGETGEIVWDKGRDFATVRKVLSMPQVNIVKKTEVQTGGFSKESILPKRNSDKLIARKKDWDPKKYGGFDSPTVAYSVLVVAKVEKGKSKKLKSVKELLGITIMERSSFEKNPIDFLEAKGYKEVKKDLIIKLPKYSLFELENGRKRMLASAGELQKGNELALPSKYVNFLYLASHYEKLKGSPEDNEQKQLFVEQHKHYLDEIIEQISEFSKRVILADANLDKVLSAYNKHRDKPIREQAENIIHLFTLTNLGAPAAFKYFDTTIDRKRYTSTKEVLDATLIHQSITGLYETRIDLSQLGGDGGPAPGGTLQLDDEYRLYSPLVKPDQNIQFWLEQFPQAWAETAGMGLAKQVPPQVIQLKASATPVSVRQYPLSKEAQEGIRPHVQRLIQQGILVPVQSPWNTPLLPVRKPGTNDYRPVQDLREVNKRVQDIHPTVPNPYNLLCALPPQRSWYTVLDLKDAFFCLRLHPTSQPLFAFEWRDPGTGRTGQLTWTRLPQGFKNSPTIFDEALHRDLANFRIQHPQVTLLQYVDDLLLAGATKQDCLEGTKALLLELSDLGYRASAKKAQICRREVTYLGYSLRDGQRWLTEARKKTVVQIPAPTTAKQVREFLGTAGFCRLWIPGFATLAAPLYPLTKEKGEFSWAPEHQKAFDAIKKALLSAPALALPDVTKPFTLYVDERKGVARGVLTQTLGPWRRPVAYLSKKLDPVASGWPVCLKAIAAVAILVKDADKLTLGQNITVIAPHALENIVRQPPDRWMTNARMTHYQSLLLTERVTFAPPAALNPATLLPEETDEPVTHDCHQLLIEETGVRKDLTDIPLTGEVLTWFTDGSSYVVEGKRMAGAAVVDGTRTIWASSLPEGTSAQKAELMALTQALRLAEGKSINIYTDSRYAFATAHVHGAIYKQRGLLTSAGREIKNKEEILSLLEALHLPKRLAIIHCPGHQKAKDPISRGNQMADRVAKQAAQGVNLLAGKRTADGSEFEKRTADGSEFESPKKKAKVE

SEQ ID NO: 6477 - protein, 2168 aa, synthetic construct
MPAAKRVKLDGGDKKYSIGLDIGTNSVGWAVITDEYKVPSKKFKVLGNTDRHSIKKNLIGALLFDSGETAEATRLKRTARRRYTRRKNRICYLQEIFSNEMAKVDDSFFHRLEESFLVEEDKKHERHPIFGNIVDEVAYHEKYPTIYHLRKKLVDSTDKADLRLIYLALAHMIKFRGHFLIEGDLNPDNSDVDKLFIQLVQTYNQLFEENPINASGVDAKAILSARLSKSRRLENLIAQLPGEKKNGLFGNLIALSLGLTPNFKSNFDLAEDAKLQLSKDTYDDDLDNLLAQIGDQYADLFLAAKNLSDAILLSDILRVNTEITKAPLSASMIKRYDEHHQDLTLLKALVRQQLPEKYKEIFFDQSKNGYAGYIDGGASQEEFYKFIKPILEKMDGTEELLVKLNREDLLRKQRTFDNGSIPHQIHLGELHAILRRQEDFYPFLKDNREKIEKILTFRIPYYVGPLARGNSRFAWMTRKSEETITPWNFEEVVDKGASAQSFIERMTNFDKNLPNEKVLPKHSLLYEYFTVYNELTKVKYVTEGMRKPAFLSGEQKKAIVDLLFKTNRKVTVKQLKEDYFKKIECFDSVEISGVEDRFNASLGTYHDLLKIIKDKDFLDNEENEDILEDIVLTLTLFEDREMIEERLKTYAHLFDDKVMKQLKRRRYTGWGRLSRKLINGIRDKQSGKTILDFLKSDGFANRNFMQLIHDDSLTFKEDIQKAQVSGQGDSLHEHIANLAGSPAIKKGILQTVKVVDELVKVMGRHKPENIVIEMARENQTTQKGQKNSRERMKRIEEGIKELGSQILKEHPVENTQLQNEKLYLYYLQNGRDMYVDQELDINRLSDYDVDHIVPQSFLKDDSIDNKVLTRSDKARGKSDNVPSEEVVKKMKNYWRQLLNAKLITQRKFDNLTKAERGGLSELDKAGFIKRQLVETRQITKHVAQILDSRMNTKYDENDKLIREVKVITLKSKLVSDFRKDFQFYKVREINNYHHAHDAYLNAVVGTALIKKYPKLESEFVYGDYKVYDVRKMIAKSEQEIGKATAKYFFYSNIMNFFKTEITLANGEIRKRPLIETNGETGEIVWDKGRDFATVRKVLSMPQVNIVKKTEVQTGGFSKESILPKRNSDKLIARKKDWDPKKYGGFDSPTVAYSVLVVAKVEKGKSKKLKSVKELLGITIMERSSFEKNPIDFLEAKGYKEVKKDLIIKLPKYSLFELENGRKRMLASAGELQKGNELALPSKYVNFLYLASHYEKLKGSPEDNEQKQLFVEQHKHYLDEIIEQISEFSKRVILADANLDKVLSAYNKHRDKPIREQAENIIHLFTLTNLGAPAAFKYFDTTIDRKRYTSTKEVLDATLIHQSITGLYETRIDLSQLGGDGGPAPGGMDPLQLLQPLEAEIKGTKLKAHWNSGATITCVPQAFLEEEVPIKNIWIKTIHGEKEQPVYYLTFKIQGRKVEAEVISSPYDYILVSPSDIPWLMKKPLQLTTLVPLQEYEERLLKQTMLTGSYKEKLQSLFLKYDALWQHWENQVGHRRIKPHHIATGTVNPRPQKQYPINPKAKASIQTVINDLLKQGVLIQQNSIMNTPVYPVPKPDGKWRMVLDYREVNKTIPLIAAQNQHSAGILSSIFRGKYKTTLDLSNGFWAHSITPESYWLTAFTWLGQQYCWTRLPQGFLNSPALFNADVVDLLKEVPNVQVYVDDIYISHDDPREHLEQLEKVFSLLLNAGYVVSLKKSEIAQHEVEFLGFNITKEGRGLTETFKQKLLNITPPRDLKQLQSILGKLNFARNFIPNFSELVKPLYNIIATAPGKYITWTTDNSQQLQNIISMLNSAENLEERNPEVRLIMKVNTSPSAGYIRFYNEFAKRPIMYLNYVYTKAEVKFTNTEKLLTTIHKGLIKALDLGMGQEILVYSPIVSMTKIQKTPLPERKALPIRWITWMSYLEDPRIQFHYDKTLPELQQVPTVTDDIIAKIKHPSEFSMVFYTDGSAIKHPNVNKSHNAGMGIAQVQFKPEFTVINTWSIPLGDHTAQLAEVAAVEFACKKALKIDGPVLIVTDSFYVAESVNKELPYWQSNGFFNNKKKPLKHVSKWKSIADCIQLKPDIIIIHEKGHQPTASTFHTEGNNLADKLATQGSYVVNAGKRTADGSEFEKRTADGSEFESPKKKAKVE

SEQ ID NO: 6478 - protein, 2086 aa, synthetic construct
MPAAKRVKLDGGDKKYSIGLDIGTNSVGWAVITDEYKVPSKKFKVLGNTDRHSIKKNLIGALLFDSGETAEATRLKRTARRRYTRRKNRICYLQEIFSNEMAKVDDSFFHRLEESFLVEEDKKHERHPIFGNIVDEVAYHEKYPTIYHLRKKLVDSTDKADLRLIYLALAHMIKFRGHFLIEGDLNPDNSDVDKLFIQLVQTYNQLFEENPINASGVDAKAILSARLSKSRRLENLIAQLPGEKKNGLFGNLIALSLGLTPNFKSNFDLAEDAKLQLSKDTYDDDLDNLLAQIGDQYADLFLAAKNLSDAILLSDILRVNTEITKAPLSASMIKRYDEHHQDLTLLKALVRQQLPEKYKEIFFDQSKNGYAGYIDGGASQEEFYKFIKPILEKMDGTEELLVKLNREDLLRKQRTFDNGSIPHQIHLGELHAILRRQEDFYPFLKDNREKIEKILTFRIPYYVGPLARGNSRFAWMTRKSEETITPWNFEEVVDKGASAQSFIERMTNFDKNLPNEKVLPKHSLLYEYFTVYNELTKVKYVTEGMRKPAFLSGEQKKAIVDLLFKTNRKVTVKQLKEDYFKKIECFDSVEISGVEDRFNASLGTYHDLLKIIKDKDFLDNEENEDILEDIVLTLTLFEDREMIEERLKTYAHLFDDKVMKQLKRRRYTGWGRLSRKLINGIRDKQSGKTILDFLKSDGFANRNFMQLIHDDSLTFKEDIQKAQVSGQGDSLHEHIANLAGSPAIKKGILQTVKVVDELVKVMGRHKPENIVIEMARENQTTQKGQKNSRERMKRIEEGIKELGSQILKEHPVENTQLQNEKLYLYYLQNGRDMYVDQELDINRLSDYDVDHIVPQSFLKDDSIDNKVLTRSDKARGKSDNVPSEEVVKKMKNYWRQLLNAKLITQRKFDNLTKAERGGLSELDKAGFIKRQLVETRQITKHVAQILDSRMNTKYDENDKLIREVKVITLKSKLVSDFRKDFQFYKVREINNYHHAHDAYLNAVVGTALIKKYPKLESEFVYGDYKVYDVRKMIAKSEQEIGKATAKYFFYSNIMNFFKTEITLANGEIRKRPLIETNGETGEIVWDKGRDFATVRKVLSMPQVNIVKKTEVQTGGFSKESILPKRNSDKLIARKKDWDPKKYGGFDSPTVAYSVLVVAKVEKGKSKKLKSVKELLGITIMERSSFEKNPIDFLEAKGYKEVKKDLIIKLPKYSLFELENGRKRMLASAGELQKGNELALPSKYVNFLYLASHYEKLKGSPEDNEQKQLFVEQHKHYLDEIIEQISEFSKRVILADANLDKVLSAYNKHRDKPIREQAENIIHLFTLTNLGAPAAFKYFDTTIDRKRYTSTKEVLDATLIHQSITGLYETRIDLSQLGGDGGPAPGGVLNLEEEYRLHEKPVPSSIDPSWLQLFPTVWAERAGMGLANQVPPVVVELRSGASPVAVRQYPMSKEAREGIRPHIQRFLDLGVLVPCQSPWNTPLLPVKKPGTNDYRPVQDLREINKRVQDIHPTVPNPYNLLSSLPPSHTWYSVLDLKDAFFCLKLHPNSQPLFAFEWRDPEKGNTGQLTWTRLPQGFKNSPTLFNEALHRDLAPFRALNPQVVLLQYVDDLLVAAPTYRDCKEGTQKLLQELSKLGYRVSAKKAQLCQKEVTYLGYLLKEGKRWLTPARKATVMKIPPPTTPRQVREFLGTAGFCRLWIPGFASLAAPLYPLTKPSIPFIWTEEHQKAFDRIKEALLSAPALALPDLTKPFTLYVDERAGVARGVLTQTLGPWRRPVAYLSKKLDPVASGWPTCLKAVAAVALLLKDADKLTLGQNVTVIASHSLESIVRQPPDRWMTNARMTHYQSLLLNERVSFAPPAVLNPATLLPVESEATPVHRCSEILAEETGTRRDLKDQPLPGVPAWYTDGSSFIAEGKRRAGAAIVDGKRTVWASSLPEGTSAQKAELVALTQALRLAEGKDINIYTDSRYAFATAHIHGAIYKQRGWLTSAGKDIKNKEEILALLEAIHLPKRVAIIHCPGHQKGNDPVATGNRRADEAAKQAALSTRVLAETTKPAGKRTADGSEFEKRTADGSEFESPKKKAKVE

SEQ ID NO: 6479 - protein, 2086 aa, synthetic construct
MPAAKRVKLDGGDKKYSIGLDIGTNSVGWAVITDEYKVPSKKFKVLGNTDRHSIKKNLIGALLFDSGETAEATRLKRTARRRYTRRKNRICYLQEIFSNEMAKVDDSFFHRLEESFLVEEDKKHERHPIFGNIVDEVAYHEKYPTIYHLRKKLVDSTDKADLRLIYLALAHMIKFRGHFLIEGDLNPDNSDVDKLFIQLVQTYNQLFEENPINASGVDAKAILSARLSKSRRLENLIAQLPGEKKNGLFGNLIALSLGLTPNFKSNFDLAEDAKLQLSKDTYDDDLDNLLAQIGDQYADLFLAAKNLSDAILLSDILRVNTEITKAPLSASMIKRYDEHHQDLTLLKALVRQQLPEKYKEIFFDQSKNGYAGYIDGGASQEEFYKFIKPILEKMDGTEELLVKLNREDLLRKQRTFDNGSIPHQIHLGELHAILRRQEDFYPFLKDNREKIEKILTFRIPYYVGPLARGNSRFAWMTRKSEETITPWNFEEVVDKGASAQSFIERMTNFDKNLPNEKVLPKHSLLYEYFTVYNELTKVKYVTEGMRKPAFLSGEQKKAIVDLLFKTNRKVTVKQLKEDYFKKIECFDSVEISGVEDRFNASLGTYHDLLKIIKDKDFLDNEENEDILEDIVLTLTLFEDREMIEERLKTYAHLFDDKVMKQLKRRRYTGWGRLSRKLINGIRDKQSGKTILDFLKSDGFANRNFMQLIHDDSLTFKEDIQKAQVSGQGDSLHEHIANLAGSPAIKKGILQTVKVVDELVKVMGRHKPENIVIEMARENQTTQKGQKNSRERMKRIEEGIKELGSQILKEHPVENTQLQNEKLYLYYLQNGRDMYVDQELDINRLSDYDVDHIVPQSFLKDDSIDNKVLTRSDKARGKSDNVPSEEVVKKMKNYWRQLLNAKLITQRKFDNLTKAERGGLSELDKAGFIKRQLVETRQITKHVAQILDSRMNTKYDENDKLIREVKVITLKSKLVSDFRKDFQFYKVREINNYHHAHDAYLNAVVGTALIKKYPKLESEFVYGDYKVYDVRKMIAKSEQEIGKATAKYFFYSNIMNFFKTEITLANGEIRKRPLIETNGETGEIVWDKGRDFATVRKVLSMPQVNIVKKTEVQTGGFSKESILPKRNSDKLIARKKDWDPKKYGGFDSPTVAYSVLVVAKVEKGKSKKLKSVKELLGITIMERSSFEKNPIDFLEAKGYKEVKKDLIIKLPKYSLFELENGRKRMLASAGELQKGNELALPSKYVNFLYLASHYEKLKGSPEDNEQKQLFVEQHKHYLDEIIEQISEFSKRVILADANLDKVLSAYNKHRDKPIREQAENIIHLFTLTNLGAPAAFKYFDTTIDRKRYTSTKEVLDATLIHQSITGLYETRIDLSQLGGDGGPAPGGVLNLEEEYRLHEKPVPSSIDPSWLQLFPTVWAERAGMGLANQVPPVVVELRSGASPVAVRQYPMSKEAREGIRPHIQRFLDLGVLVPCQSPWNTPLLPVKKPGTNDYRPVQDLREINKRVQDIHPTVPNPYNLLSSLPPSHTWYSVLDLKDAFFCLKLHPNSQPLFAFEWRDPEKGNTGQLTWTRLPQGFKNSPTLFNEALHRDLAPFRALNPQVVLLQYVDDLLVAAPTYRDCKEGTQKLLQELSKLGYRVSAKKAQLCQKEVTYLGYLLKEGKRWLTPARKATVMKIPPPTTPRQVREFLGKAGFCRLFIPGFASLAAPLYPLTKPSIPFIWTEEHQKAFDRIKEALLSAPALALPDLTKPFTLYVDERAGVARGVLTQTLGPWRRPVAYLSKKLDPVASGWPTCLKAVAAVALLLKDADKLTLGQNVTVIASHSLESIVRQPPDRWMTNARMTHYQSLLLNERVSFAPPAVLNPATLLPVESEATPVHRCSEILAEETGTRRDLKDQPLPGVPAWYTDGSSFIAEGKRRAGAAIVDGKRTVWASSLPEGTSAQKAELVALTQALRLAEGKDINIYTDSRYAFATAHIHGAIYKQRGWLTSAGKDIKNKEEILALLEAIHLPKRVAIIHCPGHQKGNDPVATGNRRADEAAKQAALSTRVLAETTKPAGKRTADGSEFEKRTADGSEFESPKKKAKVE

SEQ ID NO: 6480 - protein, 2088 aa, synthetic construct
MPAAKRVKLDGGDKKYSIGLDIGTNSVGWAVITDEYKVPSKKFKVLGNTDRHSIKKNLIGALLFDSGETAEATRLKRTARRRYTRRKNRICYLQEIFSNEMAKVDDSFFHRLEESFLVEEDKKHERHPIFGNIVDEVAYHEKYPTIYHLRKKLVDSTDKADLRLIYLALAHMIKFRGHFLIEGDLNPDNSDVDKLFIQLVQTYNQLFEENPINASGVDAKAILSARLSKSRRLENLIAQLPGEKKNGLFGNLIALSLGLTPNFKSNFDLAEDAKLQLSKDTYDDDLDNLLAQIGDQYADLFLAAKNLSDAILLSDILRVNTEITKAPLSASMIKRYDEHHQDLTLLKALVRQQLPEKYKEIFFDQSKNGYAGYIDGGASQEEFYKFIKPILEKMDGTEELLVKLNREDLLRKQRTFDNGSIPHQIHLGELHAILRRQEDFYPFLKDNREKIEKILTFRIPYYVGPLARGNSRFAWMTRKSEETITPWNFEEVVDKGASAQSFIERMTNFDKNLPNEKVLPKHSLLYEYFTVYNELTKVKYVTEGMRKPAFLSGEQKKAIVDLLFKTNRKVTVKQLKEDYFKKIECFDSVEISGVEDRFNASLGTYHDLLKIIKDKDFLDNEENEDILEDIVLTLTLFEDREMIEERLKTYAHLFDDKVMKQLKRRRYTGWGRLSRKLINGIRDKQSGKTILDFLKSDGFANRNFMQLIHDDSLTFKEDIQKAQVSGQGDSLHEHIANLAGSPAIKKGILQTVKVVDELVKVMGRHKPENIVIEMARENQTTQKGQKNSRERMKRIEEGIKELGSQILKEHPVENTQLQNEKLYLYYLQNGRDMYVDQELDINRLSDYDVDHIVPQSFLKDDSIDNKVLTRSDKARGKSDNVPSEEVVKKMKNYWRQLLNAKLITQRKFDNLTKAERGGLSELDKAGFIKRQLVETRQITKHVAQILDSRMNTKYDENDKLIREVKVITLKSKLVSDFRKDFQFYKVREINNYHHAHDAYLNAVVGTALIKKYPKLESEFVYGDYKVYDVRKMIAKSEQEIGKATAKYFFYSNIMNFFKTEITLANGEIRKRPLIETNGETGEIVWDKGRDFATVRKVLSMPQVNIVKKTEVQTGGFSKESILPKRNSDKLIARKKDWDPKKYGGFDSPTVAYSVLVVAKVEKGKSKKLKSVKELLGITIMERSSFEKNPIDFLEAKGYKEVKKDLIIKLPKYSLFELENGRKRMLASAGELQKGNELALPSKYVNFLYLASHYEKLKGSPEDNEQKQLFVEQHKHYLDEIIEQISEFSKRVILADANLDKVLSAYNKHRDKPIREQAENIIHLFTLTNLGAPAAFKYFDTTIDRKRYTSTKEVLDATLIHQSITGLYETRIDLSQLGGDGGPAPGGTLNIEDEYRLHETSKEPDVPLGSTWLSDFPQAWAETGGMGLAVRQAPLIIPLKATSTPVSIKQYPMSQEARLGIKPHIQRLLDQGILVPCQSPWNTPLLPVKKPGTNDYRPVQDLREVNKRVEDIHPTVPNPYNLLSGLPPSHQWYTVLDLKDAFFCLRLHPTSQPLFAFEWRDPEMGISGQLTWTRLPQGFKNSPTLFNEALHRDLADFRIQHPDLILLQYVDDLLLAATSEQDCQRGTRALLQTLGNLGYRASAKKAQICQKQVKYLGYLLKEGQRWLTEARKETVMGQPTPKTPRQLREFLGKAGFCRLFIPGFAEMAAPLYPLTKPGTLFNWGPDQQKAYQEIKQALLTAPALGLPDLTKPFELFVDEKQGYAKGVLTQKLGPWRRPVAYLSKKLDPVAAGWPPCLRMVAAIAVLTKDAGKLTMGQPLVILAPHAVEALVKQPPDRWLSNARMTHYQAMLLDTDRVQFGPVVALNPATLLPLPEKEAPHDCLEILAETHGTRPDLTDQPIPDADYTWYTDGSSFLQEGQRRAGAAVTTETEVIWARALPAGTSAQRAELIALTQALKMAEGKKLNVYTDSRYAFATAHVHGEIYRRRGWLTSEGREIKNKNEILALLKALFLPKRLSIIHCPGHQKGNSAEARGNRMADQAAREAAMKAVLETSTLLAGKRTADGSEFEKRTADGSEFESPKKKAKVE

SEQ ID NO: 6481 - protein, 2167 aa, synthetic construct
MPAAKRVKLDGGDKKYSIGLDIGTNSVGWAVITDEYKVPSKKFKVLGNTDRHSIKKNLIGALLFDSGETAEATRLKRTARRRYTRRKNRICYLQEIFSNEMAKVDDSFFHRLEESFLVEEDKKHERHPIFGNIVDEVAYHEKYPTIYHLRKKLVDSTDKADLRLIYLALAHMIKFRGHFLIEGDLNPDNSDVDKLFIQLVQTYNQLFEENPINASGVDAKAILSARLSKSRRLENLIAQLPGEKKNGLFGNLIALSLGLTPNFKSNFDLAEDAKLQLSKDTYDDDLDNLLAQIGDQYADLFLAAKNLSDAILLSDILRVNTEITKAPLSASMIKRYDEHHQDLTLLKALVRQQLPEKYKEIFFDQSKNGYAGYIDGGASQEEFYKFIKPILEKMDGTEELLVKLNREDLLRKQRTFDNGSIPHQIHLGELHAILRRQEDFYPFLKDNREKIEKILTFRIPYYVGPLARGNSRFAWMTRKSEETITPWNFEEVVDKGASAQSFIERMTNFDKNLPNEKVLPKHSLLYEYFTVYNELTKVKYVTEGMRKPAFLSGEQKKAIVDLLFKTNRKVTVKQLKEDYFKKIECFDSVEISGVEDRFNASLGTYHDLLKIIKDKDFLDNEENEDILEDIVLTLTLFEDREMIEERLKTYAHLFDDKVMKQLKRRRYTGWGRLSRKLINGIRDKQSGKTILDFLKSDGFANRNFMQLIHDDSLTFKEDIQKAQVSGQGDSLHEHIANLAGSPAIKKGILQTVKVVDELVKVMGRHKPENIVIEMARENQTTQKGQKNSRERMKRIEEGIKELGSQILKEHPVENTQLQNEKLYLYYLQNGRDMYVDQELDINRLSDYDVDHIVPQSFLKDDSIDNKVLTRSDKARGKSDNVPSEEVVKKMKNYWRQLLNAKLITQRKFDNLTKAERGGLSELDKAGFIKRQLVETRQITKHVAQILDSRMNTKYDENDKLIREVKVITLKSKLVSDFRKDFQFYKVREINNYHHAHDAYLNAVVGTALIKKYPKLESEFVYGDYKVYDVRKMIAKSEQEIGKATAKYFFYSNIMNFFKTEITLANGEIRKRPLIETNGETGEIVWDKGRDFATVRKVLSMPQVNIVKKTEVQTGGFSKESILPKRNSDKLIARKKDWDPKKYGGFDSPTVAYSVLVVAKVEKGKSKKLKSVKELLGITIMERSSFEKNPIDFLEAKGYKEVKKDLIIKLPKYSLFELENGRKRMLASAGELQKGNELALPSKYVNFLYLASHYEKLKGSPEDNEQKQLFVEQHKHYLDEIIEQISEFSKRVILADANLDKVLSAYNKHRDKPIREQAENIIHLFTLTNLGAPAAFKYFDTTIDRKRYTSTKEVLDATLIHQSITGLYETRIDLSQLGGDGGPAPAPGGMDLLKPLTVERKGVKIKGYWNSQADITCVPKDLLQGEEPVRQQNVTTIHGTQEGDVYYVNLKIDGRRINTEVIGTTLDYAIITPGDVPWILKKPLELTIKLDLEEQQGTLLNNSILSKKGKEELKQLFEKYSALWQSWENQVGHRRIRPHKIATGTVKPTPQKQYHINPKAKPDIQIVINDLLKQGVLIQKESTMNTPVYPVPKPNGRWRMVLDYRAVNKVTPLIAVQNQHSYGILGSLFKGRYKTTIDLSNGFWAHPIVPEDYWITAFTWQGKQYCWTVLPQGFLNSPGLFNGDVVDLLQGIPNVEVYVDDVYISHDSEKEHLEYLDILFNRLKEAGYIISLKKSNIANSIVDFLGFQITNEGRGLTDTFKEKLENITAPTTLKQLQSILGLLNFARNFIPDFTELIAPLYALIPKSPKNYVPWQIEHSTTLETLITKLNGAEYLQGRKGDKTLIMKVNASYTTGYIRYYNEGEKKPISYVSIVFSKTELKFTELEKLLTTVHKGLLKALDLSMGQNIHVYSPIVSMQNIQKTPQTAKKALASRWLSWLSYLEDPRIRFFYDPQMPALKDLPAVDTGKDNKKHPSNFQHIFYTDGSAITSPTKEGHLNAGMGIVYFINKDGNLQKQQEWSISLGNHTAQFAEIAAFEFALKKCLPLGGNILVVTDSNYVAKAYNEELDVWASNGFVNNRKKPLKHISKWKSVADLKRLRPDVVVTHEPGHQKLDSSPHAYGNNLADQLATQASFKVHAGKRTADGSEFEKRTADGSEFESPKKKAKVE

SEQ ID NO: 6482 - protein, 2089 aa, synthetic construct
MPAAKRVKLDGGDKKYSIGLDIGTNSVGWAVITDEYKVPSKKFKVLGNTDRHSIKKNLIGALLFDSGETAEATRLKRTARRRYTRRKNRICYLQEIFSNEMAKVDDSFFHRLEESFLVEEDKKHERHPIFGNIVDEVAYHEKYPTIYHLRKKLVDSTDKADLRLIYLALAHMIKFRGHFLIEGDLNPDNSDVDKLFIQLVQTYNQLFEENPINASGVDAKAILSARLSKSRRLENLIAQLPGEKKNGLFGNLIALSLGLTPNFKSNFDLAEDAKLQLSKDTYDDDLDNLLAQIGDQYADLFLAAKNLSDAILLSDILRVNTEITKAPLSASMIKRYDEHHQDLTLLKALVRQQLPEKYKEIFFDQSKNGYAGYIDGGASQEEFYKFIKPILEKMDGTEELLVKLNREDLLRKQRTFDNGSIPHQIHLGELHAILRRQEDFYPFLKDNREKIEKILTFRIPYYVGPLARGNSRFAWMTRKSEETITPWNFEEVVDKGASAQSFIERMTNFDKNLPNEKVLPKHSLLYEYFTVYNELTKVKYVTEGMRKPAFLSGEQKKAIVDLLFKTNRKVTVKQLKEDYFKKIECFDSVEISGVEDRFNASLGTYHDLLKIIKDKDFLDNEENEDILEDIVLTLTLFEDREMIEERLKTYAHLFDDKVMKQLKRRRYTGWGRLSRKLINGIRDKQSGKTILDFLKSDGFANRNFMQLIHDDSLTFKEDIQKAQVSGQGDSLHEHIANLAGSPAIKKGILQTVKVVDELVKVMGRHKPENIVIEMARENQTTQKGQKNSRERMKRIEEGIKELGSQILKEHPVENTQLQNEKLYLYYLQNGRDMYVDQELDINRLSDYDVDHIVPQSFLKDDSIDNKVLTRSDKARGKSDNVPSEEVVKKMKNYWRQLLNAKLITQRKFDNLTKAERGGLSELDKAGFIKRQLVETRQITKHVAQILDSRMNTKYDENDKLIREVKVITLKSKLVSDFRKDFQFYKVREINNYHHAHDAYLNAVVGTALIKKYPKLESEFVYGDYKVYDVRKMIAKSEQEIGKATAKYFFYSNIMNFFKTEITLANGEIRKRPLIETNGETGEIVWDKGRDFATVRKVLSMPQVNIVKKTEVQTGGFSKESILPKRNSDKLIARKKDWDPKKYGGFDSPTVAYSVLVVAKVEKGKSKKLKSVKELLGITIMERSSFEKNPIDFLEAKGYKEVKKDLIIKLPKYSLFELENGRKRMLASAGELQKGNELALPSKYVNFLYLASHYEKLKGSPEDNEQKQLFVEQHKHYLDEIIEQISEFSKRVILADANLDKVLSAYNKHRDKPIREQAENIIHLFTLTNLGAPAAFKYFDTTIDRKRYTSTKEVLDATLIHQSITGLYETRIDLSQLGGDGGPAPAPGGTLQLEEEYRLFEPESTQKQEMDIWLKNFPQAWAETGGMGTAHCQAPVLIQLKATATPISIRQYPMPHEAYQGIKPHIRRMLDQGILKPCQSPWNTPLLPVKKPGTEDYRPVQDLREVNKRVEDIHPTVPNPYNLLSTLPPSHPWYTVLDLKDAFFCLRLHSESQLLFAFEWRDPEIGLSGQLTWTRLPQGFKNSPTLFNEALHSDLADFRVRYPALVLLQYVDDLLLAAATRTECLEGTKALLETLGNKGYRASAKKAQICLQEVTYLGYSLKDGQRWLTKARKEAILSIPVPKNSRQVREFLGTAGYCRLWIPGFAELAAPLYPLTRPGTLFQWGTEQQLAFEDIKKALLSSPALGLPDITKPFELFIDENSGFAKGVLVQKLGPWKRPVAYLSKKLDTVASGWPPCLRMVAAIAILVKDAGKLTLGQPLTILTSHPVEALVRQPPNKWLSNARMTHYQAMLLDAERVHFGPTVSLNPATLLPLPSGGNHHDCLQILAETHGTRPDLTDQPLPDADLTWYTDGSSFIRNGEREAGAAVTTESEVIWAAPLPPGTSAQRAELIALTQALKMAEGKKLTVYTDSRYAFATTHVHGEIYRRRGWLTSEGKEIKNKNEILALLEALFLPKRLSIIHCPGHQKGDSPQAKGNRLADDTAKKAATETHSSLTVLPAGKRTADGSEFEKRTADGSEFESPKKKAKVE

SEQ ID NO: 6483 - protein, 2003 aa, synthetic construct
MPAAKRVKLDGGDKKYSIGLDIGTNSVGWAVITDEYKVPSKKFKVLGNTDRHSIKKNLIGALLFDSGETAEATRLKRTARRRYTRRKNRICYLQEIFSNEMAKVDDSFFHRLEESFLVEEDKKHERHPIFGNIVDEVAYHEKYPTIYHLRKKLVDSTDKADLRLIYLALAHMIKFRGHFLIEGDLNPDNSDVDKLFIQLVQTYNQLFEENPINASGVDAKAILSARLSKSRRLENLIAQLPGEKKNGLFGNLIALSLGLTPNFKSNFDLAEDAKLQLSKDTYDDDLDNLLAQIGDQYADLFLAAKNLSDAILLSDILRVNTEITKAPLSASMIKRYDEHHQDLTLLKALVRQQLPEKYKEIFFDQSKNGYAGYIDGGASQEEFYKFIKPILEKMDGTEELLVKLNREDLLRKQRTFDNGSIPHQIHLGELHAILRRQEDFYPFLKDNREKIEKILTFRIPYYVGPLARGNSRFAWMTRKSEETITPWNFEEVVDKGASAQSFIERMTNFDKNLPNEKVLPKHSLLYEYFTVYNELTKVKYVTEGMRKPAFLSGEQKKAIVDLLFKTNRKVTVKQLKEDYFKKIECFDSVEISGVEDRFNASLGTYHDLLKIIKDKDFLDNEENEDILEDIVLTLTLFEDREMIEERLKTYAHLFDDKVMKQLKRRRYTGWGRLSRKLINGIRDKQSGKTILDFLKSDGFANRNFMQLIHDDSLTFKEDIQKAQVSGQGDSLHEHIANLAGSPAIKKGILQTVKVVDELVKVMGRHKPENIVIEMARENQTTQKGQKNSRERMKRIEEGIKELGSQILKEHPVENTQLQNEKLYLYYLQNGRDMYVDQELDINRLSDYDVDHIVPQSFLKDDSIDNKVLTRSDKARGKSDNVPSEEVVKKMKNYWRQLLNAKLITQRKFDNLTKAERGGLSELDKAGFIKRQLVETRQITKHVAQILDSRMNTKYDENDKLIREVKVITLKSKLVSDFRKDFQFYKVREINNYHHAHDAYLNAVVGTALIKKYPKLESEFVYGDYKVYDVRKMIAKSEQEIGKATAKYFFYSNIMNFFKTEITLANGEIRKRPLIETNGETGEIVWDKGRDFATVRKVLSMPQVNIVKKTEVQTGGFSKESILPKRNSDKLIARKKDWDPKKYGGFDSPTVAYSVLVVAKVEKGKSKKLKSVKELLGITIMERSSFEKNPIDFLEAKGYKEVKKDLIIKLPKYSLFELENGRKRMLASAGELQKGNELALPSKYVNFLYLASHYEKLKGSPEDNEQKQLFVEQHKHYLDEIIEQISEFSKRVILADANLDKVLSAYNKHRDKPIREQAENIIHLFTLTNLGAPAAFKYFDTTIDRKRYTSTKEVLDATLIHQSITGLYETRIDLSQLGGDGGPAPAPGGGLEHLPPPPEVSQFPLNPERLQALTDLVSRALEAKHIEPYQGPGNNPIFPVKKPNGKWRFIHDLRATNSLTRDLASPSPGPPDLTSLPQDLPHLRTIDLTDAFFQIPLPAVFQPYFAFTLPQPNNHGPGTRYSWRVLPQGFKNSPTLFQQQLSHILAPVRKAFPNSLIIQYMDDILLASPALRELTALTDKVTNALTKEGLPMSLEKTQATPGSIHFLGQVISPDCITYETLPSIHVKSIWSLAELQSMLGELQWVSKGTPVLRSSLHQLYLALRGHRDPRDTIELTSTQVQALKTIQKALALNCRSRLVSQLPILALIILRPTGTTAVLFQTKQKWPLVWLHTPHPATSLRPWGQLLANAIITLDKYSLQHYGQICKSFHHNISNQALTYYLHTSDQSSVAILLQHSHRFHNLGAQPSGPWRSLLQVPQIFQNIDVLRPPFIISPVVIDHAPCLFSDGATSKAAFILWDKQVIHQQVLPLPSTCSAQAGELFGLLAGLQKSKPWPALNIFLDSKFLIGHLRRMAWGAFLGPSTQCDLHARLFPLLQGKTVYVHHVRSHTLLQDPISRLNEATDALMLAPLLPLAGKRTADGSEFEKRTADGSEFESPKKKAKVE

SEQ ID NO: 6484 - protein, 2090 aa, synthetic construct
MPAAKRVKLDGGDKKYSIGLDIGTNSVGWAVITDEYKVPSKKFKVLGNTDRHSIKKNLIGALLFDSGETAEATRLKRTARRRYTRRKNRICYLQEIFSNEMAKVDDSFFHRLEESFLVEEDKKHERHPIFGNIVDEVAYHEKYPTIYHLRKKLVDSTDKADLRLIYLALAHMIKFRGHFLIEGDLNPDNSDVDKLFIQLVQTYNQLFEENPINASGVDAKAILSARLSKSRRLENLIAQLPGEKKNGLFGNLIALSLGLTPNFKSNFDLAEDAKLQLSKDTYDDDLDNLLAQIGDQYADLFLAAKNLSDAILLSDILRVNTEITKAPLSASMIKRYDEHHQDLTLLKALVRQQLPEKYKEIFFDQSKNGYAGYIDGGASQEEFYKFIKPILEKMDGTEELLVKLNREDLLRKQRTFDNGSIPHQIHLGELHAILRRQEDFYPFLKDNREKIEKILTFRIPYYVGPLARGNSRFAWMTRKSEETITPWNFEEVVDKGASAQSFIERMTNFDKNLPNEKVLPKHSLLYEYFTVYNELTKVKYVTEGMRKPAFLSGEQKKAIVDLLFKTNRKVTVKQLKEDYFKKIECFDSVEISGVEDRFNASLGTYHDLLKIIKDKDFLDNEENEDILEDIVLTLTLFEDREMIEERLKTYAHLFDDKVMKQLKRRRYTGWGRLSRKLINGIRDKQSGKTILDFLKSDGFANRNFMQLIHDDSLTFKEDIQKAQVSGQGDSLHEHIANLAGSPAIKKGILQTVKVVDELVKVMGRHKPENIVIEMARENQTTQKGQKNSRERMKRIEEGIKELGSQILKEHPVENTQLQNEKLYLYYLQNGRDMYVDQELDINRLSDYDVDHIVPQSFLKDDSIDNKVLTRSDKARGKSDNVPSEEVVKKMKNYWRQLLNAKLITQRKFDNLTKAERGGLSELDKAGFIKRQLVETRQITKHVAQILDSRMNTKYDENDKLIREVKVITLKSKLVSDFRKDFQFYKVREINNYHHAHDAYLNAVVGTALIKKYPKLESEFVYGDYKVYDVRKMIAKSEQEIGKATAKYFFYSNIMNFFKTEITLANGEIRKRPLIETNGETGEIVWDKGRDFATVRKVLSMPQVNIVKKTEVQTGGFSKESILPKRNSDKLIARKKDWDPKKYGGFDSPTVAYSVLVVAKVEKGKSKKLKSVKELLGITIMERSSFEKNPIDFLEAKGYKEVKKDLIIKLPKYSLFELENGRKRMLASAGELQKGNELALPSKYVNFLYLASHYEKLKGSPEDNEQKQLFVEQHKHYLDEIIEQISEFSKRVILADANLDKVLSAYNKHRDKPIREQAENIIHLFTLTNLGAPAAFKYFDTTIDRKRYTSTKEVLDATLIHQSITGLYETRIDLSQLGGDGGPAPAPGGTLNLEDEYRLYETSAEPEVSPGSTWLSDFPQAWAETGGMGLAVRQAPLIIPLKATSTPVSIKQYPMSQEAKLGIKPHIQRLLDQGILVPCQSPWNTPLLPVKKPGTNDYRPVQDLREVNKRVEDIHPTVPNPYNLLSGLPPSHRWYTVLDLKDAFFCLRLHPTSQPLFAFEWRDPGMGISGQLTWTRLPQGFKNSPTLFNEALHRDLADFRIQHPDLILLQYVDDILLAATSELDCQQGTRALLLTLGNLGYRASAKKAQLCQKQVKYLGYLLKEGQRWLTEARKETVMGQPTPKTPRQLREFLGKAGFCRLFIPGFAEMAAPLYPLTKPGTLFNWGPDQQKAYQEIKQALLTAPALGLPDLTKPFELFVDEKQGYAKGVLTQKLGPWRRPVAYLSKKLDPVAAGWPPCLRMVAAIAVLRKDAGKLTMGQPLVILAPHAVEALVKQPPDRWLSNARMTHYQAMLLDTDRVQFGPVVALNPATLLPLPEEGAPHDCLEILAETHGTRPDLTDQPIPDADHTWYTDGSSFLQEGQRKAGAAVTTETEVIWARALPAGTSAQRAELIALTQALKMAEGKRLNVYTDSRYAFATAHIHGEIYRRRGWLTSEGREIKNKSEILALLKALFLPKRLSIIHCLGHQKGDSAEARGNRLADQAAREAAIKTPPDTSTLLAGKRTADGSEFEKRTADGSEFESPKKKAKVE

SEQ ID NO: 6485 - protein, 2110 aa, synthetic construct
MPAAKRVKLDGGDKKYSIGLDIGTNSVGWAVITDEYKVPSKKFKVLGNTDRHSIKKNLIGALLFDSGETAEATRLKRTARRRYTRRKNRICYLQEIFSNEMAKVDDSFFHRLEESFLVEEDKKHERHPIFGNIVDEVAYHEKYPTIYHLRKKLVDSTDKADLRLIYLALAHMIKFRGHFLIEGDLNPDNSDVDKLFIQLVQTYNQLFEENPINASGVDAKAILSARLSKSRRLENLIAQLPGEKKNGLFGNLIALSLGLTPNFKSNFDLAEDAKLQLSKDTYDDDLDNLLAQIGDQYADLFLAAKNLSDAILLSDILRVNTEITKAPLSASMIKRYDEHHQDLTLLKALVRQQLPEKYKEIFFDQSKNGYAGYIDGGASQEEFYKFIKPILEKMDGTEELLVKLNREDLLRKQRTFDNGSIPHQIHLGELHAILRRQEDFYPFLKDNREKIEKILTFRIPYYVGPLARGNSRFAWMTRKSEETITPWNFEEVVDKGASAQSFIERMTNFDKNLPNEKVLPKHSLLYEYFTVYNELTKVKYVTEGMRKPAFLSGEQKKAIVDLLFKTNRKVTVKQLKEDYFKKIECFDSVEISGVEDRFNASLGTYHDLLKIIKDKDFLDNEENEDILEDIVLTLTLFEDREMIEERLKTYAHLFDDKVMKQLKRRRYTGWGRLSRKLINGIRDKQSGKTILDFLKSDGFANRNFMQLIHDDSLTFKEDIQKAQVSGQGDSLHEHIANLAGSPAIKKGILQTVKVVDELVKVMGRHKPENIVIEMARENQTTQKGQKNSRERMKRIEEGIKELGSQILKEHPVENTQLQNEKLYLYYLQNGRDMYVDQELDINRLSDYDVDHIVPQSFLKDDSIDNKVLTRSDKARGKSDNVPSEEVVKKMKNYWRQLLNAKLITQRKFDNLTKAERGGLSELDKAGFIKRQLVETRQITKHVAQILDSRMNTKYDENDKLIREVKVITLKSKLVSDFRKDFQFYKVREINNYHHAHDAYLNAVVGTALIKKYPKLESEFVYGDYKVYDVRKMIAKSEQEIGKATAKYFFYSNIMNFFKTEITLANGEIRKRPLIETNGETGEIVWDKGRDFATVRKVLSMPQVNIVKKTEVQTGGFSKESILPKRNSDKLIARKKDWDPKKYGGFDSPTVAYSVLVVAKVEKGKSKKLKSVKELLGITIMERSSFEKNPIDFLEAKGYKEVKKDLIIKLPKYSLFELENGRKRMLASAGELQKGNELALPSKYVNFLYLASHYEKLKGSPEDNEQKQLFVEQHKHYLDEIIEQISEFSKRVILADANLDKVLSAYNKHRDKPIREQAENIIHLFTLTNLGAPAAFKYFDTTIDRKRYTSTKEVLDATLIHQSITGLYETRIDLSQLGGDGGPAPAPGGTLNIEDEYRLHETSKEPDVSLGSTWLSDFPQAWAETGGMGLAVRQAPLIIPLKATSTPVSIKQYPMSQEARLGIKPHIQRLLDQGILVPCQSPWNTPLLPVKKPGTNDYRPVQDLREVNKRVEDIHPTVPNPYNLLSGLPPSHQWYTVLDLKDAFFCLRLHPTSQPLFAFEWRDPEMGISGQLTWTRLPQGFKNSPTLFNEALHRDLADFRIQHPDLILLQYVDDLLLAATSELDCQQGTRALLQTLGNLGYRASAKKAQICQKQVKYLGYLLKEGQRWLTEARKETVMGQPTPKTPRQLREFLGKAGFCRLFIPGFAEMAAPLYPLTKPGTLFNWGPDQQKAYQEIKQALLTAPALGLPDLTKPFELFVDEKQGYAKGVLTQKLGPWRRPVAYLSKKLDPVAAGWPPCLRMVAAIAVLTKDAGKLTMGQPLVILAPHAVEALVKQPPDRWLSNARMTHYQALLLDTDRVQFGPVVALNPATLLPLPEEGLQHNCLDILAEAHGTRPDLTDQPLPDADHTWYTDGSSLLQEGQRKAGAAVTTETEVIWAKALPAGTSAQRAELIALTQALKMAEGKKLNVYTDSRYAFATAHIHGEIYRRRGWLTSEGKEIKNKDEILALLKALFLPKRLSIIHCPGHQKGHSAEARGNRMADQAARKAAITETPDTSTLLIENSSPSGGSKRTADGSEFEAGKRTADGSEFEKRTADGSEFESPKKKAKVE

SEQ ID NO: 6486 - protein, 2110 aa, synthetic construct; identical to SEQ ID NO: 6485

SEQ ID NO: 6487 - protein, 2110 aa, synthetic construct
MPAAKRVKLDGGDKKYSIGLDIGTNSVGWAVITDEYKVPSKKFKVLGNTDRHSIKKNLIGALLFDSGETAEATRLKRTARRRYTRRKNRICYLQEIFSNEMAKVDDSFFHRLEESFLVEEDKKHERHPIFGNIVDEVAYHEKYPTIYHLRKKLVDSTDKADLRLIYLALAHMIKFRGHFLIEGDLNPDNSDVDKLFIQLVQTYNQLFEENPINASGVDAKAILSARLSKSRRLENLIAQLPGEKKNGLFGNLIALSLGLTPNFKSNFDLAEDAKLQLSKDTYDDDLDNLLAQIGDQYADLFLAAKNLSDAILLSDILRVNTEITKAPLSASMIKRYDEHHQDLTLLKALVRQQLPEKYKEIFFDQSKNGYAGYIDGGASQEEFYKFIKPILEKMDGTEELLVKLNREDLLRKQRTFDNGSIPHQIHLGELHAILRRQEDFYPFLKDNREKIEKILTFRIPYYVGPLARGNSRFAWMTRKSEETITPWNFEEVVDKGASAQSFIERMTNFDKNLPNEKVLPKHSLLYEYFTVYNELTKVKYVTEGMRKPAFLSGEQKKAIVDLLFKTNRKVTVKQLKEDYFKKIECFDSVEISGVEDRFNASLGTYHDLLKIIKDKDFLDNEENEDILEDIVLTLTLFEDREMIEERLKTYAHLFDDKVMKQLKRRRYTGWGRLSRKLINGIRDKQSGKTILDFLKSDGFANRNFMQLIHDDSLTFKEDIQKAQVSGQGDSLHEHIANLAGSPAIKKGILQTVKVVDELVKVMGRHKPENIVIEMARENQTTQKGQKNSRERMKRIEEGIKELGSQILKEHPVENTQLQNEKLYLYYLQNGRDMYVDQELDINRLSDYDVDHIVPQSFLKDDSIDNKVLTRSDKARGKSDNVPSEEVVKKMKNYWRQLLNAKLITQRKFDNLTKAERGGLSELDKAGFIKRQLVETRQITKHVAQILDSRMNTKYDENDKLIREVKVITLKSKLVSDFRKDFQFYKVREINNYHHAHDAYLNAVVGTALIKKYPKLESEFVYGDYKVYDVRKMIAKSEQEIGKATAKYFFYSNIMNFFKTEITLANGEIRKRPLIETNGETGEIVWDKGRDFATVRKVLSMPQVNIVKKTEVQTGGFSKESILPKRNSDKLIARKKDWDPKKYGGFDSPTVAYSVLVVAKVEKGKSKKLKSVKELLGITIMERSSFEKNPIDFLEAKGYKEVKKDLIIKLPKYSLFELENGRKRMLASAGELQKGNELALPSKYVNFLYLASHYEKLKGSPEDNEQKQLFVEQHKHYLDEIIEQISEFSKRVILADANLDKVLSAYNKHRDKPIREQAENIIHLFTLTNLGAPAAFKYFDTTIDRKRYTSTKEVLDATLIHQSITGLYETRIDLSQLGGDGGPAPAPGGVQEISDSRPMLHIYLNGRRFLGLLDTGADKTCIAGRDWPANWPIHQTESSLQGLGMACGVARSSQPLRWQHEDKSGIIHPFVIPTLPFTLWGRDIMKDIKVRLMTDSPDDSQDLMIGAIESNLFADQISWKSDQPVWLNQWPLKQEKLQALQQLVTEQLQLGHLEESNSPWNTPVFVIKKKSGKWRLLQDLRAVNATMHDMGALQPGLPSPVAVPKGWEIIIIDLQDCFFNIKLHPEDCKRFAFSVPSPNFKRPYQRFQWKVLPQGMKNSPTLCQKFVDKAILTVRDKYQDSYIVHYMDDILLAHPSRSIVDEILTSMIQALNKHGLVVSTEKIQKYDNLKYLGTHIQGDSVSYQKLQIRTDKLRTLNDFQKLLGNINWIRPFLKLTTGELKPLFEILNGDSNPISTRKLTPEACKALQLMNERLSTARVKRLDLSQPWSLCILKTEYTPTACLWQDGVVEWIHLPHISPKVITPYDIFCTQLIIKGRHRSKELFSKDPDYIVVPYTKVQFDLLLQEKEDWPISLLGFLGEVHFHLPKDPLLTFTLQTAIIFPHMTSTTPLEKGIVIFTDGSANGRSVTYIQGREPIIKENTQNTAQQAEIVAVITAFEEVSQPFNLYTDSKYVTGLFPEIETATLSPRTKIYTELKHLQRLIHKRQEKFYIGHIRGHTGLPGPLAQGNAYADSLTRILTAAGKRTADGSEFEKRTADGSEFESPKKKAKVE

SEQ ID NO: 6488 - protein, 2084 aa, synthetic construct
MPAAKRVKLDGGDKKYSIGLDIGTNSVGWAVITDEYKVPSKKFKVLGNTDRHSIKKNLIGALLFDSGETAEATRLKRTARRRYTRRKNRICYLQEIFSNEMAKVDDSFFHRLEESFLVEEDKKHERHPIFGNIVDEVAYHEKYPTIYHLRKKLVDSTDKADLRLIYLALAHMIKFRGHFLIEGDLNPDNSDVDKLFIQLVQTYNQLFEENPINASGVDAKAILSARLSKSRRLENLIAQLPGEKKNGLFGNLIALSLGLTPNFKSNFDLAEDAKLQLSKDTYDDDLDNLLAQIGDQYADLFLAAKNLSDAILLSDILRVNTEITKAPLSASMIKRYDEHHQDLTLLKALVRQQLPEKYKEIFFDQSKNGYAGYIDGGASQEEFYKFIKPILEKMDGTEELLVKLNREDLLRKQRTFDNGSIPHQIHLGELHAILRRQEDFYPFLKDNREKIEKILTFRIPYYVGPLARGNSRFAWMTRKSEETITPWNFEEVVDKGASAQSFIERMTNFDKNLPNEKVLPKHSLLYEYFTVYNELTKVKYVTEGMRKPAFLSGEQKKAIVDLLFKTNRKVTVKQLKEDYFKKIECFDSVEISGVEDRFNASLGTYHDLLKIIKDKDFLDNEENEDILEDIVLTLTLFEDREMIEERLKTYAHLFDDKVMKQLKRRRYTGWGRLSRKLINGIRDKQSGKTILDFLKSDGFANRNFMQLIHDDSLTFKEDIQKAQVSGQGDSLHEHIANLAGSPAIKKGILQTVKVVDELVKVMGRHKPENIVIEMARENQTTQKGQKNSRERMKRIEEGIKELGSQILKEHPVENTQLQNEKLYLYYLQNGRDMYVDQELDINRLSDYDVDHIVPQSFLKDDSIDNKVLTRSDKARGKSDNVPSEEVVKKMKNYWRQLLNAKLITQRKFDNLTKAERGGLSELDKAGFIKRQLVETRQITKHVAQILDSRMNTKYDENDKLIREVKVITLKSKLVSDFRKDFQFYKVREINNYHHAHDAYLNAVVGTALIKKYPKLESEFVYGDYKVYDVRKMIAKSEQEIGKATAKYFFYSNIMNFFKTEITLANGEIRKRPLIETNGETGEIVWDKGRDFATVRKVLSMPQVNIVKKTEVQTGGFSKESILPKRNSDKLIARKKDWDPKKYGGFDSPTVAYSVLVVAKVEKGKSKKLKSVKELLGITIMERSSFEKNPIDFLEAKGYKEVKKDLIIKLPKYSLFELENGRKRMLASAGELQKGNELALPSKYVNFLYLASHYEKLKGSPEDNEQKQLFVEQHKHYLDEIIEQISEFSKRVILADANLDKVLSAYNKHRDKPIREQAENIIHLFTLTNLGAPAAFKYFDTTIDRKRYTSTKEVLDATLIHQSITGLYETRIDLSQLGGDGGPAPAPGGTLQLDDEYRLYSPLVKPDQNIQFWLEQFPQAWAETAGMGLAKQVPPQVIQLKASATPVSVRQYPLSKEAQEGIRPHVQRLIQQGILVPVQSPWNTPLLPVRKPGTNDYRPVQDLREVNKRVQDIHPTVPNPYNLLCALPPQRSWYTVLDLKDAFFCLRLHPTSQPLFAFEWRDPGTGRTGQLTWTRLPQGFKNSPTIFDEALHRDLANFRIQHPQVTLLQYVDDLLLAGATKQDCLEGTKALLLELSDLGYRASAKKAQICRREVTYLGYSLRDGQRWLTEARKKTVVQIPAPTTAKQVREFLGTAGFCRLWIPGFATLAAPLYPLTKEKGEFSWAPEHQKAFDAIKKALLSAPALALPDVTKPFTLYVDERKGVARGVLTQTLGPWRRPVAYLSKKLDPVASGWPVCLKAIAAVAILVKDADKLTLGQNITVIAPHALENIVRQPPDRWMTNARMTHYQSLLLTERVTFAPPAALNPATLLPEETDEPVTHDCHQLLIEETGVRKDLTDIPLTGEVLTWFTDGSSYVVEGKRMAGAAVVDGTRTIWASSLPEGTSAQKAELMALTQALRLAEGKSINIYTDSRYAFATAHVHGAIYKQRGLLTSAGREIKNKEEILSLLEALHLPKRLAIIHCPGHQKAKDPISRGNQMADRVAKQAAQGVNLLAGKRTADGSEFEKRTADGSEFESPKKKAKVE

SEQ ID NO: 6489 - protein, 2081 aa, synthetic construct
MPAAKRVKLDGGDKKYSIGLDIGTNSVGWAVITDEYKVPSKKFKVLGNTDRHSIKKNLIGALLFDSGETAEATRLKRTARRRYTRRKNRICYLQEIFSNEMAKVDDSFFHRLEESFLVEEDKKHERHPIFGNIVDEVAYHEKYPTIYHLRKKLVDSTDKADLRLIYLALAHMIKFRGHFLIEGDLNPDNSDVDKLFIQLVQTYNQLFEENPINASGVDAKAILSARLSKSRRLENLIAQLPGEKKNGLFGNLIALSLGLTPNFKSNFDLAEDAKLQLSKDTYDDDLDNLLAQIGDQYADLFLAAKNLSDAILLSDILRVNTEITKAPLSASMIKRYDEHHQDLTLLKALVRQQLPEKYKEIFFDQSKNGYAGYIDGGASQEEFYKFIKPILEKMDGTEELLVKLNREDLLRKQRTFDNGSIPHQIHLGELHAILRRQEDFYPFLKDNREKIEKILTFRIPYYVGPLARGNSRFAWMTRKSEETITPWNFEEVVDKGASAQSFIERMTNFDKNLPNEKVLPKHSLLYEYFTVYNELTKVKYVTEGMRKPAFLSGEQKKAIVDLLFKTNRKVTVKQLKEDYFKKIECFDSVEISGVEDRFNASLGTYHDLLKIIKDKDFLDNEENEDILEDIVLTLTLFEDREMIEERLKTYAHLFDDKVMKQLKRRRYTGWGRLSRKLINGIRDKQSGKTILDFLKSDGFANRNFMQLIHDDSLTFKEDIQKAQVSGQGDSLHEHIANLAGSPAIKKGILQTVKVVDELVKVMGRHKPENIVIEMARENQTTQKGQKNSRERMKRIEEGIKELGSQILKEHPVENTQLQNEKLYLYYLQNGRDMYVDQELDINRLSDYDVDHIVPQSFLKDDSIDNKVLTRSDKARGKSDNVPSEEVVKKMKNYWRQLLNAKLITQRKFDNLTKAERGGLSELDKAGFIKRQLVETRQITKHVAQILDSRMNTKYDENDKLIREVKVITLKSKLVSDFRKDFQFYKVREINNYHHAHDAYLNAVVGTALIKKYPKLESEFVYGDYKVYDVRKMIAKSEQEIGKATAKYFFYSNIMNFFKTEITLANGEIRKRPLIETNGETGEIVWDKGRDFATVRKVLSMPQVNIVKKTEVQTGGFSKESILPKRNSDKLIARKKDWDPKKYGGFDSPTVAYSVLVVAKVEKGKSKKLKSVKELLGITIMERSSFEKNPIDFLEAKGYKEVKKDLIIKLPKYSLFELENGRKRMLASAGELQKGNELALPSKYVNFLYLASHYEKLKGSPEDNEQKQLFVEQHKHYLDEIIEQISEFSKRVILADANLDKVLSAYNKHRDKPIREQAENIIHLFTLTNLGAPAAFKYFDTTIDRKRYTSTKEVLDATLIHQSITGLYETRIDLSQLGGDGGPAPAPGGIPWLMKKPLQLTTLVPLQEYEERLLKQTMLTGSYKEKLQSLFLKYDALWQHWENQVGHRRIKPHHIATGTVNPRPQKQYPINPKAKASIQTVINDLLKQGVLIQQNSIMNTPVYPVPKPDGKWRMVLDYREVNKTIPLIAAQNQHSAGILSSIFRGKYKTTLDLSNGFWAHSITPESYWLTAFTWLGQQYCWTRLPQGFLNSPALFNADVVDLLKEVPNVQVYVDDIYISHDDPREHLEQLEKVFSLLLNAGYVVSLKKSEIAQHEVEFLGFNITKEGRGLTETFKQKLLNITPPRDLKQLQSILGKLNFARNFIPNFSELVKPLYNIIATAPGKYITWTTDNSQQLQNIISMLNSAENLEERNPEVRLIMKVNTSPSAGYIRFYNEFAKRPIMYLNYVYTKAEVKFTNTEKLLTTIHKGLIKALDLGMGQEILVYSPIVSMTKIQKTPLPERKALPIRWITWMSYLEDPRIQFHYDKTLPELQQVPTVTDDIIAKIKHPSEFSMVFYTDGSAIKHPNVNKSHNAGMGIAQVQFKPEFTVINTWSIPLGDHTAQLAEVAAVEFACKKALKIDGPVLIVTDSFYVAESVNKELPYWQSNGFFNNKKKPLKHVSKWKSIADCIQLKPDIIIIHEKGHQPTASTFHTEGNNLADKLATQGSYVVNAGKRTADGSEFEKRTADGSEFESPKKKAKVE

SEQ ID NO: 6490 - protein, 2170 aa, synthetic construct
MPAAKRVKLDGGDKKYSIGLDIGTNSVGWAVITDEYKVPSKKFKVLGNTDRHSIKKNLIGALLFDSGETAEATRLKRTARRRYTRRKNRICYLQEIFSNEMAKVDDSFFHRLEESFLVEEDKKHERHPIFGNIVDEVAYHEKYPTIYHLRKKLVDSTDKADLRLIYLALAHMIKFRGHFLIEGDLNPDNSDVDKLFIQLVQTYNQLFEENPINASGVDAKAILSARLSKSRRLENLIAQLPGEKKNGLFGNLIALSLGLTPNFKSNFDLAEDAKLQLSKDTYDDDLDNLLAQIGDQYADLFLAAKNLSDAILLSDILRVNTEITKAPLSASMIKRYDEHHQDLTLLKALVRQQLPEKYKEIFFDQSKNGYAGYIDGGASQEEFYKFIKPILEKMDGTEELLVKLNREDLLRKQRTFDNGSIPHQIHLGELHAILRRQEDFYPFLKDNREKIEKILTFRIPYYVGPLARGNSRFAWMTRKSEETITPWNFEEVVDKGASAQSFIERMTNFDKNLPNEKVLPKHSLLYEYFTVYNELTKVKYVTEGMRKPAFLSGEQKKAIVDLLFKTNRKVTVKQLKEDYFKKIECFDSVEISGVEDRFNASLGTYHDLLKIIKDKDFLDNEENEDILEDIVLTLTLFEDREMIEERLKTYAHLFDDKVMKQLKRRRYTGWGRLSRKLINGIRDKQSGKTILDFLKSDGFANRNFMQLIHDDSLTFKEDIQKAQVSGQGDSLHEHIANLAGSPAIKKGILQTVKVVDELVKVMGRHKPENIVIEMARENQTTQKGQKNSRERMKRIEEGIKELGSQILKEHPVENTQLQNEKLYLYYLQNGRDMYVDQELDINRLSDYDVDHIVPQSFLKDDSIDNKVLTRSDKARGKSDNVPSEEVVKKMKNYWRQLLNAKLITQRKFDNLTKAERGGLSELDKAGFIKRQLVETRQITKHVAQILDSRMNTKYDENDKLIREVKVITLKSKLVSDFRKDFQFYKVREINNYHHAHDAYLNAVVGTALIKKYPKLESEFVYGDYKVYDVRKMIAKSEQEIGKATAKYFFYSNIMNFFKTEITLANGEIRKRPLIETNGETGEIVWDKGRDFATVRKVLSMPQVNIVKKTEVQTGGFSKESILPKRNSDKLIARKKDWDPKKYGGFDSPTVAYSVLVVAKVEKGKSKKLKSVKELLGITIMERSSFEKNPIDFLEAKGYKEVKKDLIIKLPKYSLFELENGRKRMLASAGELQKGNELALPSKYVNFLYLASHYEKLKGSPEDNEQKQLFVEQHKHYLDEIIEQISEFSKRVILADANLDKVLSAYNKHRDKPIREQAENIIHLFTLTNLGAPAAFKYFDTTIDRKRYTSTKEVLDATLIHQSITGLYETRIDLSQLGGDGGPAPAPGGMDPLQLLQPLEAEIKGTKLKAHWNSGATITCVPQAFLEEEVPIKNIWIKTIHGEKEQPVYYLTFKIQGRKVEAEVISSPYDYILVSPSDIPWLMKKPLQLTTLVPLQEYEERLLKQTMLTGSYKEKLQSLFLKYDALWQHWENQVGHRRIKPHHIATGTVNPRPQKQYPINPKAKASIQTVINDLLKQGVLIQQNSIMNTPVYPVPKPDGKWRMVLDYREVNKTIPLIAAQNQHSAGILSSIFRGKYKTTLDLSNGFWAHSITPESYWLTAFTWLGQQYCWTRLPQGFLNSPALFNADVVDLLKEVPNVQVYVDDIYISHDDPREHLEQLEKVFSLLLNAGYVVSLKKSEIAQHEVEFLGFNITKEGRGLTETFKQKLLNITPPRDLKQLQSILGKLNFARNFIPNFSELVKPLYNIIATAPGKYITWTTDNSQQLQNIISMLNSAENLEERNPEVRLIMKVNTSPSAGYIRFYNEFAKRPIMYLNYVYTKAEVKFTNTEKLLTTIHKGLIKALDLGMGQEILVYSPIVSMTKIQKTPLPERKALPIRWITWMSYLEDPRIQFHYDKTLPELQQVPTVTDDIIAKIKHPSEFSMVFYTDGSAIKHPNVNKSHNAGMGIAQVQFKPEFTVINTWSIPLGDHTAQLAEVAAVEFACKKALKIDGPVLIVTDSFYVAESVNKELPYWQSNGFFNNKKKPLKHVSKWKSIADCIQLKPDIIIIHEKGHQPTASTFHTEGNNLADKLATQGSYVVNAGKRTADGSEFEKRTADGSEFESPKKKAKVE

SEQ ID NO: 6491 - protein, 2090 aa, synthetic construct
MPAAKRVKLDGGDKKYSIGLDIGTNSVGWAVITDEYKVPSKKFKVLGNTDRHSIKKNLIGALLFDSGETAEATRLKRTARRRYTRRKNRICYLQEIFSNEMAKVDDSFFHRLEESFLVEEDKKHERHPIFGNIVDEVAYHEKYPTIYHLRKKLVDSTDKADLRLIYLALAHMIKFRGHFLIEGDLNPDNSDVDKLFIQLVQTYNQLFEENPINASGVDAKAILSARLSKSRRLENLIAQLPGEKKNGLFGNLIALSLGLTPNFKSNFDLAEDAKLQLSKDTYDDDLDNLLAQIGDQYADLFLAAKNLSDAILLSDILRVNTEITKAPLSASMIKRYDEHHQDLTLLKALVRQQLPEKYKEIFFDQSKNGYAGYIDGGASQEEFYKFIKPILEKMDGTEELLVKLNREDLLRKQRTFDNGSIPHQIHLGELHAILRRQEDFYPFLKDNREKIEKILTFRIPYYVGPLARGNSRFAWMTRKSEETITPWNFEEVVDKGASAQSFIERMTNFDKNLPNEKVLPKHSLLYEYFTVYNELTKVKYVTEGMRKPAFLSGEQKKAIVDLLFKTNRKVTVKQLKEDYFKKIECFDSVEISGVEDRFNASLGTYHDLLKIIKDKDFLDNEENEDILEDIVLTLTLFEDREMIEERLKTYAHLFDDKVMKQLKRRRYTGWGRLSRKLINGIRDKQSGKTILDFLKSDGFANRNFMQLIHDDSLTFKEDIQKAQVSGQGDSLHEHIANLAGSPAIKKGILQTVKVVDELVKVMGRHKPENIVIEMARENQTTQKGQKNSRERMKRIEEGIKELGSQILKEHPVENTQLQNEKLYLYYLQNGRDMYVDQELDINRLSDYDVDHIVPQSFLKDDSIDNKVLTRSDKARGKSDNVPSEEVVKKMKNYWRQLLNAKLITQRKFDNLTKAERGGLSELDKAGFIKRQLVETRQITKHVAQILDSRMNTKYDENDKLIREVKVITLKSKLVSDFRKDFQFYKVREINNYHHAHDAYLNAVVGTALIKKYPKLESEFVYGDYKVYDVRKMIAKSEQEIGKATAKYFFYSNIMNFFKTEITLANGEIRKRPLIETNGETGEIVWDKGRDFATVRKVLSMPQVNIVKKTEVQTGGFSKESILPKRNSDKLIARKKDWDPKKYGGFDSPTVAYSVLVVAKVEKGKSKKLKSVKELLGITIMERSSFEKNPIDFLEAKGYKEVKKDLIIKLPKYSLFELENGRKRMLASAGELQKGNELALPSKYVNFLYLASHYEKLKGSPEDNEQKQLFVEQHKHYLDEIIEQISEFSKRVILADANLDKVLSAYNKHRDKPIREQAENIIHLFTLTNLGAPAAFKYFDTTIDRKRYTSTKEVLDATLIHQSITGLYETRIDLSQLGGDGGPAPAPGGTLNIEDEYRLHETSKEPDVPLGSTWLSDFPQAWAETGGMGLAVRQAPLIIPLKATSTPVSIKQYPMSQEARLGIKPHIQRLLDQGILVPCQSPWNTPLLPVKKPGTNDYRPVQDLREVNKRVEDIHPTVPNPYNLLSGLPPSHQWYTVLDLKDAFFCLRLHPTSQPLFAFEWRDPEMGISGQLTWTRLPQGFKNSPTLFNEALHRDLADFRIQHPDLILLQYVDDLLLAATSEQDCQRGTRALLQTLGNLGYRASAKKAQICQKQVKYLGYLLKEGQRWLTEARKETVMGQPTPKTPRQLREFLGKAGFCRLFIPGFAEMAAPLYPLTKPGTLFNWGPDQQKAYQEIKQALLTAPALGLPDLTKPFELFVDEKQGYAKGVLTQKLGPWRRPVAYLSKKLDPVAAGWPPCLRMVAAIAVLTKDAGKLTMGQPLVILAPHAVEALVKQPPDRWLSNARMTHYQAMLLDTDRVQFGPVVALNPATLLPLPEKEAPHDCLEILAETHGTRPDLTDQPIPDADYTWYTDGSSFLQEGQRRAGAAVTTETEVIWARALPAGTSAQRAELIALTQALKMAEGKKLNVYTDSRYAFATAHVHGEIYRRRGWLTSEGREIKNKNEILALLKALFLPKRLSIIHCPGHQKGNSAEARGNRMADQAAREAAMKAVLETSTLLAGKRTADGSEFEKRTADGSEFESPKKKAKVE

SEQ ID NO: 6492 - protein, 2094 aa, synthetic construct
MPAAKRVKLDGGDKKYSIGLDIGTNSVGWAVITDEYKVPSKKFKVLGNTDRHSIKKNLIGALLFDSGETAEATRLKRTARRRYTRRKNRICYLQEIFSNEMAKVDDSFFHRLEESFLVEEDKKHERHPIFGNIVDEVAYHEKYPTIYHLRKKLVDSTDKADLRLIYLALAHMIKFRGHFLIEGDLNPDNSDVDKLFIQLVQTYNQLFEENPINASGVDAKAILSARLSKSRRLENLIAQLPGEKKNGLFGNLIALSLGLTPNFKSNFDLAEDAKLQLSKDTYDDDLDNLLAQIGDQYADLFLAAKNLSDAILLSDILRVNTEITKAPLSASMIKRYDEHHQDLTLLKALVRQQLPEKYKEIFFDQSKNGYAGYIDGGASQEEFYKFIKPILEKMDGTEELLVKLNREDLLRKQRTFDNGSIPHQIHLGELHAILRRQEDFYPFLKDNREKIEKILTFRIPYYVGPLARGNSRFAWMTRKSEETITPWNFEEVVDKGASAQSFIERMTNFDKNLPNEKVLPKHSLLYEYFTVYNELTKVKYVTEGMRKPAFLSGEQKKAIVDLLFKTNRKVTVKQLKEDYFKKIECFDSVEISGVEDRFNASLGTYHDLLKIIKDKDFLDNEENEDILEDIVLTLTLFEDREMIEERLKTYAHLFDDKVMKQLKRRRYTGWGRLSRKLINGIRDKQSGKTILDFLKSDGFANRNFMQLIHDDSLTFKEDIQKAQVSGQGDSLHEHIANLAGSPAIKKGILQTVKVVDELVKVMGRHKPENIVIEMARENQTTQKGQKNSRERMKRIEEGIKELGSQILKEHPVENTQLQNEKLYLYYLQNGRDMYVDQELDINRLSDYDVDHIVPQSFLKDDSIDNKVLTRSDKARGKSDNVPSEEVVKKMKNYWRQLLNAKLITQRKFDNLTKAERGGLSELDKAGFIKRQLVETRQITKHVAQILDSRMNTKYDENDKLIREVKVITLKSKLVSDFRKDFQFYKVREINNYHHAHDAYLNAVVGTALIKKYPKLESEFVYGDYKVYDVRKMIAKSEQEIGKATAKYFFYSNIMNFFKTEITLANGEIRKRPLIETNGETGEIVWDKGRDFATVRKVLSMPQVNIVKKTEVQTGGFSKESILPKRNSDKLIARKKDWDPKKYGGFDSPTVAYSVLVVAKVEKGKSKKLKSVKELLGITIMERSSFEKNPIDFLEAKGYKEVKKDLIIKLPKYSLFELENGRKRMLASAGELQKGNELALPSKYVNFLYLASHYEKLKGSPEDNEQKQLFVEQHKHYLDEIIEQISEFSKRVILADANLDKVLSAYNKHRDKPIREQAENIIHLFTLTNLGAPAAFKYFDTTIDRKRYTSTKEVLDATLIHQSITGLYETRIDLSQLGGDGGPAPAPAPGGTAPLEEEYRLFLEAPIQNVTLLEQWKREIPKVWAEINPPGLASTQAPIHVQLLSTALPVRVRQYPITLEAKRSLRETIRKFRAAGILRPVHSPWNTPLLPVRKSGTSEYRMVQDLREVNKRVETIHPTVPNPYTLLSLLPPDRIWYSVLDLKDAFFCIPLAPESQLIFAFEWADAEEGESGQLTWTRLPQGFKNSPTLFNEALNRDLQGFRLDHPSVSLLQYVDDLLIAADTQAACLSATRDLLMTLAELGYRVSGKKAQLCQEEVTYLGFKIHKGSRSLSNSRTQAILQIPVPKTKRQVREFLGTIGYCRLWIPGFAELAQPLYAATRPGNDPLVWGEKEEEAFQSLKLALTQPPALALPSLDKPFQLFVEETSGAAKGVLTQALGPWKRPVAYLSKRLDPVAAGWPRCLRAIAAAALLTREASKLTFGQDIEITSSHNLESLLRSPPDKWLTNARITQYQVLLLDPPRVRFKQTAALNPATLLPETDDTLPIHHCLDTLDSLTSTRPDLTDQPLAQAEATLFTDGSSYIRDGKRYAGAAVVTLDSVIWAEPLPIGTSAQKAELIALTKALEWSKDKSVNIYTDSRYAFATLHVHGMIYRERGWLTAGGKAIKNAPEILALLTAVWLPKRVAVMHCKGHQKDDAPTSTGNRRADEVAREVAIRPLSTQATISAGKRTADGSEFEKRTADGSEFESPKKKAKVE

SEQ ID NO: 6493 - protein, 2098 aa, synthetic construct
MPAAKRVKLDGGDKKYSIGLDIGTNSVGWAVITDEYKVPSKKFKVLGNTDRHSIKKNLIGALLFDSGETAEATRLKRTARRRYTRRKNRICYLQEIFSNEMAKVDDSFFHRLEESFLVEEDKKHERHPIFGNIVDEVAYHEKYPTIYHLRKKLVDSTDKADLRLIYLALAHMIKFRGHFLIEGDLNPDNSDVDKLFIQLVQTYNQLFEENPINASGVDAKAILSARLSKSRRLENLIAQLPGEKKNGLFGNLIALSLGLTPNFKSNFDLAEDAKLQLSKDTYDDDLDNLLAQIGDQYADLFLAAKNLSDAILLSDILRVNTEITKAPLSASMIKRYDEHHQDLTLLKALVRQQLPEKYKEIFFDQSKNGYAGYIDGGASQEEFYKFIKPILEKMDGTEELLVKLNREDLLRKQRTFDNGSIPHQIHLGELHAILRRQEDFYPFLKDNREKIEKILTFRIPYYVGPLARGNSRFAWMTRKSEETITPWNFEEVVDKGASAQSFIERMTNFDKNLPNEKVLPKHSLLYEYFTVYNELTKVKYVTEGMRKPAFLSGEQKKAIVDLLFKTNRKVTVKQLKEDYFKKIECFDSVEISGVEDRFNASLGTYHDLLKIIKDKDFLDNEENEDILEDIVLTLTLFEDREMIEERLKTYAHLFDDKVMKQLKRRRYTGWGRLSRKLINGIRDKQSGKTILDFLKSDGFANRNFMQLIHDDSLTFKEDIQKAQVSGQGDSLHEHIANLAGSPAIKKGILQTVKVVDELVKVMGRHKPENIVIEMARENQTTQKGQKNSRERMKRIEEGIKELGSQILKEHPVENTQLQNEKLYLYYLQNGRDMYVDQELDINRLSDYDVDHIVPQSFLKDDSIDNKVLTRSDKARGKSDNVPSEEVVKKMKNYWRQLLNAKLITQRKFDNLTKAERGGLSELDKAGFIKRQLVETRQITKHVAQILDSRMNTKYDENDKLIREVKVITLKSKLVSDFRKDFQFYKVREINNYHHAHDAYLNAVVGTALIKKYPKLESEFVYGDYKVYDVRKMIAKSEQEIGKATAKYFFYSNIMNFFKTEITLANGEIRKRPLIETNGETGEIVWDKGRDFATVRKVLSMPQVNIVKKTEVQTGGFSKESILPKRNSDKLIARKKDWDPKKYGGFDSPTVAYSVLVVAKVEKGKSKKLKSVKELLGITIMERSSFEKNPIDFLEAKGYKEVKKDLIIKLPKYSLFELENGRKRMLASAGELQKGNELALPSKYVNFLYLASHYEKLKGSPEDNEQKQLFVEQHKHYLDEIIEQISEFSKRVILADANLDKVLSAYNKHRDKPIREQAENIIHLFTLTNLGAPAAFKYFDTTIDRKRYTSTKEVLDATLIHQSITGLYETRIDLSQLGGDGGPAPAPAPGGTVSLQDEHRLFDIPVTTSLPDVWLQDFPQAWAETGGLGRAKCQAPIIIDLKPTAVPVSIKQYPMSLEAHMGIRQHIIKFLELGVLRPCRSPWNTPLLPVKKPGTQDYRPVQDLREINKRTVDIHPTVPNPYNLLSTLKPDYSWYTVLDLKDAFFCLPLAPQSQELFAFEWKDPERGISGQLTWTRLPQGFKNSPTLFNEALHRDLTDFRTQHPEVTLLQYVDDLLLAAPTKKACTQGTRHLLQELGEKGYRASAKKAQICQTKVTYLGYILSEGKRWLTPGRIETVARIPPPRNPREVREFLGTAGFCRLWIPGFAELAAPLYALTKPSTPFTWQTEHQLAFEALKKALLSAPALGLPDTSKPFTLFLDERQGIAKGVLTQKLGPWKRPVAYLSKKLDPVAAGWPPCLRIMAATAMLVKDSAKLTLGQPLTVITPHTLEAIVRQPPDRWITNARLTHYQALLLDTDRVQFGPPVTLNPATLLPVPENQPSPHDCRQVLAETHGTREDLKDQELPDADHTWYTDGSSYLDSGTRRAGAAVVDGHNTIWAQSLPPGTSAQKAELIALTKALELSKGKKANIYTDSRYAFATAHTHGSIYERRGWLTSEGKEIKNKAEIIALLKALFLPQEVAIIHCPGHQKGQDPVAVGNRQADRVARQAAMAEVLTLATEPDNTSHITAGKRTADGSEFEKRTADGSEFESPKKKAKVE

SEQ ID NO: 6494 - protein, 2169 aa, synthetic construct
MPAAKRVKLDGGDKKYSIGLDIGTNSVGWAVITDEYKVPSKKFKVLGNTDRHSIKKNLIGALLFDSGETAEATRLKRTARRRYTRRKNRICYLQEIFSNEMAKVDDSFFHRLEESFLVEEDKKHERHPIFGNIVDEVAYHEKYPTIYHLRKKLVDSTDKADLRLIYLALAHMIKFRGHFLIEGDLNPDNSDVDKLFIQLVQTYNQLFEENPINASGVDAKAILSARLSKSRRLENLIAQLPGEKKNGLFGNLIALSLGLTPNFKSNFDLAEDAKLQLSKDTYDDDLDNLLAQIGDQYADLFLAAKNLSDAILLSDILRVNTEITKAPLSASMIKRYDEHHQDLTLLKALVRQQLPEKYKEIFFDQSKNGYAGYIDGGASQEEFYKFIKPILEKMDGTEELLVKLNREDLLRKQRTFDNGSIPHQIHLGELHAILRRQEDFYPFLKDNREKIEKILTFRIPYYVGPLARGNSRFAWMTRKSEETITPWNFEEVVDKGASAQSFIERMTNFDKNLPNEKVLPKHSLLYEYFTVYNELTKVKYVTEGMRKPAFLSGEQKKAIVDLLFKTNRKVTVKQLKEDYFKKIECFDSVEISGVEDRFNASLGTYHDLLKIIKDKDFLDNEENEDILEDIVLTLTLFEDREMIEERLKTYAHLFDDKVMKQLKRRRYTGWGRLSRKLINGIRDKQSGKTILDFLKSDGFANRNFMQLIHDDSLTFKEDIQKAQVSGQGDSLHEHIANLAGSPAIKKGILQTVKVVDELVKVMGRHKPENIVIEMARENQTTQKGQKNSRERMKRIEEGIKELGSQILKEHPVENTQLQNEKLYLYYLQNGRDMYVDQELDINRLSDYDVDHIVPQSFLKDDSIDNKVLTRSDKARGKSDNVPSEEVVKKMKNYWRQLLNAKLITQRKFDNLTKAERGGLSELDKAGFIKRQLVETRQITKHVAQILDSRMNTKYDENDKLIREVKVITLKSKLVSDFRKDFQFYKVREINNYHHAHDAYLNAVVGTALIKKYPKLESEFVYGDYKVYDVRKMIAKSEQEIGKATAKYFFYSNIMNFFKTEITLANGEIRKRPLIETNGETGEIVWDKGRDFATVRKVLSMPQVNIVKKTEVQTGGFSKESILPKRNSDKLIARKKDWDPKKYGGFDSPTVAYSVLVVAKVEKGKSKKLKSVKELLGITIMERSSFEKNPIDFLEAKGYKEVKKDLIIKLPKYSLFELENGRKRMLASAGELQKGNELALPSKYVNFLYLASHYEKLKGSPEDNEQKQLFVEQHKHYLDEIIEQISEFSKRVILADANLDKVLSAYNKHRDKPIREQAENIIHLFTLTNLGAPAAFKYFDTTIDRKRYTSTKEVLDATLIHQSITGLYETRIDLSQLGGDGGPAPAPAPGGMDLLKPLTVERKGVKIKGYWNSQADITCVPKDLLQGEEPVRQQNVTTIHGTQEGDVYYVNLKIDGRRINTEVIGTTLDYAIITPGDVPWILKKPLELTIKLDLEEQQGTLLNNSILSKKGKEELKQLFEKYSALWQSWENQVGHRRIRPHKIATGTVKPTPQKQYHINPKAKPDIQIVINDLLKQGVLIQKESTMNTPVYPVPKPNGRWRMVLDYRAVNKVTPLIAVQNQHSYGILGSLFKGRYKTTIDLSNGFWAHPIVPEDYWITAFTWQGKQYCWTVLPQGFLNSPGLFNGDVVDLLQGIPNVEVYVDDVYISHDSEKEHLEYLDILFNRLKEAGYIISLKKSNIANSIVDFLGFQITNEGRGLTDTFKEKLENITAPTTLKQLQSILGLLNFARNFIPDFTELIAPLYALIPKSPKNYVPWQIEHSTTLETLITKLNGAEYLQGRKGDKTLIMKVNASYTTGYIRYYNEGEKKPISYVSIVFSKTELKFTELEKLLTTVHKGLLKALDLSMGQNIHVYSPIVSMQNIQKTPQTAKKALASRWLSWLSYLEDPRIRFFYDPQMPALKDLPAVDTGKDNKKHPSNFQHIFYTDGSAITSPTKEGHLNAGMGIVYFINKDGNLQKQQEWSISLGNHTAQFAEIAAFEFALKKCLPLGGNILVVTDSNYVAKAYNEELDVWASNGFVNNRKKPLKHISKWKSVADLKRLRPDVVVTHEPGHQKLDSSPHAYGNNLADQLATQASFKVHAGKRTADGSEFEKRTADGSEFESPKKKAKVE

SEQ ID NO: 6495 - protein, 2091 aa, synthetic construct
MPAAKRVKLDGGDKKYSIGLDIGTNSVGWAVITDEYKVPSKKFKVLGNTDRHSIKKNLIGALLFDSGETAEATRLKRTARRRYTRRKNRICYLQEIFSNEMAKVDDSFFHRLEESFLVEEDKKHERHPIFGNIVDEVAYHEKYPTIYHLRKKLVDSTDKADLRLIYLALAHMIKFRGHFLIEGDLNPDNSDVDKLFIQLVQTYNQLFEENPINASGVDAKAILSARLSKSRRLENLIAQLPGEKKNGLFGNLIALSLGLTPNFKSNFDLAEDAKLQLSKDTYDDDLDNLLAQIGDQYADLFLAAKNLSDAILLSDILRVNTEITKAPLSASMIKRYDEHHQDLTLLKALVRQQLPEKYKEIFFDQSKNGYAGYIDGGASQEEFYKFIKPILEKMDGTEELLVKLNREDLLRKQRTFDNGSIPHQIHLGELHAILRRQEDFYPFLKDNREKIEKILTFRIPYYVGPLARGNSRFAWMTRKSEETITPWNFEEVVDKGASAQSFIERMTNFDKNLPNEKVLPKHSLLYEYFTVYNELTKVKYVTEGMRKPAFLSGEQKKAIVDLLFKTNRKVTVKQLKEDYFKKIECFDSVEISGVEDRFNASLGTYHDLLKIIKDKDFLDNEENEDILEDIVLTLTLFEDREMIEERLKTYAHLFDDKVMKQLKRRRYTGWGRLSRKLINGIRDKQSGKTILDFLKSDGFANRNFMQLIHDDSLTFKEDIQKAQVSGQGDSLHEHIANLAGSPAIKKGILQTVKVVDELVKVMGRHKPENIVIEMARENQTTQKGQKNSRERMKRIEEGIKELGSQILKEHPVENTQLQNEKLYLYYLQNGRDMYVDQELDINRLSDYDVDHIVPQSFLKDDSIDNKVLTRSDKARGKSDNVPSEEVVKKMKNYWRQLLNAKLITQRKFDNLTKAERGGLSELDKAGFIKRQLVETRQITKHVAQILDSRMNTKYDENDKLIREVKVITLKSKLVSDFRKDFQFYKVREINNYHHAHDAYLNAVVGTALIKKYPKLESEFVYGDYKVYDVRKMIAKSEQEIGKATAKYFFYSNIMNFFKTEITLANGEIRKRPLIETNGETGEIVWDKGRDFATVRKVLSMPQVNIVKKTEVQTGGFSKESILPKRNSDKLIARKKDWDPKKYGGFDSPTVAYSVLVVAKVEKGKSKKLKSVKELLGITIMERSSFEKNPIDFLEAKGYKEVKKDLIIKLPKYSLFELENGRKRMLASAGELQKGNELALPSKYVNFLYLASHYEKLKGSPEDNEQKQLFVEQHKHYLDEIIEQISEFSKRVILADANLDKVLSAYNKHRDKPIREQAENIIHLFTLTNLGAPAAFKYFDTTIDRKRYTSTKEVLDATLIHQSITGLYETRIDLSQLGGDGGPAPAPAPGGTLQLEEEYRLFEPESTQKQEMDIWLKNFPQAWAETGGMGTAHCQAPVLIQLKATATPISIRQYPMPHEAYQGIKPHIRRMLDQGILKPCQSPWNTPLLPVKKPGTEDYRPVQDLREVNKRVEDIHPTVPNPYNLLSTLPPSHPWYTVLDLKDAFFCLRLHSESQLLFAFEWRDPEIGLSGQLTWTRLPQGFKNSPTLFNEALHSDLADFRVRYPALVLLQYVDDLLLAAATRTECLEGTKALLETLGNKGYRASAKKAQICLQEVTYLGYSLKDGQRWLTKARKEAILSIPVPKNSRQVREFLGTAGYCRLWIPGFAELAAPLYPLTRPGTLFQWGTEQQLAFEDIKKALLSSPALGLPDITKPFELFIDENSGFAKGVLVQKLGPWKRPVAYLSKKLDTVASGWPPCLRMVAAIAILVKDAGKLTLGQPLTILTSHPVEALVRQPPNKWLSNARMTHYQAMLLDAERVHFGPTVSLNPATLLPLPSGGNHHDCLQILAETHGTRPDLTDQPLPDADLTWYTDGSSFIRNGEREAGAAVTTESEVIWAAPLPPGTSAQRAELIALTQALKMAEGKKLTVYTDSRYAFATTHVHGEIYRRRGWLTSEGKEIKNKNEILALLEALFLPKRLSIIHCPGHQKGDSPQAKGNRLADDTAKKAATETHSSLTVLPAGKRTADGSEFEKRTADGSEFESPKKKAKVE

SEQ ID NO: 6496 - protein, 2091 aa, synthetic construct
MPAAKRVKLDGGDKKYSIGLDIGTNSVGWAVITDEYKVPSKKFKVLGNTDRHSIKKNLIGALLFDSGETAEATRLKRTARRRYTRRKNRICYLQEIFSNEMAKVDDSFFHRLEESFLVEEDKKHERHPIFGNIVDEVAYHEKYPTIYHLRKKLVDSTDKADLRLIYLALAHMIKFRGHFLIEGDLNPDNSDVDKLFIQLVQTYNQLFEENPINASGVDAKAILSARLSKSRRLENLIAQLPGEKKNGLFGNLIALSLGLTPNFKSNFDLAEDAKLQLSKDTYDDDLDNLLAQIGDQYADLFLAAKNLSDAILLSDILRVNTEITKAPLSASMIKRYDEHHQDLTLLKALVRQQLPEKYKEIFFDQSKNGYAGYIDGGASQEEFYKFIKPILEKMDGTEELLVKLNREDLLRKQRTFDNGSIPHQIHLGELHAILRRQEDFYPFLKDNREKIEKILTFRIPYYVGPLARGNSRFAWMTRKSEETITPWNFEEVVDKGASAQSFIERMTNFDKNLPNEKVLPKHSLLYEYFTVYNELTKVKYVTEGMRKPAFLSGEQKKAIVDLLFKTNRKVTVKQLKEDYFKKIECFDSVEISGVEDRFNASLGTYHDLLKIIKDKDFLDNEENEDILEDIVLTLTLFEDREMIEERLKTYAHLFDDKVMKQLKRRRYTGWGRLSRKLINGIRDKQSGKTILDFLKSDGFANRNFMQLIHDDSLTFKEDIQKAQVSGQGDSLHEHIANLAGSPAIKKGILQTVKVVDELVKVMGRHKPENIVIEMARENQTTQKGQKNSRERMKRIEEGIKELGSQILKEHPVENTQLQNEKLYLYYLQNGRDMYVDQELDINRLSDYDVDHIVPQSFLKDDSIDNKVLTRSDKARGKSDNVPSEEVVKKMKNYWRQLLNAKLITQRKFDNLTKAERGGLSELDKAGFIKRQLVETRQITKHVAQILDSRMNTKYDENDKLIREVKVITLKSKLVSDFRKDFQFYKVREINNYHHAHDAYLNAVVGTALIKKYPKLESEFVYGDYKVYDVRKMIAKSEQEIGKATAKYFFYSNIMNFFKTEITLANGEIRKRPLIETNGETGEIVWDKGRDFATVRKVLSMPQVNIVKKTEVQTGGFSKESILPKRNSDKLIARKKDWDPKKYGGFDSPTVAYSVLVVAKVEKGKSKKLKSVKELLGITIMERSSFEKNPIDFLEAKGYKEVKKDLIIKLPKYSLFELENGRKRMLASAGELQKGNELALPSKYVNFLYLASHYEKLKGSPEDNEQKQLFVEQHKHYLDEIIEQISEFSKRVILADANLDKVLSAYNKHRDKPIREQAENIIHLFTLTNLGAPAAFKYFDTTIDRKRYTSTKEVLDATLIHQSITGLYETRIDLSQLGGDGGPAPAPAPGGTLQLEEEYRLFEPESTQKQEMDIWLKNFPQAWAETGGMGTAHCQAPVLIQLKATATPISIRQYPMPHEAYQGIKPHIRRMLDQGILKPCQSPWNTPLLPVKKPGTEDYRPVQDLREVNKRVEDIHPTVPNPYNLLSTLPPSHPWYTVLDLKDAFFCLRLHSESQLLFAFEWRDPEIGLSGQLTWTRLPQGFKNSPTLFNEALHSDLADFRVRYPALVLLQYVDDLLLAAATRTECLEGTKALLETLGNKGYRASAKKAQICLQEVTYLGYSLKDGQRWLTKARKEAILSIPVPKNSRQVREFLGKAGYCRLFIPGFAELAAPLYPLTRPGTLFQWGTEQQLAFEDIKKALLSSPALGLPDITKPFELFIDENSGFAKGVLVQKLGPWKRPVAYLSKKLDTVASGWPPCLRMVAAIAILVKDAGKLTLGQPLTILTSHPVEALVRQPPNKWLSNARMTHYQAMLLDAERVHFGPTVSLNPATLLPLPSGGNHHDCLQILAETHGTRPDLTDQPLPDADLTWYTDGSSFIRNGEREAGAAVTTESEVIWAAPLPPGTSAQRAELIALTQALKMAEGKKLTVYTDSRYAFATTHVHGEIYRRRGWLTSEGKEIKNKNEILALLEALFLPKRLSIIHCPGHQKGDSPQAKGNRLADDTAKKAATETHSSLTVLPAGKRTADGSEFEKRTADGSEFESPKKKAKVE

SEQ ID NO: 6497 - protein, 2090 aa, synthetic construct
MPAAKRVKLDGGDKKYSIGLDIGTNSVGWAVITDEYKVPSKKFKVLGNTDRHSIKKNLIGALLFDSGETAEATRLKRTARRRYTRRKNRICYLQEIFSNEMAKVDDSFFHRLEESFLVEEDKKHERHPIFGNIVDEVAYHEKYPTIYHLRKKLVDSTDKADLRLIYLALAHMIKFRGHFLIEGDLNPDNSDVDKLFIQLVQTYNQLFEENPINASGVDAKAILSARLSKSRRLENLIAQLPGEKKNGLFGNLIALSLGLTPNFKSNFDLAEDAKLQLSKDTYDDDLDNLLAQIGDQYADLFLAAKNLSDAILLSDILRVNTEITKAPLSASMIKRYDEHHQDLTLLKALVRQQLPEKYKEIFFDQSKNGYAGYIDGGASQEEFYKFIKPILEKMDGTEELLVKLNREDLLRKQRTFDNGSIPHQIHLGELHAILRRQEDFYPFLKDNREKIEKILTFRIPYYVGPLARGNSRFAWMTRKSEETITPWNFEEVVDKGASAQSFIERMTNFDKNLPNEKVLPKHSLLYEYFTVYNELTKVKYVTEGMRKPAFLSGEQKKAIVDLLFKTNRKVTVKQLKEDYFKKIECFDSVEISGVEDRFNASLGTYHDLLKIIKDKDFLDNEENEDILEDIVLTLTLFEDREMIEERLKTYAHLFDDKVMKQLKRRRYTGWGRLSRKLINGIRDKQSGKTILDFLKSDGFANRNFMQLIHDDSLTFKEDIQKAQVSGQGDSLHEHIANLAGSPAIKKGILQTVKVVDELVKVMGRHKPENIVIEMARENQTTQKGQKNSRERMKRIEEGIKELGSQILKEHPVENTQLQNEKLYLYYLQNGRDMYVDQELDINRLSDYDVDHIVPQSFLKDDSIDNKVLTRSDKARGKSDNVPSEEVVKKMKNYWRQLLNAKLITQRKFDNLTKAERGGLSELDKAGFIKRQLVETRQITKHVAQILDSRMNTKYDENDKLIREVKVITLKSKLVSDFRKDFQFYKVREINNYHHAHDAYLNAVVGTALIKKYPKLESEFVYGDYKVYDVRKMIAKSEQEIGKATAKYFFYSNIMNFFKTEITLANGEIRKRPLIETNGETGEIVWDKGRDFATVRKVLSMPQVNIVKKTEVQTGGFSKESILPKRNSDKLIARKKDWDPKKYGGFDSPTVAYSVLVVAKVEKGKSKKLKSVKELLGITIMERSSFEKNPIDFLEAKGYKEVKKDLIIKLPKYSLFELENGRKRMLASAGELQKGNELALPSKYVNFLYLASHYEKLKGSPEDNEQKQLFVEQHKHYLDEIIEQISEFSKRVILADANLDKVLSAYNKHRDKPIREQAENIIHLFTLTNLGAPAAFKYFDTTIDRKRYTSTKEVLDATLIHQSITGLYETRIDLSQLGGDGGPAPAPAPGGVLNLEEEYRLHEKPVPSSIDPSWLQLFPTVWAERAGMGLANQVPPVVVELRSGASPVAVRQYPMSKEAREGIRPHIQKFLDLGVLVPCRSPWNTPLLPVKKPGTNDYRPVQDLREINKRVQDIHPTVPNPYNLLSSLPPSYTWYSVLDLKDAFFCLRLHPNSQPLFAFEWKDPEKGNTGQLTWTRLPQGFKNSPTLFNEALHRDLAPFRALNPQVVLLQYVDDLLVAAPTYEDCKKGTQKLLQELSKLGYRVSAKKAQLCQREVTYLGYLLKEGKRWLTPARKATVMKIPVPTTPRQVREFLGKAGFCRLFIPGFASLAAPLYPLTKPSIPFIWTEEHQQAFDHIKKALLSAPALALPDLTKPFTLYIDERAGVARGVLTQTLGPWRRPVAYLSKKLDPVASGWPTCLKAVAAVALLLKDADKLTLGQNVTVIASHSLESIVRQPPDRWMTNARMTHYQSLLLNERVSFAPPAVLNPATLLPVESEATPVHRCSEILAEETGTRRDLEDQPLPGVPTWYTDGSSFITEGKRRAGAPIVDGKRTVWASSLPEGTSAQKAELVALTQALRLAEGKNINIYTDSRYAFATAHIHGAIYKQRGWLTSAGKDIKNKEEILALLEAIHLPRRVAIIHCPGHQRGSNPVATGNRRADEAAKQAALSTRVLAGTTKPAGKRTADGSEFEKRTADGSEFESPKKKAKVE

SEQ ID NO: 6498 - protein, 2005 aa, synthetic construct
MPAAKRVKLDGGDKKYSIGLDIGTNSVGWAVITDEYKVPSKKFKVLGNTDRHSIKKNLIGALLFDSGETAEATRLKRTARRRYTRRKNRICYLQEIFSNEMAKVDDSFFHRLEESFLVEEDKKHERHPIFGNIVDEVAYHEKYPTIYHLRKKLVDSTDKADLRLIYLALAHMIKFRGHFLIEGDLNPDNSDVDKLFIQLVQTYNQLFEENPINASGVDAKAILSARLSKSRRLENLIAQLPGEKKNGLFGNLIALSLGLTPNFKSNFDLAEDAKLQLSKDTYDDDLDNLLAQIGDQYADLFLAAKNLSDAILLSDILRVNTEITKAPLSASMIKRYDEHHQDLTLLKALVRQQLPEKYKEIFFDQSKNGYAGYIDGGASQEEFYKFIKPILEKMDGTEELLVKLNREDLLRKQRTFDNGSIPHQIHLGELHAILRRQEDFYPFLKDNREKIEKILTFRIPYYVGPLARGNSRFAWMTRKSEETITPWNFEEVVDKGASAQSFIERMTNFDKNLPNEKVLPKHSLLYEYFTVYNELTKVKYVTEGMRKPAFLSGEQKKAIVDLLFKTNRKVTVKQLKEDYFKKIECFDSVEISGVEDRFNASLGTYHDLLKIIKDKDFLDNEENEDILEDIVLTLTLFEDREMIEERLKTYAHLFDDKVMKQLKRRRYTGWGRLSRKLINGIRDKQSGKTILDFLKSDGFANRNFMQLIHDDSLTFKEDIQKAQVSGQGDSLHEHIANLAGSPAIKKGILQTVKVVDELVKVMGRHKPENIVIEMARENQTTQKGQKNSRERMKRIEEGIKELGSQILKEHPVENTQLQNEKLYLYYLQNGRDMYVDQELDINRLSDYDVDHIVPQSFLKDDSIDNKVLTRSDKARGKSDNVPSEEVVKKMKNYWRQLLNAKLITQRKFDNLTKAERGGLSELDKAGFIKRQLVETRQITKHVAQILDSRMNTKYDENDKLIREVKVITLKSKLVSDFRKDFQFYKVREINNYHHAHDAYLNAVVGTALIKKYPKLESEFVYGDYKVYDVRKMIAKSEQEIGKATAKYFFYSNIMNFFKTEITLANGEIRKRPLIETNGETGEIVWDKGRDFATVRKVLSMPQVNIVKKTEVQTGGFSKESILPKRNSDKLIARKKDWDPKKYGGFDSPTVAYSVLVVAKVEKGKSKKLKSVKELLGITIMERSSFEKNPIDFLEAKGYKEVKKDLIIKLPKYSLFELENGRKRMLASAGELQKGNELALPSKYVNFLYLASHYEKLKGSPEDNEQKQLFVEQHKHYLDEIIEQISEFSKRVILADANLDKVLSAYNKHRDKPIREQAENIIHLFTLTNLGAPAAFKYFDTTIDRKRYTSTKEVLDATLIHQSITGLYETRIDLSQLGGDGGPAPAPAPGGHLPPPPQVDQFPLNLPERLQALNDLVSKALEAGHIEPYSGPGNNPVFPVKKPNGKWRFIHDLRATNAITTTLTSPSPGPPDLTSLPTALPHLQTIDLTDAFFQIPLPKQYQPYFAFTIPQPCNYGPGTRYAWTVLPQGFKNSPTLFQQQLAAVLNPMRKMFPTSTIVQYMDDILLASPTNEELQQLSQLTLQALTTHGLPISQEKTQQTPGQIRFLGQVISPNHITYESTPTIPIKSQWTLTELQVILGEIQWVSKGTPILRKHLQSLYSALHPYRDPRACITLTPQQLHALHAIQQALQHNCRGRLNPALPLLGLISLSTSGTTSVIFQPKQNWPLAWLHTPHPPTSLCPWGHLLACTILTLDKYTLQHYGQLCQSFHHNMSKQALCDFLRNSPHPSVGILIHHMGRFHNLGSQPSGPWKTLLHLPTLLQEPRLLRPIFTLSPVVLDTAPCLFSDGSPQKAAYVLWDQTILQQDITPLPSHETHSAQKGELLALICGLRAAKPWPSLNIFLDSKYLIKYLHSLAIGAFLGTSAHQTLQAALPPLLQGKTIYLHHVRSHTNLPDPISTFNEYTDSLILAPLVPLAGKRTADGSEFEKRTADGSEFESPKKKAKVE

SEQ ID NO: 6499 - protein, 2214 aa, synthetic construct
MPAAKRVKLDGGDKKYSIGLDIGTNSVGWAVITDEYKVPSKKFKVLGNTDRHSIKKNLIGALLFDSGETAEATRLKRTARRRYTRRKNRICYLQEIFSNEMAKVDDSFFHRLEESFLVEEDKKHERHPIFGNIVDEVAYHEKYPTIYHLRKKLVDSTDKADLRLIYLALAHMIKFRGHFLIEGDLNPDNSDVDKLFIQLVQTYNQLFEENPINASGVDAKAILSARLSKSRRLENLIAQLPGEKKNGLFGNLIALSLGLTPNFKSNFDLAEDAKLQLSKDTYDDDLDNLLAQIGDQYADLFLAAKNLSDAILLSDILRVNTEITKAPLSASMIKRYDEHHQDLTLLKALVRQQLPEKYKEIFFDQSKNGYAGYIDGGASQEEFYKFIKPILEKMDGTEELLVKLNREDLLRKQRTFDNGSIPHQIHLGELHAILRRQEDFYPFLKDNREKIEKILTFRIPYYVGPLARGNSRFAWMTRKSEETITPWNFEEVVDKGASAQSFIERMTNFDKNLPNEKVLPKHSLLYEYFTVYNELTKVKYVTEGMRKPAFLSGEQKKAIVDLLFKTNRKVTVKQLKEDYFKKIECFDSVEISGVEDRFNASLGTYHDLLKIIKDKDFLDNEENEDILEDIVLTLTLFEDREMIEERLKTYAHLFDDKVMKQLKRRRYTGWGRLSRKLINGIRDKQSGKTILDFLKSDGFANRNFMQLIHDDSLTFKEDIQKAQVSGQGDSLHEHIANLAGSPAIKKGILQTVKVVDELVKVMGRHKPENIVIEMARENQTTQKGQKNSRERMKRIEEGIKELGSQILKEHPVENTQLQNEKLYLYYLQNGRDMYVDQELDINRLSDYDVDHIVPQSFLKDDSIDNKVLTRSDKARGKSDNVPSEEVVKKMKNYWRQLLNAKLITQRKFDNLTKAERGGLSELDKAGFIKRQLVETRQITKHVAQILDSRMNTKYDENDKLIREVKVITLKSKLVSDFRKDFQFYKVREINNYHHAHDAYLNAVVGTALIKKYPKLESEFVYGDYKVYDVRKMIAKSEQEIGKATAKYFFYSNIMNFFKTEITLANGEIRKRPLIETNGETGEIVWDKGRDFATVRKVLSMPQVNIVKKTEVQTGGFSKESILPKRNSDKLIARKKDWDPKKYGGFDSPTVAYSVLVVAKVEKGKSKKLKSVKELLGITIMERSSFEKNPIDFLEAKGYKEVKKDLIIKLPKYSLFELENGRKRMLASAGELQKGNELALPSKYVNFLYLASHYEKLKGSPEDNEQKQLFVEQHKHYLDEIIEQISEFSKRVILADANLDKVLSAYNKHRDKPIREQAENIIHLFTLTNLGAPAAFKYFDTTIDRKRYTSTKEVLDATLIHQSITGLYETRIDLSQLGGDGGPAPAPAPGGTLGDQGSRGSDPLPEPRVTLTVEGIPTEFLVNTGAEHSVLTKPMGKMGSKRTVVAGATGSKVYPWTTKRLLKIGQKQVTHSFLVIPECPAPLLGRDLLTKLKAQIQFSTEGPQVTWEDRPAMCLVLNLEEEYRLHEKPVPPSIDPSWLQLFPMVWAEKAGMGLANQVPPVVVELKSDASPVAVRQYPMSKEAREGIRPHIQRFLDLGILVPCQSPWNTPLLPVKKPGTNDYRPVQDLREVNKRVQDIHPTVPNPYNLLSSLPPSHTWYSVLDLKDAFFCLKLHPNSQPLFAFEWRDPEKGNTGQLTWTRLPQGFKNSPTLFNEALHRDLASFRALNPQVVMLQYVDDLLVAAPTYRDCKEGTRRLLQELSKLGYRVSAKKAQLCREEVTYLGYLLKGGKRWLTPARKATVMKIPTPTTPRQVREFLGKAGFCRLFIPGFASLAAPLYPLTRPKVPFTWTEAHQEAFGRIKEALLSAPALALPDLTKPFALYVDEKEGVARGVLTQTLGPWRRPVAYLSKKLDPVASGWPTCLKAIAAVALLLKDADKLTLGQNVLVIAPHNLESIVRQPPDRWMTNARMTHYQSLLLNERVSFAPPAILNPATLLPVESDDTPIHICSEILAEETGTRPDLRDQPLPGVPAWYTDGSSFIMDGRRQAGAAIVDNKRTVWASNLPEGTSAQKAELIALTQALRLAEGKSINIYTDSRYAFATAHVHGAIYKQRGWLTSAGKDIKNKEEILALLEAIHLPKRVAIIHCPGHQRGTDPVATGNRKADEAAKQAAQSTRILTETTKNAGKRTADGSEFEKRTADGSEFESPKKKAKVE

SEQ ID NO: 6500 - protein, 2092 aa, synthetic construct
MPAAKRVKLDGGDKKYSIGLDIGTNSVGWAVITDEYKVPSKKFKVLGNTDRHSIKKNLIGALLFDSGETAEATRLKRTARRRYTRRKNRICYLQEIFSNEMAKVDDSFFHRLEESFLVEEDKKHERHPIFGNIVDEVAYHEKYPTIYHLRKKLVDSTDKADLRLIYLALAHMIKFRGHFLIEGDLNPDNSDVDKLFIQLVQTYNQLFEENPINASGVDAKAILSARLSKSRRLENLIAQLPGEKKNGLFGNLIALSLGLTPNFKSNFDLAEDAKLQLSKDTYDDDLDNLLAQIGDQYADLFLAAKNLSDAILLSDILRVNTEITKAPLSASMIKRYDEHHQDLTLLKALVRQQLPEKYKEIFFDQSKNGYAGYIDGGASQEEFYKFIKPILEKMDGTEELLVKLNREDLLRKQRTFDNGSIPHQIHLGELHAILRRQEDFYPFLKDNREKIEKILTFRIPYYVGPLARGNSRFAWMTRKSEETITPWNFEEVVDKGASAQSFIERMTNFDKNLPNEKVLPKHSLLYEYFTVYNELTKVKYVTEGMRKPAFLSGEQKKAIVDLLFKTNRKVTVKQLKEDYFKKIECFDSVEISGVEDRFNASLGTYHDLLKIIKDKDFLDNEENEDILEDIVLTLTLFEDREMIEERLKTYAHLFDDKVMKQLKRRRYTGWGRLSRKLINGIRDKQSGKTILDFLKSDGFANRNFMQLIHDDSLTFKEDIQKAQVSGQGDSLHEHIANLAGSPAIKKGILQTVKVVDELVKVMGRHKPENIVIEMARENQTTQKGQKNSRERMKRIEEGIKELGSQILKEHPVENTQLQNEKLYLYYLQNGRDMYVDQELDINRLSDYDVDHIVPQSFLKDDSIDNKVLTRSDKARGKSDNVPSEEVVKKMKNYWRQLLNAKLITQRKFDNLTKAERGGLSELDKAGFIKRQLVETRQITKHVAQILDSRMNTKYDENDKLIREVKVITLKSKLVSDFRKDFQFYKVREINNYHHAHDAYLNAVVGTALIKKYPKLESEFVYGDYKVYDVRKMIAKSEQEIGKATAKYFFYSNIMNFFKTEITLANGEIRKRPLIETNGETGEIVWDKGRDFATVRKVLSMPQVNIVKKTEVQTGGFSKESILPKRNSDKLIARKKDWDPKKYGGFDSPTVAYSVLVVAKVEKGKSKKLKSVKELLGITIMERSSFEKNPIDFLEAKGYKEVKKDLIIKLPKYSLFELENGRKRMLASAGELQKGNELALPSKYVNFLYLASHYEKLKGSPEDNEQKQLFVEQHKHYLDEIIEQISEFSKRVILADANLDKVLSAYNKHRDKPIREQAENIIHLFTLTNLGAPAAFKYFDTTIDRKRYTSTKEVLDATLIHQSITGLYETRIDLSQLGGDGGPAPAPAPGGTLNLEDEYRLYETSAEPEVSPGSTWLSDFPQAWAETGGMGLAVRQAPLIIPLKATSTPVSIKQYPMSQEAKLGIKPHIQRLLDQGILVPCQSPWNTPLLPVKKPGTNDYRPVQDLREVNKRVEDIHPTVPNPYNLLSGLPPSHRWYTVLDLKDAFFCLRLHPTSQPLFAFEWRDPGMGISGQLTWTRLPQGFKNSPTLFNEALHRDLADFRIQHPDLILLQYVDDILLAATSELDCQQGTRALLLTLGNLGYRASAKKAQLCQKQVKYLGYLLKEGQRWLTEARKETVMGQPTPKTPRQLREFLGTAGFCRLWIPGFAEMAAPLYPLTKPGTLFNWGPDQQKAYQEIKQALLTAPALGLPDLTKPFELFVDEKQGYAKGVLTQKLGPWRRPVAYLSKKLDPVAAGWPPCLRMVAAIAVLRKDAGKLTMGQPLVILAPHAVEALVKQPPDRWLSNARMTHYQAMLLDTDRVQFGPVVALNPATLLPLPEEGAPHDCLEILAETHGTRPDLTDQPIPDADHTWYTDGSSFLQEGQRKAGAAVTTETEVIWARALPAGTSAQRAELIALTQALKMAEGKRLNVYTDSRYAFATAHIHGEIYRRRGWLTSEGREIKNKSEILALLKALFLPKRLSIIHCLGHQKGDSAEARGNRLADQAAREAAIKTPPDTSTLLAGKRTADGSEFEKRTADGSEFESPKKKAKVE

SEQ ID NO: 6501 - protein, 2092 aa, synthetic construct
MPAAKRVKLDGGDKKYSIGLDIGTNSVGWAVITDEYKVPSKKFKVLGNTDRHSIKKNLIGALLFDSGETAEATRLKRTARRRYTRRKNRICYLQEIFSNEMAKVDDSFFHRLEESFLVEEDKKHERHPIFGNIVDEVAYHEKYPTIYHLRKKLVDSTDKADLRLIYLALAHMIKFRGHFLIEGDLNPDNSDVDKLFIQLVQTYNQLFEENPINASGVDAKAILSARLSKSRRLENLIAQLPGEKKNGLFGNLIALSLGLTPNFKSNFDLAEDAKLQLSKDTYDDDLDNLLAQIGDQYADLFLAAKNLSDAILLSDILRVNTEITKAPLSASMIKRYDEHHQDLTLLKALVRQQLPEKYKEIFFDQSKNGYAGYIDGGASQEEFYKFIKPILEKMDGTEELLVKLNREDLLRKQRTFDNGSIPHQIHLGELHAILRRQEDFYPFLKDNREKIEKILTFRIPYYVGPLARGNSRFAWMTRKSEETITPWNFEEVVDKGASAQSFIERMTNFDKNLPNEKVLPKHSLLYEYFTVYNELTKVKYVTEGMRKPAFLSGEQKKAIVDLLFKTNRKVTVKQLKEDYFKKIECFDSVEISGVEDRFNASLGTYHDLLKIIKDKDFLDNEENEDILEDIVLTLTLFEDREMIEERLKTYAHLFDDKVMKQLKRRRYTGWGRLSRKLINGIRDKQSGKTILDFLKSDGFANRNFMQLIHDDSLTFKEDIQKAQVSGQGDSLHEHIANLAGSPAIKKGILQTVKVVDELVKVMGRHKPENIVIEMARENQTTQKGQKNSRERMKRIEEGIKELGSQILKEHPVENTQLQNEKLYLYYLQNGRDMYVDQELDINRLSDYDVDHIVPQSFLKDDSIDNKVLTRSDKARGKSDNVPSEEVVKKMKNYWRQLLNAKLITQRKFDNLTKAERGGLSELDKAGFIKRQLVETRQITKHVAQILDSRMNTKYDENDKLIREVKVITLKSKLVSDFRKDFQFYKVREINNYHHAHDAYLNAVVGTALIKKYPKLESEFVYGDYKVYDVRKMIAKSEQEIGKATAKYFFYSNIMNFFKTEITLANGEIRKRPLIETNGETGEIVWDKGRDFATVRKVLSMPQVNIVKKTEVQTGGFSKESILPKRNSDKLIARKKDWDPKKYGGFDSPTVAYSVLVVAKVEKGKSKKLKSVKELLGITIMERSSFEKNPIDFLEAKGYKEVKKDLIIKLPKYSLFELENGRKRMLASAGELQKGNELALPSKYVNFLYLASHYEKLKGSPEDNEQKQLFVEQHKHYLDEIIEQISEFSKRVILADANLDKVLSAYNKHRDKPIREQAENIIHLFTLTNLGAPAAFKYFDTTIDRKRYTSTKEVLDATLIHQSITGLYETRIDLSQLGGDGGPAPAPAPGGTLGIEDEYRLHETSTEPDVSLGSTWLSDFPQAWAETGGMGLAVRQAPLIIPLKATSTPVSIQQYPMSHEARLGIKPHIQRLLDQGILVPCQSPWNTPLLPVKKPGTNDYRPVQDLREVNKRVEDIHPTVPNPYNLLSGLPPSHQWYTVLDLKDAFFCLRLHPTSQPLFAFEWRDPGMGISGQLTWTRLPQGFKNSPTLFNEALHRDLADFRIQHPDLILLQYVDDILLAATSELDCQQGTRALLQTLGDLGYRASAKKAQICQKQVKYLGYLLREGQRWLTEARKETVMGQPVPKTPRQLREFLGTAGFCRLWIPGFAEMAAPLYPLTKPGTLFSWGPDQQKAYQEIKQALLTAPALGLPDLTKPFELFVDEKQGYAKGVLTQKLGPWRRPVAYLSKKLDPVAAGWPPCLRMVAAIAVLTKDAGKLTMGQPLVILAPHAVEALVKQPPDRWLSNARMTHYQAMLLDTDRVQFGPVVALNPATLLPLPEEGAPHDCLEILAETHGTRPDLTDQPIPDADHTWYTDGSSFLQEGQRKAGAAVTTETEVIWAGALPAGTSAQRAELIALTQALKMAEGKRLNVYTDSRYAFATAHIHGEIYRRRGWLTSEGREIKNKSEILALLKALFLPKRLSIIHCLGHQKGDSAEARGNRLADQAAREAAIKTPPDTSTLLAGKRTADGSEFEKRTADGSEFESPKKKAKVE

SEQ ID NO: 6502 - protein, 2092 aa, synthetic construct
MPAAKRVKLDGGDKKYSIGLDIGTNSVGWAVITDEYKVPSKKFKVLGNTDRHSIKKNLIGALLFDSGETAEATRLKRTARRRYTRRKNRICYLQEIFSNEMAKVDDSFFHRLEESFLVEEDKKHERHPIFGNIVDEVAYHEKYPTIYHLRKKLVDSTDKADLRLIYLALAHMIKFRGHFLIEGDLNPDNSDVDKLFIQLVQTYNQLFEENPINASGVDAKAILSARLSKSRRLENLIAQLPGEKKNGLFGNLIALSLGLTPNFKSNFDLAEDAKLQLSKDTYDDDLDNLLAQIGDQYADLFLAAKNLSDAILLSDILRVNTEITKAPLSASMIKRYDEHHQDLTLLKALVRQQLPEKYKEIFFDQSKNGYAGYIDGGASQEEFYKFIKPILEKMDGTEELLVKLNREDLLRKQRTFDNGSIPHQIHLGELHAILRRQEDFYPFLKDNREKIEKILTFRIPYYVGPLARGNSRFAWMTRKSEETITPWNFEEVVDKGASAQSFIERMTNFDKNLPNEKVLPKHSLLYEYFTVYNELTKVKYVTEGMRKPAFLSGEQKKAIVDLLFKTNRKVTVKQLKEDYFKKIECFDSVEISGVEDRFNASLGTYHDLLKIIKDKDFLDNEENEDILEDIVLTLTLFEDREMIEERLKTYAHLFDDKVMKQLKRRRYTGWGRLSRKLINGIRDKQSGKTILDFLKSDGFANRNFMQLIHDDSLTFKEDIQKAQVSGQGDSLHEHIANLAGSPAIKKGILQTVKVVDELVKVMGRHKPENIVIEMARENQTTQKGQKNSRERMKRIEEGIKELGSQILKEHPVENTQLQNEKLYLYYLQNGRDMYVDQELDINRLSDYDVDHIVPQSFLKDDSIDNKVLTRSDKARGKSDNVPSEEVVKKMKNYWRQLLNAKLITQRKFDNLTKAERGGLSELDKAGFIKRQLVETRQITKHVAQILDSRMNTKYDENDKLIREVKVITLKSKLVSDFRKDFQFYKVREINNYHHAHDAYLNAVVGTALIKKYPKLESEFVYGDYKVYDVRKMIAKSEQEIGKATAKYFFYSNIMNFFKTEITLANGEIRKRPLIETNGETGEIVWDKGRDFATVRKVLSMPQVNIVKKTEVQTGGFSKESILPKRNSDKLIARKKDWDPKKYGGFDSPTVAYSVLVVAKVEKGKSKKLKSVKELLGITIMERSSFEKNPIDFLEAKGYKEVKKDLIIKLPKYSLFELENGRKRMLASAGELQKGNELALPSKYVNFLYLASHYEKLKGSPEDNEQKQLFVEQHKHYLDEIIEQISEFSKRVILADANLDKVLSAYNKHRDKPIREQAENIIHLFTLTNLGAPAAFKYFDTTIDRKRYTSTKEVLDATLIHQSITGLYETRIDLSQLGGDGGPAPAPAPGGTLNIEDEYRLHETSKGPDVPLGSTWLSDFPQAWAETGGMGLAVRQAPLIIPLKATSTPVSIKQYPMSQEARLGIKPHIQRLLDQGILVPCQSPWNTPLLPVKKPGTNDYRPVQDLREVNKRVEDIHPTVPNPYNLLSGLPPSHQWYTVLDLKDAFFCLRLHPTSQSLFAFEWRDPEMGISGQLTWTRLPQGFKNSPTLFNEALHRDLADFRIQHPDLILLQYVDDLLLAATSELDCQQGTRALLQTLGDLGYRASAKKAQICQKQVKYLGYLLKEGQRWLTEARKETVMGQPTPKTPRQLREFLGTAGFCRLWIPGFAEMAAPLYPLTKPGTLFEWGPDQQKAYQEIKQALLTAPALGLPDLTKPFELFVDEKQGYAKGVLTQKLGPWRRPVAYLSKKLDPVAAGWPPCLRMVAAIAVLTKDAGKLTMGQPLVILAPHAVEALVKQPPDRWLSNARMTHYQALLLDTDRVQFGPIVALNPATLLPLPEEGLQHDCLDILAEAHGTRPDLTDQPLPDADHTWYTDGSSFLQEGQRKAGAAVTTETEVVWAKALPAGTSAQRAELIALTQALKMAEGKKLNVYTDSRYAFATAHIHGEIYRRRGWLTSEGKEIKNKDEILALLKALFLPKRLSIIHCPGHQKGNRAEARGNRMADQAAREVATRETPETSTLLAGKRTADGSEFEKRTADGSEFESPKKKAKVE

SEQ ID NO: 6503 - protein, 2092 aa, synthetic construct
MPAAKRVKLDGGDKKYSIGLDIGTNSVGWAVITDEYKVPSKKFKVLGNTDRHSIKKNLIGALLFDSGETAEATRLKRTARRRYTRRKNRICYLQEIFSNEMAKVDDSFFHRLEESFLVEEDKKHERHPIFGNIVDEVAYHEKYPTIYHLRKKLVDSTDKADLRLIYLALAHMIKFRGHFLIEGDLNPDNSDVDKLFIQLVQTYNQLFEENPINASGVDAKAILSARLSKSRRLENLIAQLPGEKKNGLFGNLIALSLGLTPNFKSNFDLAEDAKLQLSKDTYDDDLDNLLAQIGDQYADLFLAAKNLSDAILLSDILRVNTEITKAPLSASMIKRYDEHHQDLTLLKALVRQQLPEKYKEIFFDQSKNGYAGYIDGGASQEEFYKFIKPILEKMDGTEELLVKLNREDLLRKQRTFDNGSIPHQIHLGELHAILRRQEDFYPFLKDNREKIEKILTFRIPYYVGPLARGNSRFAWMTRKSEETITPWNFEEVVDKGASAQSFIERMTNFDKNLPNEKVLPKHSLLYEYFTVYNELTKVKYVTEGMRKPAFLSGEQKKAIVDLLFKTNRKVTVKQLKEDYFKKIECFDSVEISGVEDRFNASLGTYHDLLKIIKDKDFLDNEENEDILEDIVLTLTLFEDREMIEERLKTYAHLFDDKVMKQLKRRRYTGWGRLSRKLINGIRDKQSGKTILDFLKSDGFANRNFMQLIHDDSLTFKEDIQKAQVSGQGDSLHEHIANLAGSPAIKKGILQTVKVVDELVKVMGRHKPENIVIEMARENQTTQKGQKNSRERMKRIEEGIKELGSQILKEHPVENTQLQNEKLYLYYLQNGRDMYVDQELDINRLSDYDVDHIVPQSFLKDDSIDNKVLTRSDKARGKSDNVPSEEVVKKMKNYWRQLLNAKLITQRKFDNLTKAERGGLSELDKAGFIKRQLVETRQITKHVAQILDSRMNTKYDENDKLIREVKVITLKSKLVSDFRKDFQFYKVREINNYHHAHDAYLNAVVGTALIKKYPKLESEFVYGDYKVYDVRKMIAKSEQEIGKATAKYFFYSNIMNFFKTEITLANGEIRKRPLIETNGETGEIVWDKGRDFATVRKVLSMPQVNIVKKTEVQTGGFSKESILPKRNSDKLIARKKDWDPKKYGGFDSPTVAYSVLVVAKVEKGKSKKLKSVKELLGITIMERSSFEKNPIDFLEAKGYKEVKKDLIIKLPKYSLFELENGRKRMLASAGELQKGNELALPSKYVNFLYLASHYEKLKGSPEDNEQKQLFVEQHKHYLDEIIEQISEFSKRVILADANLDKVLSAYNKHRDKPIREQAENIIHLFTLTNLGAPAAFKYFDTTIDRKRYTSTKEVLDATLIHQSITGLYETRIDLSQLGGDGGPAPAPAPGGTLNIEDEYRLHETSKGPDVPLGSTWLSDFPQAWAETGGMGLAVRQAPLIIPLKATSTPVSIKQYPMSQEARLGIKPHIQRLLDQGILVPCQSPWNTPLLPVKKPGTNDYRPVQDLREVNKRVEDIHPTVPNPYNLLSGLPPSHQWYTVLDLKDAFFCLRLHPTSQSLFAFEWRDPEMGISGQLTWTRLPQGFKNSPTLFNEALHRDLADFRIQHPDLILLQYVDDLLLAATSELDCQQGTRALLQTLGDLGYRASAKKAQICQKQVKYLGYLLKEGQRWLTEARKETVMGQPTPKTPRQLREFLGKAGFCRLFIPGFAEMAAPLYPLTKPGTLFEWGPDQQKAYQEIKQALLTAPALGLPDLTKPFELFVDEKQGYAKGVLTQKLGPWRRPVAYLSKKLDPVAAGWPPCLRMVAAIAVLTKDAGKLTMGQPLVILAPHAVEALVKQPPDRWLSNARMTHYQALLLDTDRVQFGPIVALNPATLLPLPEEGLQHDCLDILAEAHGTRPDLTDQPLPDADHTWYTDGSSFLQEGQRKAGAAVTTETEVVWAKALPAGTSAQRAELIALTQALKMAEGKKLNVYTDSRYAFATAHIHGEIYRRRGWLTSEGKEIKNKDEILALLKALFLPKRLSIIHCPGHQKGNRAEARGNRMADQAAREVATRETPETSTLLAGKRTADGSEFEKRTADGSEFESPKKKAKVE

SEQ ID NO: 6504 - protein, 2112 aa, synthetic construct; identical to SEQ ID NO: 4508

SEQ ID NO: 6505 - protein, 2112 aa, synthetic construct; identical to SEQ ID NO: 4508

SEQ ID NO: 6506 - protein, 2092 aa, synthetic construct
MPAAKRVKLDGGDKKYSIGLDIGTNSVGWAVITDEYKVPSKKFKVLGNTDRHSIKKNLIGALLFDSGETAEATRLKRTARRRYTRRKNRICYLQEIFSNEMAKVDDSFFHRLEESFLVEEDKKHERHPIFGNIVDEVAYHEKYPTIYHLRKKLVDSTDKADLRLIYLALAHMIKFRGHFLIEGDLNPDNSDVDKLFIQLVQTYNQLFEENPINASGVDAKAILSARLSKSRRLENLIAQLPGEKKNGLFGNLIALSLGLTPNFKSNFDLAEDAKLQLSKDTYDDDLDNLLAQIGDQYADLFLAAKNLSDAILLSDILRVNTEITKAPLSASMIKRYDEHHQDLTLLKALVRQQLPEKYKEIFFDQSKNGYAGYIDGGASQEEFYKFIKPILEKMDGTEELLVKLNREDLLRKQRTFDNGSIPHQIHLGELHAILRRQEDFYPFLKDNREKIEKILTFRIPYYVGPLARGNSRFAWMTRKSEETITPWNFEEVVDKGASAQSFIERMTNFDKNLPNEKVLPKHSLLYEYFTVYNELTKVKYVTEGMRKPAFLSGEQKKAIVDLLFKTNRKVTVKQLKEDYFKKIECFDSVEISGVEDRFNASLGTYHDLLKIIKDKDFLDNEENEDILEDIVLTLTLFEDREMIEERLKTYAHLFDDKVMKQLKRRRYTGWGRLSRKLINGIRDKQSGKTILDFLKSDGFANRNFMQLIHDDSLTFKEDIQKAQVSGQGDSLHEHIANLAGSPAIKKGILQTVKVVDELVKVMGRHKPENIVIEMARENQTTQKGQKNSRERMKRIEEGIKELGSQILKEHPVENTQLQNEKLYLYYLQNGRDMYVDQELDINRLSDYDVDHIVPQSFLKDDSIDNKVLTRSDKARGKSDNVPSEEVVKKMKNYWRQLLNAKLITQRKFDNLTKAERGGLSELDKAGFIKRQLVETRQITKHVAQILDSRMNTKYDENDKLIREVKVITLKSKLVSDFRKDFQFYKVREINNYHHAHDAYLNAVVGTALIKKYPKLESEFVYGDYKVYDVRKMIAKSEQEIGKATAKYFFYSNIMNFFKTEITLANGEIRKRPLIETNGETGEIVWDKGRDFATVRKVLSMPQVNIVKKTEVQTGGFSKESILPKRNSDKLIARKKDWDPKKYGGFDSPTVAYSVLVVAKVEKGKSKKLKSVKELLGITIMERSSFEKNPIDFLEAKGYKEVKKDLIIKLPKYSLFELENGRKRMLASAGELQKGNELALPSKYVNFLYLASHYEKLKGSPEDNEQKQLFVEQHKHYLDEIIEQISEFSKRVILADANLDKVLSAYNKHRDKPIREQAENIIHLFTLTNLGAPAAFKYFDTTIDRKRYTSTKEVLDATLIHQSITGLYETRIDLSQLGGDGGPAPAPAPGGTLNIEDEYRLHEISTEPDVSPGSTWLSDFPQAWAETGGMGLAVRQAPLIIPLKATSTPVSIKQYPMSQEAKLGIKPHIQRLLDQGILVPCQSPWNTPLLPVKKPGTNDYRPVQGLREVNKRVEDIHPTVPNPYNLLSGLPTSHRWYTVLDLKDAFFCLRLHPTSQPLFASEWRDPGMGISGQLTWTRLPQGFKNSPTLFNEALHRGLADFRIQHPDLILLQYVDDLLLAATSELDCQQGTRALLKTLGNLGYRASAKKAQICQKQVKYLGYLLREGQRWLTEARKETVMGQPTPKTPRQLREFLGTAGFCRLWIPRFAEMAAPLYPLTKPGTLFNWGPDQQKAYHEIKQALLTAPALGLPDLTKPFELFVDEKQGYAKGVLTQKLGPWRRPVAYLSKKLDPVAAGWPPCLRMVAAIAVLTKDAGKLTMGQPLVILAPHAVEALVKQPPDRWLSNARMTHYQAMLLDTDRVQFGPVVALNPATLLPLPEEGAPHDCLEILAETHGTEPDLTDQPIPDADHTWYTDGSSFLQEGQRKAGAAVTTETEVIWARALPAGTSAQRAELIALTQALKMAEGKRLNVYTDSRYAFATAHIHGEIYKRRGWLTSEGREIKNKSEILALLKALFLPKRLSIIHCLGHQKGDSAEARGNRLADQAAREAAIKTPPDTSTLLAGKRTADGSEFEKRTADGSEFESPKKKAKVE

SEQ ID NO: 6507 - protein, 2006 aa, synthetic construct
MPAAKRVKLDGGDKKYSIGLDIGTNSVGWAVITDEYKVPSKKFKVLGNTDRHSIKKNLIGALLFDSGETAEATRLKRTARRRYTRRKNRICYLQEIFSNEMAKVDDSFFHRLEESFLVEEDKKHERHPIFGNIVDEVAYHEKYPTIYHLRKKLVDSTDKADLRLIYLALAHMIKFRGHFLIEGDLNPDNSDVDKLFIQLVQTYNQLFEENPINASGVDAKAILSARLSKSRRLENLIAQLPGEKKNGLFGNLIALSLGLTPNFKSNFDLAEDAKLQLSKDTYDDDLDNLLAQIGDQYADLFLAAKNLSDAILLSDILRVNTEITKAPLSASMIKRYDEHHQDLTLLKALVRQQLPEKYKEIFFDQSKNGYAGYIDGGASQEEFYKFIKPILEKMDGTEELLVKLNREDLLRKQRTFDNGSIPHQIHLGELHAILRRQEDFYPFLKDNREKIEKILTFRIPYYVGPLARGNSRFAWMTRKSEETITPWNFEEVVDKGASAQSFIERMTNFDKNLPNEKVLPKHSLLYEYFTVYNELTKVKYVTEGMRKPAFLSGEQKKAIVDLLFKTNRKVTVKQLKEDYFKKIECFDSVEISGVEDRFNASLGTYHDLLKIIKDKDFLDNEENEDILEDIVLTLTLFEDREMIEERLKTYAHLFDDKVMKQLKRRRYTGWGRLSRKLINGIRDKQSGKTILDFLKSDGFANRNFMQLIHDDSLTFKEDIQKAQVSGQGDSLHEHIANLAGSPAIKKGILQTVKVVDELVKVMGRHKPENIVIEMARENQTTQKGQKNSRERMKRIEEGIKELGSQILKEHPVENTQLQNEKLYLYYLQNGRDMYVDQELDINRLSDYDVDHIVPQSFLKDDSIDNKVLTRSDKARGKSDNVPSEEVVKKMKNYWRQLLNAKLITQRKFDNLTKAERGGLSELDKAGFIKRQLVETRQITKHVAQILDSRMNTKYDENDKLIREVKVITLKSKLVSDFRKDFQFYKVREINNYHHAHDAYLNAVVGTALIKKYPKLESEFVYGDYKVYDVRKMIAKSEQEIGKATAKYFFYSNIMNFFKTEITLANGEIRKRPLIETNGETGEIVWDKGRDFATVRKVLSMPQVNIVKKTEVQTGGFSKESILPKRNSDKLIARKKDWDPKKYGGFDSPTVAYSVLVVAKVEKGKSKKLKSVKELLGITIMERSSFEKNPIDFLEAKGYKEVKKDLIIKLPKYSLFELENGRKRMLASAGELQKGNELALPSKYVNFLYLASHYEKLKGSPEDNEQKQLFVEQHKHYLDEIIEQISEFSKRVILADANLDKVLSAYNKHRDKPIREQAENIIHLFTLTNLGAPAAFKYFDTTIDRKRYTSTKEVLDATLIHQSITGLYETRIDLSQLGGDGGPAPAPAPGGLTAAIDILAPQQCAEPITWKSDEPVWVDQWPLTNDKLAAAQQLVQEQLEAGHITESSSPWNTPIFVIKKKSGKWRLLQDLRAVNATMVLMGALQPGLPSPVAIPQGYLKIIIDLKDCFFSIPLHPSDQKRFAFSLPSTNFKEPMQRFQWKVLPQGMANSPTLCQKYVATAIHKVRHAWKQMYIIHYMDDILIAGKDGQQVLQCFDQLKQELTAAGLHIAPEKVQLQDPYTYLGFELNGPKITNQKAVIRKDKLQTLNDFQKLLGDINWLRPYLKLTTGDLKPLFDTLKGDSDPNSHRSLSKEALASLEKVETAIAEQFVTHINYSLPLIFLIFNTALTPTGLFWQDNPIMWIHLPASPKKVLLPYYDAIADLIILGRDHSKKYFGIEPSTIIQPYSKSQIDWLMQNTEMWPIACASFVGILDNHYPPNKLIQFCKLHTFVFPQIISKTPLNNALLVFTDGSSTGMAAYTLTDTTIKFQTNLNSAQLVELQALIAVLSAFPNQPLNIYTDSAYLAHSIPLLETVAQIKHISETAKLFLQCQQLIYNRSIPFYIGHVRAHSGLPGPIAQGNQRADLATKIVASNINTAGKRTADGSEFEKRTADGSEFESPKKKAKVE

SEQ ID NO: 6508 - protein, 2086 aa, synthetic construct
MPAAKRVKLDGGDKKYSIGLDIGTNSVGWAVITDEYKVPSKKFKVLGNTDRHSIKKNLIGALLFDSGETAEATRLKRTARRRYTRRKNRICYLQEIFSNEMAKVDDSFFHRLEESFLVEEDKKHERHPIFGNIVDEVAYHEKYPTIYHLRKKLVDSTDKADLRLIYLALAHMIKFRGHFLIEGDLNPDNSDVDKLFIQLVQTYNQLFEENPINASGVDAKAILSARLSKSRRLENLIAQLPGEKKNGLFGNLIALSLGLTPNFKSNFDLAEDAKLQLSKDTYDDDLDNLLAQIGDQYADLFLAAKNLSDAILLSDILRVNTEITKAPLSASMIKRYDEHHQDLTLLKALVRQQLPEKYKEIFFDQSKNGYAGYIDGGASQEEFYKFIKPILEKMDGTEELLVKLNREDLLRKQRTFDNGSIPHQIHLGELHAILRRQEDFYPFLKDNREKIEKILTFRIPYYVGPLARGNSRFAWMTRKSEETITPWNFEEVVDKGASAQSFIERMTNFDKNLPNEKVLPKHSLLYEYFTVYNELTKVKYVTEGMRKPAFLSGEQKKAIVDLLFKTNRKVTVKQLKEDYFKKIECFDSVEISGVEDRFNASLGTYHDLLKIIKDKDFLDNEENEDILEDIVLTLTLFEDREMIEERLKTYAHLFDDKVMKQLKRRRYTGWGRLSRKLINGIRDKQSGKTILDFLKSDGFANRNFMQLIHDDSLTFKEDIQKAQVSGQGDSLHEHIANLAGSPAIKKGILQTVKVVDELVKVMGRHKPENIVIEMARENQTTQKGQKNSRERMKRIEEGIKELGSQILKEHPVENTQLQNEKLYLYYLQNGRDMYVDQELDINRLSDYDVDHIVPQSFLKDDSIDNKVLTRSDKARGKSDNVPSEEVVKKMKNYWRQLLNAKLITQRKFDNLTKAERGGLSELDKAGFIKRQLVETRQITKHVAQILDSRMNTKYDENDKLIREVKVITLKSKLVSDFRKDFQFYKVREINNYHHAHDAYLNAVVGTALIKKYPKLESEFVYGDYKVYDVRKMIAKSEQEIGKATAKYFFYSNIMNFFKTEITLANGEIRKRPLIETNGETGEIVWDKGRDFATVRKVLSMPQVNIVKKTEVQTGGFSKESILPKRNSDKLIARKKDWDPKKYGGFDSPTVAYSVLVVAKVEKGKSKKLKSVKELLGITIMERSSFEKNPIDFLEAKGYKEVKKDLIIKLPKYSLFELENGRKRMLASAGELQKGNELALPSKYVNFLYLASHYEKLKGSPEDNEQKQLFVEQHKHYLDEIIEQISEFSKRVILADANLDKVLSAYNKHRDKPIREQAENIIHLFTLTNLGAPAAFKYFDTTIDRKRYTSTKEVLDATLIHQSITGLYETRIDLSQLGGDGGPAPAPAPGGTLQLDDEYRLYSPLVKPDQNIQFWLEQFPQAWAETAGMGLAKQVPPQVIQLKASATPVSVRQYPLSKEAQEGIRPHVQRLIQQGILVPVQSPWNTPLLPVRKPGTNDYRPVQDLREVNKRVQDIHPTVPNPYNLLCALPPQRSWYTVLDLKDAFFCLRLHPTSQPLFAFEWRDPGTGRTGQLTWTRLPQGFKNSPTIFNEALHRDLANFRIQHPQVTLLQYVDDLLLAGATKQDCLEGTKALLLELSDLGYRASAKKAQICRREVTYLGYSLRDGQRWLTEARKKTVVQIPAPTTAKQVREFLGTAGFCRLWIPGFATLAAPLYPLTKPKGEFSWAPEHQKAFDAIKKALLSAPALALPDVTKPFTLYVDERKGVARGVLTQTLGPWRRPVAYLSKKLDPVASGWPVCLKAIAAVAILVKDADKLTLGQNITVIAPHALENIVRQPPDRWMTNARMTHYQSLLLTERVTFAPPAALNPATLLPEETDEPVTHDCHQLLIEETGVRKDLTDIPLTGEVLTWFTDGSSYVVEGKRMAGAAVVDGTRTIWASSLPEGTSAQKAELMALTQALRLAEGKSINIYTDSRYAFATAHVHGAIYKQRGWLTSAGREIKNKEEILSLLEALHLPKRLAIIHCPGHQKAKDPISRGNQMADRVAKQAAQGVNLLAGKRTADGSEFEKRTADGSEFESPKKKAKVE

SEQ ID NO: 6509 - protein, 2086 aa, synthetic construct; identical to SEQ ID NO: 6508

SEQ ID NO: 6510 - protein, 2083 aa, synthetic construct
MPAAKRVKLDGGDKKYSIGLDIGTNSVGWAVITDEYKVPSKKFKVLGNTDRHSIKKNLIGALLFDSGETAEATRLKRTARRRYTRRKNRICYLQEIFSNEMAKVDDSFFHRLEESFLVEEDKKHERHPIFGNIVDEVAYHEKYPTIYHLRKKLVDSTDKADLRLIYLALAHMIKFRGHFLIEGDLNPDNSDVDKLFIQLVQTYNQLFEENPINASGVDAKAILSARLSKSRRLENLIAQLPGEKKNGLFGNLIALSLGLTPNFKSNFDLAEDAKLQLSKDTYDDDLDNLLAQIGDQYADLFLAAKNLSDAILLSDILRVNTEITKAPLSASMIKRYDEHHQDLTLLKALVRQQLPEKYKEIFFDQSKNGYAGYIDGGASQEEFYKFIKPILEKMDGTEELLVKLNREDLLRKQRTFDNGSIPHQIHLGELHAILRRQEDFYPFLKDNREKIEKILTFRIPYYVGPLARGNSRFAWMTRKSEETITPWNFEEVVDKGASAQSFIERMTNFDKNLPNEKVLPKHSLLYEYFTVYNELTKVKYVTEGMRKPAFLSGEQKKAIVDLLFKTNRKVTVKQLKEDYFKKIECFDSVEISGVEDRFNASLGTYHDLLKIIKDKDFLDNEENEDILEDIVLTLTLFEDREMIEERLKTYAHLFDDKVMKQLKRRRYTGWGRLSRKLINGIRDKQSGKTILDFLKSDGFANRNFMQLIHDDSLTFKEDIQKAQVSGQGDSLHEHIANLAGSPAIKKGILQTVKVVDELVKVMGRHKPENIVIEMARENQTTQKGQKNSRERMKRIEEGIKELGSQILKEHPVENTQLQNEKLYLYYLQNGRDMYVDQELDINRLSDYDVDHIVPQSFLKDDSIDNKVLTRSDKARGKSDNVPSEEVVKKMKNYWRQLLNAKLITQRKFDNLTKAERGGLSELDKAGFIKRQLVETRQITKHVAQILDSRMNTKYDENDKLIREVKVITLKSKLVSDFRKDFQFYKVREINNYHHAHDAYLNAVVGTALIKKYPKLESEFVYGDYKVYDVRKMIAKSEQEIGKATAKYFFYSNIMNFFKTEITLANGEIRKRPLIETNGETGEIVWDKGRDFATVRKVLSMPQVNIVKKTEVQTGGFSKESILPKRNSDKLIARKKDWDPKKYGGFDSPTVAYSVLVVAKVEKGKSKKLKSVKELLGITIMERSSFEKNPIDFLEAKGYKEVKKDLIIKLPKYSLFELENGRKRMLASAGELQKGNELALPSKYVNFLYLASHYEKLKGSPEDNEQKQLFVEQHKHYLDEIIEQISEFSKRVILADANLDKVLSAYNKHRDKPIREQAENIIHLFTLTNLGAPAAFKYFDTTIDRKRYTSTKEVLDATLIHQSITGLYETRIDLSQLGGDGGPAPAPAPGGVPWLMKKPLQLTVLVPLHEYQERLLQQTALPKEQKELLQKLFLKYDALWQHWENQVGHRRIKPHNIATGTLAPRPQKQYPINPKAKPSIQIVIDDLLKQGVLIQQNSTMNTPVYPVPKPDGKWRMVLDYREVNKTIPLIAAQNQHSAGILSSIYRGKYKTTLDLTNGFWAHPITPESYWLTAFTWQGKQYCWTRLPQGFLNSPALFNADVVDLLKEIPNVQAYVDDIYISHDDPQEHLEQLEKIFSILLNAGYVVSLKKSEIAQREVEFLGFNITKEGRGLTDTFKQKLLNITPPKDLKQLQSILGLLNFARNFIPNYSELVKPLYTIVAPANGKFISWTEDNSNQLQHIISVLNQADNLEERNPETRLIIKVNSSPSAGYIRYYNEGSKRPIMYVNYIFSKAEAKFTQTEKLLTTMHKGLIKAMDLAMGQEILVYSPIVSMTKIQRTPLPERKALPVRWITWMTYLEDPRIQFHYDKSLPELQQIPNVTEDVIAKTKHPSEFAMVFYTDGSAIKHPDVNKSHSAGMGIAQVQFIPEYKIVHQWSIPLGDHTAQLAEIAAVEFACKKALKISGPVLIVTDSFYVAESANKELPYWKSNGFLNNKKKPLRHVSKWKSIAECLQLKPDIIIMHEKGHQQPMTTLHTEGNNLADKLATQGSYVVHAGKRTADGSEFEKRTADGSEFESPKKKAKVE

SEQ ID NO: 6511 - protein, 2172 aa, synthetic construct
MPAAKRVKLDGGDKKYSIGLDIGTNSVGWAVITDEYKVPSKKFKVLGNTDRHSIKKNLIGALLFDSGETAEATRLKRTARRRYTRRKNRICYLQEIFSNEMAKVDDSFFHRLEESFLVEEDKKHERHPIFGNIVDEVAYHEKYPTIYHLRKKLVDSTDKADLRLIYLALAHMIKFRGHFLIEGDLNPDNSDVDKLFIQLVQTYNQLFEENPINASGVDAKAILSARLSKSRRLENLIAQLPGEKKNGLFGNLIALSLGLTPNFKSNFDLAEDAKLQLSKDTYDDDLDNLLAQIGDQYADLFLAAKNLSDAILLSDILRVNTEITKAPLSASMIKRYDEHHQDLTLLKALVRQQLPEKYKEIFFDQSKNGYAGYIDGGASQEEFYKFIKPILEKMDGTEELLVKLNREDLLRKQRTFDNGSIPHQIHLGELHAILRRQEDFYPFLKDNREKIEKILTFRIPYYVGPLARGNSRFAWMTRKSEETITPWNFEEVVDKGASAQSFIERMTNFDKNLPNEKVLPKHSLLYEYFTVYNELTKVKYVTEGMRKPAFLSGEQKKAIVDLLFKTNRKVTVKQLKEDYFKKIECFDSVEISGVEDRFNASLGTYHDLLKIIKDKDFLDNEENEDILEDIVLTLTLFEDREMIEERLKTYAHLFDDKVMKQLKRRRYTGWGRLSRKLINGIRDKQSGKTILDFLKSDGFANRNFMQLIHDDSLTFKEDIQKAQVSGQGDSLHEHIANLAGSPAIKKGILQTVKVVDELVKVMGRHKPENIVIEMARENQTTQKGQKNSRERMKRIEEGIKELGSQILKEHPVENTQLQNEKLYLYYLQNGRDMYVDQELDINRLSDYDVDHIVPQSFLKDDSIDNKVLTRSDKARGKSDNVPSEEVVKKMKNYWRQLLNAKLITQRKFDNLTKAERGGLSELDKAGFIKRQLVETRQITKHVAQILDSRMNTKYDENDKLIREVKVITLKSKLVSDFRKDFQFYKVREINNYHHAHDAYLNAVVGTALIKKYPKLESEFVYGDYKVYDVRKMIAKSEQEIGKATAKYFFYSNIMNFFKTEITLANGEIRKRPLIETNGETGEIVWDKGRDFATVRKVLSMPQVNIVKKTEVQTGGFSKESILPKRNSDKLIARKKDWDPKKYGGFDSPTVAYSVLVVAKVEKGKSKKLKSVKELLGITIMERSSFEKNPIDFLEAKGYKEVKKDLIIKLPKYSLFELENGRKRMLASAGELQKGNELALPSKYVNFLYLASHYEKLKGSPEDNEQKQLFVEQHKHYLDEIIEQISEFSKRVILADANLDKVLSAYNKHRDKPIREQAENIIHLFTLTNLGAPAAFKYFDTTIDRKRYTSTKEVLDATLIHQSITGLYETRIDLSQLGGDGGPAPAPAPGGMDPLQLLQPLEAEIKGTKLKAHWNSGATITCVPQAFLEEEVPIKNIWIKTIHGEKEQPVYYLTFKIQGRKVEAEVISSPYDYILVSPSDIPWLMKKPLQLTTLVPLQEYEERLLKQTMLTGSYKEKLQSLFLKYDALWQHWENQVGHRRIKPHHIATGTVNPRPQKQYPINPKAKASIQTVINDLLKQGVLIQQNSIMNTPVYPVPKPDGKWRMVLDYREVNKTIPLIAAQNQHSAGILSSIFRGKYKTTLDLSNGFWAHSITPESYWLTAFTWLGQQYCWTRLPQGFLNSPALFNADVVDLLKEVPNVQVYVDDIYISHDDPREHLEQLEKVFSLLLNAGYVVSLKKSEIAQHEVEFLGFNITKEGRGLTETFKQKLLNITPPRDLKQLQSILGKLNFARNFIPNFSELVKPLYNIIATAPGKYITWTTDNSQQLQNIISMLNSAENLEERNPEVRLIMKVNTSPSAGYIRFYNEFAKRPIMYLNYVYTKAEVKFTNTEKLLTTIHKGLIKALDLGMGQEILVYSPIVSMTKIQKTPLPERKALPIRWITWMSYLEDPRIQFHYDKTLPELQQVPTVTDDIIAKIKHPSEFSMVFYTDGSAIKHPNVNKSHNAGMGIAQVQFKPEFTVINTWSIPLGDHTAQLAEVAAVEFACKKALKIDGPVLIVTDSFYVAESVNKELPYWQSNGFFNNKKKPLKHVSKWKSIADCIQLKPDIIIIHEKGHQPTASTFHTEGNNLADKLATQGSYVVNAGKRTADGSEFEKRTADGSEFESPKKKAKVE

SEQ ID NO: 6512 - protein, 2092 aa, synthetic construct
MPAAKRVKLDGGDKKYSIGLDIGTNSVGWAVITDEYKVPSKKFKVLGNTDRHSIKKNLIGALLFDSGETAEATRLKRTARRRYTRRKNRICYLQEIFSNEMAKVDDSFFHRLEESFLVEEDKKHERHPIFGNIVDEVAYHEKYPTIYHLRKKLVDSTDKADLRLIYLALAHMIKFRGHFLIEGDLNPDNSDVDKLFIQLVQTYNQLFEENPINASGVDAKAILSARLSKSRRLENLIAQLPGEKKNGLFGNLIALSLGLTPNFKSNFDLAEDAKLQLSKDTYDDDLDNLLAQIGDQYADLFLAAKNLSDAILLSDILRVNTEITKAPLSASMIKRYDEHHQDLTLLKALVRQQLPEKYKEIFFDQSKNGYAGYIDGGASQEEFYKFIKPILEKMDGTEELLVKLNREDLLRKQRTFDNGSIPHQIHLGELHAILRRQEDFYPFLKDNREKIEKILTFRIPYYVGPLARGNSRFAWMTRKSEETITPWNFEEVVDKGASAQSFIERMTNFDKNLPNEKVLPKHSLLYEYFTVYNELTKVKYVTEGMRKPAFLSGEQKKAIVDLLFKTNRKVTVKQLKEDYFKKIECFDSVEISGVEDRFNASLGTYHDLLKIIKDKDFLDNEENEDILEDIVLTLTLFEDREMIEERLKTYAHLFDDKVMKQLKRRRYTGWGRLSRKLINGIRDKQSGKTILDFLKSDGFANRNFMQLIHDDSLTFKEDIQKAQVSGQGDSLHEHIANLAGSPAIKKGILQTVKVVDELVKVMGRHKPENIVIEMARENQTTQKGQKNSRERMKRIEEGIKELGSQILKEHPVENTQLQNEKLYLYYLQNGRDMYVDQELDINRLSDYDVDHIVPQSFLKDDSIDNKVLTRSDKARGKSDNVPSEEVVKKMKNYWRQLLNAKLITQRKFDNLTKAERGGLSELDKAGFIKRQLVETRQITKHVAQILDSRMNTKYDENDKLIREVKVITLKSKLVSDFRKDFQFYKVREINNYHHAHDAYLNAVVGTALIKKYPKLESEFVYGDYKVYDVRKMIAKSEQEIGKATAKYFFYSNIMNFFKTEITLANGEIRKRPLIETNGETGEIVWDKGRDFATVRKVLSMPQVNIVKKTEVQTGGFSKESILPKRNSDKLIARKKDWDPKKYGGFDSPTVAYSVLVVAKVEKGKSKKLKSVKELLGITIMERSSFEKNPIDFLEAKGYKEVKKDLIIKLPKYSLFELENGRKRMLASAGELQKGNELALPSKYVNFLYLASHYEKLKGSPEDNEQKQLFVEQHKHYLDEIIEQISEFSKRVILADANLDKVLSAYNKHRDKPIREQAENIIHLFTLTNLGAPAAFKYFDTTIDRKRYTSTKEVLDATLIHQSITGLYETRIDLSQLGGDGGPAPAPAPGGTLNIEDEYRLHETSKEPDVPLGSTWLSDFPQAWAETGGMGLAVRQAPLIIPLKATSTPVSIKQYPMSQEARLGIKPHIQRLLDQGILVPCQSPWNTPLLPVKKPGTNDYRPVQDLREVNKRVEDIHPTVPNPYNLLSGLPPSHQWYTVLDLKDAFFCLRLHPTSQPLFAFEWRDPEMGISGQLTWTRLPQGFKNSPTLFNEALHRDLADFRIQHPDLILLQYVDDLLLAATSEQDCQRGTRALLQTLGNLGYRASAKKAQICQKQVKYLGYLLKEGQRWLTEARKETVMGQPTPKTPRQLREFLGKAGFCRLFIPGFAEMAAPLYPLTKPGTLFNWGPDQQKAYQEIKQALLTAPALGLPDLTKPFELFVDEKQGYAKGVLTQKLGPWRRPVAYLSKKLDPVAAGWPPCLRMVAAIAVLTKDAGKLTMGQPLVILAPHAVEALVKQPPDRWLSNARMTHYQAMLLDTDRVQFGPVVALNPATLLPLPEKEAPHDCLEILAETHGTRPDLTDQPIPDADYTWYTDGSSFLQEGQRRAGAAVTTETEVIWARALPAGTSAQRAELIALTQALKMAEGKKLNVYTDSRYAFATAHVHGEIYRRRGWLTSEGREIKNKNEILALLKALFLPKRLSIIHCPGHQKGNSAEARGNRMADQAAREAAMKAVLETSTLLAGKRTADGSEFEKRTADGSEFESPKKKAKVE

SEQ ID NO: 6513 - protein, 2096 aa, synthetic construct
MPAAKRVKLDGGDKKYSIGLDIGTNSVGWAVITDEYKVPSKKFKVLGNTDRHSIKKNLIGALLFDSGETAEATRLKRTARRRYTRRKNRICYLQEIFSNEMAKVDDSFFHRLEESFLVEEDKKHERHPIFGNIVDEVAYHEKYPTIYHLRKKLVDSTDKADLRLIYLALAHMIKFRGHFLIEGDLNPDNSDVDKLFIQLVQTYNQLFEENPINASGVDAKAILSARLSKSRRLENLIAQLPGEKKNGLFGNLIALSLGLTPNFKSNFDLAEDAKLQLSKDTYDDDLDNLLAQIGDQYADLFLAAKNLSDAILLSDILRVNTEITKAPLSASMIKRYDEHHQDLTLLKALVRQQLPEKYKEIFFDQSKNGYAGYIDGGASQEEFYKFIKPILEKMDGTEELLVKLNREDLLRKQRTFDNGSIPHQIHLGELHAILRRQEDFYPFLKDNREKIEKILTFRIPYYVGPLARGNSRFAWMTRKSEETITPWNFEEVVDKGASAQSFIERMTNFDKNLPNEKVLPKHSLLYEYFTVYNELTKVKYVTEGMRKPAFLSGEQKKAIVDLLFKTNRKVTVKQLKEDYFKKIECFDSVEISGVEDRFNASLGTYHDLLKIIKDKDFLDNEENEDILEDIVLTLTLFEDREMIEERLKTYAHLFDDKVMKQLKRRRYTGWGRLSRKLINGIRDKQSGKTILDFLKSDGFANRNFMQLIHDDSLTFKEDIQKAQVSGQGDSLHEHIANLAGSPAIKKGILQTVKVVDELVKVMGRHKPENIVIEMARENQTTQKGQKNSRERMKRIEEGIKELGSQILKEHPVENTQLQNEKLYLYYLQNGRDMYVDQELDINRLSDYDVDHIVPQSFLKDDSIDNKVLTRSDKARGKSDNVPSEEVVKKMKNYWRQLLNAKLITQRKFDNLTKAERGGLSELDKAGFIKRQLVETRQITKHVAQILDSRMNTKYDENDKLIREVKVITLKSKLVSDFRKDFQFYKVREINNYHHAHDAYLNAVVGTALIKKYPKLESEFVYGDYKVYDVRKMIAKSEQEIGKATAKYFFYSNIMNFFKTEITLANGEIRKRPLIETNGETGEIVWDKGRDFATVRKVLSMPQVNIVKKTEVQTGGFSKESILPKRNSDKLIARKKDWDPKKYGGFDSPTVAYSVLVVAKVEKGKSKKLKSVKELLGITIMERSSFEKNPIDFLEAKGYKEVKKDLIIKLPKYSLFELENGRKRMLASAGELQKGNELALPSKYVNFLYLASHYEKLKGSPEDNEQKQLFVEQHKHYLDEIIEQISEFSKRVILADANLDKVLSAYNKHRDKPIREQAENIIHLFTLTNLGAPAAFKYFDTTIDRKRYTSTKEVLDATLIHQSITGLYETRIDLSQLGGDGGPAPAPAPAPGGTAPLEEEYRLFLEAPIQNVTLLEQWKREIPKVWAEINPPGLASTQAPIHVQLLSTALPVRVRQYPITLEAKRSLRETIRKFRAAGILRPVHSPWNTPLLPVRKSGTSEYRMVQDLREVNKRVETIHPTVPNPYTLLSLLPPDRIWYSVLDLKDAFFCIPLAPESQLIFAFEWADAEEGESGQLTWTRLPQGFKNSPTLFDEALNRDLQGFRLDHPSVSLLQYVDDLLIAADTQAACLSATRDLLMTLAELGYRVSGKKAQLCQEEVTYLGFKIHKGSRSLSNSRTQAILQIPVPKTKRQVREFLGTIGYCRLWIPGFAELAQPLYAATRGGNDPLVWGEKEEEAFQSLKLALTQPPALALPSLDKPFQLFVEETSGAAKGVLTQALGPWKRPVAYLSKRLDPVAAGWPRCLRAIAAAALLTREASKLTFGQDIEITSSHNLESLLRSPPDKWLTNARITQYQVLLLDPPRVRFKQTAALNPATLLPETDDTLPIHHCLDTLDSLTSTRPDLTDQPLAQAEATLFTDGSSYIRDGKRYAGAAVVTLDSVIWAEPLPIGTSAQKAELIALTKALEWSKDKSVNIYTDSRYAFATLHVHGMIYRERGLLTAGGKAIKNAPEILALLTAVWLPKRVAVMHCKGHQKDDAPTSTGNRRADEVAREVAIRPLSTQATISAGKRTADGSEFEKRTADGSEFESPKKKAKVE

SEQ ID NO: 6514 - protein, 2096 aa, synthetic construct
MPAAKRVKLDGGDKKYSIGLDIGTNSVGWAVITDEYKVPSKKFKVLGNTDRHSIKKNLIGALLFDSGETAEATRLKRTARRRYTRRKNRICYLQEIFSNEMAKVDDSFFHRLEESFLVEEDKKHERHPIFGNIVDEVAYHEKYPTIYHLRKKLVDSTDKADLRLIYLALAHMIKFRGHFLIEGDLNPDNSDVDKLFIQLVQTYNQLFEENPINASGVDAKAILSARLSKSRRLENLIAQLPGEKKNGLFGNLIALSLGLTPNFKSNFDLAEDAKLQLSKDTYDDDLDNLLAQIGDQYADLFLAAKNLSDAILLSDILRVNTEITKAPLSASMIKRYDEHHQDLTLLKALVRQQLPEKYKEIFFDQSKNGYAGYIDGGASQEEFYKFIKPILEKMDGTEELLVKLNREDLLRKQRTFDNGSIPHQIHLGELHAILRRQEDFYPFLKDNREKIEKILTFRIPYYVGPLARGNSRFAWMTRKSEETITPWNFEEVVDKGASAQSFIERMTNFDKNLPNEKVLPKHSLLYEYFTVYNELTKVKYVTEGMRKPAFLSGEQKKAIVDLLFKTNRKVTVKQLKEDYFKKIECFDSVEISGVEDRFNASLGTYHDLLKIIKDKDFLDNEENEDILEDIVLTLTLFEDREMIEERLKTYAHLFDDKVMKQLKRRRYTGWGRLSRKLINGIRDKQSGKTILDFLKSDGFANRNFMQLIHDDSLTFKEDIQKAQVSGQGDSLHEHIANLAGSPAIKKGILQTVKVVDELVKVMGRHKPENIVIEMARENQTTQKGQKNSRERMKRIEEGIKELGSQILKEHPVENTQLQNEKLYLYYLQNGRDMYVDQELDINRLSDYDVDHIVPQSFLKDDSIDNKVLTRSDKARGKSDNVPSEEVVKKMKNYWRQLLNAKLITQRKFDNLTKAERGGLSELDKAGFIKRQLVETRQITKHVAQILDSRMNTKYDENDKLIREVKVITLKSKLVSDFRKDFQFYKVREINNYHHAHDAYLNAVVGTALIKKYPKLESEFVYGDYKVYDVRKMIAKSEQEIGKATAKYFFYSNIMNFFKTEITLANGEIRKRPLIETNGETGEIVWDKGRDFATVRKVLSMPQVNIVKKTEVQTGGFSKESILPKRNSDKLIARKKDWDPKKYGGFDSPTVAYSVLVVAKVEKGKSKKLKSVKELLGITIMERSSFEKNPIDFLEAKGYKEVKKDLIIKLPKYSLFELENGRKRMLASAGELQKGNELALPSKYVNFLYLASHYEKLKGSPEDNEQKQLFVEQHKHYLDEIIEQISEFSKRVILADANLDKVLSAYNKHRDKPIREQAENIIHLFTLTNLGAPAAFKYFDTTIDRKRYTSTKEVLDATLIHQSITGLYETRIDLSQLGGDGGPAPAPAPAPGGTAPLEEEYRLFLEAPIQNVTLLEQWKREIPKVWAEINPPGLASTQAPIHVQLLSTALPVRVRQYPITLEAKRSLRETIRKFRAAGILRPVHSPWNTPLLPVRKSGTSEYRMVQDLREVNKRVETIHPTVPNPYTLLSLLPPDRIWYSVLDLKDAFFCIPLAPESQLIFAFEWADAEEGESGQLTWTRLPQGFKNSPTLFNEALNRDLQGFRLDHPSVSLLQYVDDLLIAADTQAACLSATRDLLMTLAELGYRVSGKKAQLCQEEVTYLGFKIHKGSRSLSNSRTQAILQIPVPKTKRQVREFLGTIGYCRLWIPGFAELAQPLYAATRPGNDPLVWGEKEEEAFQSLKLALTQPPALALPSLDKPFQLFVEETSGAAKGVLTQALGPWKRPVAYLSKRLDPVAAGWPRCLRAIAAAALLTREASKLTFGQDIEITSSHNLESLLRSPPDKWLTNARITQYQVLLLDPPRVRFKQTAALNPATLLPETDDTLPIHHCLDTLDSLTSTRPDLTDQPLAQAEATLFTDGSSYIRDGKRYAGAAVVTLDSVIWAEPLPIGTSAQKAELIALTKALEWSKDKSVNIYTDSRYAFATLHVHGMIYRERGWLTAGGKAIKNAPEILALLTAVWLPKRVAVMHCKGHQKDDAPTSTGNRRADEVAREVAIRPLSTQATISAGKRTADGSEFEKRTADGSEFESPKKKAKVE

SEQ ID NO: 6515 - protein, 2100 aa, synthetic construct
MPAAKRVKLDGGDKKYSIGLDIGTNSVGWAVITDEYKVPSKKFKVLGNTDRHSIKKNLIGALLFDSGETAEATRLKRTARRRYTRRKNRICYLQEIFSNEMAKVDDSFFHRLEESFLVEEDKKHERHPIFGNIVDEVAYHEKYPTIYHLRKKLVDSTDKADLRLIYLALAHMIKFRGHFLIEGDLNPDNSDVDKLFIQLVQTYNQLFEENPINASGVDAKAILSARLSKSRRLENLIAQLPGEKKNGLFGNLIALSLGLTPNFKSNFDLAEDAKLQLSKDTYDDDLDNLLAQIGDQYADLFLAAKNLSDAILLSDILRVNTEITKAPLSASMIKRYDEHHQDLTLLKALVRQQLPEKYKEIFFDQSKNGYAGYIDGGASQEEFYKFIKPILEKMDGTEELLVKLNREDLLRKQRTFDNGSIPHQIHLGELHAILRRQEDFYPFLKDNREKIEKILTFRIPYYVGPLARGNSRFAWMTRKSEETITPWNFEEVVDKGASAQSFIERMTNFDKNLPNEKVLPKHSLLYEYFTVYNELTKVKYVTEGMRKPAFLSGEQKKAIVDLLFKTNRKVTVKQLKEDYFKKIECFDSVEISGVEDRFNASLGTYHDLLKIIKDKDFLDNEENEDILEDIVLTLTLFEDREMIEERLKTYAHLFDDKVMKQLKRRRYTGWGRLSRKLINGIRDKQSGKTILDFLKSDGFANRNFMQLIHDDSLTFKEDIQKAQVSGQGDSLHEHIANLAGSPAIKKGILQTVKVVDELVKVMGRHKPENIVIEMARENQTTQKGQKNSRERMKRIEEGIKELGSQILKEHPVENTQLQNEKLYLYYLQNGRDMYVDQELDINRLSDYDVDHIVPQSFLKDDSIDNKVLTRSDKARGKSDNVPSEEVVKKMKNYWRQLLNAKLITQRKFDNLTKAERGGLSELDKAGFIKRQLVETRQITKHVAQILDSRMNTKYDENDKLIREVKVITLKSKLVSDFRKDFQFYKVREINNYHHAHDAYLNAVVGTALIKKYPKLESEFVYGDYKVYDVRKMIAKSEQEIGKATAKYFFYSNIMNFFKTEITLANGEIRKRPLIETNGETGEIVWDKGRDFATVRKVLSMPQVNIVKKTEVQTGGFSKESILPKRNSDKLIARKKDWDPKKYGGFDSPTVAYSVLVVAKVEKGKSKKLKSVKELLGITIMERSSFEKNPIDFLEAKGYKEVKKDLIIKLPKYSLFELENGRKRMLASAGELQKGNELALPSKYVNFLYLASHYEKLKGSPEDNEQKQLFVEQHKHYLDEIIEQISEFSKRVILADANLDKVLSAYNKHRDKPIREQAENIIHLFTLTNLGAPAAFKYFDTTIDRKRYTSTKEVLDATLIHQSITGLYETRIDLSQLGGDGGPAPAPAPAPGGTVSLQDEHRLFDIPVTTSLPDVWLQDFPQAWAETGGLGRAKCQAPIIIDLKPTAVPVSIKQYPMSLEAHMGIRQHIIKFLELGVLRPCRSPWNTPLLPVKKPGTQDYRPVQDLREINKRTVDIHPTVPNPYNLLSTLKPDYSWYTVLDLKDAFFCLPLAPQSQELFAFEWKDPERGISGQLTWTRLPQGFKNSPTLFNEALHRDLTDFRTQHPEVTLLQYVDDLLLAAPTKKACTQGTRHLLQELGEKGYRASAKKAQICQTKVTYLGYILSEGKRWLTPGRIETVARIPPPRNPREVREFLGTAGFCRLWIPGFAELAAPLYALTKPSTPFTWQTEHQLAFEALKKALLSAPALGLPDTSKPFTLFLDERQGIAKGVLTQKLGPWKRPVAYLSKKLDPVAAGWPPCLRIMAATAMLVKDSAKLTLGQPLTVITPHTLEAIVRQPPDRWITNARLTHYQALLLDTDRVQFGPPVTLNPATLLPVPENQPSPHDCRQVLAETHGTREDLKDQELPDADHTWYTDGSSYLDSGTRRAGAAVVDGHNTIWAQSLPPGTSAQKAELIALTKALELSKGKKANIYTDSRYAFATAHTHGSIYERRGWLTSEGKEIKNKAEIIALLKALFLPQEVAIIHCPGHQKGQDPVAVGNRQADRVARQAAMAEVLTLATEPDNTSHITAGKRTADGSEFEKRTADGSEFESPKKKAKVE

SEQ ID NO: 6516 - protein, 2085 aa, synthetic construct
MPAAKRVKLDGGDKKYSIGLDIGTNSVGWAVITDEYKVPSKKFKVLGNTDRHSIKKNLIGALLFDSGETAEATRLKRTARRRYTRRKNRICYLQEIFSNEMAKVDDSFFHRLEESFLVEEDKKHERHPIFGNIVDEVAYHEKYPTIYHLRKKLVDSTDKADLRLIYLALAHMIKFRGHFLIEGDLNPDNSDVDKLFIQLVQTYNQLFEENPINASGVDAKAILSARLSKSRRLENLIAQLPGEKKNGLFGNLIALSLGLTPNFKSNFDLAEDAKLQLSKDTYDDDLDNLLAQIGDQYADLFLAAKNLSDAILLSDILRVNTEITKAPLSASMIKRYDEHHQDLTLLKALVRQQLPEKYKEIFFDQSKNGYAGYIDGGASQEEFYKFIKPILEKMDGTEELLVKLNREDLLRKQRTFDNGSIPHQIHLGELHAILRRQEDFYPFLKDNREKIEKILTFRIPYYVGPLARGNSRFAWMTRKSEETITPWNFEEVVDKGASAQSFIERMTNFDKNLPNEKVLPKHSLLYEYFTVYNELTKVKYVTEGMRKPAFLSGEQKKAIVDLLFKTNRKVTVKQLKEDYFKKIECFDSVEISGVEDRFNASLGTYHDLLKIIKDKDFLDNEENEDILEDIVLTLTLFEDREMIEERLKTYAHLFDDKVMKQLKRRRYTGWGRLSRKLINGIRDKQSGKTILDFLKSDGFANRNFMQLIHDDSLTFKEDIQKAQVSGQGDSLHEHIANLAGSPAIKKGILQTVKVVDELVKVMGRHKPENIVIEMARENQTTQKGQKNSRERMKRIEEGIKELGSQILKEHPVENTQLQNEKLYLYYLQNGRDMYVDQELDINRLSDYDVDHIVPQSFLKDDSIDNKVLTRSDKARGKSDNVPSEEVVKKMKNYWRQLLNAKLITQRKFDNLTKAERGGLSELDKAGFIKRQLVETRQITKHVAQILDSRMNTKYDENDKLIREVKVITLKSKLVSDFRKDFQFYKVREINNYHHAHDAYLNAVVGTALIKKYPKLESEFVYGDYKVYDVRKMIAKSEQEIGKATAKYFFYSNIMNFFKTEITLANGEIRKRPLIETNGETGEIVWDKGRDFATVRKVLSMPQVNIVKKTEVQTGGFSKESILPKRNSDKLIARKKDWDPKKYGGFDSPTVAYSVLVVAKVEKGKSKKLKSVKELLGITIMERSSFEKNPIDFLEAKGYKEVKKDLIIKLPKYSLFELENGRKRMLASAGELQKGNELALPSKYVNFLYLASHYEKLKGSPEDNEQKQLFVEQHKHYLDEIIEQISEFSKRVILADANLDKVLSAYNKHRDKPIREQAENIIHLFTLTNLGAPAAFKYFDTTIDRKRYTSTKEVLDATLIHQSITGLYETRIDLSQLGGDGGPAPAPAPAPGGVPWILKKPLELTIKLDLEEQQGTLLNNSILSKKGKEELKQLFEKYSALWQSWENQVGHRRIRPHKIATGTVKPTPQKQYHINPKAKPDIQIVINDLLKQGVLIQKESTMNTPVYPVPKPNGRWRMVLDYRAVNKVTPLIAVQNQHSYGILGSLFKGRYKTTIDLSNGFWAHPIVPEDYWITAFTWQGKQYCWTVLPQGFLNSPGLFNGDVVDLLQGIPNVEVYVDDVYISHDSEKEHLEYLDILFNRLKEAGYIISLKKSNIANSIVDFLGFQITNEGRGLTDTFKEKLENITAPTTLKQLQSILGKLNFARNFIPDFTELIAPLYALIPKSPKNYVPWQIEHSTTLETLITKLNGAEYLQGRKGDKTLIMKVNASYTTGYIRYYNEGEKKPISYVSIVFSKTELKFTELEKLLTTVHKGLLKALDLSMGQNIHVYSPIVSMQNIQKTPQTAKKALASRWLSWLSYLEDPRIRFFYDPQMPALKDLPAVDTGKDNKKHPSNFQHIFYTDGSAITSPTKEGHLNAGMGIVYFINKDGNLQKQQEWSISLGNHTAQFAEIAAFEFALKKCLPLGGNILVVTDSNYVAKAYNEELDVWASNGFVNNRKKPLKHISKWKSVADLKRLRPDVVVTHEPGHQKLDSSPHAYGNNLADQLATQASFKVHAGKRTADGSEFEKRTADGSEFESPKKKAKVE

SEQ ID NO: 6517 - protein, 2093 aa, synthetic construct
MPAAKRVKLDGGDKKYSIGLDIGTNSVGWAVITDEYKVPSKKFKVLGNTDRHSIKKNLIGALLFDSGETAEATRLKRTARRRYTRRKNRICYLQEIFSNEMAKVDDSFFHRLEESFLVEEDKKHERHPIFGNIVDEVAYHEKYPTIYHLRKKLVDSTDKADLRLIYLALAHMIKFRGHFLIEGDLNPDNSDVDKLFIQLVQTYNQLFEENPINASGVDAKAILSARLSKSRRLENLIAQLPGEKKNGLFGNLIALSLGLTPNFKSNFDLAEDAKLQLSKDTYDDDLDNLLAQIGDQYADLFLAAKNLSDAILLSDILRVNTEITKAPLSASMIKRYDEHHQDLTLLKALVRQQLPEKYKEIFFDQSKNGYAGYIDGGASQEEFYKFIKPILEKMDGTEELLVKLNREDLLRKQRTFDNGSIPHQIHLGELHAILRRQEDFYPFLKDNREKIEKILTFRIPYYVGPLARGNSRFAWMTRKSEETITPWNFEEVVDKGASAQSFIERMTNFDKNLPNEKVLPKHSLLYEYFTVYNELTKVKYVTEGMRKPAFLSGEQKKAIVDLLFKTNRKVTVKQLKEDYFKKIECFDSVEISGVEDRFNASLGTYHDLLKIIKDKDFLDNEENEDILEDIVLTLTLFEDREMIEERLKTYAHLFDDKVMKQLKRRRYTGWGRLSRKLINGIRDKQSGKTILDFLKSDGFANRNFMQLIHDDSLTFKEDIQKAQVSGQGDSLHEHIANLAGSPAIKKGILQTVKVVDELVKVMGRHKPENIVIEMARENQTTQKGQKNSRERMKRIEEGIKELGSQILKEHPVENTQLQNEKLYLYYLQNGRDMYVDQELDINRLSDYDVDHIVPQSFLKDDSIDNKVLTRSDKARGKSDNVPSEEVVKKMKNYWRQLLNAKLITQRKFDNLTKAERGGLSELDKAGFIKRQLVETRQITKHVAQILDSRMNTKYDENDKLIREVKVITLKSKLVSDFRKDFQFYKVREINNYHHAHDAYLNAVVGTALIKKYPKLESEFVYGDYKVYDVRKMIAKSEQEIGKATAKYFFYSNIMNFFKTEITLANGEIRKRPLIETNGETGEIVWDKGRDFATVRKVLSMPQVNIVKKTEVQTGGFSKESILPKRNSDKLIARKKDWDPKKYGGFDSPTVAYSVLVVAKVEKGKSKKLKSVKELLGITIMERSSFEKNPIDFLEAKGYKEVKKDLIIKLPKYSLFELENGRKRMLASAGELQKGNELALPSKYVNFLYLASHYEKLKGSPEDNEQKQLFVEQHKHYLDEIIEQISEFSKRVILADANLDKVLSAYNKHRDKPIREQAENIIHLFTLTNLGAPAAFKYFDTTIDRKRYTSTKEVLDATLIHQSITGLYETRIDLSQLGGDGGPAPAPAPAPGGTLQLEEEYRLFEPESTQKQEMDIWLKNFPQAWAETGGMGTAHCQAPVLIQLKATATPISIRQYPMPHEAYQGIKPHIRRMLDQGILKPCQSPWNTPLLPVKKPGTEDYRPVQDLREVNKRVEDIHPTVPNPYNLLSTLPPSHPWYTVLDLKDAFFCLRLHSESQLLFAFEWRDPEIGLSGQLTWTRLPQGFKNSPTLFNEALHSDLADFRVRYPALVLLQYVDDLLLAAATRTECLEGTKALLETLGNKGYRASAKKAQICLQEVTYLGYSLKDGQRWLTKARKEAILSIPVPKNSRQVREFLGTAGYCRLWIPGFAELAAPLYPLTRPGTLFQWGTEQQLAFEDIKKALLSSPALGLPDITKPFELFIDENSGFAKGVLVQKLGPWKRPVAYLSKKLDTVASGWPPCLRMVAAIAILVKDAGKLTLGQPLTILTSHPVEALVRQPPNKWLSNARMTHYQAMLLDAERVHFGPTVSLNPATLLPLPSGGNHHDCLQILAETHGTRPDLTDQPLPDADLTWYTDGSSFIRNGEREAGAAVTTESEVIWAAPLPPGTSAQRAELIALTQALKMAEGKKLTVYTDSRYAFATTHVHGEIYRRRGWLTSEGKEIKNKNEILALLEALFLPKRLSIIHCPGHQKGDSPQAKGNRLADDTAKKAATETHSSLTVLPAGKRTADGSEFEKRTADGSEFESPKKKAKVE

SEQ ID NO: 6518 - protein, 2085 aa, synthetic construct
MPAAKRVKLDGGDKKYSIGLDIGTNSVGWAVITDEYKVPSKKFKVLGNTDRHSIKKNLIGALLFDSGETAEATRLKRTARRRYTRRKNRICYLQEIFSNEMAKVDDSFFHRLEESFLVEEDKKHERHPIFGNIVDEVAYHEKYPTIYHLRKKLVDSTDKADLRLIYLALAHMIKFRGHFLIEGDLNPDNSDVDKLFIQLVQTYNQLFEENPINASGVDAKAILSARLSKSRRLENLIAQLPGEKKNGLFGNLIALSLGLTPNFKSNFDLAEDAKLQLSKDTYDDDLDNLLAQIGDQYADLFLAAKNLSDAILLSDILRVNTEITKAPLSASMIKRYDEHHQDLTLLKALVRQQLPEKYKEIFFDQSKNGYAGYIDGGASQEEFYKFIKPILEKMDGTEELLVKLNREDLLRKQRTFDNGSIPHQIHLGELHAILRRQEDFYPFLKDNREKIEKILTFRIPYYVGPLARGNSRFAWMTRKSEETITPWNFEEVVDKGASAQSFIERMTNFDKNLPNEKVLPKHSLLYEYFTVYNELTKVKYVTEGMRKPAFLSGEQKKAIVDLLFKTNRKVTVKQLKEDYFKKIECFDSVEISGVEDRFNASLGTYHDLLKIIKDKDFLDNEENEDILEDIVLTLTLFEDREMIEERLKTYAHLFDDKVMKQLKRRRYTGWGRLSRKLINGIRDKQSGKTILDFLKSDGFANRNFMQLIHDDSLTFKEDIQKAQVSGQGDSLHEHIANLAGSPAIKKGILQTVKVVDELVKVMGRHKPENIVIEMARENQTTQKGQKNSRERMKRIEEGIKELGSQILKEHPVENTQLQNEKLYLYYLQNGRDMYVDQELDINRLSDYDVDHIVPQSFLKDDSIDNKVLTRSDKARGKSDNVPSEEVVKKMKNYWRQLLNAKLITQRKFDNLTKAERGGLSELDKAGFIKRQLVETRQITKHVAQILDSRMNTKYDENDKLIREVKVITLKSKLVSDFRKDFQFYKVREINNYHHAHDAYLNAVVGTALIKKYPKLESEFVYGDYKVYDVRKMIAKSEQEIGKATAKYFFYSNIMNFFKTEITLANGEIRKRPLIETNGETGEIVWDKGRDFATVRKVLSMPQVNIVKKTEVQTGGFSKESILPKRNSDKLIARKKDWDPKKYGGFDSPTVAYSVLVVAKVEKGKSKKLKSVKELLGITIMERSSFEKNPIDFLEAKGYKEVKKDLIIKLPKYSLFELENGRKRMLASAGELQKGNELALPSKYVNFLYLASHYEKLKGSPEDNEQKQLFVEQHKHYLDEIIEQISEFSKRVILADANLDKVLSAYNKHRDKPIREQAENIIHLFTLTNLGAPAAFKYFDTTIDRKRYTSTKEVLDATLIHQSITGLYETRIDLSQLGGDGGPAPAPAPAPGGVPWLTQQPLQLTILVPLQEYQEKILSKTALPEDQKQQLKTLFVKYDNLWQHWENQVGHRKIRPHNIATGDYPPRPQKQYPINPKAKPSIQIVIDDLLKQGVLTPQNSTMNTPVYPVPKPDGRWRMVLDYREVNKTIPLTAAQNQHSAGILATIVRQKYKTTLDLANGFWAHPITPESYWLTAFTWQGKQYCWTRLPQGFLNSPALFNADVVDLLKEIPNVQVYVDDIYLSHDDPKEHVQQLEKVFQILLQAGYVVSLKKSEIGQKTVEFLGFNITKEGRGLTDTFKTKLLNITPPKDLKQLQSILGKLNFARNFIPNFAELVQPLYNLIAPAKGKYIEWSEENTKQLNMVIEALNTASNLEERLPEQRLVIKVNTSPSAGYVRYYNETGKKPIMYLNYVFSKAELKFSMLEKLLTTMHKALIKAMDLAMGQEILVYSPIVSMTKIQKTPLPERKALPIRWITWMTYLEDPRIQFHYDKTLPELKHIPDVYTSSQSPVKHPSQYEGVFYTDGSAIKSPDPTKSNNAGMGIVHATYKPEYQVLNQWSIPLGNHTAQMAEIAAVEFACKKALKIPGPVLVITDSFYVAESANKELPYWKSNGFVNNKKKPLKHISKWKSIAECLSMKPDITIQHEKGISLQIPVFILKGNALADKLATQGSYVVNAGKRTADGSEFEKRTADGSEFESPKKKAKVE

SEQ ID NO: 6519 - protein, 2216 aa, synthetic construct
MPAAKRVKLDGGDKKYSIGLDIGTNSVGWAVITDEYKVPSKKFKVLGNTDRHSIKKNLIGALLFDSGETAEATRLKRTARRRYTRRKNRICYLQEIFSNEMAKVDDSFFHRLEESFLVEEDKKHERHPIFGNIVDEVAYHEKYPTIYHLRKKLVDSTDKADLRLIYLALAHMIKFRGHFLIEGDLNPDNSDVDKLFIQLVQTYNQLFEENPINASGVDAKAILSARLSKSRRLENLIAQLPGEKKNGLFGNLIALSLGLTPNFKSNFDLAEDAKLQLSKDTYDDDLDNLLAQIGDQYADLFLAAKNLSDAILLSDILRVNTEITKAPLSASMIKRYDEHHQDLTLLKALVRQQLPEKYKEIFFDQSKNGYAGYIDGGASQEEFYKFIKPILEKMDGTEELLVKLNREDLLRKQRTFDNGSIPHQIHLGELHAILRRQEDFYPFLKDNREKIEKILTFRIPYYVGPLARGNSRFAWMTRKSEETITPWNFEEVVDKGASAQSFIERMTNFDKNLPNEKVLPKHSLLYEYFTVYNELTKVKYVTEGMRKPAFLSGEQKKAIVDLLFKTNRKVTVKQLKEDYFKKIECFDSVEISGVEDRFNASLGTYHDLLKIIKDKDFLDNEENEDILEDIVLTLTLFEDREMIEERLKTYAHLFDDKVMKQLKRRRYTGWGRLSRKLINGIRDKQSGKTILDFLKSDGFANRNFMQLIHDDSLTFKEDIQKAQVSGQGDSLHEHIANLAGSPAIKKGILQTVKVVDELVKVMGRHKPENIVIEMARENQTTQKGQKNSRERMKRIEEGIKELGSQILKEHPVENTQLQNEKLYLYYLQNGRDMYVDQELDINRLSDYDVDHIVPQSFLKDDSIDNKVLTRSDKARGKSDNVPSEEVVKKMKNYWRQLLNAKLITQRKFDNLTKAERGGLSELDKAGFIKRQLVETRQITKHVAQILDSRMNTKYDENDKLIREVKVITLKSKLVSDFRKDFQFYKVREINNYHHAHDAYLNAVVGTALIKKYPKLESEFVYGDYKVYDVRKMIAKSEQEIGKATAKYFFYSNIMNFFKTEITLANGEIRKRPLIETNGETGEIVWDKGRDFATVRKVLSMPQVNIVKKTEVQTGGFSKESILPKRNSDKLIARKKDWDPKKYGGFDSPTVAYSVLVVAKVEKGKSKKLKSVKELLGITIMERSSFEKNPIDFLEAKGYKEVKKDLIIKLPKYSLFELENGRKRMLASAGELQKGNELALPSKYVNFLYLASHYEKLKGSPEDNEQKQLFVEQHKHYLDEIIEQISEFSKRVILADANLDKVLSAYNKHRDKPIREQAENIIHLFTLTNLGAPAAFKYFDTTIDRKRYTSTKEVLDATLIHQSITGLYETRIDLSQLGGDGGPAPAPAPAPGGTLGDQGSRGSDPLPEPRVTLTVEGIPTEFLVNTGAEHSVLTKPMGKMGSKRTVVAGATGSKVYPWTTKRLLKIGQKQVTHSFLVIPECPAPLLGRDLLTKLKAQIQFSTEGPQVTWEDRPAMCLVLNLEEEYRLHEKPVPPSIDPSWLQLFPMVWAEKAGMGLANQVPPVVVELKSDASPVAVRQYPMSKEAREGIRPHIQRFLDLGILVPCQSPWNTPLLPVKKPGTNDYRPVQDLREVNKRVQDIHPTVPNPYNLLSSLPPSHTWYSVLDLKDAFFCLKLHPNSQPLFAFEWRDPEKGNTGQLTWTRLPQGFKNSPTLFDEALHRDLASFRALNPQVVMLQYVDDLLVAAPTYRDCKEGTRRLLQELSKLGYRVSAKKAQLCREEVTYLGYLLKGGKRWLTPARKATVMKIPTPTTPRQVREFLGTAGFCRLWIPGFASLAAPLYPLTREKVPFTWTEAHQEAFGRIKEALLSAPALALPDLTKPFALYVDEKEGVARGVLTQTLGPWRRPVAYLSKKLDPVASGWPTCLKAIAAVALLLKDADKLTLGQNVLVIAPHNLESIVRQPPDRWMTNARMTHYQSLLLNERVSFAPPAILNPATLLPVESDDTPIHICSEILAEETGTRPDLRDQPLPGVPAWYTDGSSFIMDGRRQAGAAIVDNKRTVWASNLPEGTSAQKAELIALTQALRLAEGKSINIYTDSRYAFATAHVHGAIYKQRGLLTSAGKDIKNKEEILALLEAIHLPKRVAIIHCPGHQRGTDPVATGNRKADEAAKQAAQSTRILTETTKNAGKRTADGSEFEKRTADGSEFESPKKKAKVE

SEQ ID NO: 6520 - protein, 2125 aa, synthetic construct
MPAAKRVKLDGGDKKYSIGLDIGTNSVGWAVITDEYKVPSKKFKVLGNTDRHSIKKNLIGALLFDSGETAEATRLKRTARRRYTRRKNRICYLQEIFSNEMAKVDDSFFHRLEESFLVEEDKKHERHPIFGNIVDEVAYHEKYPTIYHLRKKLVDSTDKADLRLIYLALAHMIKFRGHFLIEGDLNPDNSDVDKLFIQLVQTYNQLFEENPINASGVDAKAILSARLSKSRRLENLIAQLPGEKKNGLFGNLIALSLGLTPNFKSNFDLAEDAKLQLSKDTYDDDLDNLLAQIGDQYADLFLAAKNLSDAILLSDILRVNTEITKAPLSASMIKRYDEHHQDLTLLKALVRQQLPEKYKEIFFDQSKNGYAGYIDGGASQEEFYKFIKPILEKMDGTEELLVKLNREDLLRKQRTFDNGSIPHQIHLGELHAILRRQEDFYPFLKDNREKIEKILTFRIPYYVGPLARGNSRFAWMTRKSEETITPWNFEEVVDKGASAQSFIERMTNFDKNLPNEKVLPKHSLLYEYFTVYNELTKVKYVTEGMRKPAFLSGEQKKAIVDLLFKTNRKVTVKQLKEDYFKKIECFDSVEISGVEDRFNASLGTYHDLLKIIKDKDFLDNEENEDILEDIVLTLTLFEDREMIEERLKTYAHLFDDKVMKQLKRRRYTGWGRLSRKLINGIRDKQSGKTILDFLKSDGFANRNFMQLIHDDSLTFKEDIQKAQVSGQGDSLHEHIANLAGSPAIKKGILQTVKVVDELVKVMGRHKPENIVIEMARENQTTQKGQKNSRERMKRIEEGIKELGSQILKEHPVENTQLQNEKLYLYYLQNGRDMYVDQELDINRLSDYDVDHIVPQSFLKDDSIDNKVLTRSDKARGKSDNVPSEEVVKKMKNYWRQLLNAKLITQRKFDNLTKAERGGLSELDKAGFIKRQLVETRQITKHVAQILDSRMNTKYDENDKLIREVKVITLKSKLVSDFRKDFQFYKVREINNYHHAHDAYLNAVVGTALIKKYPKLESEFVYGDYKVYDVRKMIAKSEQEIGKATAKYFFYSNIMNFFKTEITLANGEIRKRPLIETNGETGEIVWDKGRDFATVRKVLSMPQVNIVKKTEVQTGGFSKESILPKRNSDKLIARKKDWDPKKYGGFDSPTVAYSVLVVAKVEKGKSKKLKSVKELLGITIMERSSFEKNPIDFLEAKGYKEVKKDLIIKLPKYSLFELENGRKRMLASAGELQKGNELALPSKYVNFLYLASHYEKLKGSPEDNEQKQLFVEQHKHYLDEIIEQISEFSKRVILADANLDKVLSAYNKHRDKPIREQAENIIHLFTLTNLGAPAAFKYFDTTIDRKRYTSTKEVLDATLIHQSITGLYETRIDLSQLGGDGGPAPAPAPAPGGLLGRDLLTKLKAQIQFSTEGPQVTWEDRPAMCLVLNLEEEYRLHEKPVPPSIDPSWLQLFPMVWAEKAGMGLANQVPPVVVELKSDASPVAVRQYPMSKEAREGIRPHIQRFLDLGILVPCQSPWNTPLLPVKKPGTNDYRPVQDLREVNKRVQDIHPTVPNPYNLLSSLPPSHTWYSVLDLKDAFFCLKLHPNSQPLFAFEWRDPEKGNTGQLTWTRLPQGFKNSPTLFNEALHRDLASFRALNPQVVMLQYVDDLLVAAPTYRDCKEGTRRLLQELSKLGYRVSAKKAQLCREEVTYLGYLLKGGKRWLTPARKATVMKIPTPTTPRQVREFLGTAGFCRLWIPGFASLAAPLYPLTRPKVPFTWTEAHQEAFGRIKEALLSAPALALPDLTKPFALYVDEKEGVARGVLTQTLGPWRRPVAYLSKKLDPVASGWPTCLKAIAAVALLLKDADKLTLGQNVLVIAPHNLESIVRQPPDRWMTNARMTHYQSLLLNERVSFAPPAILNPATLLPVESDDTPIHICSEILAEETGTRPDLRDQPLPGVPAWYTDGSSFIMDGRRQAGAAIVDNKRTVWASNLPEGTSAQKAELIALTQALRLAEGKSINIYTDSRYAFATAHVHGAIYKQRGWLTSAGKDIKNKEEILALLEAIHLPKRVAIIHCPGHQRGTDPVATGNRKADEAAKQAAQSTRILTETTKNAGKRTADGSEFEKRTADGSEFESPKKKAKVE

SEQ ID NO: 6521 - protein, 2216 aa, synthetic construct
MPAAKRVKLDGGDKKYSIGLDIGTNSVGWAVITDEYKVPSKKFKVLGNTDRHSIKKNLIGALLFDSGETAEATRLKRTARRRYTRRKNRICYLQEIFSNEMAKVDDSFFHRLEESFLVEEDKKHERHPIFGNIVDEVAYHEKYPTIYHLRKKLVDSTDKADLRLIYLALAHMIKFRGHFLIEGDLNPDNSDVDKLFIQLVQTYNQLFEENPINASGVDAKAILSARLSKSRRLENLIAQLPGEKKNGLFGNLIALSLGLTPNFKSNFDLAEDAKLQLSKDTYDDDLDNLLAQIGDQYADLFLAAKNLSDAILLSDILRVNTEITKAPLSASMIKRYDEHHQDLTLLKALVRQQLPEKYKEIFFDQSKNGYAGYIDGGASQEEFYKFIKPILEKMDGTEELLVKLNREDLLRKQRTFDNGSIPHQIHLGELHAILRRQEDFYPFLKDNREKIEKILTFRIPYYVGPLARGNSRFAWMTRKSEETITPWNFEEVVDKGASAQSFIERMTNFDKNLPNEKVLPKHSLLYEYFTVYNELTKVKYVTEGMRKPAFLSGEQKKAIVDLLFKTNRKVTVKQLKEDYFKKIECFDSVEISGVEDRFNASLGTYHDLLKIIKDKDFLDNEENEDILEDIVLTLTLFEDREMIEERLKTYAHLFDDKVMKQLKRRRYTGWGRLSRKLINGIRDKQSGKTILDFLKSDGFANRNFMQLIHDDSLTFKEDIQKAQVSGQGDSLHEHIANLAGSPAIKKGILQTVKVVDELVKVMGRHKPENIVIEMARENQTTQKGQKNSRERMKRIEEGIKELGSQILKEHPVENTQLQNEKLYLYYLQNGRDMYVDQELDINRLSDYDVDHIVPQSFLKDDSIDNKVLTRSDKARGKSDNVPSEEVVKKMKNYWRQLLNAKLITQRKFDNLTKAERGGLSELDKAGFIKRQLVETRQITKHVAQILDSRMNTKYDENDKLIREVKVITLKSKLVSDFRKDFQFYKVREINNYHHAHDAYLNAVVGTALIKKYPKLESEFVYGDYKVYDVRKMIAKSEQEIGKATAKYFFYSNIMNFFKTEITLANGEIRKRPLIETNGETGEIVWDKGRDFATVRKVLSMPQVNIVKKTEVQTGGFSKESILPKRNSDKLIARKKDWDPKKYGGFDSPTVAYSVLVVAKVEKGKSKKLKSVKELLGITIMERSSFEKNPIDFLEAKGYKEVKKDLIIKLPKYSLFELENGRKRMLASAGELQKGNELALPSKYVNFLYLASHYEKLKGSPEDNEQKQLFVEQHKHYLDEIIEQISEFSKRVILADANLDKVLSAYNKHRDKPIREQAENIIHLFTLTNLGAPAAFKYFDTTIDRKRYTSTKEVLDATLIHQSITGLYETRIDLSQLGGDGGPAPAPAPAPGGTLGDQGSRGSDPLPEPRVTLTVEGIPTEFLVNTGAEHSVLTKPMGKMGSKRTVVAGATGSKVYPWTTKRLLKIGQKQVTHSFLVIPECPAPLLGRDLLTKLKAQIQFSTEGPQVTWEDRPAMCLVLNLEEEYRLHEKPVPPSIDPSWLQLFPMVWAEKAGMGLANQVPPVVVELKSDASPVAVRQYPMSKEAREGIRPHIQRFLDLGILVPCQSPWNTPLLPVKKPGTNDYRPVQDLREVNKRVQDIHPTVPNPYNLLSSLPPSHTWYSVLDLKDAFFCLKLHPNSQPLFAFEWRDPEKGNTGQLTWTRLPQGFKNSPTLFNEALHRDLASFRALNPQVVMLQYVDDLLVAAPTYRDCKEGTRRLLQELSKLGYRVSAKKAQLCREEVTYLGYLLKGGKRWLTPARKATVMKIPTPTTPRQVREFLGTAGFCRLWIPGFASLAAPLYPLTRPKVPFTWTEAHQEAFGRIKEALLSAPALALPDLTKPFALYVDEKEGVARGVLTQTLGPWRRPVAYLSKKLDPVASGWPTCLKAIAAVALLLKDADKLTLGQNVLVIAPHNLESIVRQPPDRWMTNARMTHYQSLLLNERVSFAPPAILNPATLLPVESDDTPIHICSEILAEETGTRPDLRDQPLPGVPAWYTDGSSFIMDGRRQAGAAIVDNKRTVWASNLPEGTSAQKAELIALTQALRLAEGKSINIYTDSRYAFATAHVHGAIYKQRGWLTSAGKDIKNKEEILALLEAIHLPKRVAIIHCPGHQRGTDPVATGNRKADEAAKQAAQSTRILTETTKNAGKRTADGSEFEKRTADGSEFESPKKKAKVE

SEQ ID NO: 6522 - protein, 2094 aa, synthetic construct
MPAAKRVKLDGGDKKYSIGLDIGTNSVGWAVITDEYKVPSKKFKVLGNTDRHSIKKNLIGALLFDSGETAEATRLKRTARRRYTRRKNRICYLQEIFSNEMAKVDDSFFHRLEESFLVEEDKKHERHPIFGNIVDEVAYHEKYPTIYHLRKKLVDSTDKADLRLIYLALAHMIKFRGHFLIEGDLNPDNSDVDKLFIQLVQTYNQLFEENPINASGVDAKAILSARLSKSRRLENLIAQLPGEKKNGLFGNLIALSLGLTPNFKSNFDLAEDAKLQLSKDTYDDDLDNLLAQIGDQYADLFLAAKNLSDAILLSDILRVNTEITKAPLSASMIKRYDEHHQDLTLLKALVRQQLPEKYKEIFFDQSKNGYAGYIDGGASQEEFYKFIKPILEKMDGTEELLVKLNREDLLRKQRTFDNGSIPHQIHLGELHAILRRQEDFYPFLKDNREKIEKILTFRIPYYVGPLARGNSRFAWMTRKSEETITPWNFEEVVDKGASAQSFIERMTNFDKNLPNEKVLPKHSLLYEYFTVYNELTKVKYVTEGMRKPAFLSGEQKKAIVDLLFKTNRKVTVKQLKEDYFKKIECFDSVEISGVEDRFNASLGTYHDLLKIIKDKDFLDNEENEDILEDIVLTLTLFEDREMIEERLKTYAHLFDDKVMKQLKRRRYTGWGRLSRKLINGIRDKQSGKTILDFLKSDGFANRNFMQLIHDDSLTFKEDIQKAQVSGQGDSLHEHIANLAGSPAIKKGILQTVKVVDELVKVMGRHKPENIVIEMARENQTTQKGQKNSRERMKRIEEGIKELGSQILKEHPVENTQLQNEKLYLYYLQNGRDMYVDQELDINRLSDYDVDHIVPQSFLKDDSIDNKVLTRSDKARGKSDNVPSEEVVKKMKNYWRQLLNAKLITQRKFDNLTKAERGGLSELDKAGFIKRQLVETRQITKHVAQILDSRMNTKYDENDKLIREVKVITLKSKLVSDFRKDFQFYKVREINNYHHAHDAYLNAVVGTALIKKYPKLESEFVYGDYKVYDVRKMIAKSEQEIGKATAKYFFYSNIMNFFKTEITLANGEIRKRPLIETNGETGEIVWDKGRDFATVRKVLSMPQVNIVKKTEVQTGGFSKESILPKRNSDKLIARKKDWDPKKYGGFDSPTVAYSVLVVAKVEKGKSKKLKSVKELLGITIMERSSFEKNPIDFLEAKGYKEVKKDLIIKLPKYSLFELENGRKRMLASAGELQKGNELALPSKYVNFLYLASHYEKLKGSPEDNEQKQLFVEQHKHYLDEIIEQISEFSKRVILADANLDKVLSAYNKHRDKPIREQAENIIHLFTLTNLGAPAAFKYFDTTIDRKRYTSTKEVLDATLIHQSITGLYETRIDLSQLGGDGGPAPAPAPAPGGLGIEDEYRLHETSTEPDVSLGSTWLSDFPQAWAETGGMGLAVRQAPLIIPLKATSTPVSIQQYPMSHEARLGIKPHIQRLLDQGILVPCQSPWNTPLLPVKKPGTNDYRPVQDLREVNKRVEDIHPTVPNPYNLLSGLPPSHQWYTVLDLKDAFFCLRLHPTSQPLFAFEWRDPGMGISGQLTWTRLPQGFKNSPTLFNEALHRDLADFRIQHPDLILLQYVDDILLAATSELDCQQGTRALLQTLGDLGYRASAKKAQICQKQVKYLGYLLREGQRWLTEARKETVMGQPVPKTPRQLREFLGKAGFCRLFIPGFAEMAAPLYPLTKPGTLFSWGPDQQKAYQEIKQALLTAPALGLPDLTKPFELFVDEKQGYAKGVLTQKLGPWRRPVAYLSKKLDPVAAGWPPCLRMVAAIAVLTKDAGKLTMGQPLVILAPHAVEALVKQPPDRWLSNARMTHYQAMLLDTDRVQFGPVVALNPATLLPLPEEGAPHDCLEILAETHGTRPDLTDQPIPDADHTWYTDGSSFLQEGQRKAGAAVTTETEVIWAGALPAGTSAQRAELIALTQALKMAEGKRLNVYTDSRYAFATAHIHGEIYRRRGWLTSEGREIKNKSEILALLKALFLPKRLSIIHCLGHQKGDSAEARGNRLADQAAREAAIKTPPDTSTLLIAGKRTADGSEFEKRTADGSEFESPKKKAKVE

SEQ ID NO: 6523 - protein, 2094 aa, synthetic construct; identical to SEQ ID NO: 6522

SEQ ID NO: 6524 - protein, 2094 aa, synthetic construct
MPAAKRVKLDGGDKKYSIGLDIGTNSVGWAVITDEYKVPSKKFKVLGNTDRHSIKKNLIGALLFDSGETAEATRLKRTARRRYTRRKNRICYLQEIFSNEMAKVDDSFFHRLEESFLVEEDKKHERHPIFGNIVDEVAYHEKYPTIYHLRKKLVDSTDKADLRLIYLALAHMIKFRGHFLIEGDLNPDNSDVDKLFIQLVQTYNQLFEENPINASGVDAKAILSARLSKSRRLENLIAQLPGEKKNGLFGNLIALSLGLTPNFKSNFDLAEDAKLQLSKDTYDDDLDNLLAQIGDQYADLFLAAKNLSDAILLSDILRVNTEITKAPLSASMIKRYDEHHQDLTLLKALVRQQLPEKYKEIFFDQSKNGYAGYIDGGASQEEFYKFIKPILEKMDGTEELLVKLNREDLLRKQRTFDNGSIPHQIHLGELHAILRRQEDFYPFLKDNREKIEKILTFRIPYYVGPLARGNSRFAWMTRKSEETITPWNFEEVVDKGASAQSFIERMTNFDKNLPNEKVLPKHSLLYEYFTVYNELTKVKYVTEGMRKPAFLSGEQKKAIVDLLFKTNRKVTVKQLKEDYFKKIECFDSVEISGVEDRFNASLGTYHDLLKIIKDKDFLDNEENEDILEDIVLTLTLFEDREMIEERLKTYAHLFDDKVMKQLKRRRYTGWGRLSRKLINGIRDKQSGKTILDFLKSDGFANRNFMQLIHDDSLTFKEDIQKAQVSGQGDSLHEHIANLAGSPAIKKGILQTVKVVDELVKVMGRHKPENIVIEMARENQTTQKGQKNSRERMKRIEEGIKELGSQILKEHPVENTQLQNEKLYLYYLQNGRDMYVDQELDINRLSDYDVDHIVPQSFLKDDSIDNKVLTRSDKARGKSDNVPSEEVVKKMKNYWRQLLNAKLITQRKFDNLTKAERGGLSELDKAGFIKRQLVETRQITKHVAQILDSRMNTKYDENDKLIREVKVITLKSKLVSDFRKDFQFYKVREINNYHHAHDAYLNAVVGTALIKKYPKLESEFVYGDYKVYDVRKMIAKSEQEIGKATAKYFFYSNIMNFFKTEITLANGEIRKRPLIETNGETGEIVWDKGRDFATVRKVLSMPQVNIVKKTEVQTGGFSKESILPKRNSDKLIARKKDWDPKKYGGFDSPTVAYSVLVVAKVEKGKSKKLKSVKELLGITIMERSSFEKNPIDFLEAKGYKEVKKDLIIKLPKYSLFELENGRKRMLASAGELQKGNELALPSKYVNFLYLASHYEKLKGSPEDNEQKQLFVEQHKHYLDEIIEQISEFSKRVILADANLDKVLSAYNKHRDKPIREQAENIIHLFTLTNLGAPAAFKYFDTTIDRKRYTSTKEVLDATLIHQSITGLYETRIDLSQLGGDGGPAPAPAPAPGGTLNIEDEHRLHETSKEPDVSLGSTWLSDFPQAWAETGGMGLAVRQAPLIIPLKATSTPVSIKQYPMSQEARLGIKPHIQRLLDQGILVPCQSPWNTPLLPVKKPGTNDYRPVQDLREVNKRVEDIHPTVPNPYNLLSGLPPSHQWYTVLDLKDAFFCLRLHPTSQPLFAFEWRDPEMGISGQLTWTRLPQGFKNSPTLFDEALHRDLADFRIQHPDLILLQYVDDLLLAATSELDCQQGTRALLQTLGNLGYRASAKKAQICQKQVKYLGYLLKEGQRWLTEARKETVMGQPTPKTPRQLREFLGTAGFCRLWIPGFAEMAAPLYPLTKTGTLFNWGPDQQKAYQEIKQALLTAPALGLPDLTKPFELFVDEKQGYAKGVLTQKLGPWRRPVAYLSKKLDPVAAGWPPCLRMVAAIAVLTKDAGKLTMGQPLVILAPHAVEALVKQPPDRWLSNARMTHYQALLLDTDRVQFGPVVALNPATLLPLPEEGLQHNCLDILAEAHGTRPDLTDQPLPDADHTWYTDGSSLLQEGQRKAGAAVTTETEVIWAKALPAGTSAQRAELIALTQALKMAEGKKLNVYTDSRYAFATAHIHGEIYRRRGLLTSEGKEIKNKDEILALLKALFLPKRLSIIHCPGHQKGHSAEARGNRMADQAARKAAITETPDTSTLLAGKRTADGSEFEKRTADGSEFESPKKKAKVE

SEQ ID NO: 6525 - protein, 2086 aa, synthetic construct
MPAAKRVKLDGGDKKYSIGLDIGTNSVGWAVITDEYKVPSKKFKVLGNTDRHSIKKNLIGALLFDSGETAEATRLKRTARRRYTRRKNRICYLQEIFSNEMAKVDDSFFHRLEESFLVEEDKKHERHPIFGNIVDEVAYHEKYPTIYHLRKKLVDSTDKADLRLIYLALAHMIKFRGHFLIEGDLNPDNSDVDKLFIQLVQTYNQLFEENPINASGVDAKAILSARLSKSRRLENLIAQLPGEKKNGLFGNLIALSLGLTPNFKSNFDLAEDAKLQLSKDTYDDDLDNLLAQIGDQYADLFLAAKNLSDAILLSDILRVNTEITKAPLSASMIKRYDEHHQDLTLLKALVRQQLPEKYKEIFFDQSKNGYAGYIDGGASQEEFYKFIKPILEKMDGTEELLVKLNREDLLRKQRTFDNGSIPHQIHLGELHAILRRQEDFYPFLKDNREKIEKILTFRIPYYVGPLARGNSRFAWMTRKSEETITPWNFEEVVDKGASAQSFIERMTNFDKNLPNEKVLPKHSLLYEYFTVYNELTKVKYVTEGMRKPAFLSGEQKKAIVDLLFKTNRKVTVKQLKEDYFKKIECFDSVEISGVEDRFNASLGTYHDLLKIIKDKDFLDNEENEDILEDIVLTLTLFEDREMIEERLKTYAHLFDDKVMKQLKRRRYTGWGRLSRKLINGIRDKQSGKTILDFLKSDGFANRNFMQLIHDDSLTFKEDIQKAQVSGQGDSLHEHIANLAGSPAIKKGILQTVKVVDELVKVMGRHKPENIVIEMARENQTTQKGQKNSRERMKRIEEGIKELGSQILKEHPVENTQLQNEKLYLYYLQNGRDMYVDQELDINRLSDYDVDHIVPQSFLKDDSIDNKVLTRSDKARGKSDNVPSEEVVKKMKNYWRQLLNAKLITQRKFDNLTKAERGGLSELDKAGFIKRQLVETRQITKHVAQILDSRMNTKYDENDKLIREVKVITLKSKLVSDFRKDFQFYKVREINNYHHAHDAYLNAVVGTALIKKYPKLESEFVYGDYKVYDVRKMIAKSEQEIGKATAKYFFYSNIMNFFKTEITLANGEIRKRPLIETNGETGEIVWDKGRDFATVRKVLSMPQVNIVKKTEVQTGGFSKESILPKRNSDKLIARKKDWDPKKYGGFDSPTVAYSVLVVAKVEKGKSKKLKSVKELLGITIMERSSFEKNPIDFLEAKGYKEVKKDLIIKLPKYSLFELENGRKRMLASAGELQKGNELALPSKYVNFLYLASHYEKLKGSPEDNEQKQLFVEQHKHYLDEIIEQISEFSKRVILADANLDKVLSAYNKHRDKPIREQAENIIHLFTLTNLGAPAAFKYFDTTIDRKRYTSTKEVLDATLIHQSITGLYETRIDLSQLGGDGGPAPAPAPAPGGLDDEYRLYSPLVKPDQNIQFWLEQFPQAWAETAGMGLAKQVPPQVIQLKASATPVSVRQYPLSKEAQEGIRPHVQRLIQQGILVPVQSPWNTPLLPVRKPGTNDYRPVQDLREVNKRVQDIHPTVPNPYNLLCALPPQRSWYTVLDLKDAFFCLRLHPTSQPLFAFEWRDPGTGRTGQLTWTRLPQGFKNSPTIFNEALHRDLANFRIQHPQVTLLQYVDDLLLAGATKQDCLEGTKALLLELSDLGYRASAKKAQICRREVTYLGYSLRDGQRWLTEARKKTVVQIPAPTTAKQVREFLGKAGFCRLFIPGFATLAAPLYPLTKPKGEFSWAPEHQKAFDAIKKALLSAPALALPDVTKPFTLYVDERKGVARGVLTQTLGPWRRPVAYLSKKLDPVASGWPVCLKAIAAVAILVKDADKLTLGQNITVIAPHALENIVRQPPDRWMTNARMTHYQSLLLTERVTFAPPAALNPATLLPEETDEPVTHDCHQLLIEETGVRKDLTDIPLTGEVLTWFTDGSSYVVEGKRMAGAAVVDGTRTIWASSLPEGTSAQKAELMALTQALRLAEGKSINIYTDSRYAFATAHVHGAIYKQRGWLTSAGREIKNKEEILSLLEALHLPKRLAIIHCPGHQKAKDPISRGNQMADRVAKQAAQGVNLLPAGKRTADGSEFEKRTADGSEFESPKKKAKVE

SEQ ID NO: 6526 - protein, 2088 aa, synthetic construct
MPAAKRVKLDGGDKKYSIGLDIGTNSVGWAVITDEYKVPSKKFKVLGNTDRHSIKKNLIGALLFDSGETAEATRLKRTARRRYTRRKNRICYLQEIFSNEMAKVDDSFFHRLEESFLVEEDKKHERHPIFGNIVDEVAYHEKYPTIYHLRKKLVDSTDKADLRLIYLALAHMIKFRGHFLIEGDLNPDNSDVDKLFIQLVQTYNQLFEENPINASGVDAKAILSARLSKSRRLENLIAQLPGEKKNGLFGNLIALSLGLTPNFKSNFDLAEDAKLQLSKDTYDDDLDNLLAQIGDQYADLFLAAKNLSDAILLSDILRVNTEITKAPLSASMIKRYDEHHQDLTLLKALVRQQLPEKYKEIFFDQSKNGYAGYIDGGASQEEFYKFIKPILEKMDGTEELLVKLNREDLLRKQRTFDNGSIPHQIHLGELHAILRRQEDFYPFLKDNREKIEKILTFRIPYYVGPLARGNSRFAWMTRKSEETITPWNFEEVVDKGASAQSFIERMTNFDKNLPNEKVLPKHSLLYEYFTVYNELTKVKYVTEGMRKPAFLSGEQKKAIVDLLFKTNRKVTVKQLKEDYFKKIECFDSVEISGVEDRFNASLGTYHDLLKIIKDKDFLDNEENEDILEDIVLTLTLFEDREMIEERLKTYAHLFDDKVMKQLKRRRYTGWGRLSRKLINGIRDKQSGKTILDFLKSDGFANRNFMQLIHDDSLTFKEDIQKAQVSGQGDSLHEHIANLAGSPAIKKGILQTVKVVDELVKVMGRHKPENIVIEMARENQTTQKGQKNSRERMKRIEEGIKELGSQILKEHPVENTQLQNEKLYLYYLQNGRDMYVDQELDINRLSDYDVDHIVPQSFLKDDSIDNKVLTRSDKARGKSDNVPSEEVVKKMKNYWRQLLNAKLITQRKFDNLTKAERGGLSELDKAGFIKRQLVETRQITKHVAQILDSRMNTKYDENDKLIREVKVITLKSKLVSDFRKDFQFYKVREINNYHHAHDAYLNAVVGTALIKKYPKLESEFVYGDYKVYDVRKMIAKSEQEIGKATAKYFFYSNIMNFFKTEITLANGEIRKRPLIETNGETGEIVWDKGRDFATVRKVLSMPQVNIVKKTEVQTGGFSKESILPKRNSDKLIARKKDWDPKKYGGFDSPTVAYSVLVVAKVEKGKSKKLKSVKELLGITIMERSSFEKNPIDFLEAKGYKEVKKDLIIKLPKYSLFELENGRKRMLASAGELQKGNELALPSKYVNFLYLASHYEKLKGSPEDNEQKQLFVEQHKHYLDEIIEQISEFSKRVILADANLDKVLSAYNKHRDKPIREQAENIIHLFTLTNLGAPAAFKYFDTTIDRKRYTSTKEVLDATLIHQSITGLYETRIDLSQLGGDGGPAPAPAPAPGGTLQLDDEYRLYSPLVKPDQNIQFWLEQFPQAWAETAGMGLAKQVPPQVIQLKASATPVSVRQYPLSKEAQEGIRPHVQRLIQQGILVPVQSPWNTPLLPVRKPGTNDYRPVQDLREVNKRVQDIHPTVPNPYNLLCALPPQRSWYTVLDLKDAFFCLRLHPTSQPLFAFEWRDPGTGRTGQLTWTRLPQGFKNSPTIFDEALHRDLANFRIQHPQVTLLQYVDDLLLAGATKQDCLEGTKALLLELSDLGYRASAKKAQICRREVTYLGYSLRDGQRWLTEARKKTVVQIPAPTTAKQVREFLGTAGFCRLWIPGFATLAAPLYPLTKEKGEFSWAPEHQKAFDAIKKALLSAPALALPDVTKPFTLYVDERKGVARGVLTQTLGPWRRPVAYLSKKLDPVASGWPVCLKAIAAVAILVKDADKLTLGQNITVIAPHALENIVRQPPDRWMTNARMTHYQSLLLTERVTFAPPAALNPATLLPEETDEPVTHDCHQLLIEETGVRKDLTDIPLTGEVLTWFTDGSSYVVEGKRMAGAAVVDGTRTIWASSLPEGTSAQKAELMALTQALRLAEGKSINIYTDSRYAFATAHVHGAIYKQRGLLTSAGREIKNKEEILSLLEALHLPKRLAIIHCPGHQKAKDPISRGNQMADRVAKQAAQGVNLLAGKRTADGSEFEKRTADGSEFESPKKKAKVE

SEQ ID NO: 6527 - protein, 2086 aa, synthetic construct; identical to SEQ ID NO: 6525

SEQ ID NO: 6528 - protein, 2088 aa, synthetic construct; identical to SEQ ID NO: 6526

SEQ ID NO: 6529 - protein, 2085 aa, synthetic construct
MPAAKRVKLDGGDKKYSIGLDIGTNSVGWAVITDEYKVPSKKFKVLGNTDRHSIKKNLIGALLFDSGETAEATRLKRTARRRYTRRKNRICYLQEIFSNEMAKVDDSFFHRLEESFLVEEDKKHERHPIFGNIVDEVAYHEKYPTIYHLRKKLVDSTDKADLRLIYLALAHMIKFRGHFLIEGDLNPDNSDVDKLFIQLVQTYNQLFEENPINASGVDAKAILSARLSKSRRLENLIAQLPGEKKNGLFGNLIALSLGLTPNFKSNFDLAEDAKLQLSKDTYDDDLDNLLAQIGDQYADLFLAAKNLSDAILLSDILRVNTEITKAPLSASMIKRYDEHHQDLTLLKALVRQQLPEKYKEIFFDQSKNGYAGYIDGGASQEEFYKFIKPILEKMDGTEELLVKLNREDLLRKQRTFDNGSIPHQIHLGELHAILRRQEDFYPFLKDNREKIEKILTFRIPYYVGPLARGNSRFAWMTRKSEETITPWNFEEVVDKGASAQSFIERMTNFDKNLPNEKVLPKHSLLYEYFTVYNELTKVKYVTEGMRKPAFLSGEQKKAIVDLLFKTNRKVTVKQLKEDYFKKIECFDSVEISGVEDRFNASLGTYHDLLKIIKDKDFLDNEENEDILEDIVLTLTLFEDREMIEERLKTYAHLFDDKVMKQLKRRRYTGWGRLSRKLINGIRDKQSGKTILDFLKSDGFANRNFMQLIHDDSLTFKEDIQKAQVSGQGDSLHEHIANLAGSPAIKKGILQTVKVVDELVKVMGRHKPENIVIEMARENQTTQKGQKNSRERMKRIEEGIKELGSQILKEHPVENTQLQNEKLYLYYLQNGRDMYVDQELDINRLSDYDVDHIVPQSFLKDDSIDNKVLTRSDKARGKSDNVPSEEVVKKMKNYWRQLLNAKLITQRKFDNLTKAERGGLSELDKAGFIKRQLVETRQITKHVAQILDSRMNTKYDENDKLIREVKVITLKSKLVSDFRKDFQFYKVREINNYHHAHDAYLNAVVGTALIKKYPKLESEFVYGDYKVYDVRKMIAKSEQEIGKATAKYFFYSNIMNFFKTEITLANGEIRKRPLIETNGETGEIVWDKGRDFATVRKVLSMPQVNIVKKTEVQTGGFSKESILPKRNSDKLIARKKDWDPKKYGGFDSPTVAYSVLVVAKVEKGKSKKLKSVKELLGITIMERSSFEKNPIDFLEAKGYKEVKKDLIIKLPKYSLFELENGRKRMLASAGELQKGNELALPSKYVNFLYLASHYEKLKGSPEDNEQKQLFVEQHKHYLDEIIEQISEFSKRVILADANLDKVLSAYNKHRDKPIREQAENIIHLFTLTNLGAPAAFKYFDTTIDRKRYTSTKEVLDATLIHQSITGLYETRIDLSQLGGDGGPAPAPAPAPGGIPWLMKKPLQLTTLVPLQEYEERLLKQTMLTGSYKEKLQSLFLKYDALWQHWENQVGHRRIKPHHIATGTVNPRPQKQYPINPKAKASIQTVINDLLKQGVLIQQNSIMNTPVYPVPKPDGKWRMVLDYREVNKTIPLIAAQNQHSAGILSSIFRGKYKTTLDLSNGFWAHSITPESYWLTAFTWLGQQYCWTRLPQGFLNSPALFNADVVDLLKEVPNVQVYVDDIYISHDDPREHLEQLEKVFSLLLNAGYVVSLKKSEIAQHEVEFLGFNITKEGRGLTETFKQKLLNITPPRDLKQLQSILGKLNFARNFIPNFSELVKPLYNIIATAPGKYITWTTDNSQQLQNIISMLNSAENLEERNPEVRLIMKVNTSPSAGYIRFYNEFAKRPIMYLNYVYTKAEVKFTNTEKLLTTIHKGLIKALDLGMGQEILVYSPIVSMTKIQKTPLPERKALPIRWITWMSYLEDPRIQFHYDKTLPELQQVPTVTDDIIAKIKHPSEFSMVFYTDGSAIKHPNVNKSHNAGMGIAQVQFKPEFTVINTWSIPLGDHTAQLAEVAAVEFACKKALKIDGPVLIVTDSFYVAESVNKELPYWQSNGFFNNKKKPLKHVSKWKSIADCIQLKPDIIIIHEKGHQPTASTFHTEGNNLADKLATQGSYVVNAGKRTADGSEFEKRTADGSEFESPKKKAKVE

SEQ ID NO: 6530 - protein, 2098 aa, synthetic construct
MPAAKRVKLDGGDKKYSIGLDIGTNSVGWAVITDEYKVPSKKFKVLGNTDRHSIKKNLIGALLFDSGETAEATRLKRTARRRYTRRKNRICYLQEIFSNEMAKVDDSFFHRLEESFLVEEDKKHERHPIFGNIVDEVAYHEKYPTIYHLRKKLVDSTDKADLRLIYLALAHMIKFRGHFLIEGDLNPDNSDVDKLFIQLVQTYNQLFEENPINASGVDAKAILSARLSKSRRLENLIAQLPGEKKNGLFGNLIALSLGLTPNFKSNFDLAEDAKLQLSKDTYDDDLDNLLAQIGDQYADLFLAAKNLSDAILLSDILRVNTEITKAPLSASMIKRYDEHHQDLTLLKALVRQQLPEKYKEIFFDQSKNGYAGYIDGGASQEEFYKFIKPILEKMDGTEELLVKLNREDLLRKQRTFDNGSIPHQIHLGELHAILRRQEDFYPFLKDNREKIEKILTFRIPYYVGPLARGNSRFAWMTRKSEETITPWNFEEVVDKGASAQSFIERMTNFDKNLPNEKVLPKHSLLYEYFTVYNELTKVKYVTEGMRKPAFLSGEQKKAIVDLLFKTNRKVTVKQLKEDYFKKIECFDSVEISGVEDRFNASLGTYHDLLKIIKDKDFLDNEENEDILEDIVLTLTLFEDREMIEERLKTYAHLFDDKVMKQLKRRRYTGWGRLSRKLINGIRDKQSGKTILDFLKSDGFANRNFMQLIHDDSLTFKEDIQKAQVSGQGDSLHEHIANLAGSPAIKKGILQTVKVVDELVKVMGRHKPENIVIEMARENQTTQKGQKNSRERMKRIEEGIKELGSQILKEHPVENTQLQNEKLYLYYLQNGRDMYVDQELDINRLSDYDVDHIVPQSFLKDDSIDNKVLTRSDKARGKSDNVPSEEVVKKMKNYWRQLLNAKLITQRKFDNLTKAERGGLSELDKAGFIKRQLVETRQITKHVAQILDSRMNTKYDENDKLIREVKVITLKSKLVSDFRKDFQFYKVREINNYHHAHDAYLNAVVGTALIKKYPKLESEFVYGDYKVYDVRKMIAKSEQEIGKATAKYFFYSNIMNFFKTEITLANGEIRKRPLIETNGETGEIVWDKGRDFATVRKVLSMPQVNIVKKTEVQTGGFSKESILPKRNSDKLIARKKDWDPKKYGGFDSPTVAYSVLVVAKVEKGKSKKLKSVKELLGITIMERSSFEKNPIDFLEAKGYKEVKKDLIIKLPKYSLFELENGRKRMLASAGELQKGNELALPSKYVNFLYLASHYEKLKGSPEDNEQKQLFVEQHKHYLDEIIEQISEFSKRVILADANLDKVLSAYNKHRDKPIREQAENIIHLFTLTNLGAPAAFKYFDTTIDRKRYTSTKEVLDATLIHQSITGLYETRIDLSQLGGDGGPAPAPAPAPAPGGTAPLEEEYRLFLEAPIQNVTLLEQWKREIPKVWAEINPPGLASTQAPIHVQLLSTALPVRVRQYPITLEAKRSLRETIRKFRAAGILRPVHSPWNTPLLPVRKSGTSEYRMVQDLREVNKRVETIHPTVPNPYTLLSLLPPDRIWYSVLDLKDAFFCIPLAPESQLIFAFEWADAEEGESGQLTWTRLPQGFKNSPTLFNEALNRDLQGFRLDHPSVSLLQYVDDLLIAADTQAACLSATRDLLMTLAELGYRVSGKKAQLCQEEVTYLGFKIHKGSRSLSNSRTQAILQIPVPKTKRQVREFLGTIGYCRLWIPGFAELAQPLYAATRPGNDPLVWGEKEEEAFQSLKLALTQPPALALPSLDKPFQLFVEETSGAAKGVLTQALGPWKRPVAYLSKRLDPVAAGWPRCLRAIAAAALLTREASKLTFGQDIEITSSHNLESLLRSPPDKWLTNARITQYQVLLLDPPRVRFKQTAALNPATLLPETDDTLPIHHCLDTLDSLTSTRPDLTDQPLAQAEATLFTDGSSYIRDGKRYAGAAVVTLDSVIWAEPLPIGTSAQKAELIALTKALEWSKDKSVNIYTDSRYAFATLHVHGMIYRERGWLTAGGKAIKNAPEILALLTAVWLPKRVAVMHCKGHQKDDAPTSTGNRRADEVAREVAIRPLSTQATISAGKRTADGSEFEKRTADGSEFESPKKKAKVE

SEQ ID NO: 6531 - protein, 2098 aa, synthetic construct
MPAAKRVKLDGGDKKYSIGLDIGTNSVGWAVITDEYKVPSKKFKVLGNTDRHSIKKNLIGALLFDSGETAEATRLKRTARRRYTRRKNRICYLQEIFSNEMAKVDDSFFHRLEESFLVEEDKKHERHPIFGNIVDEVAYHEKYPTIYHLRKKLVDSTDKADLRLIYLALAHMIKFRGHFLIEGDLNPDNSDVDKLFIQLVQTYNQLFEENPINASGVDAKAILSARLSKSRRLENLIAQLPGEKKNGLFGNLIALSLGLTPNFKSNFDLAEDAKLQLSKDTYDDDLDNLLAQIGDQYADLFLAAKNLSDAILLSDILRVNTEITKAPLSASMIKRYDEHHQDLTLLKALVRQQLPEKYKEIFFDQSKNGYAGYIDGGASQEEFYKFIKPILEKMDGTEELLVKLNREDLLRKQRTFDNGSIPHQIHLGELHAILRRQEDFYPFLKDNREKIEKILTFRIPYYVGPLARGNSRFAWMTRKSEETITPWNFEEVVDKGASAQSFIERMTNFDKNLPNEKVLPKHSLLYEYFTVYNELTKVKYVTEGMRKPAFLSGEQKKAIVDLLFKTNRKVTVKQLKEDYFKKIECFDSVEISGVEDRFNASLGTYHDLLKIIKDKDFLDNEENEDILEDIVLTLTLFEDREMIEERLKTYAHLFDDKVMKQLKRRRYTGWGRLSRKLINGIRDKQSGKTILDFLKSDGFANRNFMQLIHDDSLTFKEDIQKAQVSGQGDSLHEHIANLAGSPAIKKGILQTVKVVDELVKVMGRHKPENIVIEMARENQTTQKGQKNSRERMKRIEEGIKELGSQILKEHPVENTQLQNEKLYLYYLQNGRDMYVDQELDINRLSDYDVDHIVPQSFLKDDSIDNKVLTRSDKARGKSDNVPSEEVVKKMKNYWRQLLNAKLITQRKFDNLTKAERGGLSELDKAGFIKRQLVETRQITKHVAQILDSRMNTKYDENDKLIREVKVITLKSKLVSDFRKDFQFYKVREINNYHHAHDAYLNAVVGTALIKKYPKLESEFVYGDYKVYDVRKMIAKSEQEIGKATAKYFFYSNIMNFFKTEITLANGEIRKRPLIETNGETGEIVWDKGRDFATVRKVLSMPQVNIVKKTEVQTGGFSKESILPKRNSDKLIARKKDWDPKKYGGFDSPTVAYSVLVVAKVEKGKSKKLKSVKELLGITIMERSSFEKNPIDFLEAKGYKEVKKDLIIKLPKYSLFELENGRKRMLASAGELQKGNELALPSKYVNFLYLASHYEKLKGSPEDNEQKQLFVEQHKHYLDEIIEQISEFSKRVILADANLDKVLSAYNKHRDKPIREQAENIIHLFTLTNLGAPAAFKYFDTTIDRKRYTSTKEVLDATLIHQSITGLYETRIDLSQLGGDGGPAPAPAPAPAPGGTAPLEEEYRLFLEAPIQNVTLLEQWKREIPKVWAEINPPGLASTQAPIHVQLLSTALPVRVRQYPITLEAKRSLRETIRKFRAAGILRPVHSPWNTPLLPVRKSGTSEYRMVQDLREVNKRVETIHPTVPNPYTLLSLLPPDRIWYSVLDLKDAFFCIPLAPESQLIFAFEWADAEEGESGQLTWTRLPQGFKNSPTLFNEALNRDLQGFRLDHPSVSLLQYVDDLLIAADTQAACLSATRDLLMTLAELGYRVSGKKAQLCQEEVTYLGFKIHKGSRSLSNSRTQAILQIPVPKTKRQVREFLGKIGYCRLFIPGFAELAQPLYAATRPGNDPLVWGEKEEEAFQSLKLALTQPPALALPSLDKPFQLFVEETSGAAKGVLTQALGPWKRPVAYLSKRLDPVAAGWPRCLRAIAAAALLTREASKLTFGQDIEITSSHNLESLLRSPPDKWLTNARITQYQVLLLDPPRVRFKQTAALNPATLLPETDDTLPIHHCLDTLDSLTSTRPDLTDQPLAQAEATLFTDGSSYIRDGKRYAGAAVVTLDSVIWAEPLPIGTSAQKAELIALTKALEWSKDKSVNIYTDSRYAFATLHVHGMIYRERGWLTAGGKAIKNAPEILALLTAVWLPKRVAVMHCKGHQKDDAPTSTGNRRADEVAREVAIRPLSTQATISAGKRTADGSEFEKRTADGSEFESPKKKAKVE

SEQ ID NO: 6532 - protein, 2102 aa, synthetic construct
MPAAKRVKLDGGDKKYSIGLDIGTNSVGWAVITDEYKVPSKKFKVLGNTDRHSIKKNLIGALLFDSGETAEATRLKRTARRRYTRRKNRICYLQEIFSNEMAKVDDSFFHRLEESFLVEEDKKHERHPIFGNIVDEVAYHEKYPTIYHLRKKLVDSTDKADLRLIYLALAHMIKFRGHFLIEGDLNPDNSDVDKLFIQLVQTYNQLFEENPINASGVDAKAILSARLSKSRRLENLIAQLPGEKKNGLFGNLIALSLGLTPNFKSNFDLAEDAKLQLSKDTYDDDLDNLLAQIGDQYADLFLAAKNLSDAILLSDILRVNTEITKAPLSASMIKRYDEHHQDLTLLKALVRQQLPEKYKEIFFDQSKNGYAGYIDGGASQEEFYKFIKPILEKMDGTEELLVKLNREDLLRKQRTFDNGSIPHQIHLGELHAILRRQEDFYPFLKDNREKIEKILTFRIPYYVGPLARGNSRFAWMTRKSEETITPWNFEEVVDKGASAQSFIERMTNFDKNLPNEKVLPKHSLLYEYFTVYNELTKVKYVTEGMRKPAFLSGEQKKAIVDLLFKTNRKVTVKQLKEDYFKKIECFDSVEISGVEDRFNASLGTYHDLLKIIKDKDFLDNEENEDILEDIVLTLTLFEDREMIEERLKTYAHLFDDKVMKQLKRRRYTGWGRLSRKLINGIRDKQSGKTILDFLKSDGFANRNFMQLIHDDSLTFKEDIQKAQVSGQGDSLHEHIANLAGSPAIKKGILQTVKVVDELVKVMGRHKPENIVIEMARENQTTQKGQKNSRERMKRIEEGIKELGSQILKEHPVENTQLQNEKLYLYYLQNGRDMYVDQELDINRLSDYDVDHIVPQSFLKDDSIDNKVLTRSDKARGKSDNVPSEEVVKKMKNYWRQLLNAKLITQRKFDNLTKAERGGLSELDKAGFIKRQLVETRQITKHVAQILDSRMNTKYDENDKLIREVKVITLKSKLVSDFRKDFQFYKVREINNYHHAHDAYLNAVVGTALIKKYPKLESEFVYGDYKVYDVRKMIAKSEQEIGKATAKYFFYSNIMNFFKTEITLANGEIRKRPLIETNGETGEIVWDKGRDFATVRKVLSMPQVNIVKKTEVQTGGFSKESILPKRNSDKLIARKKDWDPKKYGGFDSPTVAYSVLVVAKVEKGKSKKLKSVKELLGITIMERSSFEKNPIDFLEAKGYKEVKKDLIIKLPKYSLFELENGRKRMLASAGELQKGNELALPSKYVNFLYLASHYEKLKGSPEDNEQKQLFVEQHKHYLDEIIEQISEFSKRVILADANLDKVLSAYNKHRDKPIREQAENIIHLFTLTNLGAPAAFKYFDTTIDRKRYTSTKEVLDATLIHQSITGLYETRIDLSQLGGDGGPAPAPAPAPAPGGTVSLQDEHRLFDIPVTTSLPDVWLQDFPQAWAETGGLGRAKCQAPIIIDLKPTAVPVSIKQYPMSLEAHMGIRQHIIKFLELGVLRPCRSPWNTPLLPVKKPGTQDYRPVQDLREINKRTVDIHPTVPNPYNLLSTLKPDYSWYTVLDLKDAFFCLPLAPQSQELFAFEWKDPERGISGQLTWTRLPQGFKNSPTLFNEALHRDLTDFRTQHPEVTLLQYVDDLLLAAPTKKACTQGTRHLLQELGEKGYRASAKKAQICQTKVTYLGYILSEGKRWLTPGRIETVARIPPPRNPREVREFLGTAGFCRLWIPGFAELAAPLYALTKPSTPFTWQTEHQLAFEALKKALLSAPALGLPDTSKPFTLFLDERQGIAKGVLTQKLGPWKRPVAYLSKKLDPVAAGWPPCLRIMAATAMLVKDSAKLTLGQPLTVITPHTLEAIVRQPPDRWITNARLTHYQALLLDTDRVQFGPPVTLNPATLLPVPENQPSPHDCRQVLAETHGTREDLKDQELPDADHTWYTDGSSYLDSGTRRAGAAVVDGHNTIWAQSLPPGTSAQKAELIALTKALELSKGKKANIYTDSRYAFATAHTHGSIYERRGWLTSEGKEIKNKAEIIALLKALFLPQEVAIIHCPGHQKGQDPVAVGNRQADRVARQAAMAEVLTLATEPDNTSHITAGKRTADGSEFEKRTADGSEFESPKKKAKVE

SEQ ID NO: 6533 - protein, 2173 aa, synthetic construct
MPAAKRVKLDGGDKKYSIGLDIGTNSVGWAVITDEYKVPSKKFKVLGNTDRHSIKKNLIGALLFDSGETAEATRLKRTARRRYTRRKNRICYLQEIFSNEMAKVDDSFFHRLEESFLVEEDKKHERHPIFGNIVDEVAYHEKYPTIYHLRKKLVDSTDKADLRLIYLALAHMIKFRGHFLIEGDLNPDNSDVDKLFIQLVQTYNQLFEENPINASGVDAKAILSARLSKSRRLENLIAQLPGEKKNGLFGNLIALSLGLTPNFKSNFDLAEDAKLQLSKDTYDDDLDNLLAQIGDQYADLFLAAKNLSDAILLSDILRVNTEITKAPLSASMIKRYDEHHQDLTLLKALVRQQLPEKYKEIFFDQSKNGYAGYIDGGASQEEFYKFIKPILEKMDGTEELLVKLNREDLLRKQRTFDNGSIPHQIHLGELHAILRRQEDFYPFLKDNREKIEKILTFRIPYYVGPLARGNSRFAWMTRKSEETITPWNFEEVVDKGASAQSFIERMTNFDKNLPNEKVLPKHSLLYEYFTVYNELTKVKYVTEGMRKPAFLSGEQKKAIVDLLFKTNRKVTVKQLKEDYFKKIECFDSVEISGVEDRFNASLGTYHDLLKIIKDKDFLDNEENEDILEDIVLTLTLFEDREMIEERLKTYAHLFDDKVMKQLKRRRYTGWGRLSRKLINGIRDKQSGKTILDFLKSDGFANRNFMQLIHDDSLTFKEDIQKAQVSGQGDSLHEHIANLAGSPAIKKGILQTVKVVDELVKVMGRHKPENIVIEMARENQTTQKGQKNSRERMKRIEEGIKELGSQILKEHPVENTQLQNEKLYLYYLQNGRDMYVDQELDINRLSDYDVDHIVPQSFLKDDSIDNKVLTRSDKARGKSDNVPSEEVVKKMKNYWRQLLNAKLITQRKFDNLTKAERGGLSELDKAGFIKRQLVETRQITKHVAQILDSRMNTKYDENDKLIREVKVITLKSKLVSDFRKDFQFYKVREINNYHHAHDAYLNAVVGTALIKKYPKLESEFVYGDYKVYDVRKMIAKSEQEIGKATAKYFFYSNIMNFFKTEITLANGEIRKRPLIETNGETGEIVWDKGRDFATVRKVLSMPQVNIVKKTEVQTGGFSKESILPKRNSDKLIARKKDWDPKKYGGFDSPTVAYSVLVVAKVEKGKSKKLKSVKELLGITIMERSSFEKNPIDFLEAKGYKEVKKDLIIKLPKYSLFELENGRKRMLASAGELQKGNELALPSKYVNFLYLASHYEKLKGSPEDNEQKQLFVEQHKHYLDEIIEQISEFSKRVILADANLDKVLSAYNKHRDKPIREQAENIIHLFTLTNLGAPAAFKYFDTTIDRKRYTSTKEVLDATLIHQSITGLYETRIDLSQLGGDGGPAPAPAPAPAPGGMDLLKPLTVERKGVKIKGYWNSQADITCVPKDLLQGEEPVRQQNVTTIHGTQEGDVYYVNLKIDGRRINTEVIGTTLDYAIITPGDVPWILKKPLELTIKLDLEEQQGTLLNNSILSKKGKEELKQLFEKYSALWQSWENQVGHRRIRPHKIATGTVKPTPQKQYHINPKAKPDIQIVINDLLKQGVLIQKESTMNTPVYPVPKPNGRWRMVLDYRAVNKVTPLIAVQNQHSYGILGSLFKGRYKTTIDLSNGFWAHPIVPEDYWITAFTWQGKQYCWTVLPQGFLNSPGLFTGDVVDLLQGIPNVEVYVDDVYISHDSEKEHLEYLDILFNRLKEAGYIISLKKSNIANSIVDFLGFQITNEGRGLTDTFKEKLENITAPTTLKQLQSILGLLNFARNFIPDFTELIAPLYALIPKSTKNYVPWQIEHSTTLETLITKLNGAEYLQGRKGDKTLIMKVNASYTTGYIRYYNEGEKKPISYVSIVFSKTELKFTELEKLLTTVHKGLLKALDLSMGQNIHVYSPIVSMQNIQKTPQTAKKALASRWLSWLSYLEDPRIRFFYDPQMPALKDLPAVDTGKDNKKHPSNFQHIFYTDGSAITSPTKEGHLNAGMGIVYFINKDGNLQKQQEWSISLGNHTAQFAEIAAFEFALKKCLPLGGNILVVTDSNYVAKAYNEELDVWASNGFVNNRKKPLKHISKWKSVADLKRLRPDVVVTHEPGHQKLDSSPHAYGNNLADQLATQASFKVHAGKRTADGSEFEKRTADGSEFESPKKKAKVE

SEQ ID NO: 6534 - protein, 2173 aa, synthetic construct
MPAAKRVKLDGGDKKYSIGLDIGTNSVGWAVITDEYKVPSKKFKVLGNTDRHSIKKNLIGALLFDSGETAEATRLKRTARRRYTRRKNRICYLQEIFSNEMAKVDDSFFHRLEESFLVEEDKKHERHPIFGNIVDEVAYHEKYPTIYHLRKKLVDSTDKADLRLIYLALAHMIKFRGHFLIEGDLNPDNSDVDKLFIQLVQTYNQLFEENPINASGVDAKAILSARLSKSRRLENLIAQLPGEKKNGLFGNLIALSLGLTPNFKSNFDLAEDAKLQLSKDTYDDDLDNLLAQIGDQYADLFLAAKNLSDAILLSDILRVNTEITKAPLSASMIKRYDEHHQDLTLLKALVRQQLPEKYKEIFFDQSKNGYAGYIDGGASQEEFYKFIKPILEKMDGTEELLVKLNREDLLRKQRTFDNGSIPHQIHLGELHAILRRQEDFYPFLKDNREKIEKILTFRIPYYVGPLARGNSRFAWMTRKSEETITPWNFEEVVDKGASAQSFIERMTNFDKNLPNEKVLPKHSLLYEYFTVYNELTKVKYVTEGMRKPAFLSGEQKKAIVDLLFKTNRKVTVKQLKEDYFKKIECFDSVEISGVEDRFNASLGTYHDLLKIIKDKDFLDNEENEDILEDIVLTLTLFEDREMIEERLKTYAHLFDDKVMKQLKRRRYTGWGRLSRKLINGIRDKQSGKTILDFLKSDGFANRNFMQLIHDDSLTFKEDIQKAQVSGQGDSLHEHIANLAGSPAIKKGILQTVKVVDELVKVMGRHKPENIVIEMARENQTTQKGQKNSRERMKRIEEGIKELGSQILKEHPVENTQLQNEKLYLYYLQNGRDMYVDQELDINRLSDYDVDHIVPQSFLKDDSIDNKVLTRSDKARGKSDNVPSEEVVKKMKNYWRQLLNAKLITQRKFDNLTKAERGGLSELDKAGFIKRQLVETRQITKHVAQILDSRMNTKYDENDKLIREVKVITLKSKLVSDFRKDFQFYKVREINNYHHAHDAYLNAVVGTALIKKYPKLESEFVYGDYKVYDVRKMIAKSEQEIGKATAKYFFYSNIMNFFKTEITLANGEIRKRPLIETNGETGEIVWDKGRDFATVRKVLSMPQVNIVKKTEVQTGGFSKESILPKRNSDKLIARKKDWDPKKYGGFDSPTVAYSVLVVAKVEKGKSKKLKSVKELLGITIMERSSFEKNPIDFLEAKGYKEVKKDLIIKLPKYSLFELENGRKRMLASAGELQKGNELALPSKYVNFLYLASHYEKLKGSPEDNEQKQLFVEQHKHYLDEIIEQISEFSKRVILADANLDKVLSAYNKHRDKPIREQAENIIHLFTLTNLGAPAAFKYFDTTIDRKRYTSTKEVLDATLIHQSITGLYETRIDLSQLGGDGGPAPAPAPAPAPGGMDLLKPLTVERKGVKIKGYWNSQADITCVPKDLLQGEEPVRQQNVTTIHGTQEGDVYYVNLKIDGRRINTEVIGTTLDYAIITPGDVPWILKKPLELTIKLDLEEQQGTLLNNSILSKKGKEELKQLFEKYSALWQSWENQVGHRRIRPHKIATGTVKPTPQKQYHINPKAKPDIQIVINDLLKQGVLIQKESTMNTPVYPVPKPNGRWRMVLDYRAVNKVTPLIAVQNQHSYGILGSLFKGRYKTTIDLSNGFWAHPIVPEDYWITAFTWQGKQYCWTVLPQGFLNSPGLFNGDVVDLLQGIPNVEVYVDDVYISHDSEKEHLEYLDILFNRLKEAGYIISLKKSNIANSIVDFLGFQITNEGRGLTDTFKEKLENITAPTTLKQLQSILGLLNFARNFIPDFTELIAPLYALIPKSPKNYVPWQIEHSTTLETLITKLNGAEYLQGRKGDKTLIMKVNASYTTGYIRYYNEGEKKPISYVSIVFSKTELKFTELEKLLTTVHKGLLKALDLSMGQNIHVYSPIVSMQNIQKTPQTAKKALASRWLSWLSYLEDPRIRFFYDPQMPALKDLPAVDTGKDNKKHPSNFQHIFYTDGSAITSPTKEGHLNAGMGIVYFINKDGNLQKQQEWSISLGNHTAQFAEIAAFEFALKKCLPLGGNILVVTDSNYVAKAYNEELDVWASNGFVNNRKKPLKHISKWKSVADLKRLRPDVVVTHEPGHQKLDSSPHAYGNNLADQLATQASFKVHAGKRTADGSEFEKRTADGSEFESPKKKAKVE

SEQ ID NO: 6535 - protein, 2095 aa, synthetic construct
MPAAKRVKLDGGDKKYSIGLDIGTNSVGWAVITDEYKVPSKKFKVLGNTDRHSIKKNLIGALLFDSGETAEATRLKRTARRRYTRRKNRICYLQEIFSNEMAKVDDSFFHRLEESFLVEEDKKHERHPIFGNIVDEVAYHEKYPTIYHLRKKLVDSTDKADLRLIYLALAHMIKFRGHFLIEGDLNPDNSDVDKLFIQLVQTYNQLFEENPINASGVDAKAILSARLSKSRRLENLIAQLPGEKKNGLFGNLIALSLGLTPNFKSNFDLAEDAKLQLSKDTYDDDLDNLLAQIGDQYADLFLAAKNLSDAILLSDILRVNTEITKAPLSASMIKRYDEHHQDLTLLKALVRQQLPEKYKEIFFDQSKNGYAGYIDGGASQEEFYKFIKPILEKMDGTEELLVKLNREDLLRKQRTFDNGSIPHQIHLGELHAILRRQEDFYPFLKDNREKIEKILTFRIPYYVGPLARGNSRFAWMTRKSEETITPWNFEEVVDKGASAQSFIERMTNFDKNLPNEKVLPKHSLLYEYFTVYNELTKVKYVTEGMRKPAFLSGEQKKAIVDLLFKTNRKVTVKQLKEDYFKKIECFDSVEISGVEDRFNASLGTYHDLLKIIKDKDFLDNEENEDILEDIVLTLTLFEDREMIEERLKTYAHLFDDKVMKQLKRRRYTGWGRLSRKLINGIRDKQSGKTILDFLKSDGFANRNFMQLIHDDSLTFKEDIQKAQVSGQGDSLHEHIANLAGSPAIKKGILQTVKVVDELVKVMGRHKPENIVIEMARENQTTQKGQKNSRERMKRIEEGIKELGSQILKEHPVENTQLQNEKLYLYYLQNGRDMYVDQELDINRLSDYDVDHIVPQSFLKDDSIDNKVLTRSDKARGKSDNVPSEEVVKKMKNYWRQLLNAKLITQRKFDNLTKAERGGLSELDKAGFIKRQLVETRQITKHVAQILDSRMNTKYDENDKLIREVKVITLKSKLVSDFRKDFQFYKVREINNYHHAHDAYLNAVVGTALIKKYPKLESEFVYGDYKVYDVRKMIAKSEQEIGKATAKYFFYSNIMNFFKTEITLANGEIRKRPLIETNGETGEIVWDKGRDFATVRKVLSMPQVNIVKKTEVQTGGFSKESILPKRNSDKLIARKKDWDPKKYGGFDSPTVAYSVLVVAKVEKGKSKKLKSVKELLGITIMERSSFEKNPIDFLEAKGYKEVKKDLIIKLPKYSLFELENGRKRMLASAGELQKGNELALPSKYVNFLYLASHYEKLKGSPEDNEQKQLFVEQHKHYLDEIIEQISEFSKRVILADANLDKVLSAYNKHRDKPIREQAENIIHLFTLTNLGAPAAFKYFDTTIDRKRYTSTKEVLDATLIHQSITGLYETRIDLSQLGGDGGPAPAPAPAPAPGGTLQLEEEYRLFEPESTQKQEMDIWLKNFPQAWAETGGMGTAHCQAPVLIQLKATATPISIRQYPMPHEAYQGIKPHIRRMLDQGILKPCQSPWNTPLLPVKKPGTEDYRPVQDLREVNKRVEDIHPTVPNPYNLLSTLPPSHPWYTVLDLKDAFFCLRLHSESQLLFAFEWRDPEIGLSGQLTWTRLPQGFKNSPTLFDEALHSDLADFRVRYPALVLLQYVDDLLLAAATRTECLEGTKALLETLGNKGYRASAKKAQICLQEVTYLGYSLKDGQRWLTKARKEAILSIPVPKNSRQVREFLGTAGYCRLWIPGFAELAAPLYPLTRPGTLFQWGTEQQLAFEDIKKALLSSPALGLPDITKPFELFIDENSGFAKGVLVQKLGPWKRPVAYLSKKLDTVASGWPPCLRMVAAIAILVKDAGKLTLGQPLTILTSHPVEALVRQPPNKWLSNARMTHYQAMLLDAERVHFGPTVSLNPATLLPLPSGGNHHDCLQILAETHGTRPDLTDQPLPDADLTWYTDGSSFIRNGEREAGAAVTTESEVIWAAPLPPGTSAQRAELIALTQALKMAEGKKLTVYTDSRYAFATTHVHGEIYRRRGLLTSEGKEIKNKNEILALLEALFLPKRLSIIHCPGHQKGDSPQAKGNRLADDTAKKAATETHSSLTVLPAGKRTADGSEFEKRTADGSEFESPKKKAKVE

SEQ ID NO: 6536 - protein, 2176 aa, synthetic construct
MPAAKRVKLDGGDKKYSIGLDIGTNSVGWAVITDEYKVPSKKFKVLGNTDRHSIKKNLIGALLFDSGETAEATRLKRTARRRYTRRKNRICYLQEIFSNEMAKVDDSFFHRLEESFLVEEDKKHERHPIFGNIVDEVAYHEKYPTIYHLRKKLVDSTDKADLRLIYLALAHMIKFRGHFLIEGDLNPDNSDVDKLFIQLVQTYNQLFEENPINASGVDAKAILSARLSKSRRLENLIAQLPGEKKNGLFGNLIALSLGLTPNFKSNFDLAEDAKLQLSKDTYDDDLDNLLAQIGDQYADLFLAAKNLSDAILLSDILRVNTEITKAPLSASMIKRYDEHHQDLTLLKALVRQQLPEKYKEIFFDQSKNGYAGYIDGGASQEEFYKFIKPILEKMDGTEELLVKLNREDLLRKQRTFDNGSIPHQIHLGELHAILRRQEDFYPFLKDNREKIEKILTFRIPYYVGPLARGNSRFAWMTRKSEETITPWNFEEVVDKGASAQSFIERMTNFDKNLPNEKVLPKHSLLYEYFTVYNELTKVKYVTEGMRKPAFLSGEQKKAIVDLLFKTNRKVTVKQLKEDYFKKIECFDSVEISGVEDRFNASLGTYHDLLKIIKDKDFLDNEENEDILEDIVLTLTLFEDREMIEERLKTYAHLFDDKVMKQLKRRRYTGWGRLSRKLINGIRDKQSGKTILDFLKSDGFANRNFMQLIHDDSLTFKEDIQKAQVSGQGDSLHEHIANLAGSPAIKKGILQTVKVVDELVKVMGRHKPENIVIEMARENQTTQKGQKNSRERMKRIEEGIKELGSQILKEHPVENTQLQNEKLYLYYLQNGRDMYVDQELDINRLSDYDVDHIVPQSFLKDDSIDNKVLTRSDKARGKSDNVPSEEVVKKMKNYWRQLLNAKLITQRKFDNLTKAERGGLSELDKAGFIKRQLVETRQITKHVAQILDSRMNTKYDENDKLIREVKVITLKSKLVSDFRKDFQFYKVREINNYHHAHDAYLNAVVGTALIKKYPKLESEFVYGDYKVYDVRKMIAKSEQEIGKATAKYFFYSNIMNFFKTEITLANGEIRKRPLIETNGETGEIVWDKGRDFATVRKVLSMPQVNIVKKTEVQTGGFSKESILPKRNSDKLIARKKDWDPKKYGGFDSPTVAYSVLVVAKVEKGKSKKLKSVKELLGITIMERSSFEKNPIDFLEAKGYKEVKKDLIIKLPKYSLFELENGRKRMLASAGELQKGNELALPSKYVNFLYLASHYEKLKGSPEDNEQKQLFVEQHKHYLDEIIEQISEFSKRVILADANLDKVLSAYNKHRDKPIREQAENIIHLFTLTNLGAPAAFKYFDTTIDRKRYTSTKEVLDATLIHQSITGLYETRIDLSQLGGDGGPAPAPAPAPAPGGMNPLQLLQPLPAEIKGTKLLAHWNSGATITCIPESFLEDEQPIKKTLIKTIHGEKQQNVYYVTFKVKGRKVEAEVIASPYEYILLSPTDVPWLTQQPLQLTILVPLQEYQEKILSKTALPEDQKQQLKTLFVKYDNLWQHWENQVGHRKIRPHNIATGDYPPRPQKQYPINPKAKPSIQIVIDDLLKQGVLTPQNSTMNTPVYPVPKPDGRWRMVLDYREVNKTIPLTAAQNQHSAGILATIVRQKYKTTLDLANGFWAHPITPESYWLTAFTWQGKQYCWTRLPQGFLNSPALFNADVVDLLKEIPNVQVYVDDIYLSHDDPKEHVQQLEKVFQILLQAGYVVSLKKSEIGQKTVEFLGFNITKEGRGLTDTFKTKLLNITPPKDLKQLQSILGLLNFARNFIPNFAELVQPLYNLIAPAKGKYIEWSEENTKQLNMVIEALNTASNLEERLPEQRLVIKVNTSPSAGYVRYYNETGKKPIMYLNYVFSKAELKFSMLEKLLTTMHKALIKAMDLAMGQEILVYSPIVSMTKIQKTPLPERKALPIRWITWMTYLEDPRIQFHYDKTLPELKHIPDVYTSSQSPVKHPSQYEGVFYTDGSAIKSPDPTKSNNAGMGIVHATYKPEYQVLNQWSIPLGNHTAQMAEIAAVEFACKKALKIPGPVLVITDSFYVAESANKELPYWKSNGFVNNKKKPLKHISKWKSIAECLSMKPDITIQHEKGISLQIPVFILKGNALADKLATQGSYVVNAGKRTADGSEFEKRTADGSEFESPKKKAKVE

SEQ ID NO: 6537 - protein, 2009 aa, synthetic construct
MPAAKRVKLDGGDKKYSIGLDIGTNSVGWAVITDEYKVPSKKFKVLGNTDRHSIKKNLIGALLFDSGETAEATRLKRTARRRYTRRKNRICYLQEIFSNEMAKVDDSFFHRLEESFLVEEDKKHERHPIFGNIVDEVAYHEKYPTIYHLRKKLVDSTDKADLRLIYLALAHMIKFRGHFLIEGDLNPDNSDVDKLFIQLVQTYNQLFEENPINASGVDAKAILSARLSKSRRLENLIAQLPGEKKNGLFGNLIALSLGLTPNFKSNFDLAEDAKLQLSKDTYDDDLDNLLAQIGDQYADLFLAAKNLSDAILLSDILRVNTEITKAPLSASMIKRYDEHHQDLTLLKALVRQQLPEKYKEIFFDQSKNGYAGYIDGGASQEEFYKFIKPILEKMDGTEELLVKLNREDLLRKQRTFDNGSIPHQIHLGELHAILRRQEDFYPFLKDNREKIEKILTFRIPYYVGPLARGNSRFAWMTRKSEETITPWNFEEVVDKGASAQSFIERMTNFDKNLPNEKVLPKHSLLYEYFTVYNELTKVKYVTEGMRKPAFLSGEQKKAIVDLLFKTNRKVTVKQLKEDYFKKIECFDSVEISGVEDRFNASLGTYHDLLKIIKDKDFLDNEENEDILEDIVLTLTLFEDREMIEERLKTYAHLFDDKVMKQLKRRRYTGWGRLSRKLINGIRDKQSGKTILDFLKSDGFANRNFMQLIHDDSLTFKEDIQKAQVSGQGDSLHEHIANLAGSPAIKKGILQTVKVVDELVKVMGRHKPENIVIEMARENQTTQKGQKNSRERMKRIEEGIKELGSQILKEHPVENTQLQNEKLYLYYLQNGRDMYVDQELDINRLSDYDVDHIVPQSFLKDDSIDNKVLTRSDKARGKSDNVPSEEVVKKMKNYWRQLLNAKLITQRKFDNLTKAERGGLSELDKAGFIKRQLVETRQITKHVAQILDSRMNTKYDENDKLIREVKVITLKSKLVSDFRKDFQFYKVREINNYHHAHDAYLNAVVGTALIKKYPKLESEFVYGDYKVYDVRKMIAKSEQEIGKATAKYFFYSNIMNFFKTEITLANGEIRKRPLIETNGETGEIVWDKGRDFATVRKVLSMPQVNIVKKTEVQTGGFSKESILPKRNSDKLIARKKDWDPKKYGGFDSPTVAYSVLVVAKVEKGKSKKLKSVKELLGITIMERSSFEKNPIDFLEAKGYKEVKKDLIIKLPKYSLFELENGRKRMLASAGELQKGNELALPSKYVNFLYLASHYEKLKGSPEDNEQKQLFVEQHKHYLDEIIEQISEFSKRVILADANLDKVLSAYNKHRDKPIREQAENIIHLFTLTNLGAPAAFKYFDTTIDRKRYTSTKEVLDATLIHQSITGLYETRIDLSQLGGDGGPAPAPAPAPAPGGGLEHLPPPPEVSQFPLNPERLQALTDLVSRALEAKHIEPYQGPGNNPIFPVKKPNGKWRFIHDLRATNSVTRDLASPSPGPPDLTSLPQGLPHLRTIDLTDAFFQIPLPTIFQPYFAFTLPQPNNYGPGTRYSWRVLPQGFKNSPTLFQQQLSHILTPVRKTFPNSLIIQYMDDILLASPAPGELAALTDKVTNALTKEGLPLSPEKTQATPGPIHFLGQVISQDCITYETLPSINVKSTWSLAELQSMLGELQWVSKGTPVLRSSLHQLYLALRGHRDPRDTIKLTSIQVQALRTIQKALTLNCRSRLVNQLPILALIMLRPTGTTAVLFQTKQKWPLVWLHTPHPATSLRPWGQLLANAVIILDKYSLQHYGQVCKSFHHNISNQALTYYLHTSDQSSVAILLQHSHRFHNLGAQPSGPWRSLLQMPQIFQNIDVLRPPFTISPVVINHAPCLFSDGSASKAAFIIWDRQVIHQQVLSLPSTCSAQAGELFGLLAGLQKSQPWVALNIFLDSKFLIGHLRRMAWGAFPGPSTQCELHTQLLPLLQGKTVYVHHVRSHTLLQDPISRLNEATDALMLAPLLPLAGKRTADGSEFEKRTADGSEFESPKKKAKVE

SEQ ID NO: 6538 - protein, 2127 aa, synthetic construct
MPAAKRVKLDGGDKKYSIGLDIGTNSVGWAVITDEYKVPSKKFKVLGNTDRHSIKKNLIGALLFDSGETAEATRLKRTARRRYTRRKNRICYLQEIFSNEMAKVDDSFFHRLEESFLVEEDKKHERHPIFGNIVDEVAYHEKYPTIYHLRKKLVDSTDKADLRLIYLALAHMIKFRGHFLIEGDLNPDNSDVDKLFIQLVQTYNQLFEENPINASGVDAKAILSARLSKSRRLENLIAQLPGEKKNGLFGNLIALSLGLTPNFKSNFDLAEDAKLQLSKDTYDDDLDNLLAQIGDQYADLFLAAKNLSDAILLSDILRVNTEITKAPLSASMIKRYDEHHQDLTLLKALVRQQLPEKYKEIFFDQSKNGYAGYIDGGASQEEFYKFIKPILEKMDGTEELLVKLNREDLLRKQRTFDNGSIPHQIHLGELHAILRRQEDFYPFLKDNREKIEKILTFRIPYYVGPLARGNSRFAWMTRKSEETITPWNFEEVVDKGASAQSFIERMTNFDKNLPNEKVLPKHSLLYEYFTVYNELTKVKYVTEGMRKPAFLSGEQKKAIVDLLFKTNRKVTVKQLKEDYFKKIECFDSVEISGVEDRFNASLGTYHDLLKIIKDKDFLDNEENEDILEDIVLTLTLFEDREMIEERLKTYAHLFDDKVMKQLKRRRYTGWGRLSRKLINGIRDKQSGKTILDFLKSDGFANRNFMQLIHDDSLTFKEDIQKAQVSGQGDSLHEHIANLAGSPAIKKGILQTVKVVDELVKVMGRHKPENIVIEMARENQTTQKGQKNSRERMKRIEEGIKELGSQILKEHPVENTQLQNEKLYLYYLQNGRDMYVDQELDINRLSDYDVDHIVPQSFLKDDSIDNKVLTRSDKARGKSDNVPSEEVVKKMKNYWRQLLNAKLITQRKFDNLTKAERGGLSELDKAGFIKRQLVETRQITKHVAQILDSRMNTKYDENDKLIREVKVITLKSKLVSDFRKDFQFYKVREINNYHHAHDAYLNAVVGTALIKKYPKLESEFVYGDYKVYDVRKMIAKSEQEIGKATAKYFFYSNIMNFFKTEITLANGEIRKRPLIETNGETGEIVWDKGRDFATVRKVLSMPQVNIVKKTEVQTGGFSKESILPKRNSDKLIARKKDWDPKKYGGFDSPTVAYSVLVVAKVEKGKSKKLKSVKELLGITIMERSSFEKNPIDFLEAKGYKEVKKDLIIKLPKYSLFELENGRKRMLASAGELQKGNELALPSKYVNFLYLASHYEKLKGSPEDNEQKQLFVEQHKHYLDEIIEQISEFSKRVILADANLDKVLSAYNKHRDKPIREQAENIIHLFTLTNLGAPAAFKYFDTTIDRKRYTSTKEVLDATLIHQSITGLYETRIDLSQLGGDGGPAPAPAPAPAPGGLLGRDLLTKLKAQIQFSTEGPQVTWEDRPAMCLVLNLEEEYRLHEKPVPPSIDPSWLQLFPMVWAEKAGMGLANQVPPVVVELKSDASPVAVRQYPMSKEAREGIRPHIQRFLDLGILVPCQSPWNTPLLPVKKPGTNDYRPVQDLREVNKRVQDIHPTVPNPYNLLSSLPPSHTWYSVLDLKDAFFCLKLHPNSQPLFAFEWRDPEKGNTGQLTWTRLPQGFKNSPTLFDEALHRDLASFRALNPQVVMLQYVDDLLVAAPTYRDCKEGTRRLLQELSKLGYRVSAKKAQLCREEVTYLGYLLKGGKRWLTPARKATVMKIPTPTTPRQVREFLGTAGFCRLWIPGFASLAAPLYPLTREKVPFTWTEAHQEAFGRIKEALLSAPALALPDLTKPFALYVDEKEGVARGVLTQTLGPWRRPVAYLSKKLDPVASGWPTCLKAIAAVALLLKDADKLTLGQNVLVIAPHNLESIVRQPPDRWMTNARMTHYQSLLLNERVSFAPPAILNPATLLPVESDDTPIHICSEILAEETGTRPDLRDQPLPGVPAWYTDGSSFIMDGRRQAGAAIVDNKRTVWASNLPEGTSAQKAELIALTQALRLAEGKSINIYTDSRYAFATAHVHGAIYKQRGLLTSAGKDIKNKEEILALLEAIHLPKRVAIIHCPGHQRGTDPVATGNRKADEAAKQAAQSTRILTETTKNAGKRTADGSEFEKRTADGSEFESPKKKAKVE

SEQ ID NO: 6539 - protein, 2218 aa, synthetic construct
MPAAKRVKLDGGDKKYSIGLDIGTNSVGWAVITDEYKVPSKKFKVLGNTDRHSIKKNLIGALLFDSGETAEATRLKRTARRRYTRRKNRICYLQEIFSNEMAKVDDSFFHRLEESFLVEEDKKHERHPIFGNIVDEVAYHEKYPTIYHLRKKLVDSTDKADLRLIYLALAHMIKFRGHFLIEGDLNPDNSDVDKLFIQLVQTYNQLFEENPINASGVDAKAILSARLSKSRRLENLIAQLPGEKKNGLFGNLIALSLGLTPNFKSNFDLAEDAKLQLSKDTYDDDLDNLLAQIGDQYADLFLAAKNLSDAILLSDILRVNTEITKAPLSASMIKRYDEHHQDLTLLKALVRQQLPEKYKEIFFDQSKNGYAGYIDGGASQEEFYKFIKPILEKMDGTEELLVKLNREDLLRKQRTFDNGSIPHQIHLGELHAILRRQEDFYPFLKDNREKIEKILTFRIPYYVGPLARGNSRFAWMTRKSEETITPWNFEEVVDKGASAQSFIERMTNFDKNLPNEKVLPKHSLLYEYFTVYNELTKVKYVTEGMRKPAFLSGEQKKAIVDLLFKTNRKVTVKQLKEDYFKKIECFDSVEISGVEDRFNASLGTYHDLLKIIKDKDFLDNEENEDILEDIVLTLTLFEDREMIEERLKTYAHLFDDKVMKQLKRRRYTGWGRLSRKLINGIRDKQSGKTILDFLKSDGFANRNFMQLIHDDSLTFKEDIQKAQVSGQGDSLHEHIANLAGSPAIKKGILQTVKVVDELVKVMGRHKPENIVIEMARENQTTQKGQKNSRERMKRIEEGIKELGSQILKEHPVENTQLQNEKLYLYYLQNGRDMYVDQELDINRLSDYDVDHIVPQSFLKDDSIDNKVLTRSDKARGKSDNVPSEEVVKKMKNYWRQLLNAKLITQRKFDNLTKAERGGLSELDKAGFIKRQLVETRQITKHVAQILDSRMNTKYDENDKLIREVKVITLKSKLVSDFRKDFQFYKVREINNYHHAHDAYLNAVVGTALIKKYPKLESEFVYGDYKVYDVRKMIAKSEQEIGKATAKYFFYSNIMNFFKTEITLANGEIRKRPLIETNGETGEIVWDKGRDFATVRKVLSMPQVNIVKKTEVQTGGFSKESILPKRNSDKLIARKKDWDPKKYGGFDSPTVAYSVLVVAKVEKGKSKKLKSVKELLGITIMERSSFEKNPIDFLEAKGYKEVKKDLIIKLPKYSLFELENGRKRMLASAGELQKGNELALPSKYVNFLYLASHYEKLKGSPEDNEQKQLFVEQHKHYLDEIIEQISEFSKRVILADANLDKVLSAYNKHRDKPIREQAENIIHLFTLTNLGAPAAFKYFDTTIDRKRYTSTKEVLDATLIHQSITGLYETRIDLSQLGGDGGPAPAPAPAPAPGGTLGDQGSRGSDPLPEPRVTLTVEGIPTEFLVNTGAEHSVLTKPMGKMGSKRTVVAGATGSKVYPWTTKRLLKIGQKQVTHSFLVIPECPAPLLGRDLLTKLKAQIQFSTEGPQVTWEDRPAMCLVLNLEEEYRLHEKPVPPSIDPSWLQLFPMVWAEKAGMGLANQVPPVVVELKSDASPVAVRQYPMSKEAREGIRPHIQRFLDLGILVPCQSPWNTPLLPVKKPGTNDYRPVQDLREVNKRVQDIHPTVPNPYNLLSSLPPSHTWYSVLDLKDAFFCLKLHPNSQPLFAFEWRDPEKGNTGQLTWTRLPQGFKNSPTLFNEALHRDLASFRALNPQVVMLQYVDDLLVAAPTYRDCKEGTRRLLQELSKLGYRVSAKKAQLCREEVTYLGYLLKGGKRWLTPARKATVMKIPTPTTPRQVREFLGTAGFCRLWIPGFASLAAPLYPLTRPKVPFTWTEAHQEAFGRIKEALLSAPALALPDLTKPFALYVDEKEGVARGVLTQTLGPWRRPVAYLSKKLDPVASGWPTCLKAIAAVALLLKDADKLTLGQNVLVIAPHNLESIVRQPPDRWMTNARMTHYQSLLLNERVSFAPPAILNPATLLPVESDDTPIHICSEILAEETGTRPDLRDQPLPGVPAWYTDGSSFIMDGRRQAGAAIVDNKRTVWASNLPEGTSAQKAELIALTQALRLAEGKSINIYTDSRYAFATAHVHGAIYKQRGWLTSAGKDIKNKEEILALLEAIHLPKRVAIIHCPGHQRGTDPVATGNRKADEAAKQAAQSTRILTETTKNAGKRTADGSEFEKRTADGSEFESPKKKAKVE

SEQ ID NO: 6540 - protein, 2096 aa, synthetic construct
MPAAKRVKLDGGDKKYSIGLDIGTNSVGWAVITDEYKVPSKKFKVLGNTDRHSIKKNLIGALLFDSGETAEATRLKRTARRRYTRRKNRICYLQEIFSNEMAKVDDSFFHRLEESFLVEEDKKHERHPIFGNIVDEVAYHEKYPTIYHLRKKLVDSTDKADLRLIYLALAHMIKFRGHFLIEGDLNPDNSDVDKLFIQLVQTYNQLFEENPINASGVDAKAILSARLSKSRRLENLIAQLPGEKKNGLFGNLIALSLGLTPNFKSNFDLAEDAKLQLSKDTYDDDLDNLLAQIGDQYADLFLAAKNLSDAILLSDILRVNTEITKAPLSASMIKRYDEHHQDLTLLKALVRQQLPEKYKEIFFDQSKNGYAGYIDGGASQEEFYKFIKPILEKMDGTEELLVKLNREDLLRKQRTFDNGSIPHQIHLGELHAILRRQEDFYPFLKDNREKIEKILTFRIPYYVGPLARGNSRFAWMTRKSEETITPWNFEEVVDKGASAQSFIERMTNFDKNLPNEKVLPKHSLLYEYFTVYNELTKVKYVTEGMRKPAFLSGEQKKAIVDLLFKTNRKVTVKQLKEDYFKKIECFDSVEISGVEDRFNASLGTYHDLLKIIKDKDFLDNEENEDILEDIVLTLTLFEDREMIEERLKTYAHLFDDKVMKQLKRRRYTGWGRLSRKLINGIRDKQSGKTILDFLKSDGFANRNFMQLIHDDSLTFKEDIQKAQVSGQGDSLHEHIANLAGSPAIKKGILQTVKVVDELVKVMGRHKPENIVIEMARENQTTQKGQKNSRERMKRIEEGIKELGSQILKEHPVENTQLQNEKLYLYYLQNGRDMYVDQELDINRLSDYDVDHIVPQSFLKDDSIDNKVLTRSDKARGKSDNVPSEEVVKKMKNYWRQLLNAKLITQRKFDNLTKAERGGLSELDKAGFIKRQLVETRQITKHVAQILDSRMNTKYDENDKLIREVKVITLKSKLVSDFRKDFQFYKVREINNYHHAHDAYLNAVVGTALIKKYPKLESEFVYGDYKVYDVRKMIAKSEQEIGKATAKYFFYSNIMNFFKTEITLANGEIRKRPLIETNGETGEIVWDKGRDFATVRKVLSMPQVNIVKKTEVQTGGFSKESILPKRNSDKLIARKKDWDPKKYGGFDSPTVAYSVLVVAKVEKGKSKKLKSVKELLGITIMERSSFEKNPIDFLEAKGYKEVKKDLIIKLPKYSLFELENGRKRMLASAGELQKGNELALPSKYVNFLYLASHYEKLKGSPEDNEQKQLFVEQHKHYLDEIIEQISEFSKRVILADANLDKVLSAYNKHRDKPIREQAENIIHLFTLTNLGAPAAFKYFDTTIDRKRYTSTKEVLDATLIHQSITGLYETRIDLSQLGGDGGPAPAPAPAPAPGGLGIEDEYRLHETSTEPDVSLGSTWLSDFPQAWAETGGMGLAVRQAPLIIPLKATSTPVSIQQYPMSHEARLGIKPHIQRLLDQGILVPCQSPWNTPLLPVKKPGTNDYRPVQDLREVNKRVEDIHPTVPNPYNLLSGLPPSHQWYTVLDLKDAFFCLRLHPTSQPLFAFEWRDPGMGISGQLTWTRLPQGFKNSPTLFNEALHRDLADFRIQHPDLILLQYVDDILLAATSELDCQQGTRALLQTLGDLGYRASAKKAQICQKQVKYLGYLLREGQRWLTEARKETVMGQPVPKTPRQLREFLGKAGFCRLFIPGFAEMAAPLYPLTKPGTLFSWGPDQQKAYQEIKQALLTAPALGLPDLTKPFELFVDEKQGYAKGVLTQKLGPWRRPVAYLSKKLDPVAAGWPPCLRMVAAIAVLTKDAGKLTMGQPLVILAPHAVEALVKQPPDRWLSNARMTHYQAMLLDTDRVQFGPVVALNPATLLPLPEEGAPHDCLEILAETHGTRPDLTDQPIPDADHTWYTDGSSFLQEGQRKAGAAVTTETEVIWAGALPAGTSAQRAELIALTQALKMAEGKRLNVYTDSRYAFATAHIHGEIYRRRGWLTSEGREIKNKSEILALLKALFLPKRLSIIHCLGHQKGDSAEARGNRLADQAAREAAIKTPPDTSTLLIAGKRTADGSEFEKRTADGSEFESPKKKAKVE

SEQ ID NO: 6541 - protein, 2096 aa, synthetic construct
MPAAKRVKLDGGDKKYSIGLDIGTNSVGWAVITDEYKVPSKKFKVLGNTDRHSIKKNLIGALLFDSGETAEATRLKRTARRRYTRRKNRICYLQEIFSNEMAKVDDSFFHRLEESFLVEEDKKHERHPIFGNIVDEVAYHEKYPTIYHLRKKLVDSTDKADLRLIYLALAHMIKFRGHFLIEGDLNPDNSDVDKLFIQLVQTYNQLFEENPINASGVDAKAILSARLSKSRRLENLIAQLPGEKKNGLFGNLIALSLGLTPNFKSNFDLAEDAKLQLSKDTYDDDLDNLLAQIGDQYADLFLAAKNLSDAILLSDILRVNTEITKAPLSASMIKRYDEHHQDLTLLKALVRQQLPEKYKEIFFDQSKNGYAGYIDGGASQEEFYKFIKPILEKMDGTEELLVKLNREDLLRKQRTFDNGSIPHQIHLGELHAILRRQEDFYPFLKDNREKIEKILTFRIPYYVGPLARGNSRFAWMTRKSEETITPWNFEEVVDKGASAQSFIERMTNFDKNLPNEKVLPKHSLLYEYFTVYNELTKVKYVTEGMRKPAFLSGEQKKAIVDLLFKTNRKVTVKQLKEDYFKKIECFDSVEISGVEDRFNASLGTYHDLLKIIKDKDFLDNEENEDILEDIVLTLTLFEDREMIEERLKTYAHLFDDKVMKQLKRRRYTGWGRLSRKLINGIRDKQSGKTILDFLKSDGFANRNFMQLIHDDSLTFKEDIQKAQVSGQGDSLHEHIANLAGSPAIKKGILQTVKVVDELVKVMGRHKPENIVIEMARENQTTQKGQKNSRERMKRIEEGIKELGSQILKEHPVENTQLQNEKLYLYYLQNGRDMYVDQELDINRLSDYDVDHIVPQSFLKDDSIDNKVLTRSDKARGKSDNVPSEEVVKKMKNYWRQLLNAKLITQRKFDNLTKAERGGLSELDKAGFIKRQLVETRQITKHVAQILDSRMNTKYDENDKLIREVKVITLKSKLVSDFRKDFQFYKVREINNYHHAHDAYLNAVVGTALIKKYPKLESEFVYGDYKVYDVRKMIAKSEQEIGKATAKYFFYSNIMNFFKTEITLANGEIRKRPLIETNGETGEIVWDKGRDFATVRKVLSMPQVNIVKKTEVQTGGFSKESILPKRNSDKLIARKKDWDPKKYGGFDSPTVAYSVLVVAKVEKGKSKKLKSVKELLGITIMERSSFEKNPIDFLEAKGYKEVKKDLIIKLPKYSLFELENGRKRMLASAGELQKGNELALPSKYVNFLYLASHYEKLKGSPEDNEQKQLFVEQHKHYLDEIIEQISEFSKRVILADANLDKVLSAYNKHRDKPIREQAENIIHLFTLTNLGAPAAFKYFDTTIDRKRYTSTKEVLDATLIHQSITGLYETRIDLSQLGGDGGPAPAPAPAPAPGGTLGIEDEYRLHETSTEPDVSLGSTWLSDFPQAWAETGGMGLAVRQAPLIIPLKATSTPVSIQQYPMSHEARLGIKPHIQRLLDQGILVPCQSPWNTPLLPVKKPGTNDYRPVQDLREVNKRVEDIHPTVPNPYNLLSGLPPSHQWYTVLDLKDAFFCLRLHPTSQPLFAFEWRDPGMGISGQLTWTRLPQGFKNSPTLFDEALHRDLADFRIQHPDLILLQYVDDILLAATSELDCQQGTRALLQTLGDLGYRASAKKAQICQKQVKYLGYLLREGQRWLTEARKETVMGQPVPKTPRQLREFLGTAGFCRLWIPGFAEMAAPLYPLTKTGTLFSWGPDQQKAYQEIKQALLTAPALGLPDLTKPFELFVDEKQGYAKGVLTQKLGPWRRPVAYLSKKLDPVAAGWPPCLRMVAAIAVLTKDAGKLTMGQPLVILAPHAVEALVKQPPDRWLSNARMTHYQAMLLDTDRVQFGPVVALNPATLLPLPEEGAPHDCLEILAETHGTRPDLTDQPIPDADHTWYTDGSSFLQEGQRKAGAAVTTETEVIWAGALPAGTSAQRAELIALTQALKMAEGKRLNVYTDSRYAFATAHIHGEIYRRRGLLTSEGREIKNKSEILALLKALFLPKRLSIIHCLGHQKGDSAEARGNRLADQAAREAAIKTPPDTSTLLAGKRTADGSEFEKRTADGSEFESPKKKAKVE

SEQ ID NO: 6542 - protein, 2096 aa, synthetic construct; identical to SEQ ID NO: 6540

SEQ ID NO: 6543 - protein, 2096 aa, synthetic construct
MPAAKRVKLDGGDKKYSIGLDIGTNSVGWAVITDEYKVPSKKFKVLGNTDRHSIKKNLIGALLFDSGETAEATRLKRTARRRYTRRKNRICYLQEIFSNEMAKVDDSFFHRLEESFLVEEDKKHERHPIFGNIVDEVAYHEKYPTIYHLRKKLVDSTDKADLRLIYLALAHMIKFRGHFLIEGDLNPDNSDVDKLFIQLVQTYNQLFEENPINASGVDAKAILSARLSKSRRLENLIAQLPGEKKNGLFGNLIALSLGLTPNFKSNFDLAEDAKLQLSKDTYDDDLDNLLAQIGDQYADLFLAAKNLSDAILLSDILRVNTEITKAPLSASMIKRYDEHHQDLTLLKALVRQQLPEKYKEIFFDQSKNGYAGYIDGGASQEEFYKFIKPILEKMDGTEELLVKLNREDLLRKQRTFDNGSIPHQIHLGELHAILRRQEDFYPFLKDNREKIEKILTFRIPYYVGPLARGNSRFAWMTRKSEETITPWNFEEVVDKGASAQSFIERMTNFDKNLPNEKVLPKHSLLYEYFTVYNELTKVKYVTEGMRKPAFLSGEQKKAIVDLLFKTNRKVTVKQLKEDYFKKIECFDSVEISGVEDRFNASLGTYHDLLKIIKDKDFLDNEENEDILEDIVLTLTLFEDREMIEERLKTYAHLFDDKVMKQLKRRRYTGWGRLSRKLINGIRDKQSGKTILDFLKSDGFANRNFMQLIHDDSLTFKEDIQKAQVSGQGDSLHEHIANLAGSPAIKKGILQTVKVVDELVKVMGRHKPENIVIEMARENQTTQKGQKNSRERMKRIEEGIKELGSQILKEHPVENTQLQNEKLYLYYLQNGRDMYVDQELDINRLSDYDVDHIVPQSFLKDDSIDNKVLTRSDKARGKSDNVPSEEVVKKMKNYWRQLLNAKLITQRKFDNLTKAERGGLSELDKAGFIKRQLVETRQITKHVAQILDSRMNTKYDENDKLIREVKVITLKSKLVSDFRKDFQFYKVREINNYHHAHDAYLNAVVGTALIKKYPKLESEFVYGDYKVYDVRKMIAKSEQEIGKATAKYFFYSNIMNFFKTEITLANGEIRKRPLIETNGETGEIVWDKGRDFATVRKVLSMPQVNIVKKTEVQTGGFSKESILPKRNSDKLIARKKDWDPKKYGGFDSPTVAYSVLVVAKVEKGKSKKLKSVKELLGITIMERSSFEKNPIDFLEAKGYKEVKKDLIIKLPKYSLFELENGRKRMLASAGELQKGNELALPSKYVNFLYLASHYEKLKGSPEDNEQKQLFVEQHKHYLDEIIEQISEFSKRVILADANLDKVLSAYNKHRDKPIREQAENIIHLFTLTNLGAPAAFKYFDTTIDRKRYTSTKEVLDATLIHQSITGLYETRIDLSQLGGDGGPAPAPAPAPAPGGTLNIEDEYRLHETSKGPDVPLGSTWLSDFPQAWAETGGMGLAVRQAPLIIPLKATSTPVSIKQYPMSQEARLGIKPHIQRLLDQGILVPCQSPWNTPLLPVKKPGTNDYRPVQDLREVNKRVEDIHPTVPNPYNLLSGLPPSHQWYTVLDLKDAFFCLRLHPTSQSLFAFEWRDPEMGISGQLTWTRLPQGFKNSPTLFNEALHRDLADFRIQHPDLILLQYVDDLLLAATSELDCQQGTRALLQTLGDLGYRASAKKAQICQKQVKYLGYLLKEGQRWLTEARKETVMGQPTPKTPRQLREFLGTAGFCRLWIPGFAEMAAPLYPLTKPGTLFEWGPDQQKAYQEIKQALLTAPALGLPDLTKPFELFVDEKQGYAKGVLTQKLGPWRRPVAYLSKKLDPVAAGWPPCLRMVAAIAVLTKDAGKLTMGQPLVILAPHAVEALVKQPPDRWLSNARMTHYQALLLDTDRVQFGPIVALNPATLLPLPEEGLQHDCLDILAEAHGTRPDLTDQPLPDADHTWYTDGSSFLQEGQRKAGAAVTTETEVVWAKALPAGTSAQRAELIALTQALKMAEGKKLNVYTDSRYAFATAHIHGEIYRRRGWLTSEGKEIKNKDEILALLKALFLPKRLSIIHCPGHQKGNRAEARGNRMADQAAREVATRETPETSTLLAGKRTADGSEFEKRTADGSEFESPKKKAKVE

SEQ ID NO: 6544 - protein, 2090 aa, synthetic construct
MPAAKRVKLDGGDKKYSIGLDIGTNSVGWAVITDEYKVPSKKFKVLGNTDRHSIKKNLIGALLFDSGETAEATRLKRTARRRYTRRKNRICYLQEIFSNEMAKVDDSFFHRLEESFLVEEDKKHERHPIFGNIVDEVAYHEKYPTIYHLRKKLVDSTDKADLRLIYLALAHMIKFRGHFLIEGDLNPDNSDVDKLFIQLVQTYNQLFEENPINASGVDAKAILSARLSKSRRLENLIAQLPGEKKNGLFGNLIALSLGLTPNFKSNFDLAEDAKLQLSKDTYDDDLDNLLAQIGDQYADLFLAAKNLSDAILLSDILRVNTEITKAPLSASMIKRYDEHHQDLTLLKALVRQQLPEKYKEIFFDQSKNGYAGYIDGGASQEEFYKFIKPILEKMDGTEELLVKLNREDLLRKQRTFDNGSIPHQIHLGELHAILRRQEDFYPFLKDNREKIEKILTFRIPYYVGPLARGNSRFAWMTRKSEETITPWNFEEVVDKGASAQSFIERMTNFDKNLPNEKVLPKHSLLYEYFTVYNELTKVKYVTEGMRKPAFLSGEQKKAIVDLLFKTNRKVTVKQLKEDYFKKIECFDSVEISGVEDRFNASLGTYHDLLKIIKDKDFLDNEENEDILEDIVLTLTLFEDREMIEERLKTYAHLFDDKVMKQLKRRRYTGWGRLSRKLINGIRDKQSGKTILDFLKSDGFANRNFMQLIHDDSLTFKEDIQKAQVSGQGDSLHEHIANLAGSPAIKKGILQTVKVVDELVKVMGRHKPENIVIEMARENQTTQKGQKNSRERMKRIEEGIKELGSQILKEHPVENTQLQNEKLYLYYLQNGRDMYVDQELDINRLSDYDVDHIVPQSFLKDDSIDNKVLTRSDKARGKSDNVPSEEVVKKMKNYWRQLLNAKLITQRKFDNLTKAERGGLSELDKAGFIKRQLVETRQITKHVAQILDSRMNTKYDENDKLIREVKVITLKSKLVSDFRKDFQFYKVREINNYHHAHDAYLNAVVGTALIKKYPKLESEFVYGDYKVYDVRKMIAKSEQEIGKATAKYFFYSNIMNFFKTEITLANGEIRKRPLIETNGETGEIVWDKGRDFATVRKVLSMPQVNIVKKTEVQTGGFSKESILPKRNSDKLIARKKDWDPKKYGGFDSPTVAYSVLVVAKVEKGKSKKLKSVKELLGITIMERSSFEKNPIDFLEAKGYKEVKKDLIIKLPKYSLFELENGRKRMLASAGELQKGNELALPSKYVNFLYLASHYEKLKGSPEDNEQKQLFVEQHKHYLDEIIEQISEFSKRVILADANLDKVLSAYNKHRDKPIREQAENIIHLFTLTNLGAPAAFKYFDTTIDRKRYTSTKEVLDATLIHQSITGLYETRIDLSQLGGDGGPAPAPAPAPAPGGTLQLDDEYRLYSPLVKPDQNIQFWLEQFPQAWAETAGMGLAKQVPPQVIQLKASATPVSVRQYPLSKEAQEGIRPHVQRLIQQGILVPVQSPWNTPLLPVRKPGTNDYRPVQDLREVNKRVQDIHPTVPNPYNLLCALPPQRSWYTVLDLKDAFFCLRLHPTSQPLFAFEWRDPGTGRTGQLTWTRLPQGFKNSPTIFDEALHRDLANFRIQHPQVTLLQYVDDLLLAGATKQDCLEGTKALLLELSDLGYRASAKKAQICRREVTYLGYSLRDGQRWLTEARKKTVVQIPAPTTAKQVREFLGTAGFCRLWIPGFATLAAPLYPLTKEKGEFSWAPEHQKAFDAIKKALLSAPALALPDVTKPFTLYVDERKGVARGVLTQTLGPWRRPVAYLSKKLDPVASGWPVCLKAIAAVAILVKDADKLTLGQNITVIAPHALENIVRQPPDRWMTNARMTHYQSLLLTERVTFAPPAALNPATLLPEETDEPVTHDCHQLLIEETGVRKDLTDIPLTGEVLTWFTDGSSYVVEGKRMAGAAVVDGTRTIWASSLPEGTSAQKAELMALTQALRLAEGKSINIYTDSRYAFATAHVHGAIYKQRGLLTSAGREIKNKEEILSLLEALHLPKRLAIIHCPGHQKAKDPISRGNQMADRVAKQAAQGVNLLAGKRTADGSEFEKRTADGSEFESPKKKAKVE

SEQ ID NO: 6545 - protein, 2090 aa, synthetic construct; identical to SEQ ID NO: 6544

SEQ ID NO: 6546 - protein, 2087 aa, synthetic construct
MPAAKRVKLDGGDKKYSIGLDIGTNSVGWAVITDEYKVPSKKFKVLGNTDRHSIKKNLIGALLFDSGETAEATRLKRTARRRYTRRKNRICYLQEIFSNEMAKVDDSFFHRLEESFLVEEDKKHERHPIFGNIVDEVAYHEKYPTIYHLRKKLVDSTDKADLRLIYLALAHMIKFRGHFLIEGDLNPDNSDVDKLFIQLVQTYNQLFEENPINASGVDAKAILSARLSKSRRLENLIAQLPGEKKNGLFGNLIALSLGLTPNFKSNFDLAEDAKLQLSKDTYDDDLDNLLAQIGDQYADLFLAAKNLSDAILLSDILRVNTEITKAPLSASMIKRYDEHHQDLTLLKALVRQQLPEKYKEIFFDQSKNGYAGYIDGGASQEEFYKFIKPILEKMDGTEELLVKLNREDLLRKQRTFDNGSIPHQIHLGELHAILRRQEDFYPFLKDNREKIEKILTFRIPYYVGPLARGNSRFAWMTRKSEETITPWNFEEVVDKGASAQSFIERMTNFDKNLPNEKVLPKHSLLYEYFTVYNELTKVKYVTEGMRKPAFLSGEQKKAIVDLLFKTNRKVTVKQLKEDYFKKIECFDSVEISGVEDRFNASLGTYHDLLKIIKDKDFLDNEENEDILEDIVLTLTLFEDREMIEERLKTYAHLFDDKVMKQLKRRRYTGWGRLSRKLINGIRDKQSGKTILDFLKSDGFANRNFMQLIHDDSLTFKEDIQKAQVSGQGDSLHEHIANLAGSPAIKKGILQTVKVVDELVKVMGRHKPENIVIEMARENQTTQKGQKNSRERMKRIEEGIKELGSQILKEHPVENTQLQNEKLYLYYLQNGRDMYVDQELDINRLSDYDVDHIVPQSFLKDDSIDNKVLTRSDKARGKSDNVPSEEVVKKMKNYWRQLLNAKLITQRKFDNLTKAERGGLSELDKAGFIKRQLVETRQITKHVAQILDSRMNTKYDENDKLIREVKVITLKSKLVSDFRKDFQFYKVREINNYHHAHDAYLNAVVGTALIKKYPKLESEFVYGDYKVYDVRKMIAKSEQEIGKATAKYFFYSNIMNFFKTEITLANGEIRKRPLIETNGETGEIVWDKGRDFATVRKVLSMPQVNIVKKTEVQTGGFSKESILPKRNSDKLIARKKDWDPKKYGGFDSPTVAYSVLVVAKVEKGKSKKLKSVKELLGITIMERSSFEKNPIDFLEAKGYKEVKKDLIIKLPKYSLFELENGRKRMLASAGELQKGNELALPSKYVNFLYLASHYEKLKGSPEDNEQKQLFVEQHKHYLDEIIEQISEFSKRVILADANLDKVLSAYNKHRDKPIREQAENIIHLFTLTNLGAPAAFKYFDTTIDRKRYTSTKEVLDATLIHQSITGLYETRIDLSQLGGDGGPAPAPAPAPAPGGVPWLMKKPLQLTVLVPLHEYQERLLQQTALPKEQKELLQKLFLKYDALWQHWENQVGHRRIKPHNIATGTLAPRPQKQYPINPKAKPSIQIVIDDLLKQGVLIQQNSTMNTPVYPVPKPDGKWRMVLDYREVNKTIPLIAAQNQHSAGILSSIYRGKYKTTLDLTNGFWAHPITPESYWLTAFTWQGKQYCWTRLPQGFLNSPALFNADVVDLLKEIPNVQAYVDDIYISHDDPQEHLEQLEKIFSILLNAGYVVSLKKSEIAQREVEFLGFNITKEGRGLTDTFKQKLLNITPPKDLKQLQSILGKLNFARNFIPNYSELVKPLYTIVAPANGKFISWTEDNSNQLQHIISVLNQADNLEERNPETRLIIKVNSSPSAGYIRYYNEGSKRPIMYVNYIFSKAEAKFTQTEKLLTTMHKGLIKAMDLAMGQEILVYSPIVSMTKIQRTPLPERKALPVRWITWMTYLEDPRIQFHYDKSLPELQQIPNVTEDVIAKTKHPSEFAMVFYTDGSAIKHPDVNKSHSAGMGIAQVQFIPEYKIVHQWSIPLGDHTAQLAEIAAVEFACKKALKISGPVLIVTDSFYVAESANKELPYWKSNGFLNNKKKPLRHVSKWKSIAECLQLKPDIIIMHEKGHQQPMTTLHTEGNNLADKLATQGSYVVHAGKRTADGSEFEKRTADGSEFESPKKKAKVE

SEQ ID NO: 6547 - protein, 2176 aa, synthetic construct
MPAAKRVKLDGGDKKYSIGLDIGTNSVGWAVITDEYKVPSKKFKVLGNTDRHSIKKNLIGALLFDSGETAEATRLKRTARRRYTRRKNRICYLQEIFSNEMAKVDDSFFHRLEESFLVEEDKKHERHPIFGNIVDEVAYHEKYPTIYHLRKKLVDSTDKADLRLIYLALAHMIKFRGHFLIEGDLNPDNSDVDKLFIQLVQTYNQLFEENPINASGVDAKAILSARLSKSRRLENLIAQLPGEKKNGLFGNLIALSLGLTPNFKSNFDLAEDAKLQLSKDTYDDDLDNLLAQIGDQYADLFLAAKNLSDAILLSDILRVNTEITKAPLSASMIKRYDEHHQDLTLLKALVRQQLPEKYKEIFFDQSKNGYAGYIDGGASQEEFYKFIKPILEKMDGTEELLVKLNREDLLRKQRTFDNGSIPHQIHLGELHAILRRQEDFYPFLKDNREKIEKILTFRIPYYVGPLARGNSRFAWMTRKSEETITPWNFEEVVDKGASAQSFIERMTNFDKNLPNEKVLPKHSLLYEYFTVYNELTKVKYVTEGMRKPAFLSGEQKKAIVDLLFKTNRKVTVKQLKEDYFKKIECFDSVEISGVEDRFNASLGTYHDLLKIIKDKDFLDNEENEDILEDIVLTLTLFEDREMIEERLKTYAHLFDDKVMKQLKRRRYTGWGRLSRKLINGIRDKQSGKTILDFLKSDGFANRNFMQLIHDDSLTFKEDIQKAQVSGQGDSLHEHIANLAGSPAIKKGILQTVKVVDELVKVMGRHKPENIVIEMARENQTTQKGQKNSRERMKRIEEGIKELGSQILKEHPVENTQLQNEKLYLYYLQNGRDMYVDQELDINRLSDYDVDHIVPQSFLKDDSIDNKVLTRSDKARGKSDNVPSEEVVKKMKNYWRQLLNAKLITQRKFDNLTKAERGGLSELDKAGFIKRQLVETRQITKHVAQILDSRMNTKYDENDKLIREVKVITLKSKLVSDFRKDFQFYKVREINNYHHAHDAYLNAVVGTALIKKYPKLESEFVYGDYKVYDVRKMIAKSEQEIGKATAKYFFYSNIMNFFKTEITLANGEIRKRPLIETNGETGEIVWDKGRDFATVRKVLSMPQVNIVKKTEVQTGGFSKESILPKRNSDKLIARKKDWDPKKYGGFDSPTVAYSVLVVAKVEKGKSKKLKSVKELLGITIMERSSFEKNPIDFLEAKGYKEVKKDLIIKLPKYSLFELENGRKRMLASAGELQKGNELALPSKYVNFLYLASHYEKLKGSPEDNEQKQLFVEQHKHYLDEIIEQISEFSKRVILADANLDKVLSAYNKHRDKPIREQAENIIHLFTLTNLGAPAAFKYFDTTIDRKRYTSTKEVLDATLIHQSITGLYETRIDLSQLGGDGGPAPAPAPAPAPGGMDPLQLLQPLEAEIKGTKLKAHWNSGATITCVPEAFLEDERPIQTMLIKTIHGEKQQDVYYLTFKVQGRKVEAEVLASPYDYILLNPSDVPWLMKKPLQLTVLVPLHEYQERLLQQTALPKEQKELLQKLFLKYDALWQHWENQVGHRRIKPHNIATGTLAPRPQKQYPINPKAKPSIQIVIDDLLKQGVLIQQNSTMNTPVYPVPKPDGKWRMVLDYREVNKTIPLIAAQNQHSAGILSSIYRGKYKTTLDLTNGFWAHPITPESYWLTAFTWQGKQYCWTRLPQGFLNSPALFNADVVDLLKEIPNVQAYVDDIYISHDDPQEHLEQLEKIFSILLNAGYVVSLKKSEIAQREVEFLGFNITKEGRGLTDTFKQKLLNITPPKDLKQLQSILGLLNFARNFIPNYSELVKPLYTIVAPANGKFISWTEDNSNQLQHIISVLNQADNLEERNPETRLIIKVNSSPSAGYIRYYNEGSKRPIMYVNYIFSKAEAKFTQTEKLLTTMHKGLIKAMDLAMGQEILVYSPIVSMTKIQRTPLPERKALPVRWITWMTYLEDPRIQFHYDKSLPELQQIPNVTEDVIAKTKHPSEFAMVFYTDGSAIKHPDVNKSHSAGMGIAQVQFIPEYKIVHQWSIPLGDHTAQLAEIAAVEFACKKALKISGPVLIVTDSFYVAESANKELPYWKSNGFLNNKKKPLRHVSKWKSIAECLQLKPDIIIMHEKGHQQPMTTLHTEGNNLADKLATQGSYVVHAGKRTADGSEFEKRTADGSEFESPKKKAKVE

SEQ ID NO: 6548 - protein, 2176 aa, synthetic construct
MPAAKRVKLDGGDKKYSIGLDIGTNSVGWAVITDEYKVPSKKFKVLGNTDRHSIKKNLIGALLFDSGETAEATRLKRTARRRYTRRKNRICYLQEIFSNEMAKVDDSFFHRLEESFLVEEDKKHERHPIFGNIVDEVAYHEKYPTIYHLRKKLVDSTDKADLRLIYLALAHMIKFRGHFLIEGDLNPDNSDVDKLFIQLVQTYNQLFEENPINASGVDAKAILSARLSKSRRLENLIAQLPGEKKNGLFGNLIALSLGLTPNFKSNFDLAEDAKLQLSKDTYDDDLDNLLAQIGDQYADLFLAAKNLSDAILLSDILRVNTEITKAPLSASMIKRYDEHHQDLTLLKALVRQQLPEKYKEIFFDQSKNGYAGYIDGGASQEEFYKFIKPILEKMDGTEELLVKLNREDLLRKQRTFDNGSIPHQIHLGELHAILRRQEDFYPFLKDNREKIEKILTFRIPYYVGPLARGNSRFAWMTRKSEETITPWNFEEVVDKGASAQSFIERMTNFDKNLPNEKVLPKHSLLYEYFTVYNELTKVKYVTEGMRKPAFLSGEQKKAIVDLLFKTNRKVTVKQLKEDYFKKIECFDSVEISGVEDRFNASLGTYHDLLKIIKDKDFLDNEENEDILEDIVLTLTLFEDREMIEERLKTYAHLFDDKVMKQLKRRRYTGWGRLSRKLINGIRDKQSGKTILDFLKSDGFANRNFMQLIHDDSLTFKEDIQKAQVSGQGDSLHEHIANLAGSPAIKKGILQTVKVVDELVKVMGRHKPENIVIEMARENQTTQKGQKNSRERMKRIEEGIKELGSQILKEHPVENTQLQNEKLYLYYLQNGRDMYVDQELDINRLSDYDVDHIVPQSFLKDDSIDNKVLTRSDKARGKSDNVPSEEVVKKMKNYWRQLLNAKLITQRKFDNLTKAERGGLSELDKAGFIKRQLVETRQITKHVAQILDSRMNTKYDENDKLIREVKVITLKSKLVSDFRKDFQFYKVREINNYHHAHDAYLNAVVGTALIKKYPKLESEFVYGDYKVYDVRKMIAKSEQEIGKATAKYFFYSNIMNFFKTEITLANGEIRKRPLIETNGETGEIVWDKGRDFATVRKVLSMPQVNIVKKTEVQTGGFSKESILPKRNSDKLIARKKDWDPKKYGGFDSPTVAYSVLVVAKVEKGKSKKLKSVKELLGITIMERSSFEKNPIDFLEAKGYKEVKKDLIIKLPKYSLFELENGRKRMLASAGELQKGNELALPSKYVNFLYLASHYEKLKGSPEDNEQKQLFVEQHKHYLDEIIEQISEFSKRVILADANLDKVLSAYNKHRDKPIREQAENIIHLFTLTNLGAPAAFKYFDTTIDRKRYTSTKEVLDATLIHQSITGLYETRIDLSQLGGDGGPAPAPAPAPAPGGMDPLQLLQPLEAEIKGTKLKAHWNSGATITCVPQAFLEEEVPIKNIWIKTIHGEKEQPVYYLTFKIQGRKVEAEVISSPYDYILVSPSDIPWLMKKPLQLTTLVPLQEYEERLLKQTMLTGSYKEKLQSLFLKYDALWQHWENQVGHRRIKPHHIATGTVNPRPQKQYPINPKAKASIQTVINDLLKQGVLIQQNSIMNTPVYPVPKPDGKWRMVLDYREVNKTIPLIAAQNQHSAGILSSIFRGKYKTTLDLSNGFWAHSITPESYWLTAFTWLGQQYCWTRLPQGFLNSPALFNADVVDLLKEVPNVQVYVDDIYISHDDPREHLEQLEKVFSLLLNAGYVVSLKKSEIAQHEVEFLGFNITKEGRGLTETFKQKLLNITPPRDLKQLQSILGLLNFARNFIPNFSELVKPLYNIIATAPGKYITWTTDNSQQLQNIISMLNSAENLEERNPEVRLIMKVNTSPSAGYIRFYNEFAKRPIMYLNYVYTKAEVKFTNTEKLLTTIHKGLIKALDLGMGQEILVYSPIVSMTKIQKTPLPERKALPIRWITWMSYLEDPRIQFHYDKTLPELQQVPTVTDDIIAKIKHPSEFSMVFYTDGSAIKHPNVNKSHNAGMGIAQVQFKPEFTVINTWSIPLGDHTAQLAEVAAVEFACKKALKIDGPVLIVTDSFYVAESVNKELPYWQSNGFFNNKKKPLKHVSKWKSIADCIQLKPDIIIIHEKGHQPTASTFHTEGNNLADKLATQGSYVVNAGKRTADGSEFEKRTADGSEFESPKKKAKVE

SEQ ID NO: 6549 - protein, 2094 aa, synthetic construct
MPAAKRVKLDGGDKKYSIGLDIGTNSVGWAVITDEYKVPSKKFKVLGNTDRHSIKKNLIGALLFDSGETAEATRLKRTARRRYTRRKNRICYLQEIFSNEMAKVDDSFFHRLEESFLVEEDKKHERHPIFGNIVDEVAYHEKYPTIYHLRKKLVDSTDKADLRLIYLALAHMIKFRGHFLIEGDLNPDNSDVDKLFIQLVQTYNQLFEENPINASGVDAKAILSARLSKSRRLENLIAQLPGEKKNGLFGNLIALSLGLTPNFKSNFDLAEDAKLQLSKDTYDDDLDNLLAQIGDQYADLFLAAKNLSDAILLSDILRVNTEITKAPLSASMIKRYDEHHQDLTLLKALVRQQLPEKYKEIFFDQSKNGYAGYIDGGASQEEFYKFIKPILEKMDGTEELLVKLNREDLLRKQRTFDNGSIPHQIHLGELHAILRRQEDFYPFLKDNREKIEKILTFRIPYYVGPLARGNSRFAWMTRKSEETITPWNFEEVVDKGASAQSFIERMTNFDKNLPNEKVLPKHSLLYEYFTVYNELTKVKYVTEGMRKPAFLSGEQKKAIVDLLFKTNRKVTVKQLKEDYFKKIECFDSVEISGVEDRFNASLGTYHDLLKIIKDKDFLDNEENEDILEDIVLTLTLFEDREMIEERLKTYAHLFDDKVMKQLKRRRYTGWGRLSRKLINGIRDKQSGKTILDFLKSDGFANRNFMQLIHDDSLTFKEDIQKAQVSGQGDSLHEHIANLAGSPAIKKGILQTVKVVDELVKVMGRHKPENIVIEMARENQTTQKGQKNSRERMKRIEEGIKELGSQILKEHPVENTQLQNEKLYLYYLQNGRDMYVDQELDINRLSDYDVDHIVPQSFLKDDSIDNKVLTRSDKARGKSDNVPSEEVVKKMKNYWRQLLNAKLITQRKFDNLTKAERGGLSELDKAGFIKRQLVETRQITKHVAQILDSRMNTKYDENDKLIREVKVITLKSKLVSDFRKDFQFYKVREINNYHHAHDAYLNAVVGTALIKKYPKLESEFVYGDYKVYDVRKMIAKSEQEIGKATAKYFFYSNIMNFFKTEITLANGEIRKRPLIETNGETGEIVWDKGRDFATVRKVLSMPQVNIVKKTEVQTGGFSKESILPKRNSDKLIARKKDWDPKKYGGFDSPTVAYSVLVVAKVEKGKSKKLKSVKELLGITIMERSSFEKNPIDFLEAKGYKEVKKDLIIKLPKYSLFELENGRKRMLASAGELQKGNELALPSKYVNFLYLASHYEKLKGSPEDNEQKQLFVEQHKHYLDEIIEQISEFSKRVILADANLDKVLSAYNKHRDKPIREQAENIIHLFTLTNLGAPAAFKYFDTTIDRKRYTSTKEVLDATLIHQSITGLYETRIDLSQLGGDGGPAPAPAPAPAPGGVLNLEEEYRLHEKPVPSSIDPSWLQLFPTVWAERAGMGLANQVPPVVVELRSGASPVAVRQYPMSKEAREGIRPHIQRFLDLGVLVPCQSPWNTPLLPVKKPGTNDYRPVQDLREINKRVQDIHPTVPNPYNLLSSLPPSHTWYSVLDLKDAFFCLKLHPNSQPLFAFEWRDPEKGNTGQLTWTRLPQGFKNSPTLFNEALHRDLAPFRALNPQVVLLQYVDDLLVAAPTYRDCKEGTQKLLQELSKLGYRVSAKKAQLCQKEVTYLGYLLKEGKRWLTPARKATVMKIPPPTTPRQVREFLGKAGFCRLFIPGFASLAAPLYPLTKPSIPFIWTEEHQKAFDRIKEALLSAPALALPDLTKPFTLYVDERAGVARGVLTQTLGPWRRPVAYLSKKLDPVASGWPTCLKAVAAVALLLKDADKLTLGQNVTVIASHSLESIVRQPPDRWMTNARMTHYQSLLLNERVSFAPPAVLNPATLLPVESEATPVHRCSEILAEETGTRRDLKDQPLPGVPAWYTDGSSFIAEGKRRAGAAIVDGKRTVWASSLPEGTSAQKAELVALTQALRLAEGKDINIYTDSRYAFATAHIHGAIYKQRGWLTSAGKDIKNKEEILALLEAIHLPKRVAIIHCPGHQKGNDPVATGNRRADEAAKQAALSTRVLAETTKPAGKRTADGSEFEKRTADGSEFESPKKKAKVE

SEQ ID NO: 6550 - protein, 2096 aa, synthetic construct
MPAAKRVKLDGGDKKYSIGLDIGTNSVGWAVITDEYKVPSKKFKVLGNTDRHSIKKNLIGALLFDSGETAEATRLKRTARRRYTRRKNRICYLQEIFSNEMAKVDDSFFHRLEESFLVEEDKKHERHPIFGNIVDEVAYHEKYPTIYHLRKKLVDSTDKADLRLIYLALAHMIKFRGHFLIEGDLNPDNSDVDKLFIQLVQTYNQLFEENPINASGVDAKAILSARLSKSRRLENLIAQLPGEKKNGLFGNLIALSLGLTPNFKSNFDLAEDAKLQLSKDTYDDDLDNLLAQIGDQYADLFLAAKNLSDAILLSDILRVNTEITKAPLSASMIKRYDEHHQDLTLLKALVRQQLPEKYKEIFFDQSKNGYAGYIDGGASQEEFYKFIKPILEKMDGTEELLVKLNREDLLRKQRTFDNGSIPHQIHLGELHAILRRQEDFYPFLKDNREKIEKILTFRIPYYVGPLARGNSRFAWMTRKSEETITPWNFEEVVDKGASAQSFIERMTNFDKNLPNEKVLPKHSLLYEYFTVYNELTKVKYVTEGMRKPAFLSGEQKKAIVDLLFKTNRKVTVKQLKEDYFKKIECFDSVEISGVEDRFNASLGTYHDLLKIIKDKDFLDNEENEDILEDIVLTLTLFEDREMIEERLKTYAHLFDDKVMKQLKRRRYTGWGRLSRKLINGIRDKQSGKTILDFLKSDGFANRNFMQLIHDDSLTFKEDIQKAQVSGQGDSLHEHIANLAGSPAIKKGILQTVKVVDELVKVMGRHKPENIVIEMARENQTTQKGQKNSRERMKRIEEGIKELGSQILKEHPVENTQLQNEKLYLYYLQNGRDMYVDQELDINRLSDYDVDHIVPQSFLKDDSIDNKVLTRSDKARGKSDNVPSEEVVKKMKNYWRQLLNAKLITQRKFDNLTKAERGGLSELDKAGFIKRQLVETRQITKHVAQILDSRMNTKYDENDKLIREVKVITLKSKLVSDFRKDFQFYKVREINNYHHAHDAYLNAVVGTALIKKYPKLESEFVYGDYKVYDVRKMIAKSEQEIGKATAKYFFYSNIMNFFKTEITLANGEIRKRPLIETNGETGEIVWDKGRDFATVRKVLSMPQVNIVKKTEVQTGGFSKESILPKRNSDKLIARKKDWDPKKYGGFDSPTVAYSVLVVAKVEKGKSKKLKSVKELLGITIMERSSFEKNPIDFLEAKGYKEVKKDLIIKLPKYSLFELENGRKRMLASAGELQKGNELALPSKYVNFLYLASHYEKLKGSPEDNEQKQLFVEQHKHYLDEIIEQISEFSKRVILADANLDKVLSAYNKHRDKPIREQAENIIHLFTLTNLGAPAAFKYFDTTIDRKRYTSTKEVLDATLIHQSITGLYETRIDLSQLGGDGGPAPAPAPAPAPGGTLNIEDEYRLHETSKEPDVPLGSTWLSDFPQAWAETGGMGLAVRQAPLIIPLKATSTPVSIKQYPMSQEARLGIKPHIQRLLDQGILVPCQSPWNTPLLPVKKPGTNDYRPVQDLREVNKRVEDIHPTVPNPYNLLSGLPPSHQWYTVLDLKDAFFCLRLHPTSQPLFAFEWRDPEMGISGQLTWTRLPQGFKNSPTLFDEALHRDLADFRIQHPDLILLQYVDDLLLAATSEQDCQRGTRALLQTLGNLGYRASAKKAQICQKQVKYLGYLLKEGQRWLTEARKETVMGQPTPKTPRQLREFLGTAGFCRLWIPGFAEMAAPLYPLTKTGTLFNWGPDQQKAYQEIKQALLTAPALGLPDLTKPFELFVDEKQGYAKGVLTQKLGPWRRPVAYLSKKLDPVAAGWPPCLRMVAAIAVLTKDAGKLTMGQPLVILAPHAVEALVKQPPDRWLSNARMTHYQAMLLDTDRVQFGPVVALNPATLLPLPEKEAPHDCLEILAETHGTRPDLTDQPIPDADYTWYTDGSSFLQEGQRRAGAAVTTETEVIWARALPAGTSAQRAELIALTQALKMAEGKKLNVYTDSRYAFATAHVHGEIYRRRGLLTSEGREIKNKNEILALLKALFLPKRLSIIHCPGHQKGNSAEARGNRMADQAAREAAMKAVLETSTLLAGKRTADGSEFEKRTADGSEFESPKKKAKVE

SEQ ID NO: 6551 - protein, 2096 aa, synthetic construct
MPAAKRVKLDGGDKKYSIGLDIGTNSVGWAVITDEYKVPSKKFKVLGNTDRHSIKKNLIGALLFDSGETAEATRLKRTARRRYTRRKNRICYLQEIFSNEMAKVDDSFFHRLEESFLVEEDKKHERHPIFGNIVDEVAYHEKYPTIYHLRKKLVDSTDKADLRLIYLALAHMIKFRGHFLIEGDLNPDNSDVDKLFIQLVQTYNQLFEENPINASGVDAKAILSARLSKSRRLENLIAQLPGEKKNGLFGNLIALSLGLTPNFKSNFDLAEDAKLQLSKDTYDDDLDNLLAQIGDQYADLFLAAKNLSDAILLSDILRVNTEITKAPLSASMIKRYDEHHQDLTLLKALVRQQLPEKYKEIFFDQSKNGYAGYIDGGASQEEFYKFIKPILEKMDGTEELLVKLNREDLLRKQRTFDNGSIPHQIHLGELHAILRRQEDFYPFLKDNREKIEKILTFRIPYYVGPLARGNSRFAWMTRKSEETITPWNFEEVVDKGASAQSFIERMTNFDKNLPNEKVLPKHSLLYEYFTVYNELTKVKYVTEGMRKPAFLSGEQKKAIVDLLFKTNRKVTVKQLKEDYFKKIECFDSVEISGVEDRFNASLGTYHDLLKIIKDKDFLDNEENEDILEDIVLTLTLFEDREMIEERLKTYAHLFDDKVMKQLKRRRYTGWGRLSRKLINGIRDKQSGKTILDFLKSDGFANRNFMQLIHDDSLTFKEDIQKAQVSGQGDSLHEHIANLAGSPAIKKGILQTVKVVDELVKVMGRHKPENIVIEMARENQTTQKGQKNSRERMKRIEEGIKELGSQILKEHPVENTQLQNEKLYLYYLQNGRDMYVDQELDINRLSDYDVDHIVPQSFLKDDSIDNKVLTRSDKARGKSDNVPSEEVVKKMKNYWRQLLNAKLITQRKFDNLTKAERGGLSELDKAGFIKRQLVETRQITKHVAQILDSRMNTKYDENDKLIREVKVITLKSKLVSDFRKDFQFYKVREINNYHHAHDAYLNAVVGTALIKKYPKLESEFVYGDYKVYDVRKMIAKSEQEIGKATAKYFFYSNIMNFFKTEITLANGEIRKRPLIETNGETGEIVWDKGRDFATVRKVLSMPQVNIVKKTEVQTGGFSKESILPKRNSDKLIARKKDWDPKKYGGFDSPTVAYSVLVVAKVEKGKSKKLKSVKELLGITIMERSSFEKNPIDFLEAKGYKEVKKDLIIKLPKYSLFELENGRKRMLASAGELQKGNELALPSKYVNFLYLASHYEKLKGSPEDNEQKQLFVEQHKHYLDEIIEQISEFSKRVILADANLDKVLSAYNKHRDKPIREQAENIIHLFTLTNLGAPAAFKYFDTTIDRKRYTSTKEVLDATLIHQSITGLYETRIDLSQLGGDGGPAPAPAPAPAPGGTLNIEDEYRLHETSKEPDVPLGSTWLSDFPQAWAETGGMGLAVRQAPLIIPLKATSTPVSIKQYPMSQEARLGIKPHIQRLLDQGILVPCQSPWNTPLLPVKKPGTNDYRPVQDLREVNKRVEDIHPTVPNPYNLLSGLPPSHQWYTVLDLKDAFFCLRLHPTSQPLFAFEWRDPEMGISGQLTWTRLPQGFKNSPTLFNEALHRDLADFRIQHPDLILLQYVDDLLLAATSEQDCQRGTRALLQTLGNLGYRASAKKAQICQKQVKYLGYLLKEGQRWLTEARKETVMGQPTPKTPRQLREFLGTAGFCRLWIPGFAEMAAPLYPLTKPGTLFNWGPDQQKAYQEIKQALLTAPALGLPDLTKPFELFVDEKQGYAKGVLTQKLGPWRRPVAYLSKKLDPVAAGWPPCLRMVAAIAVLTKDAGKLTMGQPLVILAPHAVEALVKQPPDRWLSNARMTHYQAMLLDTDRVQFGPVVALNPATLLPLPEKEAPHDCLEILAETHGTRPDLTDQPIPDADYTWYTDGSSFLQEGQRRAGAAVTTETEVIWARALPAGTSAQRAELIALTQALKMAEGKKLNVYTDSRYAFATAHVHGEIYRRRGWLTSEGREIKNKNEILALLKALFLPKRLSIIHCPGHQKGNSAEARGNRMADQAAREAAMKAVLETSTLLAGKRTADGSEFEKRTADGSEFESPKKKAKVE

SEQ ID NO: 6552 - protein, 2100 aa, synthetic construct
MPAAKRVKLDGGDKKYSIGLDIGTNSVGWAVITDEYKVPSKKFKVLGNTDRHSIKKNLIGALLFDSGETAEATRLKRTARRRYTRRKNRICYLQEIFSNEMAKVDDSFFHRLEESFLVEEDKKHERHPIFGNIVDEVAYHEKYPTIYHLRKKLVDSTDKADLRLIYLALAHMIKFRGHFLIEGDLNPDNSDVDKLFIQLVQTYNQLFEENPINASGVDAKAILSARLSKSRRLENLIAQLPGEKKNGLFGNLIALSLGLTPNFKSNFDLAEDAKLQLSKDTYDDDLDNLLAQIGDQYADLFLAAKNLSDAILLSDILRVNTEITKAPLSASMIKRYDEHHQDLTLLKALVRQQLPEKYKEIFFDQSKNGYAGYIDGGASQEEFYKFIKPILEKMDGTEELLVKLNREDLLRKQRTFDNGSIPHQIHLGELHAILRRQEDFYPFLKDNREKIEKILTFRIPYYVGPLARGNSRFAWMTRKSEETITPWNFEEVVDKGASAQSFIERMTNFDKNLPNEKVLPKHSLLYEYFTVYNELTKVKYVTEGMRKPAFLSGEQKKAIVDLLFKTNRKVTVKQLKEDYFKKIECFDSVEISGVEDRFNASLGTYHDLLKIIKDKDFLDNEENEDILEDIVLTLTLFEDREMIEERLKTYAHLFDDKVMKQLKRRRYTGWGRLSRKLINGIRDKQSGKTILDFLKSDGFANRNFMQLIHDDSLTFKEDIQKAQVSGQGDSLHEHIANLAGSPAIKKGILQTVKVVDELVKVMGRHKPENIVIEMARENQTTQKGQKNSRERMKRIEEGIKELGSQILKEHPVENTQLQNEKLYLYYLQNGRDMYVDQELDINRLSDYDVDHIVPQSFLKDDSIDNKVLTRSDKARGKSDNVPSEEVVKKMKNYWRQLLNAKLITQRKFDNLTKAERGGLSELDKAGFIKRQLVETRQITKHVAQILDSRMNTKYDENDKLIREVKVITLKSKLVSDFRKDFQFYKVREINNYHHAHDAYLNAVVGTALIKKYPKLESEFVYGDYKVYDVRKMIAKSEQEIGKATAKYFFYSNIMNFFKTEITLANGEIRKRPLIETNGETGEIVWDKGRDFATVRKVLSMPQVNIVKKTEVQTGGFSKESILPKRNSDKLIARKKDWDPKKYGGFDSPTVAYSVLVVAKVEKGKSKKLKSVKELLGITIMERSSFEKNPIDFLEAKGYKEVKKDLIIKLPKYSLFELENGRKRMLASAGELQKGNELALPSKYVNFLYLASHYEKLKGSPEDNEQKQLFVEQHKHYLDEIIEQISEFSKRVILADANLDKVLSAYNKHRDKPIREQAENIIHLFTLTNLGAPAAFKYFDTTIDRKRYTSTKEVLDATLIHQSITGLYETRIDLSQLGGDGGPAPAPAPAPAPAPGGTAPLEEEYRLFLEAPIQNVTLLEQWKREIPKVWAEINPPGLASTQAPIHVQLLSTALPVRVRQYPITLEAKRSLRETIRKFRAAGILRPVHSPWNTPLLPVRKSGTSEYRMVQDLREVNKRVETIHPTVPNPYTLLSLLPPDRIWYSVLDLKDAFFCIPLAPESQLIFAFEWADAEEGESGQLTWTRLPQGFKNSPTLFDEALNRDLQGFRLDHPSVSLLQYVDDLLIAADTQAACLSATRDLLMTLAELGYRVSGKKAQLCQEEVTYLGFKIHKGSRSLSNSRTQAILQIPVPKTKRQVREFLGTIGYCRLWIPGFAELAQPLYAATRGGNDPLVWGEKEEEAFQSLKLALTQPPALALPSLDKPFQLFVEETSGAAKGVLTQALGPWKRPVAYLSKRLDPVAAGWPRCLRAIAAAALLTREASKLTFGQDIEITSSHNLESLLRSPPDKWLTNARITQYQVLLLDPPRVRFKQTAALNPATLLPETDDTLPIHHCLDTLDSLTSTRPDLTDQPLAQAEATLFTDGSSYIRDGKRYAGAAVVTLDSVIWAEPLPIGTSAQKAELIALTKALEWSKDKSVNIYTDSRYAFATLHVHGMIYRERGLLTAGGKAIKNAPEILALLTAVWLPKRVAVMHCKGHQKDDAPTSTGNRRADEVAREVAIRPLSTQATISAGKRTADGSEFEKRTADGSEFESPKKKAKVE

SEQ ID NO: 6553 - protein, 2175 aa, synthetic construct
MPAAKRVKLDGGDKKYSIGLDIGTNSVGWAVITDEYKVPSKKFKVLGNTDRHSIKKNLIGALLFDSGETAEATRLKRTARRRYTRRKNRICYLQEIFSNEMAKVDDSFFHRLEESFLVEEDKKHERHPIFGNIVDEVAYHEKYPTIYHLRKKLVDSTDKADLRLIYLALAHMIKFRGHFLIEGDLNPDNSDVDKLFIQLVQTYNQLFEENPINASGVDAKAILSARLSKSRRLENLIAQLPGEKKNGLFGNLIALSLGLTPNFKSNFDLAEDAKLQLSKDTYDDDLDNLLAQIGDQYADLFLAAKNLSDAILLSDILRVNTEITKAPLSASMIKRYDEHHQDLTLLKALVRQQLPEKYKEIFFDQSKNGYAGYIDGGASQEEFYKFIKPILEKMDGTEELLVKLNREDLLRKQRTFDNGSIPHQIHLGELHAILRRQEDFYPFLKDNREKIEKILTFRIPYYVGPLARGNSRFAWMTRKSEETITPWNFEEVVDKGASAQSFIERMTNFDKNLPNEKVLPKHSLLYEYFTVYNELTKVKYVTEGMRKPAFLSGEQKKAIVDLLFKTNRKVTVKQLKEDYFKKIECFDSVEISGVEDRFNASLGTYHDLLKIIKDKDFLDNEENEDILEDIVLTLTLFEDREMIEERLKTYAHLFDDKVMKQLKRRRYTGWGRLSRKLINGIRDKQSGKTILDFLKSDGFANRNFMQLIHDDSLTFKEDIQKAQVSGQGDSLHEHIANLAGSPAIKKGILQTVKVVDELVKVMGRHKPENIVIEMARENQTTQKGQKNSRERMKRIEEGIKELGSQILKEHPVENTQLQNEKLYLYYLQNGRDMYVDQELDINRLSDYDVDHIVPQSFLKDDSIDNKVLTRSDKARGKSDNVPSEEVVKKMKNYWRQLLNAKLITQRKFDNLTKAERGGLSELDKAGFIKRQLVETRQITKHVAQILDSRMNTKYDENDKLIREVKVITLKSKLVSDFRKDFQFYKVREINNYHHAHDAYLNAVVGTALIKKYPKLESEFVYGDYKVYDVRKMIAKSEQEIGKATAKYFFYSNIMNFFKTEITLANGEIRKRPLIETNGETGEIVWDKGRDFATVRKVLSMPQVNIVKKTEVQTGGFSKESILPKRNSDKLIARKKDWDPKKYGGFDSPTVAYSVLVVAKVEKGKSKKLKSVKELLGITIMERSSFEKNPIDFLEAKGYKEVKKDLIIKLPKYSLFELENGRKRMLASAGELQKGNELALPSKYVNFLYLASHYEKLKGSPEDNEQKQLFVEQHKHYLDEIIEQISEFSKRVILADANLDKVLSAYNKHRDKPIREQAENIIHLFTLTNLGAPAAFKYFDTTIDRKRYTSTKEVLDATLIHQSITGLYETRIDLSQLGGDGGPAPAPAPAPAPAPGGMDLLKPLTVERKGVKIKGYWNSQADITCVPKDLLQGEEPVRQQNVTTIHGTQEGDVYYVNLKIDGRRINTEVIGTTLDYAIITPGDVPWILKKPLELTIKLDLEEQQGTLLNNSILSKKGKEELKQLFEKYSALWQSWENQVGHRRIRPHKIATGTVKPTPQKQYHINPKAKPDIQIVINDLLKQGVLIQKESTMNTPVYPVPKPNGRWRMVLDYRAVNKVTPLIAVQNQHSYGILGSLFKGRYKTTIDLSNGFWAHPIVPEDYWITAFTWQGKQYCWTVLPQGFLNSPGLFNGDVVDLLQGIPNVEVYVDDVYISHDSEKEHLEYLDILFNRLKEAGYIISLKKSNIANSIVDFLGFQITNEGRGLTDTFKEKLENITAPTTLKQLQSILGLLNFARNFIPDFTELIAPLYALIPKSPKNYVPWQIEHSTTLETLITKLNGAEYLQGRKGDKTLIMKVNASYTTGYIRYYNEGEKKPISYVSIVFSKTELKFTELEKLLTTVHKGLLKALDLSMGQNIHVYSPIVSMQNIQKTPQTAKKALASRWLSWLSYLEDPRIRFFYDPQMPALKDLPAVDTGKDNKKHPSNFQHIFYTDGSAITSPTKEGHLNAGMGIVYFINKDGNLQKQQEWSISLGNHTAQFAEIAAFEFALKKCLPLGGNILVVTDSNYVAKAYNEELDVWASNGFVNNRKKPLKHISKWKSVADLKRLRPDVVVTHEPGHQKLDSSPHAYGNNLADQLATQASFKVHAGKRTADGSEFEKRTADGSEFESPKKKAKVE

SEQ ID NO: 6554 - protein, 2175 aa, synthetic construct
MPAAKRVKLDGGDKKYSIGLDIGTNSVGWAVITDEYKVPSKKFKVLGNTDRHSIKKNLIGALLFDSGETAEATRLKRTARRRYTRRKNRICYLQEIFSNEMAKVDDSFFHRLEESFLVEEDKKHERHPIFGNIVDEVAYHEKYPTIYHLRKKLVDSTDKADLRLIYLALAHMIKFRGHFLIEGDLNPDNSDVDKLFIQLVQTYNQLFEENPINASGVDAKAILSARLSKSRRLENLIAQLPGEKKNGLFGNLIALSLGLTPNFKSNFDLAEDAKLQLSKDTYDDDLDNLLAQIGDQYADLFLAAKNLSDAILLSDILRVNTEITKAPLSASMIKRYDEHHQDLTLLKALVRQQLPEKYKEIFFDQSKNGYAGYIDGGASQEEFYKFIKPILEKMDGTEELLVKLNREDLLRKQRTFDNGSIPHQIHLGELHAILRRQEDFYPFLKDNREKIEKILTFRIPYYVGPLARGNSRFAWMTRKSEETITPWNFEEVVDKGASAQSFIERMTNFDKNLPNEKVLPKHSLLYEYFTVYNELTKVKYVTEGMRKPAFLSGEQKKAIVDLLFKTNRKVTVKQLKEDYFKKIECFDSVEISGVEDRFNASLGTYHDLLKIIKDKDFLDNEENEDILEDIVLTLTLFEDREMIEERLKTYAHLFDDKVMKQLKRRRYTGWGRLSRKLINGIRDKQSGKTILDFLKSDGFANRNFMQLIHDDSLTFKEDIQKAQVSGQGDSLHEHIANLAGSPAIKKGILQTVKVVDELVKVMGRHKPENIVIEMARENQTTQKGQKNSRERMKRIEEGIKELGSQILKEHPVENTQLQNEKLYLYYLQNGRDMYVDQELDINRLSDYDVDHIVPQSFLKDDSIDNKVLTRSDKARGKSDNVPSEEVVKKMKNYWRQLLNAKLITQRKFDNLTKAERGGLSELDKAGFIKRQLVETRQITKHVAQILDSRMNTKYDENDKLIREVKVITLKSKLVSDFRKDFQFYKVREINNYHHAHDAYLNAVVGTALIKKYPKLESEFVYGDYKVYDVRKMIAKSEQEIGKATAKYFFYSNIMNFFKTEITLANGEIRKRPLIETNGETGEIVWDKGRDFATVRKVLSMPQVNIVKKTEVQTGGFSKESILPKRNSDKLIARKKDWDPKKYGGFDSPTVAYSVLVVAKVEKGKSKKLKSVKELLGITIMERSSFEKNPIDFLEAKGYKEVKKDLIIKLPKYSLFELENGRKRMLASAGELQKGNELALPSKYVNFLYLASHYEKLKGSPEDNEQKQLFVEQHKHYLDEIIEQISEFSKRVILADANLDKVLSAYNKHRDKPIREQAENIIHLFTLTNLGAPAAFKYFDTTIDRKRYTSTKEVLDATLIHQSITGLYETRIDLSQLGGDGGPAPAPAPAPAPAPGGMDLLKPLTVERKGVKIKGYWNSQADITCVPKDLLQGEEPVRQQNVTTIHGTQEGDVYYVNLKIDGRRINTEVIGTTLDYAIITPGDVPWILKKPLELTIKLDLEEQQGTLLNNSILSKKGKEELKQLFEKYSALWQSWENQVGHRRIRPHKIATGTVKPTPQKQYHINPKAKPDIQIVINDLLKQGVLIQKESTMNTPVYPVPKPNGRWRMVLDYRAVNKVTPLIAVQNQHSYGILGSLFKGRYKTTIDLSNGFWAHPIVPEDYWITAFTWQGKQYCWTVLPQGFLNSPGLFNGDVVDLLQGIPNVEVYVDDVYISHDSEKEHLEYLDILFNRLKEAGYIISLKKSNIANSIVDFLGFQITNEGRGLTDTFKEKLENITAPTTLKQLQSILGKLNFARNFIPDFTELIAPLYALIPKSPKNYVPWQIEHSTTLETLITKLNGAEYLQGRKGDKTLIMKVNASYTTGYIRYYNEGEKKPISYVSIVFSKTELKFTELEKLLTTVHKGLLKALDLSMGQNIHVYSPIVSMQNIQKTPQTAKKALASRWLSWLSYLEDPRIRFFYDPQMPALKDLPAVDTGKDNKKHPSNFQHIFYTDGSAITSPTKEGHLNAGMGIVYFINKDGNLQKQQEWSISLGNHTAQFAEIAAFEFALKKCLPLGGNILVVTDSNYVAKAYNEELDVWASNGFVNNRKKPLKHISKWKSVADLKRLRPDVVVTHEPGHQKLDSSPHAYGNNLADQLATQASFKVHAGKRTADGSEFEKRTADGSEFESPKKKAKVE

SEQ ID NO: 6555 - protein, 2097 aa, synthetic construct
MPAAKRVKLDGGDKKYSIGLDIGTNSVGWAVITDEYKVPSKKFKVLGNTDRHSIKKNLIGALLFDSGETAEATRLKRTARRRYTRRKNRICYLQEIFSNEMAKVDDSFFHRLEESFLVEEDKKHERHPIFGNIVDEVAYHEKYPTIYHLRKKLVDSTDKADLRLIYLALAHMIKFRGHFLIEGDLNPDNSDVDKLFIQLVQTYNQLFEENPINASGVDAKAILSARLSKSRRLENLIAQLPGEKKNGLFGNLIALSLGLTPNFKSNFDLAEDAKLQLSKDTYDDDLDNLLAQIGDQYADLFLAAKNLSDAILLSDILRVNTEITKAPLSASMIKRYDEHHQDLTLLKALVRQQLPEKYKEIFFDQSKNGYAGYIDGGASQEEFYKFIKPILEKMDGTEELLVKLNREDLLRKQRTFDNGSIPHQIHLGELHAILRRQEDFYPFLKDNREKIEKILTFRIPYYVGPLARGNSRFAWMTRKSEETITPWNFEEVVDKGASAQSFIERMTNFDKNLPNEKVLPKHSLLYEYFTVYNELTKVKYVTEGMRKPAFLSGEQKKAIVDLLFKTNRKVTVKQLKEDYFKKIECFDSVEISGVEDRFNASLGTYHDLLKIIKDKDFLDNEENEDILEDIVLTLTLFEDREMIEERLKTYAHLFDDKVMKQLKRRRYTGWGRLSRKLINGIRDKQSGKTILDFLKSDGFANRNFMQLIHDDSLTFKEDIQKAQVSGQGDSLHEHIANLAGSPAIKKGILQTVKVVDELVKVMGRHKPENIVIEMARENQTTQKGQKNSRERMKRIEEGIKELGSQILKEHPVENTQLQNEKLYLYYLQNGRDMYVDQELDINRLSDYDVDHIVPQSFLKDDSIDNKVLTRSDKARGKSDNVPSEEVVKKMKNYWRQLLNAKLITQRKFDNLTKAERGGLSELDKAGFIKRQLVETRQITKHVAQILDSRMNTKYDENDKLIREVKVITLKSKLVSDFRKDFQFYKVREINNYHHAHDAYLNAVVGTALIKKYPKLESEFVYGDYKVYDVRKMIAKSEQEIGKATAKYFFYSNIMNFFKTEITLANGEIRKRPLIETNGETGEIVWDKGRDFATVRKVLSMPQVNIVKKTEVQTGGFSKESILPKRNSDKLIARKKDWDPKKYGGFDSPTVAYSVLVVAKVEKGKSKKLKSVKELLGITIMERSSFEKNPIDFLEAKGYKEVKKDLIIKLPKYSLFELENGRKRMLASAGELQKGNELALPSKYVNFLYLASHYEKLKGSPEDNEQKQLFVEQHKHYLDEIIEQISEFSKRVILADANLDKVLSAYNKHRDKPIREQAENIIHLFTLTNLGAPAAFKYFDTTIDRKRYTSTKEVLDATLIHQSITGLYETRIDLSQLGGDGGPAPAPAPAPAPAPGGTLQLEEEYRLFEPESTQKQEMDIWLKNFPQAWAETGGMGTAHCQAPVLIQLKATATPISIRQYPMPHEAYQGIKPHIRRMLDQGILKPCQSPWNTPLLPVKKPGTEDYRPVQDLREVNKRVEDIHPTVPNPYNLLSTLPPSHPWYTVLDLKDAFFCLRLHSESQLLFAFEWRDPEIGLSGQLTWTRLPQGFKNSPTLFNEALHSDLADFRVRYPALVLLQYVDDLLLAAATRTECLEGTKALLETLGNKGYRASAKKAQICLQEVTYLGYSLKDGQRWLTKARKEAILSIPVPKNSRQVREFLGTAGYCRLWIPGFAELAAPLYPLTRPGTLFQWGTEQQLAFEDIKKALLSSPALGLPDITKPFELFIDENSGFAKGVLVQKLGPWKRPVAYLSKKLDTVASGWPPCLRMVAAIAILVKDAGKLTLGQPLTILTSHPVEALVRQPPNKWLSNARMTHYQAMLLDAERVHFGPTVSLNPATLLPLPSGGNHHDCLQILAETHGTRPDLTDQPLPDADLTWYTDGSSFIRNGEREAGAAVTTESEVIWAAPLPPGTSAQRAELIALTQALKMAEGKKLTVYTDSRYAFATTHVHGEIYRRRGWLTSEGKEIKNKNEILALLEALFLPKRLSIIHCPGHQKGDSPQAKGNRLADDTAKKAATETHSSLTVLPAGKRTADGSEFEKRTADGSEFESPKKKAKVE

SEQ ID NO: 6556 - protein, 2089 aa, synthetic construct
MPAAKRVKLDGGDKKYSIGLDIGTNSVGWAVITDEYKVPSKKFKVLGNTDRHSIKKNLIGALLFDSGETAEATRLKRTARRRYTRRKNRICYLQEIFSNEMAKVDDSFFHRLEESFLVEEDKKHERHPIFGNIVDEVAYHEKYPTIYHLRKKLVDSTDKADLRLIYLALAHMIKFRGHFLIEGDLNPDNSDVDKLFIQLVQTYNQLFEENPINASGVDAKAILSARLSKSRRLENLIAQLPGEKKNGLFGNLIALSLGLTPNFKSNFDLAEDAKLQLSKDTYDDDLDNLLAQIGDQYADLFLAAKNLSDAILLSDILRVNTEITKAPLSASMIKRYDEHHQDLTLLKALVRQQLPEKYKEIFFDQSKNGYAGYIDGGASQEEFYKFIKPILEKMDGTEELLVKLNREDLLRKQRTFDNGSIPHQIHLGELHAILRRQEDFYPFLKDNREKIEKILTFRIPYYVGPLARGNSRFAWMTRKSEETITPWNFEEVVDKGASAQSFIERMTNFDKNLPNEKVLPKHSLLYEYFTVYNELTKVKYVTEGMRKPAFLSGEQKKAIVDLLFKTNRKVTVKQLKEDYFKKIECFDSVEISGVEDRFNASLGTYHDLLKIIKDKDFLDNEENEDILEDIVLTLTLFEDREMIEERLKTYAHLFDDKVMKQLKRRRYTGWGRLSRKLINGIRDKQSGKTILDFLKSDGFANRNFMQLIHDDSLTFKEDIQKAQVSGQGDSLHEHIANLAGSPAIKKGILQTVKVVDELVKVMGRHKPENIVIEMARENQTTQKGQKNSRERMKRIEEGIKELGSQILKEHPVENTQLQNEKLYLYYLQNGRDMYVDQELDINRLSDYDVDHIVPQSFLKDDSIDNKVLTRSDKARGKSDNVPSEEVVKKMKNYWRQLLNAKLITQRKFDNLTKAERGGLSELDKAGFIKRQLVETRQITKHVAQILDSRMNTKYDENDKLIREVKVITLKSKLVSDFRKDFQFYKVREINNYHHAHDAYLNAVVGTALIKKYPKLESEFVYGDYKVYDVRKMIAKSEQEIGKATAKYFFYSNIMNFFKTEITLANGEIRKRPLIETNGETGEIVWDKGRDFATVRKVLSMPQVNIVKKTEVQTGGFSKESILPKRNSDKLIARKKDWDPKKYGGFDSPTVAYSVLVVAKVEKGKSKKLKSVKELLGITIMERSSFEKNPIDFLEAKGYKEVKKDLIIKLPKYSLFELENGRKRMLASAGELQKGNELALPSKYVNFLYLASHYEKLKGSPEDNEQKQLFVEQHKHYLDEIIEQISEFSKRVILADANLDKVLSAYNKHRDKPIREQAENIIHLFTLTNLGAPAAFKYFDTTIDRKRYTSTKEVLDATLIHQSITGLYETRIDLSQLGGDGGPAPAPAPAPAPAPGGVPWLTQQPLQLTILVPLQEYQEKILSKTALPEDQKQQLKTLFVKYDNLWQHWENQVGHRKIRPHNIATGDYPPRPQKQYPINPKAKPSIQIVIDDLLKQGVLTPQNSTMNTPVYPVPKPDGRWRMVLDYREVNKTIPLTAAQNQHSAGILATIVRQKYKTTLDLANGFWAHPITPESYWLTAFTWQGKQYCWTRLPQGFLNSPALFNADVVDLLKEIPNVQVYVDDIYLSHDDPKEHVQQLEKVFQILLQAGYVVSLKKSEIGQKTVEFLGFNITKEGRGLTDTFKTKLLNITPPKDLKQLQSILGKLNFARNFIPNFAELVQPLYNLIAPAKGKYIEWSEENTKQLNMVIEALNTASNLEERLPEQRLVIKVNTSPSAGYVRYYNETGKKPIMYLNYVFSKAELKFSMLEKLLTTMHKALIKAMDLAMGQEILVYSPIVSMTKIQKTPLPERKALPIRWITWMTYLEDPRIQFHYDKTLPELKHIPDVYTSSQSPVKHPSQYEGVFYTDGSAIKSPDPTKSNNAGMGIVHATYKPEYQVLNQWSIPLGNHTAQMAEIAAVEFACKKALKIPGPVLVITDSFYVAESANKELPYWKSNGFVNNKKKPLKHISKWKSIAECLSMKPDITIQHEKGISLQIPVFILKGNALADKLATQGSYVVNAGKRTADGSEFEKRTADGSEFESPKKKAKVE

SEQ ID NO: 6557 - protein, 2096 aa, synthetic construct
MPAAKRVKLDGGDKKYSIGLDIGTNSVGWAVITDEYKVPSKKFKVLGNTDRHSIKKNLIGALLFDSGETAEATRLKRTARRRYTRRKNRICYLQEIFSNEMAKVDDSFFHRLEESFLVEEDKKHERHPIFGNIVDEVAYHEKYPTIYHLRKKLVDSTDKADLRLIYLALAHMIKFRGHFLIEGDLNPDNSDVDKLFIQLVQTYNQLFEENPINASGVDAKAILSARLSKSRRLENLIAQLPGEKKNGLFGNLIALSLGLTPNFKSNFDLAEDAKLQLSKDTYDDDLDNLLAQIGDQYADLFLAAKNLSDAILLSDILRVNTEITKAPLSASMIKRYDEHHQDLTLLKALVRQQLPEKYKEIFFDQSKNGYAGYIDGGASQEEFYKFIKPILEKMDGTEELLVKLNREDLLRKQRTFDNGSIPHQIHLGELHAILRRQEDFYPFLKDNREKIEKILTFRIPYYVGPLARGNSRFAWMTRKSEETITPWNFEEVVDKGASAQSFIERMTNFDKNLPNEKVLPKHSLLYEYFTVYNELTKVKYVTEGMRKPAFLSGEQKKAIVDLLFKTNRKVTVKQLKEDYFKKIECFDSVEISGVEDRFNASLGTYHDLLKIIKDKDFLDNEENEDILEDIVLTLTLFEDREMIEERLKTYAHLFDDKVMKQLKRRRYTGWGRLSRKLINGIRDKQSGKTILDFLKSDGFANRNFMQLIHDDSLTFKEDIQKAQVSGQGDSLHEHIANLAGSPAIKKGILQTVKVVDELVKVMGRHKPENIVIEMARENQTTQKGQKNSRERMKRIEEGIKELGSQILKEHPVENTQLQNEKLYLYYLQNGRDMYVDQELDINRLSDYDVDHIVPQSFLKDDSIDNKVLTRSDKARGKSDNVPSEEVVKKMKNYWRQLLNAKLITQRKFDNLTKAERGGLSELDKAGFIKRQLVETRQITKHVAQILDSRMNTKYDENDKLIREVKVITLKSKLVSDFRKDFQFYKVREINNYHHAHDAYLNAVVGTALIKKYPKLESEFVYGDYKVYDVRKMIAKSEQEIGKATAKYFFYSNIMNFFKTEITLANGEIRKRPLIETNGETGEIVWDKGRDFATVRKVLSMPQVNIVKKTEVQTGGFSKESILPKRNSDKLIARKKDWDPKKYGGFDSPTVAYSVLVVAKVEKGKSKKLKSVKELLGITIMERSSFEKNPIDFLEAKGYKEVKKDLIIKLPKYSLFELENGRKRMLASAGELQKGNELALPSKYVNFLYLASHYEKLKGSPEDNEQKQLFVEQHKHYLDEIIEQISEFSKRVILADANLDKVLSAYNKHRDKPIREQAENIIHLFTLTNLGAPAAFKYFDTTIDRKRYTSTKEVLDATLIHQSITGLYETRIDLSQLGGDGGPAPAPAPAPAPAPGGVLNLEEEYRLHEKPVPSSIDPSWLQLFPTVWAERAGMGLANQVPPVVVELRSGASPVAVRQYPMSKEAREGIRPHIQKFLDLGVLVPCRSPWNTPLLPVKKPGTNDYRPVQDLREINKRVQDIHPTVPNPYNLLSSLPPSYTWYSVLDLKDAFFCLRLHPNSQPLFAFEWKDPEKGNTGQLTWTRLPQGFKNSPTLFNEALHRDLAPFRALNPQVVLLQYVDDLLVAAPTYEDCKKGTQKLLQELSKLGYRVSAKKAQLCQREVTYLGYLLKEGKRWLTPARKATVMKIPVPTTPRQVREFLGTAGFCRLWIPGFASLAAPLYPLTKPSIPFIWTEEHQQAFDHIKKALLSAPALALPDLTKPFTLYIDERAGVARGVLTQTLGPWRRPVAYLSKKLDPVASGWPTCLKAVAAVALLLKDADKLTLGQNVTVIASHSLESIVRQPPDRWMTNARMTHYQSLLLNERVSFAPPAVLNPATLLPVESEATPVHRCSEILAEETGTRRDLEDQPLPGVPTWYTDGSSFITEGKRRAGAPIVDGKRTVWASSLPEGTSAQKAELVALTQALRLAEGKNINIYTDSRYAFATAHIHGAIYKQRGWLTSAGKDIKNKEEILALLEAIHLPRRVAIIHCPGHQRGSNPVATGNRRADEAAKQAALSTRVLAGTTKPAGKRTADGSEFEKRTADGSEFESPKKKAKVE

SEQ ID NO: 6558 - protein, 2096 aa, synthetic construct
MPAAKRVKLDGGDKKYSIGLDIGTNSVGWAVITDEYKVPSKKFKVLGNTDRHSIKKNLIGALLFDSGETAEATRLKRTARRRYTRRKNRICYLQEIFSNEMAKVDDSFFHRLEESFLVEEDKKHERHPIFGNIVDEVAYHEKYPTIYHLRKKLVDSTDKADLRLIYLALAHMIKFRGHFLIEGDLNPDNSDVDKLFIQLVQTYNQLFEENPINASGVDAKAILSARLSKSRRLENLIAQLPGEKKNGLFGNLIALSLGLTPNFKSNFDLAEDAKLQLSKDTYDDDLDNLLAQIGDQYADLFLAAKNLSDAILLSDILRVNTEITKAPLSASMIKRYDEHHQDLTLLKALVRQQLPEKYKEIFFDQSKNGYAGYIDGGASQEEFYKFIKPILEKMDGTEELLVKLNREDLLRKQRTFDNGSIPHQIHLGELHAILRRQEDFYPFLKDNREKIEKILTFRIPYYVGPLARGNSRFAWMTRKSEETITPWNFEEVVDKGASAQSFIERMTNFDKNLPNEKVLPKHSLLYEYFTVYNELTKVKYVTEGMRKPAFLSGEQKKAIVDLLFKTNRKVTVKQLKEDYFKKIECFDSVEISGVEDRFNASLGTYHDLLKIIKDKDFLDNEENEDILEDIVLTLTLFEDREMIEERLKTYAHLFDDKVMKQLKRRRYTGWGRLSRKLINGIRDKQSGKTILDFLKSDGFANRNFMQLIHDDSLTFKEDIQKAQVSGQGDSLHEHIANLAGSPAIKKGILQTVKVVDELVKVMGRHKPENIVIEMARENQTTQKGQKNSRERMKRIEEGIKELGSQILKEHPVENTQLQNEKLYLYYLQNGRDMYVDQELDINRLSDYDVDHIVPQSFLKDDSIDNKVLTRSDKARGKSDNVPSEEVVKKMKNYWRQLLNAKLITQRKFDNLTKAERGGLSELDKAGFIKRQLVETRQITKHVAQILDSRMNTKYDENDKLIREVKVITLKSKLVSDFRKDFQFYKVREINNYHHAHDAYLNAVVGTALIKKYPKLESEFVYGDYKVYDVRKMIAKSEQEIGKATAKYFFYSNIMNFFKTEITLANGEIRKRPLIETNGETGEIVWDKGRDFATVRKVLSMPQVNIVKKTEVQTGGFSKESILPKRNSDKLIARKKDWDPKKYGGFDSPTVAYSVLVVAKVEKGKSKKLKSVKELLGITIMERSSFEKNPIDFLEAKGYKEVKKDLIIKLPKYSLFELENGRKRMLASAGELQKGNELALPSKYVNFLYLASHYEKLKGSPEDNEQKQLFVEQHKHYLDEIIEQISEFSKRVILADANLDKVLSAYNKHRDKPIREQAENIIHLFTLTNLGAPAAFKYFDTTIDRKRYTSTKEVLDATLIHQSITGLYETRIDLSQLGGDGGPAPAPAPAPAPAPGGVLNLEEEYRLHEKPVPSSIDPSWLQLFPTVWAERAGMGLANQVPPVVVELRSGASPVAVRQYPMSKEAREGIRPHIQKFLDLGVLVPCRSPWNTPLLPVKKPGTNDYRPVQDLREINKRVQDIHPTVPNPYNLLSSLPPSYTWYSVLDLKDAFFCLRLHPNSQPLFAFEWKDPEKGNTGQLTWTRLPQGFKNSPTLFNEALHRDLAPFRALNPQVVLLQYVDDLLVAAPTYEDCKKGTQKLLQELSKLGYRVSAKKAQLCQREVTYLGYLLKEGKRWLTPARKATVMKIPVPTTPRQVREFLGKAGFCRLFIPGFASLAAPLYPLTKPSIPFIWTEEHQQAFDHIKKALLSAPALALPDLTKPFTLYIDERAGVARGVLTQTLGPWRRPVAYLSKKLDPVASGWPTCLKAVAAVALLLKDADKLTLGQNVTVIASHSLESIVRQPPDRWMTNARMTHYQSLLLNERVSFAPPAVLNPATLLPVESEATPVHRCSEILAEETGTRRDLEDQPLPGVPTWYTDGSSFITEGKRRAGAPIVDGKRTVWASSLPEGTSAQKAELVALTQALRLAEGKNINIYTDSRYAFATAHIHGAIYKQRGWLTSAGKDIKNKEEILALLEAIHLPRRVAIIHCPGHQRGSNPVATGNRRADEAAKQAALSTRVLAGTTKPAGKRTADGSEFEKRTADGSEFESPKKKAKVE

SEQ ID NO: 6559 - protein, 2129 aa, synthetic construct
MPAAKRVKLDGGDKKYSIGLDIGTNSVGWAVITDEYKVPSKKFKVLGNTDRHSIKKNLIGALLFDSGETAEATRLKRTARRRYTRRKNRICYLQEIFSNEMAKVDDSFFHRLEESFLVEEDKKHERHPIFGNIVDEVAYHEKYPTIYHLRKKLVDSTDKADLRLIYLALAHMIKFRGHFLIEGDLNPDNSDVDKLFIQLVQTYNQLFEENPINASGVDAKAILSARLSKSRRLENLIAQLPGEKKNGLFGNLIALSLGLTPNFKSNFDLAEDAKLQLSKDTYDDDLDNLLAQIGDQYADLFLAAKNLSDAILLSDILRVNTEITKAPLSASMIKRYDEHHQDLTLLKALVRQQLPEKYKEIFFDQSKNGYAGYIDGGASQEEFYKFIKPILEKMDGTEELLVKLNREDLLRKQRTFDNGSIPHQIHLGELHAILRRQEDFYPFLKDNREKIEKILTFRIPYYVGPLARGNSRFAWMTRKSEETITPWNFEEVVDKGASAQSFIERMTNFDKNLPNEKVLPKHSLLYEYFTVYNELTKVKYVTEGMRKPAFLSGEQKKAIVDLLFKTNRKVTVKQLKEDYFKKIECFDSVEISGVEDRFNASLGTYHDLLKIIKDKDFLDNEENEDILEDIVLTLTLFEDREMIEERLKTYAHLFDDKVMKQLKRRRYTGWGRLSRKLINGIRDKQSGKTILDFLKSDGFANRNFMQLIHDDSLTFKEDIQKAQVSGQGDSLHEHIANLAGSPAIKKGILQTVKVVDELVKVMGRHKPENIVIEMARENQTTQKGQKNSRERMKRIEEGIKELGSQILKEHPVENTQLQNEKLYLYYLQNGRDMYVDQELDINRLSDYDVDHIVPQSFLKDDSIDNKVLTRSDKARGKSDNVPSEEVVKKMKNYWRQLLNAKLITQRKFDNLTKAERGGLSELDKAGFIKRQLVETRQITKHVAQILDSRMNTKYDENDKLIREVKVITLKSKLVSDFRKDFQFYKVREINNYHHAHDAYLNAVVGTALIKKYPKLESEFVYGDYKVYDVRKMIAKSEQEIGKATAKYFFYSNIMNFFKTEITLANGEIRKRPLIETNGETGEIVWDKGRDFATVRKVLSMPQVNIVKKTEVQTGGFSKESILPKRNSDKLIARKKDWDPKKYGGFDSPTVAYSVLVVAKVEKGKSKKLKSVKELLGITIMERSSFEKNPIDFLEAKGYKEVKKDLIIKLPKYSLFELENGRKRMLASAGELQKGNELALPSKYVNFLYLASHYEKLKGSPEDNEQKQLFVEQHKHYLDEIIEQISEFSKRVILADANLDKVLSAYNKHRDKPIREQAENIIHLFTLTNLGAPAAFKYFDTTIDRKRYTSTKEVLDATLIHQSITGLYETRIDLSQLGGDGGPAPAPAPAPAPAPGGLLGRDLLTKLKAQIQFSTEGPQVTWEDRPAMCLVLNLEEEYRLHEKPVPPSIDPSWLQLFPMVWAEKAGMGLANQVPPVVVELKSDASPVAVRQYPMSKEAREGIRPHIQRFLDLGILVPCQSPWNTPLLPVKKPGTNDYRPVQDLREVNKRVQDIHPTVPNPYNLLSSLPPSHTWYSVLDLKDAFFCLKLHPNSQPLFAFEWRDPEKGNTGQLTWTRLPQGFKNSPTLFNEALHRDLASFRALNPQVVMLQYVDDLLVAAPTYRDCKEGTRRLLQELSKLGYRVSAKKAQLCREEVTYLGYLLKGGKRWLTPARKATVMKIPTPTTPRQVREFLGTAGFCRLWIPGFASLAAPLYPLTRPKVPFTWTEAHQEAFGRIKEALLSAPALALPDLTKPFALYVDEKEGVARGVLTQTLGPWRRPVAYLSKKLDPVASGWPTCLKAIAAVALLLKDADKLTLGQNVLVIAPHNLESIVRQPPDRWMTNARMTHYQSLLLNERVSFAPPAILNPATLLPVESDDTPIHICSEILAEETGTRPDLRDQPLPGVPAWYTDGSSFIMDGRRQAGAAIVDNKRTVWASNLPEGTSAQKAELIALTQALRLAEGKSINIYTDSRYAFATAHVHGAIYKQRGWLTSAGKDIKNKEEILALLEAIHLPKRVAIIHCPGHQRGTDPVATGNRKADEAAKQAAQSTRILTETTKNAGKRTADGSEFEKRTADGSEFESPKKKAKVE

SEQ ID NO: 6560 - protein, 2220 aa, synthetic construct
MPAAKRVKLDGGDKKYSIGLDIGTNSVGWAVITDEYKVPSKKFKVLGNTDRHSIKKNLIGALLFDSGETAEATRLKRTARRRYTRRKNRICYLQEIFSNEMAKVDDSFFHRLEESFLVEEDKKHERHPIFGNIVDEVAYHEKYPTIYHLRKKLVDSTDKADLRLIYLALAHMIKFRGHFLIEGDLNPDNSDVDKLFIQLVQTYNQLFEENPINASGVDAKAILSARLSKSRRLENLIAQLPGEKKNGLFGNLIALSLGLTPNFKSNFDLAEDAKLQLSKDTYDDDLDNLLAQIGDQYADLFLAAKNLSDAILLSDILRVNTEITKAPLSASMIKRYDEHHQDLTLLKALVRQQLPEKYKEIFFDQSKNGYAGYIDGGASQEEFYKFIKPILEKMDGTEELLVKLNREDLLRKQRTFDNGSIPHQIHLGELHAILRRQEDFYPFLKDNREKIEKILTFRIPYYVGPLARGNSRFAWMTRKSEETITPWNFEEVVDKGASAQSFIERMTNFDKNLPNEKVLPKHSLLYEYFTVYNELTKVKYVTEGMRKPAFLSGEQKKAIVDLLFKTNRKVTVKQLKEDYFKKIECFDSVEISGVEDRFNASLGTYHDLLKIIKDKDFLDNEENEDILEDIVLTLTLFEDREMIEERLKTYAHLFDDKVMKQLKRRRYTGWGRLSRKLINGIRDKQSGKTILDFLKSDGFANRNFMQLIHDDSLTFKEDIQKAQVSGQGDSLHEHIANLAGSPAIKKGILQTVKVVDELVKVMGRHKPENIVIEMARENQTTQKGQKNSRERMKRIEEGIKELGSQILKEHPVENTQLQNEKLYLYYLQNGRDMYVDQELDINRLSDYDVDHIVPQSFLKDDSIDNKVLTRSDKARGKSDNVPSEEVVKKMKNYWRQLLNAKLITQRKFDNLTKAERGGLSELDKAGFIKRQLVETRQITKHVAQILDSRMNTKYDENDKLIREVKVITLKSKLVSDFRKDFQFYKVREINNYHHAHDAYLNAVVGTALIKKYPKLESEFVYGDYKVYDVRKMIAKSEQEIGKATAKYFFYSNIMNFFKTEITLANGEIRKRPLIETNGETGEIVWDKGRDFATVRKVLSMPQVNIVKKTEVQTGGFSKESILPKRNSDKLIARKKDWDPKKYGGFDSPTVAYSVLVVAKVEKGKSKKLKSVKELLGITIMERSSFEKNPIDFLEAKGYKEVKKDLIIKLPKYSLFELENGRKRMLASAGELQKGNELALPSKYVNFLYLASHYEKLKGSPEDNEQKQLFVEQHKHYLDEIIEQISEFSKRVILADANLDKVLSAYNKHRDKPIREQAENIIHLFTLTNLGAPAAFKYFDTTIDRKRYTSTKEVLDATLIHQSITGLYETRIDLSQLGGDGGPAPAPAPAPAPAPGGTLGDQGSRGSDPLPEPRVTLTVEGIPTEFLVNTGAEHSVLTKPMGKMGSKRTVVAGATGSKVYPWTTKRLLKIGQKQVTHSFLVIPECPAPLLGRDLLTKLKAQIQFSTEGPQVTWEDRPAMCLVLNLEEEYRLHEKPVPPSIDPSWLQLFPMVWAEKAGMGLANQVPPVVVELKSDASPVAVRQYPMSKEAREGIRPHIQRFLDLGILVPCQSPWNTPLLPVKKPGTNDYRPVQDLREVNKRVQDIHPTVPNPYNLLSSLPPSHTWYSVLDLKDAFFCLKLHPNSQPLFAFEWRDPEKGNTGQLTWTRLPQGFKNSPTLFNEALHRDLASFRALNPQVVMLQYVDDLLVAAPTYRDCKEGTRRLLQELSKLGYRVSAKKAQLCREEVTYLGYLLKGGKRWLTPARKATVMKIPTPTTPRQVREFLGTAGFCRLWIPGFASLAAPLYPLTRPKVPFTWTEAHQEAFGRIKEALLSAPALALPDLTKPFALYVDEKEGVARGVLTQTLGPWRRPVAYLSKKLDPVASGWPTCLKAIAAVALLLKDADKLTLGQNVLVIAPHNLESIVRQPPDRWMTNARMTHYQSLLLNERVSFAPPAILNPATLLPVESDDTPIHICSEILAEETGTRPDLRDQPLPGVPAWYTDGSSFIMDGRRQAGAAIVDNKRTVWASNLPEGTSAQKAELIALTQALRLAEGKSINIYTDSRYAFATAHVHGAIYKQRGWLTSAGKDIKNKEEILALLEAIHLPKRVAIIHCPGHQRGTDPVATGNRKADEAAKQAAQSTRILTETTKNAGKRTADGSEFEKRTADGSEFESPKKKAKVE

SEQ ID NO: 6561 - protein, 2098 aa, synthetic construct
MPAAKRVKLDGGDKKYSIGLDIGTNSVGWAVITDEYKVPSKKFKVLGNTDRHSIKKNLIGALLFDSGETAEATRLKRTARRRYTRRKNRICYLQEIFSNEMAKVDDSFFHRLEESFLVEEDKKHERHPIFGNIVDEVAYHEKYPTIYHLRKKLVDSTDKADLRLIYLALAHMIKFRGHFLIEGDLNPDNSDVDKLFIQLVQTYNQLFEENPINASGVDAKAILSARLSKSRRLENLIAQLPGEKKNGLFGNLIALSLGLTPNFKSNFDLAEDAKLQLSKDTYDDDLDNLLAQIGDQYADLFLAAKNLSDAILLSDILRVNTEITKAPLSASMIKRYDEHHQDLTLLKALVRQQLPEKYKEIFFDQSKNGYAGYIDGGASQEEFYKFIKPILEKMDGTEELLVKLNREDLLRKQRTFDNGSIPHQIHLGELHAILRRQEDFYPFLKDNREKIEKILTFRIPYYVGPLARGNSRFAWMTRKSEETITPWNFEEVVDKGASAQSFIERMTNFDKNLPNEKVLPKHSLLYEYFTVYNELTKVKYVTEGMRKPAFLSGEQKKAIVDLLFKTNRKVTVKQLKEDYFKKIECFDSVEISGVEDRFNASLGTYHDLLKIIKDKDFLDNEENEDILEDIVLTLTLFEDREMIEERLKTYAHLFDDKVMKQLKRRRYTGWGRLSRKLINGIRDKQSGKTILDFLKSDGFANRNFMQLIHDDSLTFKEDIQKAQVSGQGDSLHEHIANLAGSPAIKKGILQTVKVVDELVKVMGRHKPENIVIEMARENQTTQKGQKNSRERMKRIEEGIKELGSQILKEHPVENTQLQNEKLYLYYLQNGRDMYVDQELDINRLSDYDVDHIVPQSFLKDDSIDNKVLTRSDKARGKSDNVPSEEVVKKMKNYWRQLLNAKLITQRKFDNLTKAERGGLSELDKAGFIKRQLVETRQITKHVAQILDSRMNTKYDENDKLIREVKVITLKSKLVSDFRKDFQFYKVREINNYHHAHDAYLNAVVGTALIKKYPKLESEFVYGDYKVYDVRKMIAKSEQEIGKATAKYFFYSNIMNFFKTEITLANGEIRKRPLIETNGETGEIVWDKGRDFATVRKVLSMPQVNIVKKTEVQTGGFSKESILPKRNSDKLIARKKDWDPKKYGGFDSPTVAYSVLVVAKVEKGKSKKLKSVKELLGITIMERSSFEKNPIDFLEAKGYKEVKKDLIIKLPKYSLFELENGRKRMLASAGELQKGNELALPSKYVNFLYLASHYEKLKGSPEDNEQKQLFVEQHKHYLDEIIEQISEFSKRVILADANLDKVLSAYNKHRDKPIREQAENIIHLFTLTNLGAPAAFKYFDTTIDRKRYTSTKEVLDATLIHQSITGLYETRIDLSQLGGDGGPAPAPAPAPAPAPGGTLNIEDEYRLHETSKEPDVSLGSTWLSDFPQAWAETGGMGLAVRQAPLIIPLKATSTPVSIKQYPMSQEARLGIKPHIQRLLDQGILVPCQSPWNTPLLPVKKPGTNDYRPVQDLREVNKRVEDIHPTVPNPYNLLSGLPPSHQWYTVLDLKDAFFCLRLHPTSQPLFAFEWRDPEMGISGQLTWTRLPQGFKNSPTLFNEALHRDLAGFRIQHPDLILLQYVDDLLLAATSELDCQQGTRALLQTLGDLGYRASAKKAQICQKQVKYLGYLLKEGQRWLTEARKETVMGQPIPKTPRQLREFLGTAGFCRLWIPGFAEMAAPLYPLTKPGTLFNWGPDQQKAFQEIKQALLTAPALGLPDLTKPFELFVDEKQGYAKGVLTQKLGPWRRPVAYLSKKLDPVAAGWPPCLRMVAAIAVLTKDAGKLTMGQPLVILAPHAVEALVKQPPDRWLSNARMTHYQALLLDTDRVQFGPVVALNPATLLPLPEEGLQHDCLDILAEAHGTRSDLMDQPLPDADHTWYTDGSSFLQEGQRKAGAAVTTETEVIWARALPAGTSAQRAELIALTQALKMAEGKKLNVYTDSRYAFATAHIHGEIYRRRGWLTSEGKEIKNKDEILALLKALFLPKRLSIIHCPGHQKGNSAEARGNRMADQAAREVATRETPETSTLLAGKRTADGSEFEKRTADGSEFESPKKKAKVE

SEQ ID NO: 6562 - protein, 2098 aa, synthetic construct
MPAAKRVKLDGGDKKYSIGLDIGTNSVGWAVITDEYKVPSKKFKVLGNTDRHSIKKNLIGALLFDSGETAEATRLKRTARRRYTRRKNRICYLQEIFSNEMAKVDDSFFHRLEESFLVEEDKKHERHPIFGNIVDEVAYHEKYPTIYHLRKKLVDSTDKADLRLIYLALAHMIKFRGHFLIEGDLNPDNSDVDKLFIQLVQTYNQLFEENPINASGVDAKAILSARLSKSRRLENLIAQLPGEKKNGLFGNLIALSLGLTPNFKSNFDLAEDAKLQLSKDTYDDDLDNLLAQIGDQYADLFLAAKNLSDAILLSDILRVNTEITKAPLSASMIKRYDEHHQDLTLLKALVRQQLPEKYKEIFFDQSKNGYAGYIDGGASQEEFYKFIKPILEKMDGTEELLVKLNREDLLRKQRTFDNGSIPHQIHLGELHAILRRQEDFYPFLKDNREKIEKILTFRIPYYVGPLARGNSRFAWMTRKSEETITPWNFEEVVDKGASAQSFIERMTNFDKNLPNEKVLPKHSLLYEYFTVYNELTKVKYVTEGMRKPAFLSGEQKKAIVDLLFKTNRKVTVKQLKEDYFKKIECFDSVEISGVEDRFNASLGTYHDLLKIIKDKDFLDNEENEDILEDIVLTLTLFEDREMIEERLKTYAHLFDDKVMKQLKRRRYTGWGRLSRKLINGIRDKQSGKTILDFLKSDGFANRNFMQLIHDDSLTFKEDIQKAQVSGQGDSLHEHIANLAGSPAIKKGILQTVKVVDELVKVMGRHKPENIVIEMARENQTTQKGQKNSRERMKRIEEGIKELGSQILKEHPVENTQLQNEKLYLYYLQNGRDMYVDQELDINRLSDYDVDHIVPQSFLKDDSIDNKVLTRSDKARGKSDNVPSEEVVKKMKNYWRQLLNAKLITQRKFDNLTKAERGGLSELDKAGFIKRQLVETRQITKHVAQILDSRMNTKYDENDKLIREVKVITLKSKLVSDFRKDFQFYKVREINNYHHAHDAYLNAVVGTALIKKYPKLESEFVYGDYKVYDVRKMIAKSEQEIGKATAKYFFYSNIMNFFKTEITLANGEIRKRPLIETNGETGEIVWDKGRDFATVRKVLSMPQVNIVKKTEVQTGGFSKESILPKRNSDKLIARKKDWDPKKYGGFDSPTVAYSVLVVAKVEKGKSKKLKSVKELLGITIMERSSFEKNPIDFLEAKGYKEVKKDLIIKLPKYSLFELENGRKRMLASAGELQKGNELALPSKYVNFLYLASHYEKLKGSPEDNEQKQLFVEQHKHYLDEIIEQISEFSKRVILADANLDKVLSAYNKHRDKPIREQAENIIHLFTLTNLGAPAAFKYFDTTIDRKRYTSTKEVLDATLIHQSITGLYETRIDLSQLGGDGGPAPAPAPAPAPAPGGTLNIEDEHRLHETSKEPDVSLGSTWLSDFPQAWAETGGMGLAVRQAPLIIPLKATSTPVSIKQYPMSQEARLGIKPHIQRLLDQGILVPCQSPWNTPLLPVKKPGTNDYRPVQDLREVNKRVEDIHPTVPNPYNLLSGLPPSHQWYTVLDLKDAFFCLRLHPTSQPLFAFEWRDPEMGISGQLTWTRLPQGFKNSPTLFDEALHRDLADFRIQHPDLILLQYVDDLLLAATSELDCQQGTRALLQTLGNLGYRASAKKAQICQKQVKYLGYLLKEGQRWLTEARKETVMGQPTPKTPRQLREFLGTAGFCRLWIPGFAEMAAPLYPLTKTGTLFNWGPDQQKAYQEIKQALLTAPALGLPDLTKPFELFVDEKQGYAKGVLTQKLGPWRRPVAYLSKKLDPVAAGWPPCLRMVAAIAVLTKDAGKLTMGQPLVILAPHAVEALVKQPPDRWLSNARMTHYQALLLDTDRVQFGPVVALNPATLLPLPEEGLQHNCLDILAEAHGTRPDLTDQPLPDADHTWYTDGSSLLQEGQRKAGAAVTTETEVIWAKALPAGTSAQRAELIALTQALKMAEGKKLNVYTDSRYAFATAHIHGEIYRRRGLLTSEGKEIKNKDEILALLKALFLPKRLSIIHCPGHQKGHSAEARGNRMADQAARKAAITETPDTSTLLAGKRTADGSEFEKRTADGSEFESPKKKAKVE

SEQ ID NO: 6563 - protein, 2098 aa, synthetic construct; identical to SEQ ID NO: 6562

SEQ ID NO: 6564 - protein, 2092 aa, synthetic construct
MPAAKRVKLDGGDKKYSIGLDIGTNSVGWAVITDEYKVPSKKFKVLGNTDRHSIKKNLIGALLFDSGETAEATRLKRTARRRYTRRKNRICYLQEIFSNEMAKVDDSFFHRLEESFLVEEDKKHERHPIFGNIVDEVAYHEKYPTIYHLRKKLVDSTDKADLRLIYLALAHMIKFRGHFLIEGDLNPDNSDVDKLFIQLVQTYNQLFEENPINASGVDAKAILSARLSKSRRLENLIAQLPGEKKNGLFGNLIALSLGLTPNFKSNFDLAEDAKLQLSKDTYDDDLDNLLAQIGDQYADLFLAAKNLSDAILLSDILRVNTEITKAPLSASMIKRYDEHHQDLTLLKALVRQQLPEKYKEIFFDQSKNGYAGYIDGGASQEEFYKFIKPILEKMDGTEELLVKLNREDLLRKQRTFDNGSIPHQIHLGELHAILRRQEDFYPFLKDNREKIEKILTFRIPYYVGPLARGNSRFAWMTRKSEETITPWNFEEVVDKGASAQSFIERMTNFDKNLPNEKVLPKHSLLYEYFTVYNELTKVKYVTEGMRKPAFLSGEQKKAIVDLLFKTNRKVTVKQLKEDYFKKIECFDSVEISGVEDRFNASLGTYHDLLKIIKDKDFLDNEENEDILEDIVLTLTLFEDREMIEERLKTYAHLFDDKVMKQLKRRRYTGWGRLSRKLINGIRDKQSGKTILDFLKSDGFANRNFMQLIHDDSLTFKEDIQKAQVSGQGDSLHEHIANLAGSPAIKKGILQTVKVVDELVKVMGRHKPENIVIEMARENQTTQKGQKNSRERMKRIEEGIKELGSQILKEHPVENTQLQNEKLYLYYLQNGRDMYVDQELDINRLSDYDVDHIVPQSFLKDDSIDNKVLTRSDKARGKSDNVPSEEVVKKMKNYWRQLLNAKLITQRKFDNLTKAERGGLSELDKAGFIKRQLVETRQITKHVAQILDSRMNTKYDENDKLIREVKVITLKSKLVSDFRKDFQFYKVREINNYHHAHDAYLNAVVGTALIKKYPKLESEFVYGDYKVYDVRKMIAKSEQEIGKATAKYFFYSNIMNFFKTEITLANGEIRKRPLIETNGETGEIVWDKGRDFATVRKVLSMPQVNIVKKTEVQTGGFSKESILPKRNSDKLIARKKDWDPKKYGGFDSPTVAYSVLVVAKVEKGKSKKLKSVKELLGITIMERSSFEKNPIDFLEAKGYKEVKKDLIIKLPKYSLFELENGRKRMLASAGELQKGNELALPSKYVNFLYLASHYEKLKGSPEDNEQKQLFVEQHKHYLDEIIEQISEFSKRVILADANLDKVLSAYNKHRDKPIREQAENIIHLFTLTNLGAPAAFKYFDTTIDRKRYTSTKEVLDATLIHQSITGLYETRIDLSQLGGDGGPAPAPAPAPAPAPGGTLQLDDEYRLYSPLVKPDQNIQFWLEQFPQAWAETAGMGLAKQVPPQVIQLKASATPVSVRQYPLSKEAQEGIRPHVQRLIQQGILVPVQSPWNTPLLPVRKPGTNDYRPVQDLREVNKRVQDIHPTVPNPYNLLCALPPQRSWYTVLDLKDAFFCLRLHPTSQPLFAFEWRDPGTGRTGQLTWTRLPQGFKNSPTIFDEALHRDLANFRIQHPQVTLLQYVDDLLLAGATKQDCLEGTKALLLELSDLGYRASAKKAQICRREVTYLGYSLRDGQRWLTEARKKTVVQIPAPTTAKQVREFLGTAGFCRLWIPGFATLAAPLYPLTKEKGEFSWAPEHQKAFDAIKKALLSAPALALPDVTKPFTLYVDERKGVARGVLTQTLGPWRRPVAYLSKKLDPVASGWPVCLKAIAAVAILVKDADKLTLGQNITVIAPHALENIVRQPPDRWMTNARMTHYQSLLLTERVTFAPPAALNPATLLPEETDEPVTHDCHQLLIEETGVRKDLTDIPLTGEVLTWFTDGSSYVVEGKRMAGAAVVDGTRTIWASSLPEGTSAQKAELMALTQALRLAEGKSINIYTDSRYAFATAHVHGAIYKQRGLLTSAGREIKNKEEILSLLEALHLPKRLAIIHCPGHQKAKDPISRGNQMADRVAKQAAQGVNLLAGKRTADGSEFEKRTADGSEFESPKKKAKVE

SEQ ID NO: 6565 - protein, 2092 aa, synthetic construct; identical to SEQ ID NO: 6564

SEQ ID NO: 6566 - protein, 2178 aa, synthetic construct
MPAAKRVKLDGGDKKYSIGLDIGTNSVGWAVITDEYKVPSKKFKVLGNTDRHSIKKNLIGALLFDSGETAEATRLKRTARRRYTRRKNRICYLQEIFSNEMAKVDDSFFHRLEESFLVEEDKKHERHPIFGNIVDEVAYHEKYPTIYHLRKKLVDSTDKADLRLIYLALAHMIKFRGHFLIEGDLNPDNSDVDKLFIQLVQTYNQLFEENPINASGVDAKAILSARLSKSRRLENLIAQLPGEKKNGLFGNLIALSLGLTPNFKSNFDLAEDAKLQLSKDTYDDDLDNLLAQIGDQYADLFLAAKNLSDAILLSDILRVNTEITKAPLSASMIKRYDEHHQDLTLLKALVRQQLPEKYKEIFFDQSKNGYAGYIDGGASQEEFYKFIKPILEKMDGTEELLVKLNREDLLRKQRTFDNGSIPHQIHLGELHAILRRQEDFYPFLKDNREKIEKILTFRIPYYVGPLARGNSRFAWMTRKSEETITPWNFEEVVDKGASAQSFIERMTNFDKNLPNEKVLPKHSLLYEYFTVYNELTKVKYVTEGMRKPAFLSGEQKKAIVDLLFKTNRKVTVKQLKEDYFKKIECFDSVEISGVEDRFNASLGTYHDLLKIIKDKDFLDNEENEDILEDIVLTLTLFEDREMIEERLKTYAHLFDDKVMKQLKRRRYTGWGRLSRKLINGIRDKQSGKTILDFLKSDGFANRNFMQLIHDDSLTFKEDIQKAQVSGQGDSLHEHIANLAGSPAIKKGILQTVKVVDELVKVMGRHKPENIVIEMARENQTTQKGQKNSRERMKRIEEGIKELGSQILKEHPVENTQLQNEKLYLYYLQNGRDMYVDQELDINRLSDYDVDHIVPQSFLKDDSIDNKVLTRSDKARGKSDNVPSEEVVKKMKNYWRQLLNAKLITQRKFDNLTKAERGGLSELDKAGFIKRQLVETRQITKHVAQILDSRMNTKYDENDKLIREVKVITLKSKLVSDFRKDFQFYKVREINNYHHAHDAYLNAVVGTALIKKYPKLESEFVYGDYKVYDVRKMIAKSEQEIGKATAKYFFYSNIMNFFKTEITLANGEIRKRPLIETNGETGEIVWDKGRDFATVRKVLSMPQVNIVKKTEVQTGGFSKESILPKRNSDKLIARKKDWDPKKYGGFDSPTVAYSVLVVAKVEKGKSKKLKSVKELLGITIMERSSFEKNPIDFLEAKGYKEVKKDLIIKLPKYSLFELENGRKRMLASAGELQKGNELALPSKYVNFLYLASHYEKLKGSPEDNEQKQLFVEQHKHYLDEIIEQISEFSKRVILADANLDKVLSAYNKHRDKPIREQAENIIHLFTLTNLGAPAAFKYFDTTIDRKRYTSTKEVLDATLIHQSITGLYETRIDLSQLGGDGGPAPAPAPAPAPAPGGMDPLQLLQPLEAEIKGTKLKAHWNSGATITCVPQAFLEEEVPIKNIWIKTIHGEKEQPVYYLTFKIQGRKVEAEVISSPYDYILVSPSDIPWLMKKPLQLTTLVPLQEYEERLLKQTMLTGSYKEKLQSLFLKYDALWQHWENQVGHRRIKPHHIATGTVNPRPQKQYPINPKAKASIQTVINDLLKQGVLIQQNSIMNTPVYPVPKPDGKWRMVLDYREVNKTIPLIAAQNQHSAGILSSIFRGKYKTTLDLSNGFWAHSITPESYWLTAFTWLGQQYCWTRLPQGFLNSPALFNADVVDLLKEVPNVQVYVDDIYISHDDPREHLEQLEKVFSLLLNAGYVVSLKKSEIAQHEVEFLGFNITKEGRGLTETFKQKLLNITPPRDLKQLQSILGLLNFARNFIPNFSELVKPLYNIIATAPGKYITWTTDNSQQLQNIISMLNSAENLEERNPEVRLIMKVNTSPSAGYIRFYNEFAKRPIMYLNYVYTKAEVKFTNTEKLLTTIHKGLIKALDLGMGQEILVYSPIVSMTKIQKTPLPERKALPIRWITWMSYLEDPRIQFHYDKTLPELQQVPTVTDDIIAKIKHPSEFSMVFYTDGSAIKHPNVNKSHNAGMGIAQVQFKPEFTVINTWSIPLGDHTAQLAEVAAVEFACKKALKIDGPVLIVTDSFYVAESVNKELPYWQSNGFFNNKKKPLKHVSKWKSIADCIQLKPDIIIIHEKGHQPTASTFHTEGNNLADKLATQGSYVVNAGKRTADGSEFEKRTADGSEFESPKKKAKVE

SEQ ID NO: 6567 - protein, 2096 aa, synthetic construct; identical to SEQ ID NO: 4509

SEQ ID NO: 6568 - protein, 2098 aa, synthetic construct; identical to SEQ ID NO: 4510

SEQ ID NO: 6569 - protein, 2093 aa, synthetic construct
MPAAKRVKLDGGDKKYSIGLDIGTNSVGWAVITDEYKVPSKKFKVLGNTDRHSIKKNLIGALLFDSGETAEATRLKRTARRRYTRRKNRICYLQEIFSNEMAKVDDSFFHRLEESFLVEEDKKHERHPIFGNIVDEVAYHEKYPTIYHLRKKLVDSTDKADLRLIYLALAHMIKFRGHFLIEGDLNPDNSDVDKLFIQLVQTYNQLFEENPINASGVDAKAILSARLSKSRRLENLIAQLPGEKKNGLFGNLIALSLGLTPNFKSNFDLAEDAKLQLSKDTYDDDLDNLLAQIGDQYADLFLAAKNLSDAILLSDILRVNTEITKAPLSASMIKRYDEHHQDLTLLKALVRQQLPEKYKEIFFDQSKNGYAGYIDGGASQEEFYKFIKPILEKMDGTEELLVKLNREDLLRKQRTFDNGSIPHQIHLGELHAILRRQEDFYPFLKDNREKIEKILTFRIPYYVGPLARGNSRFAWMTRKSEETITPWNFEEVVDKGASAQSFIERMTNFDKNLPNEKVLPKHSLLYEYFTVYNELTKVKYVTEGMRKPAFLSGEQKKAIVDLLFKTNRKVTVKQLKEDYFKKIECFDSVEISGVEDRFNASLGTYHDLLKIIKDKDFLDNEENEDILEDIVLTLTLFEDREMIEERLKTYAHLFDDKVMKQLKRRRYTGWGRLSRKLINGIRDKQSGKTILDFLKSDGFANRNFMQLIHDDSLTFKEDIQKAQVSGQGDSLHEHIANLAGSPAIKKGILQTVKVVDELVKVMGRHKPENIVIEMARENQTTQKGQKNSRERMKRIEEGIKELGSQILKEHPVENTQLQNEKLYLYYLQNGRDMYVDQELDINRLSDYDVDHIVPQSFLKDDSIDNKVLTRSDKARGKSDNVPSEEVVKKMKNYWRQLLNAKLITQRKFDNLTKAERGGLSELDKAGFIKRQLVETRQITKHVAQILDSRMNTKYDENDKLIREVKVITLKSKLVSDFRKDFQFYKVREINNYHHAHDAYLNAVVGTALIKKYPKLESEFVYGDYKVYDVRKMIAKSEQEIGKATAKYFFYSNIMNFFKTEITLANGEIRKRPLIETNGETGEIVWDKGRDFATVRKVLSMPQVNIVKKTEVQTGGFSKESILPKRNSDKLIARKKDWDPKKYGGFDSPTVAYSVLVVAKVEKGKSKKLKSVKELLGITIMERSSFEKNPIDFLEAKGYKEVKKDLIIKLPKYSLFELENGRKRMLASAGELQKGNELALPSKYVNFLYLASHYEKLKGSPEDNEQKQLFVEQHKHYLDEIIEQISEFSKRVILADANLDKVLSAYNKHRDKPIREQAENIIHLFTLTNLGAPAAFKYFDTTIDRKRYTSTKEVLDATLIHQSITGLYETRIDLSQLGGDGGGGSGGGGGTAPLEEEYRLFLEAPIQNVTLLEQWKREIPKVWAEINPPGLASTQAPIHVQLLSTALPVRVRQYPITLEAKRSLRETIRKFRAAGILRPVHSPWNTPLLPVRKSGTSEYRMVQDLREVNKRVETIHPTVPNPYTLLSLLPPDRIWYSVLDLKDAFFCIPLAPESQLIFAFEWADAEEGESGQLTWTRLPQGFKNSPTLFNEALNRDLQGFRLDHPSVSLLQYVDDLLIAADTQAACLSATRDLLMTLAELGYRVSGKKAQLCQEEVTYLGFKIHKGSRSLSNSRTQAILQIPVPKTKRQVREFLGTIGYCRLWIPGFAELAQPLYAATRPGNDPLVWGEKEEEAFQSLKLALTQPPALALPSLDKPFQLFVEETSGAAKGVLTQALGPWKRPVAYLSKRLDPVAAGWPRCLRAIAAAALLTREASKLTFGQDIEITSSHNLESLLRSPPDKWLTNARITQYQVLLLDPPRVRFKQTAALNPATLLPETDDTLPIHHCLDTLDSLTSTRPDLTDQPLAQAEATLFTDGSSYIRDGKRYAGAAVVTLDSVIWAEPLPIGTSAQKAELIALTKALEWSKDKSVNIYTDSRYAFATLHVHGMIYRERGWLTAGGKAIKNAPEILALLTAVWLPKRVAVMHCKGHQKDDAPTSTGNRRADEVAREVAIRPLSTQATISAGKRTADGSEFEKRTADGSEFESPKKKAKVE

SEQ ID NO: 6570 - protein, 2082 aa, synthetic construct
MPAAKRVKLDGGDKKYSIGLDIGTNSVGWAVITDEYKVPSKKFKVLGNTDRHSIKKNLIGALLFDSGETAEATRLKRTARRRYTRRKNRICYLQEIFSNEMAKVDDSFFHRLEESFLVEEDKKHERHPIFGNIVDEVAYHEKYPTIYHLRKKLVDSTDKADLRLIYLALAHMIKFRGHFLIEGDLNPDNSDVDKLFIQLVQTYNQLFEENPINASGVDAKAILSARLSKSRRLENLIAQLPGEKKNGLFGNLIALSLGLTPNFKSNFDLAEDAKLQLSKDTYDDDLDNLLAQIGDQYADLFLAAKNLSDAILLSDILRVNTEITKAPLSASMIKRYDEHHQDLTLLKALVRQQLPEKYKEIFFDQSKNGYAGYIDGGASQEEFYKFIKPILEKMDGTEELLVKLNREDLLRKQRTFDNGSIPHQIHLGELHAILRRQEDFYPFLKDNREKIEKILTFRIPYYVGPLARGNSRFAWMTRKSEETITPWNFEEVVDKGASAQSFIERMTNFDKNLPNEKVLPKHSLLYEYFTVYNELTKVKYVTEGMRKPAFLSGEQKKAIVDLLFKTNRKVTVKQLKEDYFKKIECFDSVEISGVEDRFNASLGTYHDLLKIIKDKDFLDNEENEDILEDIVLTLTLFEDREMIEERLKTYAHLFDDKVMKQLKRRRYTGWGRLSRKLINGIRDKQSGKTILDFLKSDGFANRNFMQLIHDDSLTFKEDIQKAQVSGQGDSLHEHIANLAGSPAIKKGILQTVKVVDELVKVMGRHKPENIVIEMARENQTTQKGQKNSRERMKRIEEGIKELGSQILKEHPVENTQLQNEKLYLYYLQNGRDMYVDQELDINRLSDYDVDHIVPQSFLKDDSIDNKVLTRSDKARGKSDNVPSEEVVKKMKNYWRQLLNAKLITQRKFDNLTKAERGGLSELDKAGFIKRQLVETRQITKHVAQILDSRMNTKYDENDKLIREVKVITLKSKLVSDFRKDFQFYKVREINNYHHAHDAYLNAVVGTALIKKYPKLESEFVYGDYKVYDVRKMIAKSEQEIGKATAKYFFYSNIMNFFKTEITLANGEIRKRPLIETNGETGEIVWDKGRDFATVRKVLSMPQVNIVKKTEVQTGGFSKESILPKRNSDKLIARKKDWDPKKYGGFDSPTVAYSVLVVAKVEKGKSKKLKSVKELLGITIMERSSFEKNPIDFLEAKGYKEVKKDLIIKLPKYSLFELENGRKRMLASAGELQKGNELALPSKYVNFLYLASHYEKLKGSPEDNEQKQLFVEQHKHYLDEIIEQISEFSKRVILADANLDKVLSAYNKHRDKPIREQAENIIHLFTLTNLGAPAAFKYFDTTIDRKRYTSTKEVLDATLIHQSITGLYETRIDLSQLGGDGGGGSGGGGGVPWILKKPLELTIKLDLEEQQGTLLNNSILSKKGKEELKQLFEKYSALWQSWENQVGHRRIRPHKIATGTVKPTPQKQYHINPKAKPDIQIVINDLLKQGVLIQKESTMNTPVYPVPKPNGRWRMVLDYRAVNKVTPLIAVQNQHSYGILGSLFKGRYKTTIDLSNGFWAHPIVPEDYWITAFTWQGKQYCWTVLPQGFLNSPGLFTGDVVDLLQGIPNVEVYVDDVYISHDSEKEHLEYLDILFNRLKEAGYIISLKKSNIANSIVDFLGFQITNEGRGLTDTFKEKLENITAPTTLKQLQSILGLLNFARNFIPDFTELIAPLYALIPKSTKNYVPWQIEHSTTLETLITKLNGAEYLQGRKGDKTLIMKVNASYTTGYIRYYNEGEKKPISYVSIVFSKTELKFTELEKLLTTVHKGLLKALDLSMGQNIHVYSPIVSMQNIQKTPQTAKKALASRWLSWLSYLEDPRIRFFYDPQMPALKDLPAVDTGKDNKKHPSNFQHIFYTDGSAITSPTKEGHLNAGMGIVYFINKDGNLQKQQEWSISLGNHTAQFAEIAAFEFALKKCLPLGGNILVVTDSNYVAKAYNEELDVWASNGFVNNRKKPLKHISKWKSVADLKRLRPDVVVTHEPGHQKLDSSPHAYGNNLADQLATQASFKVHAGKRTADGSEFEKRTADGSEFESPKKKAKVE

SEQ ID NO: 6571 - protein, 2082 aa, synthetic construct
MPAAKRVKLDGGDKKYSIGLDIGTNSVGWAVITDEYKVPSKKFKVLGNTDRHSIKKNLIGALLFDSGETAEATRLKRTARRRYTRRKNRICYLQEIFSNEMAKVDDSFFHRLEESFLVEEDKKHERHPIFGNIVDEVAYHEKYPTIYHLRKKLVDSTDKADLRLIYLALAHMIKFRGHFLIEGDLNPDNSDVDKLFIQLVQTYNQLFEENPINASGVDAKAILSARLSKSRRLENLIAQLPGEKKNGLFGNLIALSLGLTPNFKSNFDLAEDAKLQLSKDTYDDDLDNLLAQIGDQYADLFLAAKNLSDAILLSDILRVNTEITKAPLSASMIKRYDEHHQDLTLLKALVRQQLPEKYKEIFFDQSKNGYAGYIDGGASQEEFYKFIKPILEKMDGTEELLVKLNREDLLRKQRTFDNGSIPHQIHLGELHAILRRQEDFYPFLKDNREKIEKILTFRIPYYVGPLARGNSRFAWMTRKSEETITPWNFEEVVDKGASAQSFIERMTNFDKNLPNEKVLPKHSLLYEYFTVYNELTKVKYVTEGMRKPAFLSGEQKKAIVDLLFKTNRKVTVKQLKEDYFKKIECFDSVEISGVEDRFNASLGTYHDLLKIIKDKDFLDNEENEDILEDIVLTLTLFEDREMIEERLKTYAHLFDDKVMKQLKRRRYTGWGRLSRKLINGIRDKQSGKTILDFLKSDGFANRNFMQLIHDDSLTFKEDIQKAQVSGQGDSLHEHIANLAGSPAIKKGILQTVKVVDELVKVMGRHKPENIVIEMARENQTTQKGQKNSRERMKRIEEGIKELGSQILKEHPVENTQLQNEKLYLYYLQNGRDMYVDQELDINRLSDYDVDHIVPQSFLKDDSIDNKVLTRSDKARGKSDNVPSEEVVKKMKNYWRQLLNAKLITQRKFDNLTKAERGGLSELDKAGFIKRQLVETRQITKHVAQILDSRMNTKYDENDKLIREVKVITLKSKLVSDFRKDFQFYKVREINNYHHAHDAYLNAVVGTALIKKYPKLESEFVYGDYKVYDVRKMIAKSEQEIGKATAKYFFYSNIMNFFKTEITLANGEIRKRPLIETNGETGEIVWDKGRDFATVRKVLSMPQVNIVKKTEVQTGGFSKESILPKRNSDKLIARKKDWDPKKYGGFDSPTVAYSVLVVAKVEKGKSKKLKSVKELLGITIMERSSFEKNPIDFLEAKGYKEVKKDLIIKLPKYSLFELENGRKRMLASAGELQKGNELALPSKYVNFLYLASHYEKLKGSPEDNEQKQLFVEQHKHYLDEIIEQISEFSKRVILADANLDKVLSAYNKHRDKPIREQAENIIHLFTLTNLGAPAAFKYFDTTIDRKRYTSTKEVLDATLIHQSITGLYETRIDLSQLGGDGGGGSGGGGGVPWILKKPLELTIKLDLEEQQGTLLNNSILSKKGKEELKQLFEKYSALWQSWENQVGHRRIRPHKIATGTVKPTPQKQYHINPKAKPDIQIVINDLLKQGVLIQKESTMNTPVYPVPKPNGRWRMVLDYRAVNKVTPLIAVQNQHSYGILGSLFKGRYKTTIDLSNGFWAHPIVPEDYWITAFTWQGKQYCWTVLPQGFLNSPGLFNGDVVDLLQGIPNVEVYVDDVYISHDSEKEHLEYLDILFNRLKEAGYIISLKKSNIANSIVDFLGFQITNEGRGLTDTFKEKLENITAPTTLKQLQSILGLLNFARNFIPDFTELIAPLYALIPKSPKNYVPWQIEHSTTLETLITKLNGAEYLQGRKGDKTLIMKVNASYTTGYIRYYNEGEKKPISYVSIVFSKTELKFTELEKLLTTVHKGLLKALDLSMGQNIHVYSPIVSMQNIQKTPQTAKKALASRWLSWLSYLEDPRIRFFYDPQMPALKDLPAVDTGKDNKKHPSNFQHIFYTDGSAITSPTKEGHLNAGMGIVYFINKDGNLQKQQEWSISLGNHTAQFAEIAAFEFALKKCLPLGGNILVVTDSNYVAKAYNEELDVWASNGFVNNRKKPLKHISKWKSVADLKRLRPDVVVTHEPGHQKLDSSPHAYGNNLADQLATQASFKVHAGKRTADGSEFEKRTADGSEFESPKKKAKVE

SEQ ID NO: 6572 - protein, 2090 aa, synthetic construct
MPAAKRVKLDGGDKKYSIGLDIGTNSVGWAVITDEYKVPSKKFKVLGNTDRHSIKKNLIGALLFDSGETAEATRLKRTARRRYTRRKNRICYLQEIFSNEMAKVDDSFFHRLEESFLVEEDKKHERHPIFGNIVDEVAYHEKYPTIYHLRKKLVDSTDKADLRLIYLALAHMIKFRGHFLIEGDLNPDNSDVDKLFIQLVQTYNQLFEENPINASGVDAKAILSARLSKSRRLENLIAQLPGEKKNGLFGNLIALSLGLTPNFKSNFDLAEDAKLQLSKDTYDDDLDNLLAQIGDQYADLFLAAKNLSDAILLSDILRVNTEITKAPLSASMIKRYDEHHQDLTLLKALVRQQLPEKYKEIFFDQSKNGYAGYIDGGASQEEFYKFIKPILEKMDGTEELLVKLNREDLLRKQRTFDNGSIPHQIHLGELHAILRRQEDFYPFLKDNREKIEKILTFRIPYYVGPLARGNSRFAWMTRKSEETITPWNFEEVVDKGASAQSFIERMTNFDKNLPNEKVLPKHSLLYEYFTVYNELTKVKYVTEGMRKPAFLSGEQKKAIVDLLFKTNRKVTVKQLKEDYFKKIECFDSVEISGVEDRFNASLGTYHDLLKIIKDKDFLDNEENEDILEDIVLTLTLFEDREMIEERLKTYAHLFDDKVMKQLKRRRYTGWGRLSRKLINGIRDKQSGKTILDFLKSDGFANRNFMQLIHDDSLTFKEDIQKAQVSGQGDSLHEHIANLAGSPAIKKGILQTVKVVDELVKVMGRHKPENIVIEMARENQTTQKGQKNSRERMKRIEEGIKELGSQILKEHPVENTQLQNEKLYLYYLQNGRDMYVDQELDINRLSDYDVDHIVPQSFLKDDSIDNKVLTRSDKARGKSDNVPSEEVVKKMKNYWRQLLNAKLITQRKFDNLTKAERGGLSELDKAGFIKRQLVETRQITKHVAQILDSRMNTKYDENDKLIREVKVITLKSKLVSDFRKDFQFYKVREINNYHHAHDAYLNAVVGTALIKKYPKLESEFVYGDYKVYDVRKMIAKSEQEIGKATAKYFFYSNIMNFFKTEITLANGEIRKRPLIETNGETGEIVWDKGRDFATVRKVLSMPQVNIVKKTEVQTGGFSKESILPKRNSDKLIARKKDWDPKKYGGFDSPTVAYSVLVVAKVEKGKSKKLKSVKELLGITIMERSSFEKNPIDFLEAKGYKEVKKDLIIKLPKYSLFELENGRKRMLASAGELQKGNELALPSKYVNFLYLASHYEKLKGSPEDNEQKQLFVEQHKHYLDEIIEQISEFSKRVILADANLDKVLSAYNKHRDKPIREQAENIIHLFTLTNLGAPAAFKYFDTTIDRKRYTSTKEVLDATLIHQSITGLYETRIDLSQLGGDGGGGSGGGGGTLQLEEEYRLFEPESTQKQEMDIWLKNFPQAWAETGGMGTAHCQAPVLIQLKATATPISIRQYPMPHEAYQGIKPHIRRMLDQGILKPCQSPWNTPLLPVKKPGTEDYRPVQDLREVNKRVEDIHPTVPNPYNLLSTLPPSHPWYTVLDLKDAFFCLRLHSESQLLFAFEWRDPEIGLSGQLTWTRLPQGFKNSPTLFNEALHSDLADFRVRYPALVLLQYVDDLLLAAATRTECLEGTKALLETLGNKGYRASAKKAQICLQEVTYLGYSLKDGQRWLTKARKEAILSIPVPKNSRQVREFLGKAGYCRLFIPGFAELAAPLYPLTRPGTLFQWGTEQQLAFEDIKKALLSSPALGLPDITKPFELFIDENSGFAKGVLVQKLGPWKRPVAYLSKKLDTVASGWPPCLRMVAAIAILVKDAGKLTLGQPLTILTSHPVEALVRQPPNKWLSNARMTHYQAMLLDAERVHFGPTVSLNPATLLPLPSGGNHHDCLQILAETHGTRPDLTDQPLPDADLTWYTDGSSFIRNGEREAGAAVTTESEVIWAAPLPPGTSAQRAELIALTQALKMAEGKKLTVYTDSRYAFATTHVHGEIYRRRGWLTSEGKEIKNKNEILALLEALFLPKRLSIIHCPGHQKGDSPQAKGNRLADDTAKKAATETHSSLTVLPAGKRTADGSEFEKRTADGSEFESPKKKAKVE

SEQ ID NO: 6573 - protein, 2082 aa, synthetic construct
MPAAKRVKLDGGDKKYSIGLDIGTNSVGWAVITDEYKVPSKKFKVLGNTDRHSIKKNLIGALLFDSGETAEATRLKRTARRRYTRRKNRICYLQEIFSNEMAKVDDSFFHRLEESFLVEEDKKHERHPIFGNIVDEVAYHEKYPTIYHLRKKLVDSTDKADLRLIYLALAHMIKFRGHFLIEGDLNPDNSDVDKLFIQLVQTYNQLFEENPINASGVDAKAILSARLSKSRRLENLIAQLPGEKKNGLFGNLIALSLGLTPNFKSNFDLAEDAKLQLSKDTYDDDLDNLLAQIGDQYADLFLAAKNLSDAILLSDILRVNTEITKAPLSASMIKRYDEHHQDLTLLKALVRQQLPEKYKEIFFDQSKNGYAGYIDGGASQEEFYKFIKPILEKMDGTEELLVKLNREDLLRKQRTFDNGSIPHQIHLGELHAILRRQEDFYPFLKDNREKIEKILTFRIPYYVGPLARGNSRFAWMTRKSEETITPWNFEEVVDKGASAQSFIERMTNFDKNLPNEKVLPKHSLLYEYFTVYNELTKVKYVTEGMRKPAFLSGEQKKAIVDLLFKTNRKVTVKQLKEDYFKKIECFDSVEISGVEDRFNASLGTYHDLLKIIKDKDFLDNEENEDILEDIVLTLTLFEDREMIEERLKTYAHLFDDKVMKQLKRRRYTGWGRLSRKLINGIRDKQSGKTILDFLKSDGFANRNFMQLIHDDSLTFKEDIQKAQVSGQGDSLHEHIANLAGSPAIKKGILQTVKVVDELVKVMGRHKPENIVIEMARENQTTQKGQKNSRERMKRIEEGIKELGSQILKEHPVENTQLQNEKLYLYYLQNGRDMYVDQELDINRLSDYDVDHIVPQSFLKDDSIDNKVLTRSDKARGKSDNVPSEEVVKKMKNYWRQLLNAKLITQRKFDNLTKAERGGLSELDKAGFIKRQLVETRQITKHVAQILDSRMNTKYDENDKLIREVKVITLKSKLVSDFRKDFQFYKVREINNYHHAHDAYLNAVVGTALIKKYPKLESEFVYGDYKVYDVRKMIAKSEQEIGKATAKYFFYSNIMNFFKTEITLANGEIRKRPLIETNGETGEIVWDKGRDFATVRKVLSMPQVNIVKKTEVQTGGFSKESILPKRNSDKLIARKKDWDPKKYGGFDSPTVAYSVLVVAKVEKGKSKKLKSVKELLGITIMERSSFEKNPIDFLEAKGYKEVKKDLIIKLPKYSLFELENGRKRMLASAGELQKGNELALPSKYVNFLYLASHYEKLKGSPEDNEQKQLFVEQHKHYLDEIIEQISEFSKRVILADANLDKVLSAYNKHRDKPIREQAENIIHLFTLTNLGAPAAFKYFDTTIDRKRYTSTKEVLDATLIHQSITGLYETRIDLSQLGGDGGGGSGGGGGVPWLTQQPLQLTILVPLQEYQEKILSKTALPEDQKQQLKTLFVKYDNLWQHWENQVGHRKIRPHNIATGDYPPRPQKQYPINPKAKPSIQIVIDDLLKQGVLTPQNSTMNTPVYPVPKPDGRWRMVLDYREVNKTIPLTAAQNQHSAGILATIVRQKYKTTLDLANGFWAHPITPESYWLTAFTWQGKQYCWTRLPQGFLNSPALFNADVVDLLKEIPNVQVYVDDIYLSHDDPKEHVQQLEKVFQILLQAGYVVSLKKSEIGQKTVEFLGFNITKEGRGLTDTFKTKLLNITPPKDLKQLQSILGLLNFARNFIPNFAELVQPLYNLIAPAKGKYIEWSEENTKQLNMVIEALNTASNLEERLPEQRLVIKVNTSPSAGYVRYYNETGKKPIMYLNYVFSKAELKFSMLEKLLTTMHKALIKAMDLAMGQEILVYSPIVSMTKIQKTPLPERKALPIRWITWMTYLEDPRIQFHYDKTLPELKHIPDVYTSSQSPVKHPSQYEGVFYTDGSAIKSPDPTKSNNAGMGIVHATYKPEYQVLNQWSIPLGNHTAQMAEIAAVEFACKKALKIPGPVLVITDSFYVAESANKELPYWKSNGFVNNKKKPLKHISKWKSIAECLSMKPDITIQHEKGISLQIPVFILKGNALADKLATQGSYVVNAGKRTADGSEFEKRTADGSEFESPKKKAKVE

SEQ ID NO: 6574 - protein, 2171 aa, synthetic construct
MPAAKRVKLDGGDKKYSIGLDIGTNSVGWAVITDEYKVPSKKFKVLGNTDRHSIKKNLIGALLFDSGETAEATRLKRTARRRYTRRKNRICYLQEIFSNEMAKVDDSFFHRLEESFLVEEDKKHERHPIFGNIVDEVAYHEKYPTIYHLRKKLVDSTDKADLRLIYLALAHMIKFRGHFLIEGDLNPDNSDVDKLFIQLVQTYNQLFEENPINASGVDAKAILSARLSKSRRLENLIAQLPGEKKNGLFGNLIALSLGLTPNFKSNFDLAEDAKLQLSKDTYDDDLDNLLAQIGDQYADLFLAAKNLSDAILLSDILRVNTEITKAPLSASMIKRYDEHHQDLTLLKALVRQQLPEKYKEIFFDQSKNGYAGYIDGGASQEEFYKFIKPILEKMDGTEELLVKLNREDLLRKQRTFDNGSIPHQIHLGELHAILRRQEDFYPFLKDNREKIEKILTFRIPYYVGPLARGNSRFAWMTRKSEETITPWNFEEVVDKGASAQSFIERMTNFDKNLPNEKVLPKHSLLYEYFTVYNELTKVKYVTEGMRKPAFLSGEQKKAIVDLLFKTNRKVTVKQLKEDYFKKIECFDSVEISGVEDRFNASLGTYHDLLKIIKDKDFLDNEENEDILEDIVLTLTLFEDREMIEERLKTYAHLFDDKVMKQLKRRRYTGWGRLSRKLINGIRDKQSGKTILDFLKSDGFANRNFMQLIHDDSLTFKEDIQKAQVSGQGDSLHEHIANLAGSPAIKKGILQTVKVVDELVKVMGRHKPENIVIEMARENQTTQKGQKNSRERMKRIEEGIKELGSQILKEHPVENTQLQNEKLYLYYLQNGRDMYVDQELDINRLSDYDVDHIVPQSFLKDDSIDNKVLTRSDKARGKSDNVPSEEVVKKMKNYWRQLLNAKLITQRKFDNLTKAERGGLSELDKAGFIKRQLVETRQITKHVAQILDSRMNTKYDENDKLIREVKVITLKSKLVSDFRKDFQFYKVREINNYHHAHDAYLNAVVGTALIKKYPKLESEFVYGDYKVYDVRKMIAKSEQEIGKATAKYFFYSNIMNFFKTEITLANGEIRKRPLIETNGETGEIVWDKGRDFATVRKVLSMPQVNIVKKTEVQTGGFSKESILPKRNSDKLIARKKDWDPKKYGGFDSPTVAYSVLVVAKVEKGKSKKLKSVKELLGITIMERSSFEKNPIDFLEAKGYKEVKKDLIIKLPKYSLFELENGRKRMLASAGELQKGNELALPSKYVNFLYLASHYEKLKGSPEDNEQKQLFVEQHKHYLDEIIEQISEFSKRVILADANLDKVLSAYNKHRDKPIREQAENIIHLFTLTNLGAPAAFKYFDTTIDRKRYTSTKEVLDATLIHQSITGLYETRIDLSQLGGDGGGGSGGGGGMNPLQLLQPLPAEIKGTKLLAHWNSGATITCIPESFLEDEQPIKKTLIKTIHGEKQQNVYYVTFKVKGRKVEAEVIASPYEYILLSPTDVPWLTQQPLQLTILVPLQEYQEKILSKTALPEDQKQQLKTLFVKYDNLWQHWENQVGHRKIRPHNIATGDYPPRPQKQYPINPKAKPSIQIVIDDLLKQGVLTPQNSTMNTPVYPVPKPDGRWRMVLDYREVNKTIPLTAAQNQHSAGILATIVRQKYKTTLDLANGFWAHPITPESYWLTAFTWQGKQYCWTRLPQGFLNSPALFNADVVDLLKEIPNVQVYVDDIYLSHDDPKEHVQQLEKVFQILLQAGYVVSLKKSEIGQKTVEFLGFNITKEGRGLTDTFKTKLLNITPPKDLKQLQSILGKLNFARNFIPNFAELVQPLYNLIAPAKGKYIEWSEENTKQLNMVIEALNTASNLEERLPEQRLVIKVNTSPSAGYVRYYNETGKKPIMYLNYVFSKAELKFSMLEKLLTTMHKALIKAMDLAMGQEILVYSPIVSMTKIQKTPLPERKALPIRWITWMTYLEDPRIQFHYDKTLPELKHIPDVYTSSQSPVKHPSQYEGVFYTDGSAIKSPDPTKSNNAGMGIVHATYKPEYQVLNQWSIPLGNHTAQMAEIAAVEFACKKALKIPGPVLVITDSFYVAESANKELPYWKSNGFVNNKKKPLKHISKWKSIAECLSMKPDITIQHEKGISLQIPVFILKGNALADKLATQGSYVVNAGKRTADGSEFEKRTADGSEFESPKKKAKVE

SEQ ID NO: 6575 - protein, 2213 aa, synthetic construct
MPAAKRVKLDGGDKKYSIGLDIGTNSVGWAVITDEYKVPSKKFKVLGNTDRHSIKKNLIGALLFDSGETAEATRLKRTARRRYTRRKNRICYLQEIFSNEMAKVDDSFFHRLEESFLVEEDKKHERHPIFGNIVDEVAYHEKYPTIYHLRKKLVDSTDKADLRLIYLALAHMIKFRGHFLIEGDLNPDNSDVDKLFIQLVQTYNQLFEENPINASGVDAKAILSARLSKSRRLENLIAQLPGEKKNGLFGNLIALSLGLTPNFKSNFDLAEDAKLQLSKDTYDDDLDNLLAQIGDQYADLFLAAKNLSDAILLSDILRVNTEITKAPLSASMIKRYDEHHQDLTLLKALVRQQLPEKYKEIFFDQSKNGYAGYIDGGASQEEFYKFIKPILEKMDGTEELLVKLNREDLLRKQRTFDNGSIPHQIHLGELHAILRRQEDFYPFLKDNREKIEKILTFRIPYYVGPLARGNSRFAWMTRKSEETITPWNFEEVVDKGASAQSFIERMTNFDKNLPNEKVLPKHSLLYEYFTVYNELTKVKYVTEGMRKPAFLSGEQKKAIVDLLFKTNRKVTVKQLKEDYFKKIECFDSVEISGVEDRFNASLGTYHDLLKIIKDKDFLDNEENEDILEDIVLTLTLFEDREMIEERLKTYAHLFDDKVMKQLKRRRYTGWGRLSRKLINGIRDKQSGKTILDFLKSDGFANRNFMQLIHDDSLTFKEDIQKAQVSGQGDSLHEHIANLAGSPAIKKGILQTVKVVDELVKVMGRHKPENIVIEMARENQTTQKGQKNSRERMKRIEEGIKELGSQILKEHPVENTQLQNEKLYLYYLQNGRDMYVDQELDINRLSDYDVDHIVPQSFLKDDSIDNKVLTRSDKARGKSDNVPSEEVVKKMKNYWRQLLNAKLITQRKFDNLTKAERGGLSELDKAGFIKRQLVETRQITKHVAQILDSRMNTKYDENDKLIREVKVITLKSKLVSDFRKDFQFYKVREINNYHHAHDAYLNAVVGTALIKKYPKLESEFVYGDYKVYDVRKMIAKSEQEIGKATAKYFFYSNIMNFFKTEITLANGEIRKRPLIETNGETGEIVWDKGRDFATVRKVLSMPQVNIVKKTEVQTGGFSKESILPKRNSDKLIARKKDWDPKKYGGFDSPTVAYSVLVVAKVEKGKSKKLKSVKELLGITIMERSSFEKNPIDFLEAKGYKEVKKDLIIKLPKYSLFELENGRKRMLASAGELQKGNELALPSKYVNFLYLASHYEKLKGSPEDNEQKQLFVEQHKHYLDEIIEQISEFSKRVILADANLDKVLSAYNKHRDKPIREQAENIIHLFTLTNLGAPAAFKYFDTTIDRKRYTSTKEVLDATLIHQSITGLYETRIDLSQLGGDGGGGSGGGGGTLGDQGSRGSDPLPEPRVTLTVEGIPTEFLVNTGAEHSVLTKPMGKMGSKRTVVAGATGSKVYPWTTKRLLKIGQKQVTHSFLVIPECPAPLLGRDLLTKLKAQIQFSTEGPQVTWEDRPAMCLVLNLEEEYRLHEKPVPPSIDPSWLQLFPMVWAEKAGMGLANQVPPVVVELKSDASPVAVRQYPMSKEAREGIRPHIQRFLDLGILVPCQSPWNTPLLPVKKPGTNDYRPVQDLREVNKRVQDIHPTVPNPYNLLSSLPPSHTWYSVLDLKDAFFCLKLHPNSQPLFAFEWRDPEKGNTGQLTWTRLPQGFKNSPTLFNEALHRDLASFRALNPQVVMLQYVDDLLVAAPTYRDCKEGTRRLLQELSKLGYRVSAKKAQLCREEVTYLGYLLKGGKRWLTPARKATVMKIPTPTTPRQVREFLGKAGFCRLFIPGFASLAAPLYPLTRPKVPFTWTEAHQEAFGRIKEALLSAPALALPDLTKPFALYVDEKEGVARGVLTQTLGPWRRPVAYLSKKLDPVASGWPTCLKAIAAVALLLKDADKLTLGQNVLVIAPHNLESIVRQPPDRWMTNARMTHYQSLLLNERVSFAPPAILNPATLLPVESDDTPIHICSEILAEETGTRPDLRDQPLPGVPAWYTDGSSFIMDGRRQAGAAIVDNKRTVWASNLPEGTSAQKAELIALTQALRLAEGKSINIYTDSRYAFATAHVHGAIYKQRGWLTSAGKDIKNKEEILALLEAIHLPKRVAIIHCPGHQRGTDPVATGNRKADEAAKQAAQSTRILTETTKNAGKRTADGSEFEKRTADGSEFESPKKKAKVE

SEQ ID NO: 6576 - protein, 2091 aa, synthetic construct
MPAAKRVKLDGGDKKYSIGLDIGTNSVGWAVITDEYKVPSKKFKVLGNTDRHSIKKNLIGALLFDSGETAEATRLKRTARRRYTRRKNRICYLQEIFSNEMAKVDDSFFHRLEESFLVEEDKKHERHPIFGNIVDEVAYHEKYPTIYHLRKKLVDSTDKADLRLIYLALAHMIKFRGHFLIEGDLNPDNSDVDKLFIQLVQTYNQLFEENPINASGVDAKAILSARLSKSRRLENLIAQLPGEKKNGLFGNLIALSLGLTPNFKSNFDLAEDAKLQLSKDTYDDDLDNLLAQIGDQYADLFLAAKNLSDAILLSDILRVNTEITKAPLSASMIKRYDEHHQDLTLLKALVRQQLPEKYKEIFFDQSKNGYAGYIDGGASQEEFYKFIKPILEKMDGTEELLVKLNREDLLRKQRTFDNGSIPHQIHLGELHAILRRQEDFYPFLKDNREKIEKILTFRIPYYVGPLARGNSRFAWMTRKSEETITPWNFEEVVDKGASAQSFIERMTNFDKNLPNEKVLPKHSLLYEYFTVYNELTKVKYVTEGMRKPAFLSGEQKKAIVDLLFKTNRKVTVKQLKEDYFKKIECFDSVEISGVEDRFNASLGTYHDLLKIIKDKDFLDNEENEDILEDIVLTLTLFEDREMIEERLKTYAHLFDDKVMKQLKRRRYTGWGRLSRKLINGIRDKQSGKTILDFLKSDGFANRNFMQLIHDDSLTFKEDIQKAQVSGQGDSLHEHIANLAGSPAIKKGILQTVKVVDELVKVMGRHKPENIVIEMARENQTTQKGQKNSRERMKRIEEGIKELGSQILKEHPVENTQLQNEKLYLYYLQNGRDMYVDQELDINRLSDYDVDHIVPQSFLKDDSIDNKVLTRSDKARGKSDNVPSEEVVKKMKNYWRQLLNAKLITQRKFDNLTKAERGGLSELDKAGFIKRQLVETRQITKHVAQILDSRMNTKYDENDKLIREVKVITLKSKLVSDFRKDFQFYKVREINNYHHAHDAYLNAVVGTALIKKYPKLESEFVYGDYKVYDVRKMIAKSEQEIGKATAKYFFYSNIMNFFKTEITLANGEIRKRPLIETNGETGEIVWDKGRDFATVRKVLSMPQVNIVKKTEVQTGGFSKESILPKRNSDKLIARKKDWDPKKYGGFDSPTVAYSVLVVAKVEKGKSKKLKSVKELLGITIMERSSFEKNPIDFLEAKGYKEVKKDLIIKLPKYSLFELENGRKRMLASAGELQKGNELALPSKYVNFLYLASHYEKLKGSPEDNEQKQLFVEQHKHYLDEIIEQISEFSKRVILADANLDKVLSAYNKHRDKPIREQAENIIHLFTLTNLGAPAAFKYFDTTIDRKRYTSTKEVLDATLIHQSITGLYETRIDLSQLGGDGGGGSGGGGGTLNLEDEYRLYETSAEPEVSPGSTWLSDFPQAWAETGGMGLAVRQAPLIIPLKATSTPVSIKQYPMSQEAKLGIKPHIQRLLDQGILVPCQSPWNTPLLPVKKPGTNDYRPVQDLREVNKRVEDIHPTVPNPYNLLSGLPPSHRWYTVLDLKDAFFCLRLHPTSQPLFAFEWRDPGMGISGQLTWTRLPQGFKNSPTLFNEALHRDLADFRIQHPDLILLQYVDDILLAATSELDCQQGTRALLLTLGNLGYRASAKKAQLCQKQVKYLGYLLKEGQRWLTEARKETVMGQPTPKTPRQLREFLGTAGFCRLWIPGFAEMAAPLYPLTKPGTLFNWGPDQQKAYQEIKQALLTAPALGLPDLTKPFELFVDEKQGYAKGVLTQKLGPWRRPVAYLSKKLDPVAAGWPPCLRMVAAIAVLRKDAGKLTMGQPLVILAPHAVEALVKQPPDRWLSNARMTHYQAMLLDTDRVQFGPVVALNPATLLPLPEEGAPHDCLEILAETHGTRPDLTDQPIPDADHTWYTDGSSFLQEGQRKAGAAVTTETEVIWARALPAGTSAQRAELIALTQALKMAEGKRLNVYTDSRYAFATAHIHGEIYRRRGWLTSEGREIKNKSEILALLKALFLPKRLSIIHCLGHQKGDSAEARGNRLADQAAREAAIKTPPDTSTLLAGKRTADGSEFEKRTADGSEFESPKKKAKVE

SEQ ID NO: 6577 - protein, 2091 aa, synthetic construct
MPAAKRVKLDGGDKKYSIGLDIGTNSVGWAVITDEYKVPSKKFKVLGNTDRHSIKKNLIGALLFDSGETAEATRLKRTARRRYTRRKNRICYLQEIFSNEMAKVDDSFFHRLEESFLVEEDKKHERHPIFGNIVDEVAYHEKYPTIYHLRKKLVDSTDKADLRLIYLALAHMIKFRGHFLIEGDLNPDNSDVDKLFIQLVQTYNQLFEENPINASGVDAKAILSARLSKSRRLENLIAQLPGEKKNGLFGNLIALSLGLTPNFKSNFDLAEDAKLQLSKDTYDDDLDNLLAQIGDQYADLFLAAKNLSDAILLSDILRVNTEITKAPLSASMIKRYDEHHQDLTLLKALVRQQLPEKYKEIFFDQSKNGYAGYIDGGASQEEFYKFIKPILEKMDGTEELLVKLNREDLLRKQRTFDNGSIPHQIHLGELHAILRRQEDFYPFLKDNREKIEKILTFRIPYYVGPLARGNSRFAWMTRKSEETITPWNFEEVVDKGASAQSFIERMTNFDKNLPNEKVLPKHSLLYEYFTVYNELTKVKYVTEGMRKPAFLSGEQKKAIVDLLFKTNRKVTVKQLKEDYFKKIECFDSVEISGVEDRFNASLGTYHDLLKIIKDKDFLDNEENEDILEDIVLTLTLFEDREMIEERLKTYAHLFDDKVMKQLKRRRYTGWGRLSRKLINGIRDKQSGKTILDFLKSDGFANRNFMQLIHDDSLTFKEDIQKAQVSGQGDSLHEHIANLAGSPAIKKGILQTVKVVDELVKVMGRHKPENIVIEMARENQTTQKGQKNSRERMKRIEEGIKELGSQILKEHPVENTQLQNEKLYLYYLQNGRDMYVDQELDINRLSDYDVDHIVPQSFLKDDSIDNKVLTRSDKARGKSDNVPSEEVVKKMKNYWRQLLNAKLITQRKFDNLTKAERGGLSELDKAGFIKRQLVETRQITKHVAQILDSRMNTKYDENDKLIREVKVITLKSKLVSDFRKDFQFYKVREINNYHHAHDAYLNAVVGTALIKKYPKLESEFVYGDYKVYDVRKMIAKSEQEIGKATAKYFFYSNIMNFFKTEITLANGEIRKRPLIETNGETGEIVWDKGRDFATVRKVLSMPQVNIVKKTEVQTGGFSKESILPKRNSDKLIARKKDWDPKKYGGFDSPTVAYSVLVVAKVEKGKSKKLKSVKELLGITIMERSSFEKNPIDFLEAKGYKEVKKDLIIKLPKYSLFELENGRKRMLASAGELQKGNELALPSKYVNFLYLASHYEKLKGSPEDNEQKQLFVEQHKHYLDEIIEQISEFSKRVILADANLDKVLSAYNKHRDKPIREQAENIIHLFTLTNLGAPAAFKYFDTTIDRKRYTSTKEVLDATLIHQSITGLYETRIDLSQLGGDGGGGSGGGGGTLGIEDEYRLHETSTEPDVSLGSTWLSDFPQAWAETGGMGLAVRQAPLIIPLKATSTPVSIQQYPMSHEARLGIKPHIQRLLDQGILVPCQSPWNTPLLPVKKPGTNDYRPVQDLREVNKRVEDIHPTVPNPYNLLSGLPPSHQWYTVLDLKDAFFCLRLHPTSQPLFAFEWRDPGMGISGQLTWTRLPQGFKNSPTLFNEALHRDLADFRIQHPDLILLQYVDDILLAATSELDCQQGTRALLQTLGDLGYRASAKKAQICQKQVKYLGYLLREGQRWLTEARKETVMGQPVPKTPRQLREFLGTAGFCRLWIPGFAEMAAPLYPLTKPGTLFSWGPDQQKAYQEIKQALLTAPALGLPDLTKPFELFVDEKQGYAKGVLTQKLGPWRRPVAYLSKKLDPVAAGWPPCLRMVAAIAVLTKDAGKLTMGQPLVILAPHAVEALVKQPPDRWLSNARMTHYQAMLLDTDRVQFGPVVALNPATLLPLPEEGAPHDCLEILAETHGTRPDLTDQPIPDADHTWYTDGSSFLQEGQRKAGAAVTTETEVIWAGALPAGTSAQRAELIALTQALKMAEGKRLNVYTDSRYAFATAHIHGEIYRRRGWLTSEGREIKNKSEILALLKALFLPKRLSIIHCLGHQKGDSAEARGNRLADQAAREAAIKTPPDTSTLLAGKRTADGSEFEKRTADGSEFESPKKKAKVE

SEQ ID NO: 6578 - protein, 2091 aa, synthetic construct
MPAAKRVKLDGGDKKYSIGLDIGTNSVGWAVITDEYKVPSKKFKVLGNTDRHSIKKNLIGALLFDSGETAEATRLKRTARRRYTRRKNRICYLQEIFSNEMAKVDDSFFHRLEESFLVEEDKKHERHPIFGNIVDEVAYHEKYPTIYHLRKKLVDSTDKADLRLIYLALAHMIKFRGHFLIEGDLNPDNSDVDKLFIQLVQTYNQLFEENPINASGVDAKAILSARLSKSRRLENLIAQLPGEKKNGLFGNLIALSLGLTPNFKSNFDLAEDAKLQLSKDTYDDDLDNLLAQIGDQYADLFLAAKNLSDAILLSDILRVNTEITKAPLSASMIKRYDEHHQDLTLLKALVRQQLPEKYKEIFFDQSKNGYAGYIDGGASQEEFYKFIKPILEKMDGTEELLVKLNREDLLRKQRTFDNGSIPHQIHLGELHAILRRQEDFYPFLKDNREKIEKILTFRIPYYVGPLARGNSRFAWMTRKSEETITPWNFEEVVDKGASAQSFIERMTNFDKNLPNEKVLPKHSLLYEYFTVYNELTKVKYVTEGMRKPAFLSGEQKKAIVDLLFKTNRKVTVKQLKEDYFKKIECFDSVEISGVEDRFNASLGTYHDLLKIIKDKDFLDNEENEDILEDIVLTLTLFEDREMIEERLKTYAHLFDDKVMKQLKRRRYTGWGRLSRKLINGIRDKQSGKTILDFLKSDGFANRNFMQLIHDDSLTFKEDIQKAQVSGQGDSLHEHIANLAGSPAIKKGILQTVKVVDELVKVMGRHKPENIVIEMARENQTTQKGQKNSRERMKRIEEGIKELGSQILKEHPVENTQLQNEKLYLYYLQNGRDMYVDQELDINRLSDYDVDHIVPQSFLKDDSIDNKVLTRSDKARGKSDNVPSEEVVKKMKNYWRQLLNAKLITQRKFDNLTKAERGGLSELDKAGFIKRQLVETRQITKHVAQILDSRMNTKYDENDKLIREVKVITLKSKLVSDFRKDFQFYKVREINNYHHAHDAYLNAVVGTALIKKYPKLESEFVYGDYKVYDVRKMIAKSEQEIGKATAKYFFYSNIMNFFKTEITLANGEIRKRPLIETNGETGEIVWDKGRDFATVRKVLSMPQVNIVKKTEVQTGGFSKESILPKRNSDKLIARKKDWDPKKYGGFDSPTVAYSVLVVAKVEKGKSKKLKSVKELLGITIMERSSFEKNPIDFLEAKGYKEVKKDLIIKLPKYSLFELENGRKRMLASAGELQKGNELALPSKYVNFLYLASHYEKLKGSPEDNEQKQLFVEQHKHYLDEIIEQISEFSKRVILADANLDKVLSAYNKHRDKPIREQAENIIHLFTLTNLGAPAAFKYFDTTIDRKRYTSTKEVLDATLIHQSITGLYETRIDLSQLGGDGGGGSGGGGGTLNIEDEHRLHETSKEPDVSLGSTWLSDFPQAWAETGGMGLAVRQAPLIIPLKATSTPVSIKQYPMSQEARLGIKPHIQRLLDQGILVPCQSPWNTPLLPVKKPGTNDYRPVQDLREVNKRVEDIHPTVPNPYNLLSGLPPSHQWYTVLDLKDAFFCLRLHPTSQPLFAFEWRDPEMGISGQLTWTRLPQGFKNSPTLFNEALHRDLADFRIQHPDLILLQYVDDLLLAATSELDCQQGTRALLQTLGNLGYRASAKKAQICQKQVKYLGYLLKEGQRWLTEARKETVMGQPTPKTPRQLREFLGTAGFCRLWIPGFAEMAAPLYPLTKPGTLFNWGPDQQKAYQEIKQALLTAPALGLPDLTKPFELFVDEKQGYAKGVLTQKLGPWRRPVAYLSKKLDPVAAGWPPCLRMVAAIAVLTKDAGKLTMGQPLVILAPHAVEALVKQPPDRWLSNARMTHYQALLLDTDRVQFGPVVALNPATLLPLPEEGLQHNCLDILAEAHGTRPDLTDQPLPDADHTWYTDGSSLLQEGQRKAGAAVTTETEVIWAKALPAGTSAQRAELIALTQALKMAEGKKLNVYTDSRYAFATAHIHGEIYRRRGWLTSEGKEIKNKDEILALLKALFLPKRLSIIHCPGHQKGHSAEARGNRMADQAARKAAITETPDTSTLLAGKRTADGSEFEKRTADGSEFESPKKKAKVE

SEQ ID NO: 6579 - protein, 2091 aa, synthetic construct; identical to SEQ ID NO: 6578

SEQ ID NO: 6580 - protein, 2082 aa, synthetic construct
MPAAKRVKLDGGDKKYSIGLDIGTNSVGWAVITDEYKVPSKKFKVLGNTDRHSIKKNLIGALLFDSGETAEATRLKRTARRRYTRRKNRICYLQEIFSNEMAKVDDSFFHRLEESFLVEEDKKHERHPIFGNIVDEVAYHEKYPTIYHLRKKLVDSTDKADLRLIYLALAHMIKFRGHFLIEGDLNPDNSDVDKLFIQLVQTYNQLFEENPINASGVDAKAILSARLSKSRRLENLIAQLPGEKKNGLFGNLIALSLGLTPNFKSNFDLAEDAKLQLSKDTYDDDLDNLLAQIGDQYADLFLAAKNLSDAILLSDILRVNTEITKAPLSASMIKRYDEHHQDLTLLKALVRQQLPEKYKEIFFDQSKNGYAGYIDGGASQEEFYKFIKPILEKMDGTEELLVKLNREDLLRKQRTFDNGSIPHQIHLGELHAILRRQEDFYPFLKDNREKIEKILTFRIPYYVGPLARGNSRFAWMTRKSEETITPWNFEEVVDKGASAQSFIERMTNFDKNLPNEKVLPKHSLLYEYFTVYNELTKVKYVTEGMRKPAFLSGEQKKAIVDLLFKTNRKVTVKQLKEDYFKKIECFDSVEISGVEDRFNASLGTYHDLLKIIKDKDFLDNEENEDILEDIVLTLTLFEDREMIEERLKTYAHLFDDKVMKQLKRRRYTGWGRLSRKLINGIRDKQSGKTILDFLKSDGFANRNFMQLIHDDSLTFKEDIQKAQVSGQGDSLHEHIANLAGSPAIKKGILQTVKVVDELVKVMGRHKPENIVIEMARENQTTQKGQKNSRERMKRIEEGIKELGSQILKEHPVENTQLQNEKLYLYYLQNGRDMYVDQELDINRLSDYDVDHIVPQSFLKDDSIDNKVLTRSDKARGKSDNVPSEEVVKKMKNYWRQLLNAKLITQRKFDNLTKAERGGLSELDKAGFIKRQLVETRQITKHVAQILDSRMNTKYDENDKLIREVKVITLKSKLVSDFRKDFQFYKVREINNYHHAHDAYLNAVVGTALIKKYPKLESEFVYGDYKVYDVRKMIAKSEQEIGKATAKYFFYSNIMNFFKTEITLANGEIRKRPLIETNGETGEIVWDKGRDFATVRKVLSMPQVNIVKKTEVQTGGFSKESILPKRNSDKLIARKKDWDPKKYGGFDSPTVAYSVLVVAKVEKGKSKKLKSVKELLGITIMERSSFEKNPIDFLEAKGYKEVKKDLIIKLPKYSLFELENGRKRMLASAGELQKGNELALPSKYVNFLYLASHYEKLKGSPEDNEQKQLFVEQHKHYLDEIIEQISEFSKRVILADANLDKVLSAYNKHRDKPIREQAENIIHLFTLTNLGAPAAFKYFDTTIDRKRYTSTKEVLDATLIHQSITGLYETRIDLSQLGGDGGGGSGGGGGIPWLMKKPLQLTTLVPLQEYEERLLKQTMLTGSYKEKLQSLFLKYDALWQHWENQVGHRRIKPHHIATGTVNPRPQKQYPINPKAKASIQTVINDLLKQGVLIQQNSIMNTPVYPVPKPDGKWRMVLDYREVNKTIPLIAAQNQHSAGILSSIFRGKYKTTLDLSNGFWAHSITPESYWLTAFTWLGQQYCWTRLPQGFLNSPALFNADVVDLLKEVPNVQVYVDDIYISHDDPREHLEQLEKVFSLLLNAGYVVSLKKSEIAQHEVEFLGFNITKEGRGLTETFKQKLLNITPPRDLKQLQSILGLLNFARNFIPNFSELVKPLYNIIATAPGKYITWTTDNSQQLQNIISMLNSAENLEERNPEVRLIMKVNTSPSAGYIRFYNEFAKRPIMYLNYVYTKAEVKFTNTEKLLTTIHKGLIKALDLGMGQEILVYSPIVSMTKIQKTPLPERKALPIRWITWMSYLEDPRIQFHYDKTLPELQQVPTVTDDIIAKIKHPSEFSMVFYTDGSAIKHPNVNKSHNAGMGIAQVQFKPEFTVINTWSIPLGDHTAQLAEVAAVEFACKKALKIDGPVLIVTDSFYVAESVNKELPYWQSNGFFNNKKKPLKHVSKWKSIADCIQLKPDIIIIHEKGHQPTASTFHTEGNNLADKLATQGSYVVNAGKRTADGSEFEKRTADGSEFESPKKKAKVE

SEQ ID NO: 6581 - protein, 2089 aa, synthetic construct
MPAAKRVKLDGGDKKYSIGLDIGTNSVGWAVITDEYKVPSKKFKVLGNTDRHSIKKNLIGALLFDSGETAEATRLKRTARRRYTRRKNRICYLQEIFSNEMAKVDDSFFHRLEESFLVEEDKKHERHPIFGNIVDEVAYHEKYPTIYHLRKKLVDSTDKADLRLIYLALAHMIKFRGHFLIEGDLNPDNSDVDKLFIQLVQTYNQLFEENPINASGVDAKAILSARLSKSRRLENLIAQLPGEKKNGLFGNLIALSLGLTPNFKSNFDLAEDAKLQLSKDTYDDDLDNLLAQIGDQYADLFLAAKNLSDAILLSDILRVNTEITKAPLSASMIKRYDEHHQDLTLLKALVRQQLPEKYKEIFFDQSKNGYAGYIDGGASQEEFYKFIKPILEKMDGTEELLVKLNREDLLRKQRTFDNGSIPHQIHLGELHAILRRQEDFYPFLKDNREKIEKILTFRIPYYVGPLARGNSRFAWMTRKSEETITPWNFEEVVDKGASAQSFIERMTNFDKNLPNEKVLPKHSLLYEYFTVYNELTKVKYVTEGMRKPAFLSGEQKKAIVDLLFKTNRKVTVKQLKEDYFKKIECFDSVEISGVEDRFNASLGTYHDLLKIIKDKDFLDNEENEDILEDIVLTLTLFEDREMIEERLKTYAHLFDDKVMKQLKRRRYTGWGRLSRKLINGIRDKQSGKTILDFLKSDGFANRNFMQLIHDDSLTFKEDIQKAQVSGQGDSLHEHIANLAGSPAIKKGILQTVKVVDELVKVMGRHKPENIVIEMARENQTTQKGQKNSRERMKRIEEGIKELGSQILKEHPVENTQLQNEKLYLYYLQNGRDMYVDQELDINRLSDYDVDHIVPQSFLKDDSIDNKVLTRSDKARGKSDNVPSEEVVKKMKNYWRQLLNAKLITQRKFDNLTKAERGGLSELDKAGFIKRQLVETRQITKHVAQILDSRMNTKYDENDKLIREVKVITLKSKLVSDFRKDFQFYKVREINNYHHAHDAYLNAVVGTALIKKYPKLESEFVYGDYKVYDVRKMIAKSEQEIGKATAKYFFYSNIMNFFKTEITLANGEIRKRPLIETNGETGEIVWDKGRDFATVRKVLSMPQVNIVKKTEVQTGGFSKESILPKRNSDKLIARKKDWDPKKYGGFDSPTVAYSVLVVAKVEKGKSKKLKSVKELLGITIMERSSFEKNPIDFLEAKGYKEVKKDLIIKLPKYSLFELENGRKRMLASAGELQKGNELALPSKYVNFLYLASHYEKLKGSPEDNEQKQLFVEQHKHYLDEIIEQISEFSKRVILADANLDKVLSAYNKHRDKPIREQAENIIHLFTLTNLGAPAAFKYFDTTIDRKRYTSTKEVLDATLIHQSITGLYETRIDLSQLGGDGGGGSGGGGGVLNLEEEYRLHEKPVPSSIDPSWLQLFPTVWAERAGMGLANQVPPVVVELRSGASPVAVRQYPMSKEAREGIRPHIQRFLDLGVLVPCQSPWNTPLLPVKKPGTNDYRPVQDLREINKRVQDIHPTVPNPYNLLSSLPPSHTWYSVLDLKDAFFCLKLHPNSQPLFAFEWRDPEKGNTGQLTWTRLPQGFKNSPTLFNEALHRDLAPFRALNPQVVLLQYVDDLLVAAPTYRDCKEGTQKLLQELSKLGYRVSAKKAQLCQKEVTYLGYLLKEGKRWLTPARKATVMKIPPPTTPRQVREFLGKAGFCRLFIPGFASLAAPLYPLTKPSIPFIWTEEHQKAFDRIKEALLSAPALALPDLTKPFTLYVDERAGVARGVLTQTLGPWRRPVAYLSKKLDPVASGWPTCLKAVAAVALLLKDADKLTLGQNVTVIASHSLESIVRQPPDRWMTNARMTHYQSLLLNERVSFAPPAVLNPATLLPVESEATPVHRCSEILAEETGTRRDLKDQPLPGVPAWYTDGSSFIAEGKRRAGAAIVDGKRTVWASSLPEGTSAQKAELVALTQALRLAEGKDINIYTDSRYAFATAHIHGAIYKQRGWLTSAGKDIKNKEEILALLEAIHLPKRVAIIHCPGHQKGNDPVATGNRRADEAAKQAALSTRVLAETTKPAGKRTADGSEFEKRTADGSEFESPKKKAKVE

SEQ ID NO: 6582 - protein, 2091 aa, synthetic construct
MPAAKRVKLDGGDKKYSIGLDIGTNSVGWAVITDEYKVPSKKFKVLGNTDRHSIKKNLIGALLFDSGETAEATRLKRTARRRYTRRKNRICYLQEIFSNEMAKVDDSFFHRLEESFLVEEDKKHERHPIFGNIVDEVAYHEKYPTIYHLRKKLVDSTDKADLRLIYLALAHMIKFRGHFLIEGDLNPDNSDVDKLFIQLVQTYNQLFEENPINASGVDAKAILSARLSKSRRLENLIAQLPGEKKNGLFGNLIALSLGLTPNFKSNFDLAEDAKLQLSKDTYDDDLDNLLAQIGDQYADLFLAAKNLSDAILLSDILRVNTEITKAPLSASMIKRYDEHHQDLTLLKALVRQQLPEKYKEIFFDQSKNGYAGYIDGGASQEEFYKFIKPILEKMDGTEELLVKLNREDLLRKQRTFDNGSIPHQIHLGELHAILRRQEDFYPFLKDNREKIEKILTFRIPYYVGPLARGNSRFAWMTRKSEETITPWNFEEVVDKGASAQSFIERMTNFDKNLPNEKVLPKHSLLYEYFTVYNELTKVKYVTEGMRKPAFLSGEQKKAIVDLLFKTNRKVTVKQLKEDYFKKIECFDSVEISGVEDRFNASLGTYHDLLKIIKDKDFLDNEENEDILEDIVLTLTLFEDREMIEERLKTYAHLFDDKVMKQLKRRRYTGWGRLSRKLINGIRDKQSGKTILDFLKSDGFANRNFMQLIHDDSLTFKEDIQKAQVSGQGDSLHEHIANLAGSPAIKKGILQTVKVVDELVKVMGRHKPENIVIEMARENQTTQKGQKNSRERMKRIEEGIKELGSQILKEHPVENTQLQNEKLYLYYLQNGRDMYVDQELDINRLSDYDVDHIVPQSFLKDDSIDNKVLTRSDKARGKSDNVPSEEVVKKMKNYWRQLLNAKLITQRKFDNLTKAERGGLSELDKAGFIKRQLVETRQITKHVAQILDSRMNTKYDENDKLIREVKVITLKSKLVSDFRKDFQFYKVREINNYHHAHDAYLNAVVGTALIKKYPKLESEFVYGDYKVYDVRKMIAKSEQEIGKATAKYFFYSNIMNFFKTEITLANGEIRKRPLIETNGETGEIVWDKGRDFATVRKVLSMPQVNIVKKTEVQTGGFSKESILPKRNSDKLIARKKDWDPKKYGGFDSPTVAYSVLVVAKVEKGKSKKLKSVKELLGITIMERSSFEKNPIDFLEAKGYKEVKKDLIIKLPKYSLFELENGRKRMLASAGELQKGNELALPSKYVNFLYLASHYEKLKGSPEDNEQKQLFVEQHKHYLDEIIEQISEFSKRVILADANLDKVLSAYNKHRDKPIREQAENIIHLFTLTNLGAPAAFKYFDTTIDRKRYTSTKEVLDATLIHQSITGLYETRIDLSQLGGDGGGGSGGGGGTLNIEDEYRLHETSKEPDVPLGSTWLSDFPQAWAETGGMGLAVRQAPLIIPLKATSTPVSIKQYPMSQEARLGIKPHIQRLLDQGILVPCQSPWNTPLLPVKKPGTNDYRPVQDLREVNKRVEDIHPTVPNPYNLLSGLPPSHQWYTVLDLKDAFFCLRLHPTSQPLFAFEWRDPEMGISGQLTWTRLPQGFKNSPTLFNEALHRDLADFRIQHPDLILLQYVDDLLLAATSEQDCQRGTRALLQTLGNLGYRASAKKAQICQKQVKYLGYLLKEGQRWLTEARKETVMGQPTPKTPRQLREFLGTAGFCRLWIPGFAEMAAPLYPLTKPGTLFNWGPDQQKAYQEIKQALLTAPALGLPDLTKPFELFVDEKQGYAKGVLTQKLGPWRRPVAYLSKKLDPVAAGWPPCLRMVAAIAVLTKDAGKLTMGQPLVILAPHAVEALVKQPPDRWLSNARMTHYQAMLLDTDRVQFGPVVALNPATLLPLPEKEAPHDCLEILAETHGTRPDLTDQPIPDADYTWYTDGSSFLQEGQRRAGAAVTTETEVIWARALPAGTSAQRAELIALTQALKMAEGKKLNVYTDSRYAFATAHVHGEIYRRRGWLTSEGREIKNKNEILALLKALFLPKRLSIIHCPGHQKGNSAEARGNRMADQAAREAAMKAVLETSTLLAGKRTADGSEFEKRTADGSEFESPKKKAKVE

SEQ ID NO: 6583 - protein, 2091 aa, synthetic construct
MPAAKRVKLDGGDKKYSIGLDIGTNSVGWAVITDEYKVPSKKFKVLGNTDRHSIKKNLIGALLFDSGETAEATRLKRTARRRYTRRKNRICYLQEIFSNEMAKVDDSFFHRLEESFLVEEDKKHERHPIFGNIVDEVAYHEKYPTIYHLRKKLVDSTDKADLRLIYLALAHMIKFRGHFLIEGDLNPDNSDVDKLFIQLVQTYNQLFEENPINASGVDAKAILSARLSKSRRLENLIAQLPGEKKNGLFGNLIALSLGLTPNFKSNFDLAEDAKLQLSKDTYDDDLDNLLAQIGDQYADLFLAAKNLSDAILLSDILRVNTEITKAPLSASMIKRYDEHHQDLTLLKALVRQQLPEKYKEIFFDQSKNGYAGYIDGGASQEEFYKFIKPILEKMDGTEELLVKLNREDLLRKQRTFDNGSIPHQIHLGELHAILRRQEDFYPFLKDNREKIEKILTFRIPYYVGPLARGNSRFAWMTRKSEETITPWNFEEVVDKGASAQSFIERMTNFDKNLPNEKVLPKHSLLYEYFTVYNELTKVKYVTEGMRKPAFLSGEQKKAIVDLLFKTNRKVTVKQLKEDYFKKIECFDSVEISGVEDRFNASLGTYHDLLKIIKDKDFLDNEENEDILEDIVLTLTLFEDREMIEERLKTYAHLFDDKVMKQLKRRRYTGWGRLSRKLINGIRDKQSGKTILDFLKSDGFANRNFMQLIHDDSLTFKEDIQKAQVSGQGDSLHEHIANLAGSPAIKKGILQTVKVVDELVKVMGRHKPENIVIEMARENQTTQKGQKNSRERMKRIEEGIKELGSQILKEHPVENTQLQNEKLYLYYLQNGRDMYVDQELDINRLSDYDVDHIVPQSFLKDDSIDNKVLTRSDKARGKSDNVPSEEVVKKMKNYWRQLLNAKLITQRKFDNLTKAERGGLSELDKAGFIKRQLVETRQITKHVAQILDSRMNTKYDENDKLIREVKVITLKSKLVSDFRKDFQFYKVREINNYHHAHDAYLNAVVGTALIKKYPKLESEFVYGDYKVYDVRKMIAKSEQEIGKATAKYFFYSNIMNFFKTEITLANGEIRKRPLIETNGETGEIVWDKGRDFATVRKVLSMPQVNIVKKTEVQTGGFSKESILPKRNSDKLIARKKDWDPKKYGGFDSPTVAYSVLVVAKVEKGKSKKLKSVKELLGITIMERSSFEKNPIDFLEAKGYKEVKKDLIIKLPKYSLFELENGRKRMLASAGELQKGNELALPSKYVNFLYLASHYEKLKGSPEDNEQKQLFVEQHKHYLDEIIEQISEFSKRVILADANLDKVLSAYNKHRDKPIREQAENIIHLFTLTNLGAPAAFKYFDTTIDRKRYTSTKEVLDATLIHQSITGLYETRIDLSQLGGDGGGGSGGGGGTLNIEDEYRLHETSKEPDVPLGSTWLSDFPQAWAETGGMGLAVRQAPLIIPLKATSTPVSIKQYPMSQEARLGIKPHIQRLLDQGILVPCQSPWNTPLLPVKKPGTNDYRPVQDLREVNKRVEDIHPTVPNPYNLLSGLPPSHQWYTVLDLKDAFFCLRLHPTSQPLFAFEWRDPEMGISGQLTWTRLPQGFKNSPTLFNEALHRDLADFRIQHPDLILLQYVDDLLLAATSEQDCQRGTRALLQTLGNLGYRASAKKAQICQKQVKYLGYLLKEGQRWLTEARKETVMGQPTPKTPRQLREFLGKAGFCRLFIPGFAEMAAPLYPLTKPGTLFNWGPDQQKAYQEIKQALLTAPALGLPDLTKPFELFVDEKQGYAKGVLTQKLGPWRRPVAYLSKKLDPVAAGWPPCLRMVAAIAVLTKDAGKLTMGQPLVILAPHAVEALVKQPPDRWLSNARMTHYQAMLLDTDRVQFGPVVALNPATLLPLPEKEAPHDCLEILAETHGTRPDLTDQPIPDADYTWYTDGSSFLQEGQRRAGAAVTTETEVIWARALPAGTSAQRAELIALTQALKMAEGKKLNVYTDSRYAFATAHVHGEIYRRRGWLTSEGREIKNKNEILALLKALFLPKRLSIIHCPGHQKGNSAEARGNRMADQAAREAAMKAVLETSTLLAGKRTADGSEFEKRTADGSEFESPKKKAKVE

SEQ ID NO: 6584 - protein, 2093 aa, synthetic construct
MPAAKRVKLDGGDKKYSIGLDIGTNSVGWAVITDEYKVPSKKFKVLGNTDRHSIKKNLIGALLFDSGETAEATRLKRTARRRYTRRKNRICYLQEIFSNEMAKVDDSFFHRLEESFLVEEDKKHERHPIFGNIVDEVAYHEKYPTIYHLRKKLVDSTDKADLRLIYLALAHMIKFRGHFLIEGDLNPDNSDVDKLFIQLVQTYNQLFEENPINASGVDAKAILSARLSKSRRLENLIAQLPGEKKNGLFGNLIALSLGLTPNFKSNFDLAEDAKLQLSKDTYDDDLDNLLAQIGDQYADLFLAAKNLSDAILLSDILRVNTEITKAPLSASMIKRYDEHHQDLTLLKALVRQQLPEKYKEIFFDQSKNGYAGYIDGGASQEEFYKFIKPILEKMDGTEELLVKLNREDLLRKQRTFDNGSIPHQIHLGELHAILRRQEDFYPFLKDNREKIEKILTFRIPYYVGPLARGNSRFAWMTRKSEETITPWNFEEVVDKGASAQSFIERMTNFDKNLPNEKVLPKHSLLYEYFTVYNELTKVKYVTEGMRKPAFLSGEQKKAIVDLLFKTNRKVTVKQLKEDYFKKIECFDSVEISGVEDRFNASLGTYHDLLKIIKDKDFLDNEENEDILEDIVLTLTLFEDREMIEERLKTYAHLFDDKVMKQLKRRRYTGWGRLSRKLINGIRDKQSGKTILDFLKSDGFANRNFMQLIHDDSLTFKEDIQKAQVSGQGDSLHEHIANLAGSPAIKKGILQTVKVVDELVKVMGRHKPENIVIEMARENQTTQKGQKNSRERMKRIEEGIKELGSQILKEHPVENTQLQNEKLYLYYLQNGRDMYVDQELDINRLSDYDVDHIVPQSFLKDDSIDNKVLTRSDKARGKSDNVPSEEVVKKMKNYWRQLLNAKLITQRKFDNLTKAERGGLSELDKAGFIKRQLVETRQITKHVAQILDSRMNTKYDENDKLIREVKVITLKSKLVSDFRKDFQFYKVREINNYHHAHDAYLNAVVGTALIKKYPKLESEFVYGDYKVYDVRKMIAKSEQEIGKATAKYFFYSNIMNFFKTEITLANGEIRKRPLIETNGETGEIVWDKGRDFATVRKVLSMPQVNIVKKTEVQTGGFSKESILPKRNSDKLIARKKDWDPKKYGGFDSPTVAYSVLVVAKVEKGKSKKLKSVKELLGITIMERSSFEKNPIDFLEAKGYKEVKKDLIIKLPKYSLFELENGRKRMLASAGELQKGNELALPSKYVNFLYLASHYEKLKGSPEDNEQKQLFVEQHKHYLDEIIEQISEFSKRVILADANLDKVLSAYNKHRDKPIREQAENIIHLFTLTNLGAPAAFKYFDTTIDRKRYTSTKEVLDATLIHQSITGLYETRIDLSQLGGDGGGGGGGSGGTAPLEEEYRLFLEAPIQNVTLLEQWKREIPKVWAEINPPGLASTQAPIHVQLLSTALPVRVRQYPITLEAKRSLRETIRKFRAAGILRPVHSPWNTPLLPVRKSGTSEYRMVQDLREVNKRVETIHPTVPNPYTLLSLLPPDRIWYSVLDLKDAFFCIPLAPESQLIFAFEWADAEEGESGQLTWTRLPQGFKNSPTLFNEALNRDLQGFRLDHPSVSLLQYVDDLLIAADTQAACLSATRDLLMTLAELGYRVSGKKAQLCQEEVTYLGFKIHKGSRSLSNSRTQAILQIPVPKTKRQVREFLGTIGYCRLWIPGFAELAQPLYAATRPGNDPLVWGEKEEEAFQSLKLALTQPPALALPSLDKPFQLFVEETSGAAKGVLTQALGPWKRPVAYLSKRLDPVAAGWPRCLRAIAAAALLTREASKLTFGQDIEITSSHNLESLLRSPPDKWLTNARITQYQVLLLDPPRVRFKQTAALNPATLLPETDDTLPIHHCLDTLDSLTSTRPDLTDQPLAQAEATLFTDGSSYIRDGKRYAGAAVVTLDSVIWAEPLPIGTSAQKAELIALTKALEWSKDKSVNIYTDSRYAFATLHVHGMIYRERGWLTAGGKAIKNAPEILALLTAVWLPKRVAVMHCKGHQKDDAPTSTGNRRADEVAREVAIRPLSTQATISAGKRTADGSEFEKRTADGSEFESPKKKAKVE

SEQ ID NO: 6585 - protein, 2093 aa, synthetic construct
MPAAKRVKLDGGDKKYSIGLDIGTNSVGWAVITDEYKVPSKKFKVLGNTDRHSIKKNLIGALLFDSGETAEATRLKRTARRRYTRRKNRICYLQEIFSNEMAKVDDSFFHRLEESFLVEEDKKHERHPIFGNIVDEVAYHEKYPTIYHLRKKLVDSTDKADLRLIYLALAHMIKFRGHFLIEGDLNPDNSDVDKLFIQLVQTYNQLFEENPINASGVDAKAILSARLSKSRRLENLIAQLPGEKKNGLFGNLIALSLGLTPNFKSNFDLAEDAKLQLSKDTYDDDLDNLLAQIGDQYADLFLAAKNLSDAILLSDILRVNTEITKAPLSASMIKRYDEHHQDLTLLKALVRQQLPEKYKEIFFDQSKNGYAGYIDGGASQEEFYKFIKPILEKMDGTEELLVKLNREDLLRKQRTFDNGSIPHQIHLGELHAILRRQEDFYPFLKDNREKIEKILTFRIPYYVGPLARGNSRFAWMTRKSEETITPWNFEEVVDKGASAQSFIERMTNFDKNLPNEKVLPKHSLLYEYFTVYNELTKVKYVTEGMRKPAFLSGEQKKAIVDLLFKTNRKVTVKQLKEDYFKKIECFDSVEISGVEDRFNASLGTYHDLLKIIKDKDFLDNEENEDILEDIVLTLTLFEDREMIEERLKTYAHLFDDKVMKQLKRRRYTGWGRLSRKLINGIRDKQSGKTILDFLKSDGFANRNFMQLIHDDSLTFKEDIQKAQVSGQGDSLHEHIANLAGSPAIKKGILQTVKVVDELVKVMGRHKPENIVIEMARENQTTQKGQKNSRERMKRIEEGIKELGSQILKEHPVENTQLQNEKLYLYYLQNGRDMYVDQELDINRLSDYDVDHIVPQSFLKDDSIDNKVLTRSDKARGKSDNVPSEEVVKKMKNYWRQLLNAKLITQRKFDNLTKAERGGLSELDKAGFIKRQLVETRQITKHVAQILDSRMNTKYDENDKLIREVKVITLKSKLVSDFRKDFQFYKVREINNYHHAHDAYLNAVVGTALIKKYPKLESEFVYGDYKVYDVRKMIAKSEQEIGKATAKYFFYSNIMNFFKTEITLANGEIRKRPLIETNGETGEIVWDKGRDFATVRKVLSMPQVNIVKKTEVQTGGFSKESILPKRNSDKLIARKKDWDPKKYGGFDSPTVAYSVLVVAKVEKGKSKKLKSVKELLGITIMERSSFEKNPIDFLEAKGYKEVKKDLIIKLPKYSLFELENGRKRMLASAGELQKGNELALPSKYVNFLYLASHYEKLKGSPEDNEQKQLFVEQHKHYLDEIIEQISEFSKRVILADANLDKVLSAYNKHRDKPIREQAENIIHLFTLTNLGAPAAFKYFDTTIDRKRYTSTKEVLDATLIHQSITGLYETRIDLSQLGGDGGGGGGGSGGTAPLEEEYRLFLEAPIQNVTLLEQWKREIPKVWAEINPPGLASTQAPIHVQLLSTALPVRVRQYPITLEAKRSLRETIRKFRAAGILRPVHSPWNTPLLPVRKSGTSEYRMVQDLREVNKRVETIHPTVPNPYTLLSLLPPDRIWYSVLDLKDAFFCIPLAPESQLIFAFEWADAEEGESGQLTWTRLPQGFKNSPTLFNEALNRDLQGFRLDHPSVSLLQYVDDLLIAADTQAACLSATRDLLMTLAELGYRVSGKKAQLCQEEVTYLGFKIHKGSRSLSNSRTQAILQIPVPKTKRQVREFLGKIGYCRLFIPGFAELAQPLYAATRPGNDPLVWGEKEEEAFQSLKLALTQPPALALPSLDKPFQLFVEETSGAAKGVLTQALGPWKRPVAYLSKRLDPVAAGWPRCLRAIAAAALLTREASKLTFGQDIEITSSHNLESLLRSPPDKWLTNARITQYQVLLLDPPRVRFKQTAALNPATLLPETDDTLPIHHCLDTLDSLTSTRPDLTDQPLAQAEATLFTDGSSYIRDGKRYAGAAVVTLDSVIWAEPLPIGTSAQKAELIALTKALEWSKDKSVNIYTDSRYAFATLHVHGMIYRERGWLTAGGKAIKNAPEILALLTAVWLPKRVAVMHCKGHQKDDAPTSTGNRRADEVAREVAIRPLSTQATISAGKRTADGSEFEKRTADGSEFESPKKKAKVE

SEQ ID NO: 6586 - protein, 2097 aa, synthetic construct
MPAAKRVKLDGGDKKYSIGLDIGTNSVGWAVITDEYKVPSKKFKVLGNTDRHSIKKNLIGALLFDSGETAEATRLKRTARRRYTRRKNRICYLQEIFSNEMAKVDDSFFHRLEESFLVEEDKKHERHPIFGNIVDEVAYHEKYPTIYHLRKKLVDSTDKADLRLIYLALAHMIKFRGHFLIEGDLNPDNSDVDKLFIQLVQTYNQLFEENPINASGVDAKAILSARLSKSRRLENLIAQLPGEKKNGLFGNLIALSLGLTPNFKSNFDLAEDAKLQLSKDTYDDDLDNLLAQIGDQYADLFLAAKNLSDAILLSDILRVNTEITKAPLSASMIKRYDEHHQDLTLLKALVRQQLPEKYKEIFFDQSKNGYAGYIDGGASQEEFYKFIKPILEKMDGTEELLVKLNREDLLRKQRTFDNGSIPHQIHLGELHAILRRQEDFYPFLKDNREKIEKILTFRIPYYVGPLARGNSRFAWMTRKSEETITPWNFEEVVDKGASAQSFIERMTNFDKNLPNEKVLPKHSLLYEYFTVYNELTKVKYVTEGMRKPAFLSGEQKKAIVDLLFKTNRKVTVKQLKEDYFKKIECFDSVEISGVEDRFNASLGTYHDLLKIIKDKDFLDNEENEDILEDIVLTLTLFEDREMIEERLKTYAHLFDDKVMKQLKRRRYTGWGRLSRKLINGIRDKQSGKTILDFLKSDGFANRNFMQLIHDDSLTFKEDIQKAQVSGQGDSLHEHIANLAGSPAIKKGILQTVKVVDELVKVMGRHKPENIVIEMARENQTTQKGQKNSRERMKRIEEGIKELGSQILKEHPVENTQLQNEKLYLYYLQNGRDMYVDQELDINRLSDYDVDHIVPQSFLKDDSIDNKVLTRSDKARGKSDNVPSEEVVKKMKNYWRQLLNAKLITQRKFDNLTKAERGGLSELDKAGFIKRQLVETRQITKHVAQILDSRMNTKYDENDKLIREVKVITLKSKLVSDFRKDFQFYKVREINNYHHAHDAYLNAVVGTALIKKYPKLESEFVYGDYKVYDVRKMIAKSEQEIGKATAKYFFYSNIMNFFKTEITLANGEIRKRPLIETNGETGEIVWDKGRDFATVRKVLSMPQVNIVKKTEVQTGGFSKESILPKRNSDKLIARKKDWDPKKYGGFDSPTVAYSVLVVAKVEKGKSKKLKSVKELLGITIMERSSFEKNPIDFLEAKGYKEVKKDLIIKLPKYSLFELENGRKRMLASAGELQKGNELALPSKYVNFLYLASHYEKLKGSPEDNEQKQLFVEQHKHYLDEIIEQISEFSKRVILADANLDKVLSAYNKHRDKPIREQAENIIHLFTLTNLGAPAAFKYFDTTIDRKRYTSTKEVLDATLIHQSITGLYETRIDLSQLGGDGGGGGGGSGGTVSLQDEHRLFDIPVTTSLPDVWLQDFPQAWAETGGLGRAKCQAPIIIDLKPTAVPVSIKQYPMSLEAHMGIRQHIIKFLELGVLRPCRSPWNTPLLPVKKPGTQDYRPVQDLREINKRTVDIHPTVPNPYNLLSTLKPDYSWYTVLDLKDAFFCLPLAPQSQELFAFEWKDPERGISGQLTWTRLPQGFKNSPTLFNEALHRDLTDFRTQHPEVTLLQYVDDLLLAAPTKKACTQGTRHLLQELGEKGYRASAKKAQICQTKVTYLGYILSEGKRWLTPGRIETVARIPPPRNPREVREFLGTAGFCRLWIPGFAELAAPLYALTKPSTPFTWQTEHQLAFEALKKALLSAPALGLPDTSKPFTLFLDERQGIAKGVLTQKLGPWKRPVAYLSKKLDPVAAGWPPCLRIMAATAMLVKDSAKLTLGQPLTVITPHTLEAIVRQPPDRWITNARLTHYQALLLDTDRVQFGPPVTLNPATLLPVPENQPSPHDCRQVLAETHGTREDLKDQELPDADHTWYTDGSSYLDSGTRRAGAAVVDGHNTIWAQSLPPGTSAQKAELIALTKALELSKGKKANIYTDSRYAFATAHTHGSIYERRGWLTSEGKEIKNKAEIIALLKALFLPQEVAIIHCPGHQKGQDPVAVGNRQADRVARQAAMAEVLTLATEPDNTSHITAGKRTADGSEFEKRTADGSEFESPKKKAKVE

SEQ ID NO: 6587 - protein, 2090 aa, synthetic construct
MPAAKRVKLDGGDKKYSIGLDIGTNSVGWAVITDEYKVPSKKFKVLGNTDRHSIKKNLIGALLFDSGETAEATRLKRTARRRYTRRKNRICYLQEIFSNEMAKVDDSFFHRLEESFLVEEDKKHERHPIFGNIVDEVAYHEKYPTIYHLRKKLVDSTDKADLRLIYLALAHMIKFRGHFLIEGDLNPDNSDVDKLFIQLVQTYNQLFEENPINASGVDAKAILSARLSKSRRLENLIAQLPGEKKNGLFGNLIALSLGLTPNFKSNFDLAEDAKLQLSKDTYDDDLDNLLAQIGDQYADLFLAAKNLSDAILLSDILRVNTEITKAPLSASMIKRYDEHHQDLTLLKALVRQQLPEKYKEIFFDQSKNGYAGYIDGGASQEEFYKFIKPILEKMDGTEELLVKLNREDLLRKQRTFDNGSIPHQIHLGELHAILRRQEDFYPFLKDNREKIEKILTFRIPYYVGPLARGNSRFAWMTRKSEETITPWNFEEVVDKGASAQSFIERMTNFDKNLPNEKVLPKHSLLYEYFTVYNELTKVKYVTEGMRKPAFLSGEQKKAIVDLLFKTNRKVTVKQLKEDYFKKIECFDSVEISGVEDRFNASLGTYHDLLKIIKDKDFLDNEENEDILEDIVLTLTLFEDREMIEERLKTYAHLFDDKVMKQLKRRRYTGWGRLSRKLINGIRDKQSGKTILDFLKSDGFANRNFMQLIHDDSLTFKEDIQKAQVSGQGDSLHEHIANLAGSPAIKKGILQTVKVVDELVKVMGRHKPENIVIEMARENQTTQKGQKNSRERMKRIEEGIKELGSQILKEHPVENTQLQNEKLYLYYLQNGRDMYVDQELDINRLSDYDVDHIVPQSFLKDDSIDNKVLTRSDKARGKSDNVPSEEVVKKMKNYWRQLLNAKLITQRKFDNLTKAERGGLSELDKAGFIKRQLVETRQITKHVAQILDSRMNTKYDENDKLIREVKVITLKSKLVSDFRKDFQFYKVREINNYHHAHDAYLNAVVGTALIKKYPKLESEFVYGDYKVYDVRKMIAKSEQEIGKATAKYFFYSNIMNFFKTEITLANGEIRKRPLIETNGETGEIVWDKGRDFATVRKVLSMPQVNIVKKTEVQTGGFSKESILPKRNSDKLIARKKDWDPKKYGGFDSPTVAYSVLVVAKVEKGKSKKLKSVKELLGITIMERSSFEKNPIDFLEAKGYKEVKKDLIIKLPKYSLFELENGRKRMLASAGELQKGNELALPSKYVNFLYLASHYEKLKGSPEDNEQKQLFVEQHKHYLDEIIEQISEFSKRVILADANLDKVLSAYNKHRDKPIREQAENIIHLFTLTNLGAPAAFKYFDTTIDRKRYTSTKEVLDATLIHQSITGLYETRIDLSQLGGDGGGGGGGSGGTLQLEEEYRLFEPESTQKQEMDIWLKNFPQAWAETGGMGTAHCQAPVLIQLKATATPISIRQYPMPHEAYQGIKPHIRRMLDQGILKPCQSPWNTPLLPVKKPGTEDYRPVQDLREVNKRVEDIHPTVPNPYNLLSTLPPSHPWYTVLDLKDAFFCLRLHSESQLLFAFEWRDPEIGLSGQLTWTRLPQGFKNSPTLFNEALHSDLADFRVRYPALVLLQYVDDLLLAAATRTECLEGTKALLETLGNKGYRASAKKAQICLQEVTYLGYSLKDGQRWLTKARKEAILSIPVPKNSRQVREFLGTAGYCRLWIPGFAELAAPLYPLTRPGTLFQWGTEQQLAFEDIKKALLSSPALGLPDITKPFELFIDENSGFAKGVLVQKLGPWKRPVAYLSKKLDTVASGWPPCLRMVAAIAILVKDAGKLTLGQPLTILTSHPVEALVRQPPNKWLSNARMTHYQAMLLDAERVHFGPTVSLNPATLLPLPSGGNHHDCLQILAETHGTRPDLTDQPLPDADLTWYTDGSSFIRNGEREAGAAVTTESEVIWAAPLPPGTSAQRAELIALTQALKMAEGKKLTVYTDSRYAFATTHVHGEIYRRRGWLTSEGKEIKNKNEILALLEALFLPKRLSIIHCPGHQKGDSPQAKGNRLADDTAKKAATETHSSLTVLPAGKRTADGSEFEKRTADGSEFESPKKKAKVE

SEQ ID NO: 6588 - protein, 2213 aa, synthetic construct
MPAAKRVKLDGGDKKYSIGLDIGTNSVGWAVITDEYKVPSKKFKVLGNTDRHSIKKNLIGALLFDSGETAEATRLKRTARRRYTRRKNRICYLQEIFSNEMAKVDDSFFHRLEESFLVEEDKKHERHPIFGNIVDEVAYHEKYPTIYHLRKKLVDSTDKADLRLIYLALAHMIKFRGHFLIEGDLNPDNSDVDKLFIQLVQTYNQLFEENPINASGVDAKAILSARLSKSRRLENLIAQLPGEKKNGLFGNLIALSLGLTPNFKSNFDLAEDAKLQLSKDTYDDDLDNLLAQIGDQYADLFLAAKNLSDAILLSDILRVNTEITKAPLSASMIKRYDEHHQDLTLLKALVRQQLPEKYKEIFFDQSKNGYAGYIDGGASQEEFYKFIKPILEKMDGTEELLVKLNREDLLRKQRTFDNGSIPHQIHLGELHAILRRQEDFYPFLKDNREKIEKILTFRIPYYVGPLARGNSRFAWMTRKSEETITPWNFEEVVDKGASAQSFIERMTNFDKNLPNEKVLPKHSLLYEYFTVYNELTKVKYVTEGMRKPAFLSGEQKKAIVDLLFKTNRKVTVKQLKEDYFKKIECFDSVEISGVEDRFNASLGTYHDLLKIIKDKDFLDNEENEDILEDIVLTLTLFEDREMIEERLKTYAHLFDDKVMKQLKRRRYTGWGRLSRKLINGIRDKQSGKTILDFLKSDGFANRNFMQLIHDDSLTFKEDIQKAQVSGQGDSLHEHIANLAGSPAIKKGILQTVKVVDELVKVMGRHKPENIVIEMARENQTTQKGQKNSRERMKRIEEGIKELGSQILKEHPVENTQLQNEKLYLYYLQNGRDMYVDQELDINRLSDYDVDHIVPQSFLKDDSIDNKVLTRSDKARGKSDNVPSEEVVKKMKNYWRQLLNAKLITQRKFDNLTKAERGGLSELDKAGFIKRQLVETRQITKHVAQILDSRMNTKYDENDKLIREVKVITLKSKLVSDFRKDFQFYKVREINNYHHAHDAYLNAVVGTALIKKYPKLESEFVYGDYKVYDVRKMIAKSEQEIGKATAKYFFYSNIMNFFKTEITLANGEIRKRPLIETNGETGEIVWDKGRDFATVRKVLSMPQVNIVKKTEVQTGGFSKESILPKRNSDKLIARKKDWDPKKYGGFDSPTVAYSVLVVAKVEKGKSKKLKSVKELLGITIMERSSFEKNPIDFLEAKGYKEVKKDLIIKLPKYSLFELENGRKRMLASAGELQKGNELALPSKYVNFLYLASHYEKLKGSPEDNEQKQLFVEQHKHYLDEIIEQISEFSKRVILADANLDKVLSAYNKHRDKPIREQAENIIHLFTLTNLGAPAAFKYFDTTIDRKRYTSTKEVLDATLIHQSITGLYETRIDLSQLGGDGGGGGGGSGGTLGDQGSRGSDPLPEPRVTLTVEGIPTEFLVNTGAEHSVLTKPMGKMGSKRTVVAGATGSKVYPWTTKRLLKIGQKQVTHSFLVIPECPAPLLGRDLLTKLKAQIQFSTEGPQVTWEDRPAMCLVLNLEEEYRLHEKPVPPSIDPSWLQLFPMVWAEKAGMGLANQVPPVVVELKSDASPVAVRQYPMSKEAREGIRPHIQRFLDLGILVPCQSPWNTPLLPVKKPGTNDYRPVQDLREVNKRVQDIHPTVPNPYNLLSSLPPSHTWYSVLDLKDAFFCLKLHPNSQPLFAFEWRDPEKGNTGQLTWTRLPQGFKNSPTLFNEALHRDLASFRALNPQVVMLQYVDDLLVAAPTYRDCKEGTRRLLQELSKLGYRVSAKKAQLCREEVTYLGYLLKGGKRWLTPARKATVMKIPTPTTPRQVREFLGKAGFCRLFIPGFASLAAPLYPLTRPKVPFTWTEAHQEAFGRIKEALLSAPALALPDLTKPFALYVDEKEGVARGVLTQTLGPWRRPVAYLSKKLDPVASGWPTCLKAIAAVALLLKDADKLTLGQNVLVIAPHNLESIVRQPPDRWMTNARMTHYQSLLLNERVSFAPPAILNPATLLPVESDDTPIHICSEILAEETGTRPDLRDQPLPGVPAWYTDGSSFIMDGRRQAGAAIVDNKRTVWASNLPEGTSAQKAELIALTQALRLAEGKSINIYTDSRYAFATAHVHGAIYKQRGWLTSAGKDIKNKEEILALLEAIHLPKRVAIIHCPGHQRGTDPVATGNRKADEAAKQAAQSTRILTETTKNAGKRTADGSEFEKRTADGSEFESPKKKAKVE

SEQ ID NO: 6589 - protein, 2091 aa, synthetic construct; identical to SEQ ID NO: 4511

SEQ ID NO: 6590 - protein, 2091 aa, synthetic construct
MPAAKRVKLDGGDKKYSIGLDIGTNSVGWAVITDEYKVPSKKFKVLGNTDRHSIKKNLIGALLFDSGETAEATRLKRTARRRYTRRKNRICYLQEIFSNEMAKVDDSFFHRLEESFLVEEDKKHERHPIFGNIVDEVAYHEKYPTIYHLRKKLVDSTDKADLRLIYLALAHMIKFRGHFLIEGDLNPDNSDVDKLFIQLVQTYNQLFEENPINASGVDAKAILSARLSKSRRLENLIAQLPGEKKNGLFGNLIALSLGLTPNFKSNFDLAEDAKLQLSKDTYDDDLDNLLAQIGDQYADLFLAAKNLSDAILLSDILRVNTEITKAPLSASMIKRYDEHHQDLTLLKALVRQQLPEKYKEIFFDQSKNGYAGYIDGGASQEEFYKFIKPILEKMDGTEELLVKLNREDLLRKQRTFDNGSIPHQIHLGELHAILRRQEDFYPFLKDNREKIEKILTFRIPYYVGPLARGNSRFAWMTRKSEETITPWNFEEVVDKGASAQSFIERMTNFDKNLPNEKVLPKHSLLYEYFTVYNELTKVKYVTEGMRKPAFLSGEQKKAIVDLLFKTNRKVTVKQLKEDYFKKIECFDSVEISGVEDRFNASLGTYHDLLKIIKDKDFLDNEENEDILEDIVLTLTLFEDREMIEERLKTYAHLFDDKVMKQLKRRRYTGWGRLSRKLINGIRDKQSGKTILDFLKSDGFANRNFMQLIHDDSLTFKEDIQKAQVSGQGDSLHEHIANLAGSPAIKKGILQTVKVVDELVKVMGRHKPENIVIEMARENQTTQKGQKNSRERMKRIEEGIKELGSQILKEHPVENTQLQNEKLYLYYLQNGRDMYVDQELDINRLSDYDVDHIVPQSFLKDDSIDNKVLTRSDKARGKSDNVPSEEVVKKMKNYWRQLLNAKLITQRKFDNLTKAERGGLSELDKAGFIKRQLVETRQITKHVAQILDSRMNTKYDENDKLIREVKVITLKSKLVSDFRKDFQFYKVREINNYHHAHDAYLNAVVGTALIKKYPKLESEFVYGDYKVYDVRKMIAKSEQEIGKATAKYFFYSNIMNFFKTEITLANGEIRKRPLIETNGETGEIVWDKGRDFATVRKVLSMPQVNIVKKTEVQTGGFSKESILPKRNSDKLIARKKDWDPKKYGGFDSPTVAYSVLVVAKVEKGKSKKLKSVKELLGITIMERSSFEKNPIDFLEAKGYKEVKKDLIIKLPKYSLFELENGRKRMLASAGELQKGNELALPSKYVNFLYLASHYEKLKGSPEDNEQKQLFVEQHKHYLDEIIEQISEFSKRVILADANLDKVLSAYNKHRDKPIREQAENIIHLFTLTNLGAPAAFKYFDTTIDRKRYTSTKEVLDATLIHQSITGLYETRIDLSQLGGDGGGGGGGSGGTLGIEDEYRLHETSTEPDVSLGSTWLSDFPQAWAETGGMGLAVRQAPLIIPLKATSTPVSIQQYPMSHEARLGIKPHIQRLLDQGILVPCQSPWNTPLLPVKKPGTNDYRPVQDLREVNKRVEDIHPTVPNPYNLLSGLPPSHQWYTVLDLKDAFFCLRLHPTSQPLFAFEWRDPGMGISGQLTWTRLPQGFKNSPTLFNEALHRDLADFRIQHPDLILLQYVDDILLAATSELDCQQGTRALLQTLGDLGYRASAKKAQICQKQVKYLGYLLREGQRWLTEARKETVMGQPVPKTPRQLREFLGTAGFCRLWIPGFAEMAAPLYPLTKPGTLFSWGPDQQKAYQEIKQALLTAPALGLPDLTKPFELFVDEKQGYAKGVLTQKLGPWRRPVAYLSKKLDPVAAGWPPCLRMVAAIAVLTKDAGKLTMGQPLVILAPHAVEALVKQPPDRWLSNARMTHYQAMLLDTDRVQFGPVVALNPATLLPLPEEGAPHDCLEILAETHGTRPDLTDQPIPDADHTWYTDGSSFLQEGQRKAGAAVTTETEVIWAGALPAGTSAQRAELIALTQALKMAEGKRLNVYTDSRYAFATAHIHGEIYRRRGWLTSEGREIKNKSEILALLKALFLPKRLSIIHCLGHQKGDSAEARGNRLADQAAREAAIKTPPDTSTLLAGKRTADGSEFEKRTADGSEFESPKKKAKVE

SEQ ID NO: 6591 - protein, 2091 aa, synthetic construct; identical to SEQ ID NO: 4511

SEQ ID NO: 6592 - protein, 2091 aa, synthetic construct
MPAAKRVKLDGGDKKYSIGLDIGTNSVGWAVITDEYKVPSKKFKVLGNTDRHSIKKNLIGALLFDSGETAEATRLKRTARRRYTRRKNRICYLQEIFSNEMAKVDDSFFHRLEESFLVEEDKKHERHPIFGNIVDEVAYHEKYPTIYHLRKKLVDSTDKADLRLIYLALAHMIKFRGHFLIEGDLNPDNSDVDKLFIQLVQTYNQLFEENPINASGVDAKAILSARLSKSRRLENLIAQLPGEKKNGLFGNLIALSLGLTPNFKSNFDLAEDAKLQLSKDTYDDDLDNLLAQIGDQYADLFLAAKNLSDAILLSDILRVNTEITKAPLSASMIKRYDEHHQDLTLLKALVRQQLPEKYKEIFFDQSKNGYAGYIDGGASQEEFYKFIKPILEKMDGTEELLVKLNREDLLRKQRTFDNGSIPHQIHLGELHAILRRQEDFYPFLKDNREKIEKILTFRIPYYVGPLARGNSRFAWMTRKSEETITPWNFEEVVDKGASAQSFIERMTNFDKNLPNEKVLPKHSLLYEYFTVYNELTKVKYVTEGMRKPAFLSGEQKKAIVDLLFKTNRKVTVKQLKEDYFKKIECFDSVEISGVEDRFNASLGTYHDLLKIIKDKDFLDNEENEDILEDIVLTLTLFEDREMIEERLKTYAHLFDDKVMKQLKRRRYTGWGRLSRKLINGIRDKQSGKTILDFLKSDGFANRNFMQLIHDDSLTFKEDIQKAQVSGQGDSLHEHIANLAGSPAIKKGILQTVKVVDELVKVMGRHKPENIVIEMARENQTTQKGQKNSRERMKRIEEGIKELGSQILKEHPVENTQLQNEKLYLYYLQNGRDMYVDQELDINRLSDYDVDHIVPQSFLKDDSIDNKVLTRSDKARGKSDNVPSEEVVKKMKNYWRQLLNAKLITQRKFDNLTKAERGGLSELDKAGFIKRQLVETRQITKHVAQILDSRMNTKYDENDKLIREVKVITLKSKLVSDFRKDFQFYKVREINNYHHAHDAYLNAVVGTALIKKYPKLESEFVYGDYKVYDVRKMIAKSEQEIGKATAKYFFYSNIMNFFKTEITLANGEIRKRPLIETNGETGEIVWDKGRDFATVRKVLSMPQVNIVKKTEVQTGGFSKESILPKRNSDKLIARKKDWDPKKYGGFDSPTVAYSVLVVAKVEKGKSKKLKSVKELLGITIMERSSFEKNPIDFLEAKGYKEVKKDLIIKLPKYSLFELENGRKRMLASAGELQKGNELALPSKYVNFLYLASHYEKLKGSPEDNEQKQLFVEQHKHYLDEIIEQISEFSKRVILADANLDKVLSAYNKHRDKPIREQAENIIHLFTLTNLGAPAAFKYFDTTIDRKRYTSTKEVLDATLIHQSITGLYETRIDLSQLGGDGGGGGGGSGGTLNIEDEYRLHETSKGPDVPLGSTWLSDFPQAWAETGGMGLAFRQAPLIISLKATSTPVSIKQYPMSQEARLGIKPHIQRLLDQGILVPCQSPWNTPLLPVKKPGTNDYRPVQDLREVNKRVEDIHPTVPNPYNLLSGLPPSHQWYTVLDLKDAFFCLRLHPTSQSLFAFEWKDPEMGISGQLTWTRLPQGFKNSPTLFDEALHRDLADFRIQHPDLILLQYVDDLLLAATSELDCQQGTRALLQTLGDLGYRASAKKAQICQKQVKYLGYLLKEGQRWLTEARKETVMGQPTPKTPRQLREFLGTAGLCRLWIPGFAEMAAPLYPLTKTGTLFKWGPDQQKAYQEIKQALLTAPALGLPDLTKPFELFVDEKQGYAKGVLTQKLGPWRRPVAYLSKKLDPVAAGWPPCLRMVAAIAVLTKDVGKLTMGQPLVILAPHAVEALVKQPPDRWLSNARMTHYQALLLDTDRVQFGPIVALNPATLLPLPEEGLQHDCLDILAEAHGTRPDLTDQPLPDADHTWYTDGSSFLQEGQRRAGAAVTTETEVIWAKALPAGTSAQRAELIALTQALKMAAGKKLNVYTDSRYAFATAHIHGEIYRRRGLLTSEGKEIKNKDEILALLKALFLPKRLSIIHCPGHQKGNHAEARGNRMADQAAREVATRETPETSTLLAGKRTADGSEFEKRTADGSEFESPKKKAKVE

SEQ ID NO: 6593 - protein, 2091 aa, synthetic construct
MPAAKRVKLDGGDKKYSIGLDIGTNSVGWAVITDEYKVPSKKFKVLGNTDRHSIKKNLIGALLFDSGETAEATRLKRTARRRYTRRKNRICYLQEIFSNEMAKVDDSFFHRLEESFLVEEDKKHERHPIFGNIVDEVAYHEKYPTIYHLRKKLVDSTDKADLRLIYLALAHMIKFRGHFLIEGDLNPDNSDVDKLFIQLVQTYNQLFEENPINASGVDAKAILSARLSKSRRLENLIAQLPGEKKNGLFGNLIALSLGLTPNFKSNFDLAEDAKLQLSKDTYDDDLDNLLAQIGDQYADLFLAAKNLSDAILLSDILRVNTEITKAPLSASMIKRYDEHHQDLTLLKALVRQQLPEKYKEIFFDQSKNGYAGYIDGGASQEEFYKFIKPILEKMDGTEELLVKLNREDLLRKQRTFDNGSIPHQIHLGELHAILRRQEDFYPFLKDNREKIEKILTFRIPYYVGPLARGNSRFAWMTRKSEETITPWNFEEVVDKGASAQSFIERMTNFDKNLPNEKVLPKHSLLYEYFTVYNELTKVKYVTEGMRKPAFLSGEQKKAIVDLLFKTNRKVTVKQLKEDYFKKIECFDSVEISGVEDRFNASLGTYHDLLKIIKDKDFLDNEENEDILEDIVLTLTLFEDREMIEERLKTYAHLFDDKVMKQLKRRRYTGWGRLSRKLINGIRDKQSGKTILDFLKSDGFANRNFMQLIHDDSLTFKEDIQKAQVSGQGDSLHEHIANLAGSPAIKKGILQTVKVVDELVKVMGRHKPENIVIEMARENQTTQKGQKNSRERMKRIEEGIKELGSQILKEHPVENTQLQNEKLYLYYLQNGRDMYVDQELDINRLSDYDVDHIVPQSFLKDDSIDNKVLTRSDKARGKSDNVPSEEVVKKMKNYWRQLLNAKLITQRKFDNLTKAERGGLSELDKAGFIKRQLVETRQITKHVAQILDSRMNTKYDENDKLIREVKVITLKSKLVSDFRKDFQFYKVREINNYHHAHDAYLNAVVGTALIKKYPKLESEFVYGDYKVYDVRKMIAKSEQEIGKATAKYFFYSNIMNFFKTEITLANGEIRKRPLIETNGETGEIVWDKGRDFATVRKVLSMPQVNIVKKTEVQTGGFSKESILPKRNSDKLIARKKDWDPKKYGGFDSPTVAYSVLVVAKVEKGKSKKLKSVKELLGITIMERSSFEKNPIDFLEAKGYKEVKKDLIIKLPKYSLFELENGRKRMLASAGELQKGNELALPSKYVNFLYLASHYEKLKGSPEDNEQKQLFVEQHKHYLDEIIEQISEFSKRVILADANLDKVLSAYNKHRDKPIREQAENIIHLFTLTNLGAPAAFKYFDTTIDRKRYTSTKEVLDATLIHQSITGLYETRIDLSQLGGDGGGGGGGSGGTLNIEDEYRLHETSKGPDVPLGSTWLSDFPQAWAETGGMGLAVRQAPLIIPLKATSTPVSIKQYPMSQEARLGIKPHIQRLLDQGILVPCQSPWNTPLLPVKKPGTNDYRPVQDLREVNKRVEDIHPTVPNPYNLLSGLPPSHQWYTVLDLKDAFFCLRLHPTSQSLFAFEWRDPEMGISGQLTWTRLPQGFKNSPTLFNEALHRDLADFRIQHPDLILLQYVDDLLLAATSELDCQQGTRALLQTLGDLGYRASAKKAQICQKQVKYLGYLLKEGQRWLTEARKETVMGQPTPKTPRQLREFLGTAGFCRLWIPGFAEMAAPLYPLTKPGTLFEWGPDQQKAYQEIKQALLTAPALGLPDLTKPFELFVDEKQGYAKGVLTQKLGPWRRPVAYLSKKLDPVAAGWPPCLRMVAAIAVLTKDAGKLTMGQPLVILAPHAVEALVKQPPDRWLSNARMTHYQALLLDTDRVQFGPIVALNPATLLPLPEEGLQHDCLDILAEAHGTRPDLTDQPLPDADHTWYTDGSSFLQEGQRKAGAAVTTETEVVWAKALPAGTSAQRAELIALTQALKMAEGKKLNVYTDSRYAFATAHIHGEIYRRRGWLTSEGKEIKNKDEILALLKALFLPKRLSIIHCPGHQKGNRAEARGNRMADQAAREVATRETPETSTLLAGKRTADGSEFEKRTADGSEFESPKKKAKVE

SEQ ID NO: 6594 - protein, 2091 aa, synthetic construct
MPAAKRVKLDGGDKKYSIGLDIGTNSVGWAVITDEYKVPSKKFKVLGNTDRHSIKKNLIGALLFDSGETAEATRLKRTARRRYTRRKNRICYLQEIFSNEMAKVDDSFFHRLEESFLVEEDKKHERHPIFGNIVDEVAYHEKYPTIYHLRKKLVDSTDKADLRLIYLALAHMIKFRGHFLIEGDLNPDNSDVDKLFIQLVQTYNQLFEENPINASGVDAKAILSARLSKSRRLENLIAQLPGEKKNGLFGNLIALSLGLTPNFKSNFDLAEDAKLQLSKDTYDDDLDNLLAQIGDQYADLFLAAKNLSDAILLSDILRVNTEITKAPLSASMIKRYDEHHQDLTLLKALVRQQLPEKYKEIFFDQSKNGYAGYIDGGASQEEFYKFIKPILEKMDGTEELLVKLNREDLLRKQRTFDNGSIPHQIHLGELHAILRRQEDFYPFLKDNREKIEKILTFRIPYYVGPLARGNSRFAWMTRKSEETITPWNFEEVVDKGASAQSFIERMTNFDKNLPNEKVLPKHSLLYEYFTVYNELTKVKYVTEGMRKPAFLSGEQKKAIVDLLFKTNRKVTVKQLKEDYFKKIECFDSVEISGVEDRFNASLGTYHDLLKIIKDKDFLDNEENEDILEDIVLTLTLFEDREMIEERLKTYAHLFDDKVMKQLKRRRYTGWGRLSRKLINGIRDKQSGKTILDFLKSDGFANRNFMQLIHDDSLTFKEDIQKAQVSGQGDSLHEHIANLAGSPAIKKGILQTVKVVDELVKVMGRHKPENIVIEMARENQTTQKGQKNSRERMKRIEEGIKELGSQILKEHPVENTQLQNEKLYLYYLQNGRDMYVDQELDINRLSDYDVDHIVPQSFLKDDSIDNKVLTRSDKARGKSDNVPSEEVVKKMKNYWRQLLNAKLITQRKFDNLTKAERGGLSELDKAGFIKRQLVETRQITKHVAQILDSRMNTKYDENDKLIREVKVITLKSKLVSDFRKDFQFYKVREINNYHHAHDAYLNAVVGTALIKKYPKLESEFVYGDYKVYDVRKMIAKSEQEIGKATAKYFFYSNIMNFFKTEITLANGEIRKRPLIETNGETGEIVWDKGRDFATVRKVLSMPQVNIVKKTEVQTGGFSKESILPKRNSDKLIARKKDWDPKKYGGFDSPTVAYSVLVVAKVEKGKSKKLKSVKELLGITIMERSSFEKNPIDFLEAKGYKEVKKDLIIKLPKYSLFELENGRKRMLASAGELQKGNELALPSKYVNFLYLASHYEKLKGSPEDNEQKQLFVEQHKHYLDEIIEQISEFSKRVILADANLDKVLSAYNKHRDKPIREQAENIIHLFTLTNLGAPAAFKYFDTTIDRKRYTSTKEVLDATLIHQSITGLYETRIDLSQLGGDGGGGGGGSGGTLNIEDEYRLHETSKGPDVPLGSTWLSDFPQAWAETGGMGLAVRQAPLIIPLKATSTPVSIKQYPMSQEARLGIKPHIQRLLDQGILVPCQSPWNTPLLPVKKPGTNDYRPVQDLREVNKRVEDIHPTVPNPYNLLSGLPPSHQWYTVLDLKDAFFCLRLHPTSQSLFAFEWRDPEMGISGQLTWTRLPQGFKNSPTLFNEALHRDLADFRIQHPDLILLQYVDDLLLAATSELDCQQGTRALLQTLGDLGYRASAKKAQICQKQVKYLGYLLKEGQRWLTEARKETVMGQPTPKTPRQLREFLGKAGFCRLFIPGFAEMAAPLYPLTKPGTLFEWGPDQQKAYQEIKQALLTAPALGLPDLTKPFELFVDEKQGYAKGVLTQKLGPWRRPVAYLSKKLDPVAAGWPPCLRMVAAIAVLTKDAGKLTMGQPLVILAPHAVEALVKQPPDRWLSNARMTHYQALLLDTDRVQFGPIVALNPATLLPLPEEGLQHDCLDILAEAHGTRPDLTDQPLPDADHTWYTDGSSFLQEGQRKAGAAVTTETEVVWAKALPAGTSAQRAELIALTQALKMAEGKKLNVYTDSRYAFATAHIHGEIYRRRGWLTSEGKEIKNKDEILALLKALFLPKRLSIIHCPGHQKGNRAEARGNRMADQAAREVATRETPETSTLLAGKRTADGSEFEKRTADGSEFESPKKKAKVE

SEQ ID NO: 6595 - protein, 2111 aa, synthetic construct
MPAAKRVKLDGGDKKYSIGLDIGTNSVGWAVITDEYKVPSKKFKVLGNTDRHSIKKNLIGALLFDSGETAEATRLKRTARRRYTRRKNRICYLQEIFSNEMAKVDDSFFHRLEESFLVEEDKKHERHPIFGNIVDEVAYHEKYPTIYHLRKKLVDSTDKADLRLIYLALAHMIKFRGHFLIEGDLNPDNSDVDKLFIQLVQTYNQLFEENPINASGVDAKAILSARLSKSRRLENLIAQLPGEKKNGLFGNLIALSLGLTPNFKSNFDLAEDAKLQLSKDTYDDDLDNLLAQIGDQYADLFLAAKNLSDAILLSDILRVNTEITKAPLSASMIKRYDEHHQDLTLLKALVRQQLPEKYKEIFFDQSKNGYAGYIDGGASQEEFYKFIKPILEKMDGTEELLVKLNREDLLRKQRTFDNGSIPHQIHLGELHAILRRQEDFYPFLKDNREKIEKILTFRIPYYVGPLARGNSRFAWMTRKSEETITPWNFEEVVDKGASAQSFIERMTNFDKNLPNEKVLPKHSLLYEYFTVYNELTKVKYVTEGMRKPAFLSGEQKKAIVDLLFKTNRKVTVKQLKEDYFKKIECFDSVEISGVEDRFNASLGTYHDLLKIIKDKDFLDNEENEDILEDIVLTLTLFEDREMIEERLKTYAHLFDDKVMKQLKRRRYTGWGRLSRKLINGIRDKQSGKTILDFLKSDGFANRNFMQLIHDDSLTFKEDIQKAQVSGQGDSLHEHIANLAGSPAIKKGILQTVKVVDELVKVMGRHKPENIVIEMARENQTTQKGQKNSRERMKRIEEGIKELGSQILKEHPVENTQLQNEKLYLYYLQNGRDMYVDQELDINRLSDYDVDHIVPQSFLKDDSIDNKVLTRSDKARGKSDNVPSEEVVKKMKNYWRQLLNAKLITQRKFDNLTKAERGGLSELDKAGFIKRQLVETRQITKHVAQILDSRMNTKYDENDKLIREVKVITLKSKLVSDFRKDFQFYKVREINNYHHAHDAYLNAVVGTALIKKYPKLESEFVYGDYKVYDVRKMIAKSEQEIGKATAKYFFYSNIMNFFKTEITLANGEIRKRPLIETNGETGEIVWDKGRDFATVRKVLSMPQVNIVKKTEVQTGGFSKESILPKRNSDKLIARKKDWDPKKYGGFDSPTVAYSVLVVAKVEKGKSKKLKSVKELLGITIMERSSFEKNPIDFLEAKGYKEVKKDLIIKLPKYSLFELENGRKRMLASAGELQKGNELALPSKYVNFLYLASHYEKLKGSPEDNEQKQLFVEQHKHYLDEIIEQISEFSKRVILADANLDKVLSAYNKHRDKPIREQAENIIHLFTLTNLGAPAAFKYFDTTIDRKRYTSTKEVLDATLIHQSITGLYETRIDLSQLGGDGGGGGGGSGGTLNIEDEYRLHETSKEPDVSLGSTWLSDFPQAWAETGGMGLAVRQAPLIIPLKATSTPVSIKQYPMSQEARLGIKPHIQRLLDQGILVPCQSPWNTPLLPVKKPGTNDYRPVQDLREVNKRVEDIHPTVPNPYNLLSGLPPSHQWYTVLDLKDAFFCLRLHPTSQPLFAFEWRDPEMGISGQLTWTRLPQGFKNSPTLFNEALHRDLADFRIQHPDLILLQYVDDLLLAATSELDCQQGTRALLQTLGNLGYRASAKKAQICQKQVKYLGYLLKEGQRWLTEARKETVMGQPTPKTPRQLREFLGKAGFCRLFIPGFAEMAAPLYPLTKPGTLFNWGPDQQKAYQEIKQALLTAPALGLPDLTKPFELFVDEKQGYAKGVLTQKLGPWRRPVAYLSKKLDPVAAGWPPCLRMVAAIAVLTKDAGKLTMGQPLVILAPHAVEALVKQPPDRWLSNARMTHYQALLLDTDRVQFGPVVALNPATLLPLPEEGLQHNCLDILAEAHGTRPDLTDQPLPDADHTWYTDGSSLLQEGQRKAGAAVTTETEVIWAKALPAGTSAQRAELIALTQALKMAEGKKLNVYTDSRYAFATAHIHGEIYRRRGWLTSEGKEIKNKDEILALLKALFLPKRLSIIHCPGHQKGHSAEARGNRMADQAARKAAITETPDTSTLLIENSSPSGGSKRTADGSEFEAGKRTADGSEFEKRTADGSEFESPKKKAKVE

SEQ ID NO: 6596 - protein, 2111 aa, synthetic construct; identical to SEQ ID NO: 6595

SEQ ID NO: 6597 - protein, 2091 aa, synthetic construct
MPAAKRVKLDGGDKKYSIGLDIGTNSVGWAVITDEYKVPSKKFKVLGNTDRHSIKKNLIGALLFDSGETAEATRLKRTARRRYTRRKNRICYLQEIFSNEMAKVDDSFFHRLEESFLVEEDKKHERHPIFGNIVDEVAYHEKYPTIYHLRKKLVDSTDKADLRLIYLALAHMIKFRGHFLIEGDLNPDNSDVDKLFIQLVQTYNQLFEENPINASGVDAKAILSARLSKSRRLENLIAQLPGEKKNGLFGNLIALSLGLTPNFKSNFDLAEDAKLQLSKDTYDDDLDNLLAQIGDQYADLFLAAKNLSDAILLSDILRVNTEITKAPLSASMIKRYDEHHQDLTLLKALVRQQLPEKYKEIFFDQSKNGYAGYIDGGASQEEFYKFIKPILEKMDGTEELLVKLNREDLLRKQRTFDNGSIPHQIHLGELHAILRRQEDFYPFLKDNREKIEKILTFRIPYYVGPLARGNSRFAWMTRKSEETITPWNFEEVVDKGASAQSFIERMTNFDKNLPNEKVLPKHSLLYEYFTVYNELTKVKYVTEGMRKPAFLSGEQKKAIVDLLFKTNRKVTVKQLKEDYFKKIECFDSVEISGVEDRFNASLGTYHDLLKIIKDKDFLDNEENEDILEDIVLTLTLFEDREMIEERLKTYAHLFDDKVMKQLKRRRYTGWGRLSRKLINGIRDKQSGKTILDFLKSDGFANRNFMQLIHDDSLTFKEDIQKAQVSGQGDSLHEHIANLAGSPAIKKGILQTVKVVDELVKVMGRHKPENIVIEMARENQTTQKGQKNSRERMKRIEEGIKELGSQILKEHPVENTQLQNEKLYLYYLQNGRDMYVDQELDINRLSDYDVDHIVPQSFLKDDSIDNKVLTRSDKARGKSDNVPSEEVVKKMKNYWRQLLNAKLITQRKFDNLTKAERGGLSELDKAGFIKRQLVETRQITKHVAQILDSRMNTKYDENDKLIREVKVITLKSKLVSDFRKDFQFYKVREINNYHHAHDAYLNAVVGTALIKKYPKLESEFVYGDYKVYDVRKMIAKSEQEIGKATAKYFFYSNIMNFFKTEITLANGEIRKRPLIETNGETGEIVWDKGRDFATVRKVLSMPQVNIVKKTEVQTGGFSKESILPKRNSDKLIARKKDWDPKKYGGFDSPTVAYSVLVVAKVEKGKSKKLKSVKELLGITIMERSSFEKNPIDFLEAKGYKEVKKDLIIKLPKYSLFELENGRKRMLASAGELQKGNELALPSKYVNFLYLASHYEKLKGSPEDNEQKQLFVEQHKHYLDEIIEQISEFSKRVILADANLDKVLSAYNKHRDKPIREQAENIIHLFTLTNLGAPAAFKYFDTTIDRKRYTSTKEVLDATLIHQSITGLYETRIDLSQLGGDGGGGGGGSGGTLNIEDEYRLHEISTEPDVSPGSTWLSDFPQAWAETGGMGLAVRQAPLIIPLKATSTPVSIKQYPMSQEAKLGIKPHIQRLLDQGILVPCQSPWNTPLLPVKKPGTNDYRPVQGLREVNKRVEDIHPTVPNPYNLLSGLPTSHRWYTVLDLKDAFFCLRLHPTSQPLFASEWRDPGMGISGQLTWTRLPQGFKNSPTLFNEALHRGLADFRIQHPDLILLQYVDDLLLAATSELDCQQGTRALLKTLGNLGYRASAKKAQICQKQVKYLGYLLREGQRWLTEARKETVMGQPTPKTPRQLREFLGTAGFCRLWIPRFAEMAAPLYPLTKPGTLFNWGPDQQKAYHEIKQALLTAPALGLPDLTKPFELFVDEKQGYAKGVLTQKLGPWRRPVAYLSKKLDPVAAGWPPCLRMVAAIAVLTKDAGKLTMGQPLVILAPHAVEALVKQPPDRWLSNARMTHYQAMLLDTDRVQFGPVVALNPATLLPLPEEGAPHDCLEILAETHGTEPDLTDQPIPDADHTWYTDGSSFLQEGQRKAGAAVTTETEVIWARALPAGTSAQRAELIALTQALKMAEGKRLNVYTDSRYAFATAHIHGEIYKRRGWLTSEGREIKNKSEILALLKALFLPKRLSIIHCLGHQKGDSAEARGNRLADQAAREAAIKTPPDTSTLLAGKRTADGSEFEKRTADGSEFESPKKKAKVE

SEQ ID NO: 6598 - protein, 2082 aa, synthetic construct
MPAAKRVKLDGGDKKYSIGLDIGTNSVGWAVITDEYKVPSKKFKVLGNTDRHSIKKNLIGALLFDSGETAEATRLKRTARRRYTRRKNRICYLQEIFSNEMAKVDDSFFHRLEESFLVEEDKKHERHPIFGNIVDEVAYHEKYPTIYHLRKKLVDSTDKADLRLIYLALAHMIKFRGHFLIEGDLNPDNSDVDKLFIQLVQTYNQLFEENPINASGVDAKAILSARLSKSRRLENLIAQLPGEKKNGLFGNLIALSLGLTPNFKSNFDLAEDAKLQLSKDTYDDDLDNLLAQIGDQYADLFLAAKNLSDAILLSDILRVNTEITKAPLSASMIKRYDEHHQDLTLLKALVRQQLPEKYKEIFFDQSKNGYAGYIDGGASQEEFYKFIKPILEKMDGTEELLVKLNREDLLRKQRTFDNGSIPHQIHLGELHAILRRQEDFYPFLKDNREKIEKILTFRIPYYVGPLARGNSRFAWMTRKSEETITPWNFEEVVDKGASAQSFIERMTNFDKNLPNEKVLPKHSLLYEYFTVYNELTKVKYVTEGMRKPAFLSGEQKKAIVDLLFKTNRKVTVKQLKEDYFKKIECFDSVEISGVEDRFNASLGTYHDLLKIIKDKDFLDNEENEDILEDIVLTLTLFEDREMIEERLKTYAHLFDDKVMKQLKRRRYTGWGRLSRKLINGIRDKQSGKTILDFLKSDGFANRNFMQLIHDDSLTFKEDIQKAQVSGQGDSLHEHIANLAGSPAIKKGILQTVKVVDELVKVMGRHKPENIVIEMARENQTTQKGQKNSRERMKRIEEGIKELGSQILKEHPVENTQLQNEKLYLYYLQNGRDMYVDQELDINRLSDYDVDHIVPQSFLKDDSIDNKVLTRSDKARGKSDNVPSEEVVKKMKNYWRQLLNAKLITQRKFDNLTKAERGGLSELDKAGFIKRQLVETRQITKHVAQILDSRMNTKYDENDKLIREVKVITLKSKLVSDFRKDFQFYKVREINNYHHAHDAYLNAVVGTALIKKYPKLESEFVYGDYKVYDVRKMIAKSEQEIGKATAKYFFYSNIMNFFKTEITLANGEIRKRPLIETNGETGEIVWDKGRDFATVRKVLSMPQVNIVKKTEVQTGGFSKESILPKRNSDKLIARKKDWDPKKYGGFDSPTVAYSVLVVAKVEKGKSKKLKSVKELLGITIMERSSFEKNPIDFLEAKGYKEVKKDLIIKLPKYSLFELENGRKRMLASAGELQKGNELALPSKYVNFLYLASHYEKLKGSPEDNEQKQLFVEQHKHYLDEIIEQISEFSKRVILADANLDKVLSAYNKHRDKPIREQAENIIHLFTLTNLGAPAAFKYFDTTIDRKRYTSTKEVLDATLIHQSITGLYETRIDLSQLGGDGGGGGGGSGGIPWLMKKPLQLTTLVPLQEYEERLLKQTMLTGSYKEKLQSLFLKYDALWQHWENQVGHRRIKPHHIATGTVNPRPQKQYPINPKAKASIQTVINDLLKQGVLIQQNSIMNTPVYPVPKPDGKWRMVLDYREVNKTIPLIAAQNQHSAGILSSIFRGKYKTTLDLSNGFWAHSITPESYWLTAFTWLGQQYCWTRLPQGFLNSPALFNADVVDLLKEVPNVQVYVDDIYISHDDPREHLEQLEKVFSLLLNAGYVVSLKKSEIAQHEVEFLGFNITKEGRGLTETFKQKLLNITPPRDLKQLQSILGKLNFARNFIPNFSELVKPLYNIIATAPGKYITWTTDNSQQLQNIISMLNSAENLEERNPEVRLIMKVNTSPSAGYIRFYNEFAKRPIMYLNYVYTKAEVKFTNTEKLLTTIHKGLIKALDLGMGQEILVYSPIVSMTKIQKTPLPERKALPIRWITWMSYLEDPRIQFHYDKTLPELQQVPTVTDDIIAKIKHPSEFSMVFYTDGSAIKHPNVNKSHNAGMGIAQVQFKPEFTVINTWSIPLGDHTAQLAEVAAVEFACKKALKIDGPVLIVTDSFYVAESVNKELPYWQSNGFFNNKKKPLKHVSKWKSIADCIQLKPDIIIIHEKGHQPTASTFHTEGNNLADKLATQGSYVVNAGKRTADGSEFEKRTADGSEFESPKKKAKVE

SEQ ID NO: 6599 - protein, 2089 aa, synthetic construct
MPAAKRVKLDGGDKKYSIGLDIGTNSVGWAVITDEYKVPSKKFKVLGNTDRHSIKKNLIGALLFDSGETAEATRLKRTARRRYTRRKNRICYLQEIFSNEMAKVDDSFFHRLEESFLVEEDKKHERHPIFGNIVDEVAYHEKYPTIYHLRKKLVDSTDKADLRLIYLALAHMIKFRGHFLIEGDLNPDNSDVDKLFIQLVQTYNQLFEENPINASGVDAKAILSARLSKSRRLENLIAQLPGEKKNGLFGNLIALSLGLTPNFKSNFDLAEDAKLQLSKDTYDDDLDNLLAQIGDQYADLFLAAKNLSDAILLSDILRVNTEITKAPLSASMIKRYDEHHQDLTLLKALVRQQLPEKYKEIFFDQSKNGYAGYIDGGASQEEFYKFIKPILEKMDGTEELLVKLNREDLLRKQRTFDNGSIPHQIHLGELHAILRRQEDFYPFLKDNREKIEKILTFRIPYYVGPLARGNSRFAWMTRKSEETITPWNFEEVVDKGASAQSFIERMTNFDKNLPNEKVLPKHSLLYEYFTVYNELTKVKYVTEGMRKPAFLSGEQKKAIVDLLFKTNRKVTVKQLKEDYFKKIECFDSVEISGVEDRFNASLGTYHDLLKIIKDKDFLDNEENEDILEDIVLTLTLFEDREMIEERLKTYAHLFDDKVMKQLKRRRYTGWGRLSRKLINGIRDKQSGKTILDFLKSDGFANRNFMQLIHDDSLTFKEDIQKAQVSGQGDSLHEHIANLAGSPAIKKGILQTVKVVDELVKVMGRHKPENIVIEMARENQTTQKGQKNSRERMKRIEEGIKELGSQILKEHPVENTQLQNEKLYLYYLQNGRDMYVDQELDINRLSDYDVDHIVPQSFLKDDSIDNKVLTRSDKARGKSDNVPSEEVVKKMKNYWRQLLNAKLITQRKFDNLTKAERGGLSELDKAGFIKRQLVETRQITKHVAQILDSRMNTKYDENDKLIREVKVITLKSKLVSDFRKDFQFYKVREINNYHHAHDAYLNAVVGTALIKKYPKLESEFVYGDYKVYDVRKMIAKSEQEIGKATAKYFFYSNIMNFFKTEITLANGEIRKRPLIETNGETGEIVWDKGRDFATVRKVLSMPQVNIVKKTEVQTGGFSKESILPKRNSDKLIARKKDWDPKKYGGFDSPTVAYSVLVVAKVEKGKSKKLKSVKELLGITIMERSSFEKNPIDFLEAKGYKEVKKDLIIKLPKYSLFELENGRKRMLASAGELQKGNELALPSKYVNFLYLASHYEKLKGSPEDNEQKQLFVEQHKHYLDEIIEQISEFSKRVILADANLDKVLSAYNKHRDKPIREQAENIIHLFTLTNLGAPAAFKYFDTTIDRKRYTSTKEVLDATLIHQSITGLYETRIDLSQLGGDGGGGGGGSGGVLNLEEEYRLHEKPVPSSIDPSWLQLFPTVWAERAGMGLANQVPPVVVELRSGASPVAVRQYPMSKEAREGIRPHIQRFLDLGVLVPCQSPWNTPLLPVKKPGTNDYRPVQDLREINKRVQDIHPTVPNPYNLLSSLPPSHTWYSVLDLKDAFFCLKLHPNSQPLFAFEWRDPEKGNTGQLTWTRLPQGFKNSPTLFNEALHRDLAPFRALNPQVVLLQYVDDLLVAAPTYRDCKEGTQKLLQELSKLGYRVSAKKAQLCQKEVTYLGYLLKEGKRWLTPARKATVMKIPPPTTPRQVREFLGTAGFCRLWIPGFASLAAPLYPLTKPSIPFIWTEEHQKAFDRIKEALLSAPALALPDLTKPFTLYVDERAGVARGVLTQTLGPWRRPVAYLSKKLDPVASGWPTCLKAVAAVALLLKDADKLTLGQNVTVIASHSLESIVRQPPDRWMTNARMTHYQSLLLNERVSFAPPAVLNPATLLPVESEATPVHRCSEILAEETGTRRDLKDQPLPGVPAWYTDGSSFIAEGKRRAGAAIVDGKRTVWASSLPEGTSAQKAELVALTQALRLAEGKDINIYTDSRYAFATAHIHGAIYKQRGWLTSAGKDIKNKEEILALLEAIHLPKRVAIIHCPGHQKGNDPVATGNRRADEAAKQAALSTRVLAETTKPAGKRTADGSEFEKRTADGSEFESPKKKAKVE

SEQ ID NO: 6600 - protein, 2089 aa, synthetic construct
MPAAKRVKLDGGDKKYSIGLDIGTNSVGWAVITDEYKVPSKKFKVLGNTDRHSIKKNLIGALLFDSGETAEATRLKRTARRRYTRRKNRICYLQEIFSNEMAKVDDSFFHRLEESFLVEEDKKHERHPIFGNIVDEVAYHEKYPTIYHLRKKLVDSTDKADLRLIYLALAHMIKFRGHFLIEGDLNPDNSDVDKLFIQLVQTYNQLFEENPINASGVDAKAILSARLSKSRRLENLIAQLPGEKKNGLFGNLIALSLGLTPNFKSNFDLAEDAKLQLSKDTYDDDLDNLLAQIGDQYADLFLAAKNLSDAILLSDILRVNTEITKAPLSASMIKRYDEHHQDLTLLKALVRQQLPEKYKEIFFDQSKNGYAGYIDGGASQEEFYKFIKPILEKMDGTEELLVKLNREDLLRKQRTFDNGSIPHQIHLGELHAILRRQEDFYPFLKDNREKIEKILTFRIPYYVGPLARGNSRFAWMTRKSEETITPWNFEEVVDKGASAQSFIERMTNFDKNLPNEKVLPKHSLLYEYFTVYNELTKVKYVTEGMRKPAFLSGEQKKAIVDLLFKTNRKVTVKQLKEDYFKKIECFDSVEISGVEDRFNASLGTYHDLLKIIKDKDFLDNEENEDILEDIVLTLTLFEDREMIEERLKTYAHLFDDKVMKQLKRRRYTGWGRLSRKLINGIRDKQSGKTILDFLKSDGFANRNFMQLIHDDSLTFKEDIQKAQVSGQGDSLHEHIANLAGSPAIKKGILQTVKVVDELVKVMGRHKPENIVIEMARENQTTQKGQKNSRERMKRIEEGIKELGSQILKEHPVENTQLQNEKLYLYYLQNGRDMYVDQELDINRLSDYDVDHIVPQSFLKDDSIDNKVLTRSDKARGKSDNVPSEEVVKKMKNYWRQLLNAKLITQRKFDNLTKAERGGLSELDKAGFIKRQLVETRQITKHVAQILDSRMNTKYDENDKLIREVKVITLKSKLVSDFRKDFQFYKVREINNYHHAHDAYLNAVVGTALIKKYPKLESEFVYGDYKVYDVRKMIAKSEQEIGKATAKYFFYSNIMNFFKTEITLANGEIRKRPLIETNGETGEIVWDKGRDFATVRKVLSMPQVNIVKKTEVQTGGFSKESILPKRNSDKLIARKKDWDPKKYGGFDSPTVAYSVLVVAKVEKGKSKKLKSVKELLGITIMERSSFEKNPIDFLEAKGYKEVKKDLIIKLPKYSLFELENGRKRMLASAGELQKGNELALPSKYVNFLYLASHYEKLKGSPEDNEQKQLFVEQHKHYLDEIIEQISEFSKRVILADANLDKVLSAYNKHRDKPIREQAENIIHLFTLTNLGAPAAFKYFDTTIDRKRYTSTKEVLDATLIHQSITGLYETRIDLSQLGGDGGGGGGGSGGVLNLEEEYRLHEKPVPSSIDPSWLQLFPTVWAERAGMGLANQVPPVVVELRSGASPVAVRQYPMSKEAREGIRPHIQRFLDLGVLVPCQSPWNTPLLPVKKPGTNDYRPVQDLREINKRVQDIHPTVPNPYNLLSSLPPSHTWYSVLDLKDAFFCLKLHPNSQPLFAFEWRDPEKGNTGQLTWTRLPQGFKNSPTLFNEALHRDLAPFRALNPQVVLLQYVDDLLVAAPTYRDCKEGTQKLLQELSKLGYRVSAKKAQLCQKEVTYLGYLLKEGKRWLTPARKATVMKIPPPTTPRQVREFLGKAGFCRLFIPGFASLAAPLYPLTKPSIPFIWTEEHQKAFDRIKEALLSAPALALPDLTKPFTLYVDERAGVARGVLTQTLGPWRRPVAYLSKKLDPVASGWPTCLKAVAAVALLLKDADKLTLGQNVTVIASHSLESIVRQPPDRWMTNARMTHYQSLLLNERVSFAPPAVLNPATLLPVESEATPVHRCSEILAEETGTRRDLKDQPLPGVPAWYTDGSSFIAEGKRRAGAAIVDGKRTVWASSLPEGTSAQKAELVALTQALRLAEGKDINIYTDSRYAFATAHIHGAIYKQRGWLTSAGKDIKNKEEILALLEAIHLPKRVAIIHCPGHQKGNDPVATGNRRADEAAKQAALSTRVLAETTKPAGKRTADGSEFEKRTADGSEFESPKKKAKVE

SEQ ID NO: 6601 - protein, 2091 aa, synthetic construct
MPAAKRVKLDGGDKKYSIGLDIGTNSVGWAVITDEYKVPSKKFKVLGNTDRHSIKKNLIGALLFDSGETAEATRLKRTARRRYTRRKNRICYLQEIFSNEMAKVDDSFFHRLEESFLVEEDKKHERHPIFGNIVDEVAYHEKYPTIYHLRKKLVDSTDKADLRLIYLALAHMIKFRGHFLIEGDLNPDNSDVDKLFIQLVQTYNQLFEENPINASGVDAKAILSARLSKSRRLENLIAQLPGEKKNGLFGNLIALSLGLTPNFKSNFDLAEDAKLQLSKDTYDDDLDNLLAQIGDQYADLFLAAKNLSDAILLSDILRVNTEITKAPLSASMIKRYDEHHQDLTLLKALVRQQLPEKYKEIFFDQSKNGYAGYIDGGASQEEFYKFIKPILEKMDGTEELLVKLNREDLLRKQRTFDNGSIPHQIHLGELHAILRRQEDFYPFLKDNREKIEKILTFRIPYYVGPLARGNSRFAWMTRKSEETITPWNFEEVVDKGASAQSFIERMTNFDKNLPNEKVLPKHSLLYEYFTVYNELTKVKYVTEGMRKPAFLSGEQKKAIVDLLFKTNRKVTVKQLKEDYFKKIECFDSVEISGVEDRFNASLGTYHDLLKIIKDKDFLDNEENEDILEDIVLTLTLFEDREMIEERLKTYAHLFDDKVMKQLKRRRYTGWGRLSRKLINGIRDKQSGKTILDFLKSDGFANRNFMQLIHDDSLTFKEDIQKAQVSGQGDSLHEHIANLAGSPAIKKGILQTVKVVDELVKVMGRHKPENIVIEMARENQTTQKGQKNSRERMKRIEEGIKELGSQILKEHPVENTQLQNEKLYLYYLQNGRDMYVDQELDINRLSDYDVDHIVPQSFLKDDSIDNKVLTRSDKARGKSDNVPSEEVVKKMKNYWRQLLNAKLITQRKFDNLTKAERGGLSELDKAGFIKRQLVETRQITKHVAQILDSRMNTKYDENDKLIREVKVITLKSKLVSDFRKDFQFYKVREINNYHHAHDAYLNAVVGTALIKKYPKLESEFVYGDYKVYDVRKMIAKSEQEIGKATAKYFFYSNIMNFFKTEITLANGEIRKRPLIETNGETGEIVWDKGRDFATVRKVLSMPQVNIVKKTEVQTGGFSKESILPKRNSDKLIARKKDWDPKKYGGFDSPTVAYSVLVVAKVEKGKSKKLKSVKELLGITIMERSSFEKNPIDFLEAKGYKEVKKDLIIKLPKYSLFELENGRKRMLASAGELQKGNELALPSKYVNFLYLASHYEKLKGSPEDNEQKQLFVEQHKHYLDEIIEQISEFSKRVILADANLDKVLSAYNKHRDKPIREQAENIIHLFTLTNLGAPAAFKYFDTTIDRKRYTSTKEVLDATLIHQSITGLYETRIDLSQLGGDGGGGGGGSGGTLNIEDEYRLHETSKEPDVPLGSTWLSDFPQAWAETGGMGLAVRQAPLIIPLKATSTPVSIKQYPMSQEARLGIKPHIQRLLDQGILVPCQSPWNTPLLPVKKPGTNDYRPVQDLREVNKRVEDIHPTVPNPYNLLSGLPPSHQWYTVLDLKDAFFCLRLHPTSQPLFAFEWRDPEMGISGQLTWTRLPQGFKNSPTLFNEALHRDLADFRIQHPDLILLQYVDDLLLAATSEQDCQRGTRALLQTLGNLGYRASAKKAQICQKQVKYLGYLLKEGQRWLTEARKETVMGQPTPKTPRQLREFLGKAGFCRLFIPGFAEMAAPLYPLTKPGTLFNWGPDQQKAYQEIKQALLTAPALGLPDLTKPFELFVDEKQGYAKGVLTQKLGPWRRPVAYLSKKLDPVAAGWPPCLRMVAAIAVLTKDAGKLTMGQPLVILAPHAVEALVKQPPDRWLSNARMTHYQAMLLDTDRVQFGPVVALNPATLLPLPEKEAPHDCLEILAETHGTRPDLTDQPIPDADYTWYTDGSSFLQEGQRRAGAAVTTETEVIWARALPAGTSAQRAELIALTQALKMAEGKKLNVYTDSRYAFATAHVHGEIYRRRGWLTSEGREIKNKNEILALLKALFLPKRLSIIHCPGHQKGNSAEARGNRMADQAAREAAMKAVLETSTLLAGKRTADGSEFEKRTADGSEFESPKKKAKVE

SEQ ID NO: 6602 - protein, 2168 aa, synthetic construct
MPAAKRVKLDGGDKKYSIGLDIGTNSVGWAVITDEYKVPSKKFKVLGNTDRHSIKKNLIGALLFDSGETAEATRLKRTARRRYTRRKNRICYLQEIFSNEMAKVDDSFFHRLEESFLVEEDKKHERHPIFGNIVDEVAYHEKYPTIYHLRKKLVDSTDKADLRLIYLALAHMIKFRGHFLIEGDLNPDNSDVDKLFIQLVQTYNQLFEENPINASGVDAKAILSARLSKSRRLENLIAQLPGEKKNGLFGNLIALSLGLTPNFKSNFDLAEDAKLQLSKDTYDDDLDNLLAQIGDQYADLFLAAKNLSDAILLSDILRVNTEITKAPLSASMIKRYDEHHQDLTLLKALVRQQLPEKYKEIFFDQSKNGYAGYIDGGASQEEFYKFIKPILEKMDGTEELLVKLNREDLLRKQRTFDNGSIPHQIHLGELHAILRRQEDFYPFLKDNREKIEKILTFRIPYYVGPLARGNSRFAWMTRKSEETITPWNFEEVVDKGASAQSFIERMTNFDKNLPNEKVLPKHSLLYEYFTVYNELTKVKYVTEGMRKPAFLSGEQKKAIVDLLFKTNRKVTVKQLKEDYFKKIECFDSVEISGVEDRFNASLGTYHDLLKIIKDKDFLDNEENEDILEDIVLTLTLFEDREMIEERLKTYAHLFDDKVMKQLKRRRYTGWGRLSRKLINGIRDKQSGKTILDFLKSDGFANRNFMQLIHDDSLTFKEDIQKAQVSGQGDSLHEHIANLAGSPAIKKGILQTVKVVDELVKVMGRHKPENIVIEMARENQTTQKGQKNSRERMKRIEEGIKELGSQILKEHPVENTQLQNEKLYLYYLQNGRDMYVDQELDINRLSDYDVDHIVPQSFLKDDSIDNKVLTRSDKARGKSDNVPSEEVVKKMKNYWRQLLNAKLITQRKFDNLTKAERGGLSELDKAGFIKRQLVETRQITKHVAQILDSRMNTKYDENDKLIREVKVITLKSKLVSDFRKDFQFYKVREINNYHHAHDAYLNAVVGTALIKKYPKLESEFVYGDYKVYDVRKMIAKSEQEIGKATAKYFFYSNIMNFFKTEITLANGEIRKRPLIETNGETGEIVWDKGRDFATVRKVLSMPQVNIVKKTEVQTGGFSKESILPKRNSDKLIARKKDWDPKKYGGFDSPTVAYSVLVVAKVEKGKSKKLKSVKELLGITIMERSSFEKNPIDFLEAKGYKEVKKDLIIKLPKYSLFELENGRKRMLASAGELQKGNELALPSKYVNFLYLASHYEKLKGSPEDNEQKQLFVEQHKHYLDEIIEQISEFSKRVILADANLDKVLSAYNKHRDKPIREQAENIIHLFTLTNLGAPAAFKYFDTTIDRKRYTSTKEVLDATLIHQSITGLYETRIDLSQLGGDGGGGSGSSGGMDLLKPLTVERKGVKIKGYWNSQADITCVPKDLLQGEEPVRQQNVTTIHGTQEGDVYYVNLKIDGRRINTEVIGTTLDYAIITPGDVPWILKKPLELTIKLDLEEQQGTLLNNSILSKKGKEELKQLFEKYSALWQSWENQVGHRRIRPHKIATGTVKPTPQKQYHINPKAKPDIQIVINDLLKQGVLIQKESTMNTPVYPVPKPNGRWRMVLDYRAVNKVTPLIAVQNQHSYGILGSLFKGRYKTTIDLSNGFWAHPIVPEDYWITAFTWQGKQYCWTVLPQGFLNSPGLFTGDVVDLLQGIPNVEVYVDDVYISHDSEKEHLEYLDILFNRLKEAGYIISLKKSNIANSIVDFLGFQITNEGRGLTDTFKEKLENITAPTTLKQLQSILGLLNFARNFIPDFTELIAPLYALIPKSTKNYVPWQIEHSTTLETLITKLNGAEYLQGRKGDKTLIMKVNASYTTGYIRYYNEGEKKPISYVSIVFSKTELKFTELEKLLTTVHKGLLKALDLSMGQNIHVYSPIVSMQNIQKTPQTAKKALASRWLSWLSYLEDPRIRFFYDPQMPALKDLPAVDTGKDNKKHPSNFQHIFYTDGSAITSPTKEGHLNAGMGIVYFINKDGNLQKQQEWSISLGNHTAQFAEIAAFEFALKKCLPLGGNILVVTDSNYVAKAYNEELDVWASNGFVNNRKKPLKHISKWKSVADLKRLRPDVVVTHEPGHQKLDSSPHAYGNNLADQLATQASFKVHAGKRTADGSEFEKRTADGSEFESPKKKAKVE

SEQ ID NO: 6603 - protein, 2090 aa, synthetic construct
MPAAKRVKLDGGDKKYSIGLDIGTNSVGWAVITDEYKVPSKKFKVLGNTDRHSIKKNLIGALLFDSGETAEATRLKRTARRRYTRRKNRICYLQEIFSNEMAKVDDSFFHRLEESFLVEEDKKHERHPIFGNIVDEVAYHEKYPTIYHLRKKLVDSTDKADLRLIYLALAHMIKFRGHFLIEGDLNPDNSDVDKLFIQLVQTYNQLFEENPINASGVDAKAILSARLSKSRRLENLIAQLPGEKKNGLFGNLIALSLGLTPNFKSNFDLAEDAKLQLSKDTYDDDLDNLLAQIGDQYADLFLAAKNLSDAILLSDILRVNTEITKAPLSASMIKRYDEHHQDLTLLKALVRQQLPEKYKEIFFDQSKNGYAGYIDGGASQEEFYKFIKPILEKMDGTEELLVKLNREDLLRKQRTFDNGSIPHQIHLGELHAILRRQEDFYPFLKDNREKIEKILTFRIPYYVGPLARGNSRFAWMTRKSEETITPWNFEEVVDKGASAQSFIERMTNFDKNLPNEKVLPKHSLLYEYFTVYNELTKVKYVTEGMRKPAFLSGEQKKAIVDLLFKTNRKVTVKQLKEDYFKKIECFDSVEISGVEDRFNASLGTYHDLLKIIKDKDFLDNEENEDILEDIVLTLTLFEDREMIEERLKTYAHLFDDKVMKQLKRRRYTGWGRLSRKLINGIRDKQSGKTILDFLKSDGFANRNFMQLIHDDSLTFKEDIQKAQVSGQGDSLHEHIANLAGSPAIKKGILQTVKVVDELVKVMGRHKPENIVIEMARENQTTQKGQKNSRERMKRIEEGIKELGSQILKEHPVENTQLQNEKLYLYYLQNGRDMYVDQELDINRLSDYDVDHIVPQSFLKDDSIDNKVLTRSDKARGKSDNVPSEEVVKKMKNYWRQLLNAKLITQRKFDNLTKAERGGLSELDKAGFIKRQLVETRQITKHVAQILDSRMNTKYDENDKLIREVKVITLKSKLVSDFRKDFQFYKVREINNYHHAHDAYLNAVVGTALIKKYPKLESEFVYGDYKVYDVRKMIAKSEQEIGKATAKYFFYSNIMNFFKTEITLANGEIRKRPLIETNGETGEIVWDKGRDFATVRKVLSMPQVNIVKKTEVQTGGFSKESILPKRNSDKLIARKKDWDPKKYGGFDSPTVAYSVLVVAKVEKGKSKKLKSVKELLGITIMERSSFEKNPIDFLEAKGYKEVKKDLIIKLPKYSLFELENGRKRMLASAGELQKGNELALPSKYVNFLYLASHYEKLKGSPEDNEQKQLFVEQHKHYLDEIIEQISEFSKRVILADANLDKVLSAYNKHRDKPIREQAENIIHLFTLTNLGAPAAFKYFDTTIDRKRYTSTKEVLDATLIHQSITGLYETRIDLSQLGGDGGGGSGSSGGTLQLEEEYRLFEPESTQKQEMDIWLKNFPQAWAETGGMGTAHCQAPVLIQLKATATPISIRQYPMPHEAYQGIKPHIRRMLDQGILKPCQSPWNTPLLPVKKPGTEDYRPVQDLREVNKRVEDIHPTVPNPYNLLSTLPPSHPWYTVLDLKDAFFCLRLHSESQLLFAFEWRDPEIGLSGQLTWTRLPQGFKNSPTLFNEALHSDLADFRVRYPALVLLQYVDDLLLAAATRTECLEGTKALLETLGNKGYRASAKKAQICLQEVTYLGYSLKDGQRWLTKARKEAILSIPVPKNSRQVREFLGKAGYCRLFIPGFAELAAPLYPLTRPGTLFQWGTEQQLAFEDIKKALLSSPALGLPDITKPFELFIDENSGFAKGVLVQKLGPWKRPVAYLSKKLDTVASGWPPCLRMVAAIAILVKDAGKLTLGQPLTILTSHPVEALVRQPPNKWLSNARMTHYQAMLLDAERVHFGPTVSLNPATLLPLPSGGNHHDCLQILAETHGTRPDLTDQPLPDADLTWYTDGSSFIRNGEREAGAAVTTESEVIWAAPLPPGTSAQRAELIALTQALKMAEGKKLTVYTDSRYAFATTHVHGEIYRRRGWLTSEGKEIKNKNEILALLEALFLPKRLSIIHCPGHQKGDSPQAKGNRLADDTAKKAATETHSSLTVLPAGKRTADGSEFEKRTADGSEFESPKKKAKVE

SEQ ID NO: 6604 - protein, 2213 aa, synthetic construct
MPAAKRVKLDGGDKKYSIGLDIGTNSVGWAVITDEYKVPSKKFKVLGNTDRHSIKKNLIGALLFDSGETAEATRLKRTARRRYTRRKNRICYLQEIFSNEMAKVDDSFFHRLEESFLVEEDKKHERHPIFGNIVDEVAYHEKYPTIYHLRKKLVDSTDKADLRLIYLALAHMIKFRGHFLIEGDLNPDNSDVDKLFIQLVQTYNQLFEENPINASGVDAKAILSARLSKSRRLENLIAQLPGEKKNGLFGNLIALSLGLTPNFKSNFDLAEDAKLQLSKDTYDDDLDNLLAQIGDQYADLFLAAKNLSDAILLSDILRVNTEITKAPLSASMIKRYDEHHQDLTLLKALVRQQLPEKYKEIFFDQSKNGYAGYIDGGASQEEFYKFIKPILEKMDGTEELLVKLNREDLLRKQRTFDNGSIPHQIHLGELHAILRRQEDFYPFLKDNREKIEKILTFRIPYYVGPLARGNSRFAWMTRKSEETITPWNFEEVVDKGASAQSFIERMTNFDKNLPNEKVLPKHSLLYEYFTVYNELTKVKYVTEGMRKPAFLSGEQKKAIVDLLFKTNRKVTVKQLKEDYFKKIECFDSVEISGVEDRFNASLGTYHDLLKIIKDKDFLDNEENEDILEDIVLTLTLFEDREMIEERLKTYAHLFDDKVMKQLKRRRYTGWGRLSRKLINGIRDKQSGKTILDFLKSDGFANRNFMQLIHDDSLTFKEDIQKAQVSGQGDSLHEHIANLAGSPAIKKGILQTVKVVDELVKVMGRHKPENIVIEMARENQTTQKGQKNSRERMKRIEEGIKELGSQILKEHPVENTQLQNEKLYLYYLQNGRDMYVDQELDINRLSDYDVDHIVPQSFLKDDSIDNKVLTRSDKARGKSDNVPSEEVVKKMKNYWRQLLNAKLITQRKFDNLTKAERGGLSELDKAGFIKRQLVETRQITKHVAQILDSRMNTKYDENDKLIREVKVITLKSKLVSDFRKDFQFYKVREINNYHHAHDAYLNAVVGTALIKKYPKLESEFVYGDYKVYDVRKMIAKSEQEIGKATAKYFFYSNIMNFFKTEITLANGEIRKRPLIETNGETGEIVWDKGRDFATVRKVLSMPQVNIVKKTEVQTGGFSKESILPKRNSDKLIARKKDWDPKKYGGFDSPTVAYSVLVVAKVEKGKSKKLKSVKELLGITIMERSSFEKNPIDFLEAKGYKEVKKDLIIKLPKYSLFELENGRKRMLASAGELQKGNELALPSKYVNFLYLASHYEKLKGSPEDNEQKQLFVEQHKHYLDEIIEQISEFSKRVILADANLDKVLSAYNKHRDKPIREQAENIIHLFTLTNLGAPAAFKYFDTTIDRKRYTSTKEVLDATLIHQSITGLYETRIDLSQLGGDGGGGSGSSGGTLGDQGSRGSDPLPEPRVTLTVEGIPTEFLVNTGAEHSVLTKPMGKMGSKRTVVAGATGSKVYPWTTKRLLKIGQKQVTHSFLVIPECPAPLLGRDLLTKLKAQIQFSTEGPQVTWEDRPAMCLVLNLEEEYRLHEKPVPPSIDPSWLQLFPMVWAEKAGMGLANQVPPVVVELKSDASPVAVRQYPMSKEAREGIRPHIQRFLDLGILVPCQSPWNTPLLPVKKPGTNDYRPVQDLREVNKRVQDIHPTVPNPYNLLSSLPPSHTWYSVLDLKDAFFCLKLHPNSQPLFAFEWRDPEKGNTGQLTWTRLPQGFKNSPTLFDEALHRDLASFRALNPQVVMLQYVDDLLVAAPTYRDCKEGTRRLLQELSKLGYRVSAKKAQLCREEVTYLGYLLKGGKRWLTPARKATVMKIPTPTTPRQVREFLGTAGFCRLWIPGFASLAAPLYPLTREKVPFTWTEAHQEAFGRIKEALLSAPALALPDLTKPFALYVDEKEGVARGVLTQTLGPWRRPVAYLSKKLDPVASGWPTCLKAIAAVALLLKDADKLTLGQNVLVIAPHNLESIVRQPPDRWMTNARMTHYQSLLLNERVSFAPPAILNPATLLPVESDDTPIHICSEILAEETGTRPDLRDQPLPGVPAWYTDGSSFIMDGRRQAGAAIVDNKRTVWASNLPEGTSAQKAELIALTQALRLAEGKSINIYTDSRYAFATAHVHGAIYKQRGLLTSAGKDIKNKEEILALLEAIHLPKRVAIIHCPGHQRGTDPVATGNRKADEAAKQAAQSTRILTETTKNAGKRTADGSEFEKRTADGSEFESPKKKAKVE

SEQ ID NO: 6605 - protein, 2091 aa, synthetic construct
MPAAKRVKLDGGDKKYSIGLDIGTNSVGWAVITDEYKVPSKKFKVLGNTDRHSIKKNLIGALLFDSGETAEATRLKRTARRRYTRRKNRICYLQEIFSNEMAKVDDSFFHRLEESFLVEEDKKHERHPIFGNIVDEVAYHEKYPTIYHLRKKLVDSTDKADLRLIYLALAHMIKFRGHFLIEGDLNPDNSDVDKLFIQLVQTYNQLFEENPINASGVDAKAILSARLSKSRRLENLIAQLPGEKKNGLFGNLIALSLGLTPNFKSNFDLAEDAKLQLSKDTYDDDLDNLLAQIGDQYADLFLAAKNLSDAILLSDILRVNTEITKAPLSASMIKRYDEHHQDLTLLKALVRQQLPEKYKEIFFDQSKNGYAGYIDGGASQEEFYKFIKPILEKMDGTEELLVKLNREDLLRKQRTFDNGSIPHQIHLGELHAILRRQEDFYPFLKDNREKIEKILTFRIPYYVGPLARGNSRFAWMTRKSEETITPWNFEEVVDKGASAQSFIERMTNFDKNLPNEKVLPKHSLLYEYFTVYNELTKVKYVTEGMRKPAFLSGEQKKAIVDLLFKTNRKVTVKQLKEDYFKKIECFDSVEISGVEDRFNASLGTYHDLLKIIKDKDFLDNEENEDILEDIVLTLTLFEDREMIEERLKTYAHLFDDKVMKQLKRRRYTGWGRLSRKLINGIRDKQSGKTILDFLKSDGFANRNFMQLIHDDSLTFKEDIQKAQVSGQGDSLHEHIANLAGSPAIKKGILQTVKVVDELVKVMGRHKPENIVIEMARENQTTQKGQKNSRERMKRIEEGIKELGSQILKEHPVENTQLQNEKLYLYYLQNGRDMYVDQELDINRLSDYDVDHIVPQSFLKDDSIDNKVLTRSDKARGKSDNVPSEEVVKKMKNYWRQLLNAKLITQRKFDNLTKAERGGLSELDKAGFIKRQLVETRQITKHVAQILDSRMNTKYDENDKLIREVKVITLKSKLVSDFRKDFQFYKVREINNYHHAHDAYLNAVVGTALIKKYPKLESEFVYGDYKVYDVRKMIAKSEQEIGKATAKYFFYSNIMNFFKTEITLANGEIRKRPLIETNGETGEIVWDKGRDFATVRKVLSMPQVNIVKKTEVQTGGFSKESILPKRNSDKLIARKKDWDPKKYGGFDSPTVAYSVLVVAKVEKGKSKKLKSVKELLGITIMERSSFEKNPIDFLEAKGYKEVKKDLIIKLPKYSLFELENGRKRMLASAGELQKGNELALPSKYVNFLYLASHYEKLKGSPEDNEQKQLFVEQHKHYLDEIIEQISEFSKRVILADANLDKVLSAYNKHRDKPIREQAENIIHLFTLTNLGAPAAFKYFDTTIDRKRYTSTKEVLDATLIHQSITGLYETRIDLSQLGGDGGGGSGSSGGTLGIEDEYRLHETSTEPDVSLGSTWLSDFPQAWAETGGMGLAVRQAPLIIPLKATSTPVSIQQYPMSHEARLGIKPHIQRLLDQGILVPCQSPWNTPLLPVKKPGTNDYRPVQDLREVNKRVEDIHPTVPNPYNLLSGLPPSHQWYTVLDLKDAFFCLRLHPTSQPLFAFEWRDPGMGISGQLTWTRLPQGFKNSPTLFDEALHRDLADFRIQHPDLILLQYVDDILLAATSELDCQQGTRALLQTLGDLGYRASAKKAQICQKQVKYLGYLLREGQRWLTEARKETVMGQPVPKTPRQLREFLGTAGFCRLWIPGFAEMAAPLYPLTKTGTLFSWGPDQQKAYQEIKQALLTAPALGLPDLTKPFELFVDEKQGYAKGVLTQKLGPWRRPVAYLSKKLDPVAAGWPPCLRMVAAIAVLTKDAGKLTMGQPLVILAPHAVEALVKQPPDRWLSNARMTHYQAMLLDTDRVQFGPVVALNPATLLPLPEEGAPHDCLEILAETHGTRPDLTDQPIPDADHTWYTDGSSFLQEGQRKAGAAVTTETEVIWAGALPAGTSAQRAELIALTQALKMAEGKRLNVYTDSRYAFATAHIHGEIYRRRGLLTSEGREIKNKSEILALLKALFLPKRLSIIHCLGHQKGDSAEARGNRLADQAAREAAIKTPPDTSTLLAGKRTADGSEFEKRTADGSEFESPKKKAKVE

SEQ ID NO: 6606 - protein, 2091 aa, synthetic construct
MPAAKRVKLDGGDKKYSIGLDIGTNSVGWAVITDEYKVPSKKFKVLGNTDRHSIKKNLIGALLFDSGETAEATRLKRTARRRYTRRKNRICYLQEIFSNEMAKVDDSFFHRLEESFLVEEDKKHERHPIFGNIVDEVAYHEKYPTIYHLRKKLVDSTDKADLRLIYLALAHMIKFRGHFLIEGDLNPDNSDVDKLFIQLVQTYNQLFEENPINASGVDAKAILSARLSKSRRLENLIAQLPGEKKNGLFGNLIALSLGLTPNFKSNFDLAEDAKLQLSKDTYDDDLDNLLAQIGDQYADLFLAAKNLSDAILLSDILRVNTEITKAPLSASMIKRYDEHHQDLTLLKALVRQQLPEKYKEIFFDQSKNGYAGYIDGGASQEEFYKFIKPILEKMDGTEELLVKLNREDLLRKQRTFDNGSIPHQIHLGELHAILRRQEDFYPFLKDNREKIEKILTFRIPYYVGPLARGNSRFAWMTRKSEETITPWNFEEVVDKGASAQSFIERMTNFDKNLPNEKVLPKHSLLYEYFTVYNELTKVKYVTEGMRKPAFLSGEQKKAIVDLLFKTNRKVTVKQLKEDYFKKIECFDSVEISGVEDRFNASLGTYHDLLKIIKDKDFLDNEENEDILEDIVLTLTLFEDREMIEERLKTYAHLFDDKVMKQLKRRRYTGWGRLSRKLINGIRDKQSGKTILDFLKSDGFANRNFMQLIHDDSLTFKEDIQKAQVSGQGDSLHEHIANLAGSPAIKKGILQTVKVVDELVKVMGRHKPENIVIEMARENQTTQKGQKNSRERMKRIEEGIKELGSQILKEHPVENTQLQNEKLYLYYLQNGRDMYVDQELDINRLSDYDVDHIVPQSFLKDDSIDNKVLTRSDKARGKSDNVPSEEVVKKMKNYWRQLLNAKLITQRKFDNLTKAERGGLSELDKAGFIKRQLVETRQITKHVAQILDSRMNTKYDENDKLIREVKVITLKSKLVSDFRKDFQFYKVREINNYHHAHDAYLNAVVGTALIKKYPKLESEFVYGDYKVYDVRKMIAKSEQEIGKATAKYFFYSNIMNFFKTEITLANGEIRKRPLIETNGETGEIVWDKGRDFATVRKVLSMPQVNIVKKTEVQTGGFSKESILPKRNSDKLIARKKDWDPKKYGGFDSPTVAYSVLVVAKVEKGKSKKLKSVKELLGITIMERSSFEKNPIDFLEAKGYKEVKKDLIIKLPKYSLFELENGRKRMLASAGELQKGNELALPSKYVNFLYLASHYEKLKGSPEDNEQKQLFVEQHKHYLDEIIEQISEFSKRVILADANLDKVLSAYNKHRDKPIREQAENIIHLFTLTNLGAPAAFKYFDTTIDRKRYTSTKEVLDATLIHQSITGLYETRIDLSQLGGDGGGGSGSSGGTLGIEDEYRLHETSTEPDVSLGSTWLSDFPQAWAETGGMGLAVRQAPLIIPLKATSTPVSIQQYPMSHEARLGIKPHIQRLLDQGILVPCQSPWNTPLLPVKKPGTNDYRPVQDLREVNKRVEDIHPTVPNPYNLLSGLPPSHQWYTVLDLKDAFFCLRLHPTSQPLFAFEWRDPGMGISGQLTWTRLPQGFKNSPTLFNEALHRDLADFRIQHPDLILLQYVDDILLAATSELDCQQGTRALLQTLGDLGYRASAKKAQICQKQVKYLGYLLREGQRWLTEARKETVMGQPVPKTPRQLREFLGTAGFCRLWIPGFAEMAAPLYPLTKPGTLFSWGPDQQKAYQEIKQALLTAPALGLPDLTKPFELFVDEKQGYAKGVLTQKLGPWRRPVAYLSKKLDPVAAGWPPCLRMVAAIAVLTKDAGKLTMGQPLVILAPHAVEALVKQPPDRWLSNARMTHYQAMLLDTDRVQFGPVVALNPATLLPLPEEGAPHDCLEILAETHGTRPDLTDQPIPDADHTWYTDGSSFLQEGQRKAGAAVTTETEVIWAGALPAGTSAQRAELIALTQALKMAEGKRLNVYTDSRYAFATAHIHGEIYRRRGWLTSEGREIKNKSEILALLKALFLPKRLSIIHCLGHQKGDSAEARGNRLADQAAREAAIKTPPDTSTLLAGKRTADGSEFEKRTADGSEFESPKKKAKVE

SEQ ID NO: 6607 - protein, 2091 aa, synthetic construct
MPAAKRVKLDGGDKKYSIGLDIGTNSVGWAVITDEYKVPSKKFKVLGNTDRHSIKKNLIGALLFDSGETAEATRLKRTARRRYTRRKNRICYLQEIFSNEMAKVDDSFFHRLEESFLVEEDKKHERHPIFGNIVDEVAYHEKYPTIYHLRKKLVDSTDKADLRLIYLALAHMIKFRGHFLIEGDLNPDNSDVDKLFIQLVQTYNQLFEENPINASGVDAKAILSARLSKSRRLENLIAQLPGEKKNGLFGNLIALSLGLTPNFKSNFDLAEDAKLQLSKDTYDDDLDNLLAQIGDQYADLFLAAKNLSDAILLSDILRVNTEITKAPLSASMIKRYDEHHQDLTLLKALVRQQLPEKYKEIFFDQSKNGYAGYIDGGASQEEFYKFIKPILEKMDGTEELLVKLNREDLLRKQRTFDNGSIPHQIHLGELHAILRRQEDFYPFLKDNREKIEKILTFRIPYYVGPLARGNSRFAWMTRKSEETITPWNFEEVVDKGASAQSFIERMTNFDKNLPNEKVLPKHSLLYEYFTVYNELTKVKYVTEGMRKPAFLSGEQKKAIVDLLFKTNRKVTVKQLKEDYFKKIECFDSVEISGVEDRFNASLGTYHDLLKIIKDKDFLDNEENEDILEDIVLTLTLFEDREMIEERLKTYAHLFDDKVMKQLKRRRYTGWGRLSRKLINGIRDKQSGKTILDFLKSDGFANRNFMQLIHDDSLTFKEDIQKAQVSGQGDSLHEHIANLAGSPAIKKGILQTVKVVDELVKVMGRHKPENIVIEMARENQTTQKGQKNSRERMKRIEEGIKELGSQILKEHPVENTQLQNEKLYLYYLQNGRDMYVDQELDINRLSDYDVDHIVPQSFLKDDSIDNKVLTRSDKARGKSDNVPSEEVVKKMKNYWRQLLNAKLITQRKFDNLTKAERGGLSELDKAGFIKRQLVETRQITKHVAQILDSRMNTKYDENDKLIREVKVITLKSKLVSDFRKDFQFYKVREINNYHHAHDAYLNAVVGTALIKKYPKLESEFVYGDYKVYDVRKMIAKSEQEIGKATAKYFFYSNIMNFFKTEITLANGEIRKRPLIETNGETGEIVWDKGRDFATVRKVLSMPQVNIVKKTEVQTGGFSKESILPKRNSDKLIARKKDWDPKKYGGFDSPTVAYSVLVVAKVEKGKSKKLKSVKELLGITIMERSSFEKNPIDFLEAKGYKEVKKDLIIKLPKYSLFELENGRKRMLASAGELQKGNELALPSKYVNFLYLASHYEKLKGSPEDNEQKQLFVEQHKHYLDEIIEQISEFSKRVILADANLDKVLSAYNKHRDKPIREQAENIIHLFTLTNLGAPAAFKYFDTTIDRKRYTSTKEVLDATLIHQSITGLYETRIDLSQLGGDGGGGSGSSGGTLNIEDEYRLHETSKGPDVPLGSTWLSDFPQAWAETGGMGLAVRQAPLIIPLKATSTPVSIKQYPMSQEARLGIKPHIQRLLDQGILVPCQSPWNTPLLPVKKPGTNDYRPVQDLREVNKRVEDIHPTVPNPYNLLSGLPPSHQWYTVLDLKDAFFCLRLHPTSQSLFAFEWRDPEMGISGQLTWTRLPQGFKNSPTLFNEALHRDLADFRIQHPDLILLQYVDDLLLAATSELDCQQGTRALLQTLGDLGYRASAKKAQICQKQVKYLGYLLKEGQRWLTEARKETVMGQPTPKTPRQLREFLGKAGFCRLFIPGFAEMAAPLYPLTKPGTLFEWGPDQQKAYQEIKQALLTAPALGLPDLTKPFELFVDEKQGYAKGVLTQKLGPWRRPVAYLSKKLDPVAAGWPPCLRMVAAIAVLTKDAGKLTMGQPLVILAPHAVEALVKQPPDRWLSNARMTHYQALLLDTDRVQFGPIVALNPATLLPLPEEGLQHDCLDILAEAHGTRPDLTDQPLPDADHTWYTDGSSFLQEGQRKAGAAVTTETEVVWAKALPAGTSAQRAELIALTQALKMAEGKKLNVYTDSRYAFATAHIHGEIYRRRGWLTSEGKEIKNKDEILALLKALFLPKRLSIIHCPGHQKGNRAEARGNRMADQAAREVATRETPETSTLLAGKRTADGSEFEKRTADGSEFESPKKKAKVE

SEQ ID NO: 6608 - protein, 2082 aa, synthetic construct
MPAAKRVKLDGGDKKYSIGLDIGTNSVGWAVITDEYKVPSKKFKVLGNTDRHSIKKNLIGALLFDSGETAEATRLKRTARRRYTRRKNRICYLQEIFSNEMAKVDDSFFHRLEESFLVEEDKKHERHPIFGNIVDEVAYHEKYPTIYHLRKKLVDSTDKADLRLIYLALAHMIKFRGHFLIEGDLNPDNSDVDKLFIQLVQTYNQLFEENPINASGVDAKAILSARLSKSRRLENLIAQLPGEKKNGLFGNLIALSLGLTPNFKSNFDLAEDAKLQLSKDTYDDDLDNLLAQIGDQYADLFLAAKNLSDAILLSDILRVNTEITKAPLSASMIKRYDEHHQDLTLLKALVRQQLPEKYKEIFFDQSKNGYAGYIDGGASQEEFYKFIKPILEKMDGTEELLVKLNREDLLRKQRTFDNGSIPHQIHLGELHAILRRQEDFYPFLKDNREKIEKILTFRIPYYVGPLARGNSRFAWMTRKSEETITPWNFEEVVDKGASAQSFIERMTNFDKNLPNEKVLPKHSLLYEYFTVYNELTKVKYVTEGMRKPAFLSGEQKKAIVDLLFKTNRKVTVKQLKEDYFKKIECFDSVEISGVEDRFNASLGTYHDLLKIIKDKDFLDNEENEDILEDIVLTLTLFEDREMIEERLKTYAHLFDDKVMKQLKRRRYTGWGRLSRKLINGIRDKQSGKTILDFLKSDGFANRNFMQLIHDDSLTFKEDIQKAQVSGQGDSLHEHIANLAGSPAIKKGILQTVKVVDELVKVMGRHKPENIVIEMARENQTTQKGQKNSRERMKRIEEGIKELGSQILKEHPVENTQLQNEKLYLYYLQNGRDMYVDQELDINRLSDYDVDHIVPQSFLKDDSIDNKVLTRSDKARGKSDNVPSEEVVKKMKNYWRQLLNAKLITQRKFDNLTKAERGGLSELDKAGFIKRQLVETRQITKHVAQILDSRMNTKYDENDKLIREVKVITLKSKLVSDFRKDFQFYKVREINNYHHAHDAYLNAVVGTALIKKYPKLESEFVYGDYKVYDVRKMIAKSEQEIGKATAKYFFYSNIMNFFKTEITLANGEIRKRPLIETNGETGEIVWDKGRDFATVRKVLSMPQVNIVKKTEVQTGGFSKESILPKRNSDKLIARKKDWDPKKYGGFDSPTVAYSVLVVAKVEKGKSKKLKSVKELLGITIMERSSFEKNPIDFLEAKGYKEVKKDLIIKLPKYSLFELENGRKRMLASAGELQKGNELALPSKYVNFLYLASHYEKLKGSPEDNEQKQLFVEQHKHYLDEIIEQISEFSKRVILADANLDKVLSAYNKHRDKPIREQAENIIHLFTLTNLGAPAAFKYFDTTIDRKRYTSTKEVLDATLIHQSITGLYETRIDLSQLGGDGGGGSGSSGGVPWLMKKPLQLTVLVPLHEYQERLLQQTALPKEQKELLQKLFLKYDALWQHWENQVGHRRIKPHNIATGTLAPRPQKQYPINPKAKPSIQIVIDDLLKQGVLIQQNSTMNTPVYPVPKPDGKWRMVLDYREVNKTIPLIAAQNQHSAGILSSIYRGKYKTTLDLTNGFWAHPITPESYWLTAFTWQGKQYCWTRLPQGFLNSPALFNADVVDLLKEIPNVQAYVDDIYISHDDPQEHLEQLEKIFSILLNAGYVVSLKKSEIAQREVEFLGFNITKEGRGLTDTFKQKLLNITPPKDLKQLQSILGLLNFARNFIPNYSELVKPLYTIVAPANGKFISWTEDNSNQLQHIISVLNQADNLEERNPETRLIIKVNSSPSAGYIRYYNEGSKRPIMYVNYIFSKAEAKFTQTEKLLTTMHKGLIKAMDLAMGQEILVYSPIVSMTKIQRTPLPERKALPVRWITWMTYLEDPRIQFHYDKSLPELQQIPNVTEDVIAKTKHPSEFAMVFYTDGSAIKHPDVNKSHSAGMGIAQVQFIPEYKIVHQWSIPLGDHTAQLAEIAAVEFACKKALKISGPVLIVTDSFYVAESANKELPYWKSNGFLNNKKKPLRHVSKWKSIAECLQLKPDIIIMHEKGHQQPMTTLHTEGNNLADKLATQGSYVVHAGKRTADGSEFEKRTADGSEFESPKKKAKVE

SEQ ID NO: 6609 - protein, 2082 aa, synthetic construct
MPAAKRVKLDGGDKKYSIGLDIGTNSVGWAVITDEYKVPSKKFKVLGNTDRHSIKKNLIGALLFDSGETAEATRLKRTARRRYTRRKNRICYLQEIFSNEMAKVDDSFFHRLEESFLVEEDKKHERHPIFGNIVDEVAYHEKYPTIYHLRKKLVDSTDKADLRLIYLALAHMIKFRGHFLIEGDLNPDNSDVDKLFIQLVQTYNQLFEENPINASGVDAKAILSARLSKSRRLENLIAQLPGEKKNGLFGNLIALSLGLTPNFKSNFDLAEDAKLQLSKDTYDDDLDNLLAQIGDQYADLFLAAKNLSDAILLSDILRVNTEITKAPLSASMIKRYDEHHQDLTLLKALVRQQLPEKYKEIFFDQSKNGYAGYIDGGASQEEFYKFIKPILEKMDGTEELLVKLNREDLLRKQRTFDNGSIPHQIHLGELHAILRRQEDFYPFLKDNREKIEKILTFRIPYYVGPLARGNSRFAWMTRKSEETITPWNFEEVVDKGASAQSFIERMTNFDKNLPNEKVLPKHSLLYEYFTVYNELTKVKYVTEGMRKPAFLSGEQKKAIVDLLFKTNRKVTVKQLKEDYFKKIECFDSVEISGVEDRFNASLGTYHDLLKIIKDKDFLDNEENEDILEDIVLTLTLFEDREMIEERLKTYAHLFDDKVMKQLKRRRYTGWGRLSRKLINGIRDKQSGKTILDFLKSDGFANRNFMQLIHDDSLTFKEDIQKAQVSGQGDSLHEHIANLAGSPAIKKGILQTVKVVDELVKVMGRHKPENIVIEMARENQTTQKGQKNSRERMKRIEEGIKELGSQILKEHPVENTQLQNEKLYLYYLQNGRDMYVDQELDINRLSDYDVDHIVPQSFLKDDSIDNKVLTRSDKARGKSDNVPSEEVVKKMKNYWRQLLNAKLITQRKFDNLTKAERGGLSELDKAGFIKRQLVETRQITKHVAQILDSRMNTKYDENDKLIREVKVITLKSKLVSDFRKDFQFYKVREINNYHHAHDAYLNAVVGTALIKKYPKLESEFVYGDYKVYDVRKMIAKSEQEIGKATAKYFFYSNIMNFFKTEITLANGEIRKRPLIETNGETGEIVWDKGRDFATVRKVLSMPQVNIVKKTEVQTGGFSKESILPKRNSDKLIARKKDWDPKKYGGFDSPTVAYSVLVVAKVEKGKSKKLKSVKELLGITIMERSSFEKNPIDFLEAKGYKEVKKDLIIKLPKYSLFELENGRKRMLASAGELQKGNELALPSKYVNFLYLASHYEKLKGSPEDNEQKQLFVEQHKHYLDEIIEQISEFSKRVILADANLDKVLSAYNKHRDKPIREQAENIIHLFTLTNLGAPAAFKYFDTTIDRKRYTSTKEVLDATLIHQSITGLYETRIDLSQLGGDGGGGSGSSGGIPWLMKKPLQLTTLVPLQEYEERLLKQTMLTGSYKEKLQSLFLKYDALWQHWENQVGHRRIKPHHIATGTVNPRPQKQYPINPKAKASIQTVINDLLKQGVLIQQNSIMNTPVYPVPKPDGKWRMVLDYREVNKTIPLIAAQNQHSAGILSSIFRGKYKTTLDLSNGFWAHSITPESYWLTAFTWLGQQYCWTRLPQGFLNSPALFNADVVDLLKEVPNVQVYVDDIYISHDDPREHLEQLEKVFSLLLNAGYVVSLKKSEIAQHEVEFLGFNITKEGRGLTETFKQKLLNITPPRDLKQLQSILGLLNFARNFIPNFSELVKPLYNIIATAPGKYITWTTDNSQQLQNIISMLNSAENLEERNPEVRLIMKVNTSPSAGYIRFYNEFAKRPIMYLNYVYTKAEVKFTNTEKLLTTIHKGLIKALDLGMGQEILVYSPIVSMTKIQKTPLPERKALPIRWITWMSYLEDPRIQFHYDKTLPELQQVPTVTDDIIAKIKHPSEFSMVFYTDGSAIKHPNVNKSHNAGMGIAQVQFKPEFTVINTWSIPLGDHTAQLAEVAAVEFACKKALKIDGPVLIVTDSFYVAESVNKELPYWQSNGFFNNKKKPLKHVSKWKSIADCIQLKPDIIIIHEKGHQPTASTFHTEGNNLADKLATQGSYVVNAGKRTADGSEFEKRTADGSEFESPKKKAKVE

SEQ ID NO: 6610 - protein, 2082 aa, synthetic construct
MPAAKRVKLDGGDKKYSIGLDIGTNSVGWAVITDEYKVPSKKFKVLGNTDRHSIKKNLIGALLFDSGETAEATRLKRTARRRYTRRKNRICYLQEIFSNEMAKVDDSFFHRLEESFLVEEDKKHERHPIFGNIVDEVAYHEKYPTIYHLRKKLVDSTDKADLRLIYLALAHMIKFRGHFLIEGDLNPDNSDVDKLFIQLVQTYNQLFEENPINASGVDAKAILSARLSKSRRLENLIAQLPGEKKNGLFGNLIALSLGLTPNFKSNFDLAEDAKLQLSKDTYDDDLDNLLAQIGDQYADLFLAAKNLSDAILLSDILRVNTEITKAPLSASMIKRYDEHHQDLTLLKALVRQQLPEKYKEIFFDQSKNGYAGYIDGGASQEEFYKFIKPILEKMDGTEELLVKLNREDLLRKQRTFDNGSIPHQIHLGELHAILRRQEDFYPFLKDNREKIEKILTFRIPYYVGPLARGNSRFAWMTRKSEETITPWNFEEVVDKGASAQSFIERMTNFDKNLPNEKVLPKHSLLYEYFTVYNELTKVKYVTEGMRKPAFLSGEQKKAIVDLLFKTNRKVTVKQLKEDYFKKIECFDSVEISGVEDRFNASLGTYHDLLKIIKDKDFLDNEENEDILEDIVLTLTLFEDREMIEERLKTYAHLFDDKVMKQLKRRRYTGWGRLSRKLINGIRDKQSGKTILDFLKSDGFANRNFMQLIHDDSLTFKEDIQKAQVSGQGDSLHEHIANLAGSPAIKKGILQTVKVVDELVKVMGRHKPENIVIEMARENQTTQKGQKNSRERMKRIEEGIKELGSQILKEHPVENTQLQNEKLYLYYLQNGRDMYVDQELDINRLSDYDVDHIVPQSFLKDDSIDNKVLTRSDKARGKSDNVPSEEVVKKMKNYWRQLLNAKLITQRKFDNLTKAERGGLSELDKAGFIKRQLVETRQITKHVAQILDSRMNTKYDENDKLIREVKVITLKSKLVSDFRKDFQFYKVREINNYHHAHDAYLNAVVGTALIKKYPKLESEFVYGDYKVYDVRKMIAKSEQEIGKATAKYFFYSNIMNFFKTEITLANGEIRKRPLIETNGETGEIVWDKGRDFATVRKVLSMPQVNIVKKTEVQTGGFSKESILPKRNSDKLIARKKDWDPKKYGGFDSPTVAYSVLVVAKVEKGKSKKLKSVKELLGITIMERSSFEKNPIDFLEAKGYKEVKKDLIIKLPKYSLFELENGRKRMLASAGELQKGNELALPSKYVNFLYLASHYEKLKGSPEDNEQKQLFVEQHKHYLDEIIEQISEFSKRVILADANLDKVLSAYNKHRDKPIREQAENIIHLFTLTNLGAPAAFKYFDTTIDRKRYTSTKEVLDATLIHQSITGLYETRIDLSQLGGDGGGGSGSSGGIPWLMKKPLQLTTLVPLQEYEERLLKQTMLTGSYKEKLQSLFLKYDALWQHWENQVGHRRIKPHHIATGTVNPRPQKQYPINPKAKASIQTVINDLLKQGVLIQQNSIMNTPVYPVPKPDGKWRMVLDYREVNKTIPLIAAQNQHSAGILSSIFRGKYKTTLDLSNGFWAHSITPESYWLTAFTWLGQQYCWTRLPQGFLNSPALFNADVVDLLKEVPNVQVYVDDIYISHDDPREHLEQLEKVFSLLLNAGYVVSLKKSEIAQHEVEFLGFNITKEGRGLTETFKQKLLNITPPRDLKQLQSILGKLNFARNFIPNFSELVKPLYNIIATAPGKYITWTTDNSQQLQNIISMLNSAENLEERNPEVRLIMKVNTSPSAGYIRFYNEFAKRPIMYLNYVYTKAEVKFTNTEKLLTTIHKGLIKALDLGMGQEILVYSPIVSMTKIQKTPLPERKALPIRWITWMSYLEDPRIQFHYDKTLPELQQVPTVTDDIIAKIKHPSEFSMVFYTDGSAIKHPNVNKSHNAGMGIAQVQFKPEFTVINTWSIPLGDHTAQLAEVAAVEFACKKALKIDGPVLIVTDSFYVAESVNKELPYWQSNGFFNNKKKPLKHVSKWKSIADCIQLKPDIIIIHEKGHQPTASTFHTEGNNLADKLATQGSYVVNAGKRTADGSEFEKRTADGSEFESPKKKAKVE

SEQ ID NO: 6611 - protein, 2089 aa, synthetic construct
MPAAKRVKLDGGDKKYSIGLDIGTNSVGWAVITDEYKVPSKKFKVLGNTDRHSIKKNLIGALLFDSGETAEATRLKRTARRRYTRRKNRICYLQEIFSNEMAKVDDSFFHRLEESFLVEEDKKHERHPIFGNIVDEVAYHEKYPTIYHLRKKLVDSTDKADLRLIYLALAHMIKFRGHFLIEGDLNPDNSDVDKLFIQLVQTYNQLFEENPINASGVDAKAILSARLSKSRRLENLIAQLPGEKKNGLFGNLIALSLGLTPNFKSNFDLAEDAKLQLSKDTYDDDLDNLLAQIGDQYADLFLAAKNLSDAILLSDILRVNTEITKAPLSASMIKRYDEHHQDLTLLKALVRQQLPEKYKEIFFDQSKNGYAGYIDGGASQEEFYKFIKPILEKMDGTEELLVKLNREDLLRKQRTFDNGSIPHQIHLGELHAILRRQEDFYPFLKDNREKIEKILTFRIPYYVGPLARGNSRFAWMTRKSEETITPWNFEEVVDKGASAQSFIERMTNFDKNLPNEKVLPKHSLLYEYFTVYNELTKVKYVTEGMRKPAFLSGEQKKAIVDLLFKTNRKVTVKQLKEDYFKKIECFDSVEISGVEDRFNASLGTYHDLLKIIKDKDFLDNEENEDILEDIVLTLTLFEDREMIEERLKTYAHLFDDKVMKQLKRRRYTGWGRLSRKLINGIRDKQSGKTILDFLKSDGFANRNFMQLIHDDSLTFKEDIQKAQVSGQGDSLHEHIANLAGSPAIKKGILQTVKVVDELVKVMGRHKPENIVIEMARENQTTQKGQKNSRERMKRIEEGIKELGSQILKEHPVENTQLQNEKLYLYYLQNGRDMYVDQELDINRLSDYDVDHIVPQSFLKDDSIDNKVLTRSDKARGKSDNVPSEEVVKKMKNYWRQLLNAKLITQRKFDNLTKAERGGLSELDKAGFIKRQLVETRQITKHVAQILDSRMNTKYDENDKLIREVKVITLKSKLVSDFRKDFQFYKVREINNYHHAHDAYLNAVVGTALIKKYPKLESEFVYGDYKVYDVRKMIAKSEQEIGKATAKYFFYSNIMNFFKTEITLANGEIRKRPLIETNGETGEIVWDKGRDFATVRKVLSMPQVNIVKKTEVQTGGFSKESILPKRNSDKLIARKKDWDPKKYGGFDSPTVAYSVLVVAKVEKGKSKKLKSVKELLGITIMERSSFEKNPIDFLEAKGYKEVKKDLIIKLPKYSLFELENGRKRMLASAGELQKGNELALPSKYVNFLYLASHYEKLKGSPEDNEQKQLFVEQHKHYLDEIIEQISEFSKRVILADANLDKVLSAYNKHRDKPIREQAENIIHLFTLTNLGAPAAFKYFDTTIDRKRYTSTKEVLDATLIHQSITGLYETRIDLSQLGGDGGGGSGSSGGVLNLEEEYRLHEKPVPSSIDPSWLQLFPTVWAERAGMGLANQVPPVVVELRSGASPVAVRQYPMSKEAREGIRPHIQRFLDLGVLVPCQSPWNTPLLPVKKPGTNDYRPVQDLREINKRVQDIHPTVPNPYNLLSSLPPSHTWYSVLDLKDAFFCLKLHPNSQPLFAFEWRDPEKGNTGQLTWTRLPQGFKNSPTLFNEALHRDLAPFRALNPQVVLLQYVDDLLVAAPTYRDCKEGTQKLLQELSKLGYRVSAKKAQLCQKEVTYLGYLLKEGKRWLTPARKATVMKIPPPTTPRQVREFLGTAGFCRLWIPGFASLAAPLYPLTKPSIPFIWTEEHQKAFDRIKEALLSAPALALPDLTKPFTLYVDERAGVARGVLTQTLGPWRRPVAYLSKKLDPVASGWPTCLKAVAAVALLLKDADKLTLGQNVTVIASHSLESIVRQPPDRWMTNARMTHYQSLLLNERVSFAPPAVLNPATLLPVESEATPVHRCSEILAEETGTRRDLKDQPLPGVPAWYTDGSSFIAEGKRRAGAAIVDGKRTVWASSLPEGTSAQKAELVALTQALRLAEGKDINIYTDSRYAFATAHIHGAIYKQRGWLTSAGKDIKNKEEILALLEAIHLPKRVAIIHCPGHQKGNDPVATGNRRADEAAKQAALSTRVLAETTKPAGKRTADGSEFEKRTADGSEFESPKKKAKVE

SEQ ID NO: 6612 - protein, 2091 aa, synthetic construct
MPAAKRVKLDGGDKKYSIGLDIGTNSVGWAVITDEYKVPSKKFKVLGNTDRHSIKKNLIGALLFDSGETAEATRLKRTARRRYTRRKNRICYLQEIFSNEMAKVDDSFFHRLEESFLVEEDKKHERHPIFGNIVDEVAYHEKYPTIYHLRKKLVDSTDKADLRLIYLALAHMIKFRGHFLIEGDLNPDNSDVDKLFIQLVQTYNQLFEENPINASGVDAKAILSARLSKSRRLENLIAQLPGEKKNGLFGNLIALSLGLTPNFKSNFDLAEDAKLQLSKDTYDDDLDNLLAQIGDQYADLFLAAKNLSDAILLSDILRVNTEITKAPLSASMIKRYDEHHQDLTLLKALVRQQLPEKYKEIFFDQSKNGYAGYIDGGASQEEFYKFIKPILEKMDGTEELLVKLNREDLLRKQRTFDNGSIPHQIHLGELHAILRRQEDFYPFLKDNREKIEKILTFRIPYYVGPLARGNSRFAWMTRKSEETITPWNFEEVVDKGASAQSFIERMTNFDKNLPNEKVLPKHSLLYEYFTVYNELTKVKYVTEGMRKPAFLSGEQKKAIVDLLFKTNRKVTVKQLKEDYFKKIECFDSVEISGVEDRFNASLGTYHDLLKIIKDKDFLDNEENEDILEDIVLTLTLFEDREMIEERLKTYAHLFDDKVMKQLKRRRYTGWGRLSRKLINGIRDKQSGKTILDFLKSDGFANRNFMQLIHDDSLTFKEDIQKAQVSGQGDSLHEHIANLAGSPAIKKGILQTVKVVDELVKVMGRHKPENIVIEMARENQTTQKGQKNSRERMKRIEEGIKELGSQILKEHPVENTQLQNEKLYLYYLQNGRDMYVDQELDINRLSDYDVDHIVPQSFLKDDSIDNKVLTRSDKARGKSDNVPSEEVVKKMKNYWRQLLNAKLITQRKFDNLTKAERGGLSELDKAGFIKRQLVETRQITKHVAQILDSRMNTKYDENDKLIREVKVITLKSKLVSDFRKDFQFYKVREINNYHHAHDAYLNAVVGTALIKKYPKLESEFVYGDYKVYDVRKMIAKSEQEIGKATAKYFFYSNIMNFFKTEITLANGEIRKRPLIETNGETGEIVWDKGRDFATVRKVLSMPQVNIVKKTEVQTGGFSKESILPKRNSDKLIARKKDWDPKKYGGFDSPTVAYSVLVVAKVEKGKSKKLKSVKELLGITIMERSSFEKNPIDFLEAKGYKEVKKDLIIKLPKYSLFELENGRKRMLASAGELQKGNELALPSKYVNFLYLASHYEKLKGSPEDNEQKQLFVEQHKHYLDEIIEQISEFSKRVILADANLDKVLSAYNKHRDKPIREQAENIIHLFTLTNLGAPAAFKYFDTTIDRKRYTSTKEVLDATLIHQSITGLYETRIDLSQLGGDGGGGSGSSGGTLNIEDEYRLHETSKEPDVPLGSTWLSDFPQAWAETGGMGLAVRQAPLIIPLKATSTPVSIKQYPMSQEARLGIKPHIQRLLDQGILVPCQSPWNTPLLPVKKPGTNDYRPVQDLREVNKRVEDIHPTVPNPYNLLSGLPPSHQWYTVLDLKDAFFCLRLHPTSQPLFAFEWRDPEMGISGQLTWTRLPQGFKNSPTLFNEALHRDLADFRIQHPDLILLQYVDDLLLAATSEQDCQRGTRALLQTLGNLGYRASAKKAQICQKQVKYLGYLLKEGQRWLTEARKETVMGQPTPKTPRQLREFLGTAGFCRLWIPGFAEMAAPLYPLTKPGTLFNWGPDQQKAYQEIKQALLTAPALGLPDLTKPFELFVDEKQGYAKGVLTQKLGPWRRPVAYLSKKLDPVAAGWPPCLRMVAAIAVLTKDAGKLTMGQPLVILAPHAVEALVKQPPDRWLSNARMTHYQAMLLDTDRVQFGPVVALNPATLLPLPEKEAPHDCLEILAETHGTRPDLTDQPIPDADYTWYTDGSSFLQEGQRRAGAAVTTETEVIWARALPAGTSAQRAELIALTQALKMAEGKKLNVYTDSRYAFATAHVHGEIYRRRGWLTSEGREIKNKNEILALLKALFLPKRLSIIHCPGHQKGNSAEARGNRMADQAAREAAMKAVLETSTLLAGKRTADGSEFEKRTADGSEFESPKKKAKVE

SEQ ID NO: 6613 - protein, 2093 aa, synthetic construct
MPAAKRVKLDGGDKKYSIGLDIGTNSVGWAVITDEYKVPSKKFKVLGNTDRHSIKKNLIGALLFDSGETAEATRLKRTARRRYTRRKNRICYLQEIFSNEMAKVDDSFFHRLEESFLVEEDKKHERHPIFGNIVDEVAYHEKYPTIYHLRKKLVDSTDKADLRLIYLALAHMIKFRGHFLIEGDLNPDNSDVDKLFIQLVQTYNQLFEENPINASGVDAKAILSARLSKSRRLENLIAQLPGEKKNGLFGNLIALSLGLTPNFKSNFDLAEDAKLQLSKDTYDDDLDNLLAQIGDQYADLFLAAKNLSDAILLSDILRVNTEITKAPLSASMIKRYDEHHQDLTLLKALVRQQLPEKYKEIFFDQSKNGYAGYIDGGASQEEFYKFIKPILEKMDGTEELLVKLNREDLLRKQRTFDNGSIPHQIHLGELHAILRRQEDFYPFLKDNREKIEKILTFRIPYYVGPLARGNSRFAWMTRKSEETITPWNFEEVVDKGASAQSFIERMTNFDKNLPNEKVLPKHSLLYEYFTVYNELTKVKYVTEGMRKPAFLSGEQKKAIVDLLFKTNRKVTVKQLKEDYFKKIECFDSVEISGVEDRFNASLGTYHDLLKIIKDKDFLDNEENEDILEDIVLTLTLFEDREMIEERLKTYAHLFDDKVMKQLKRRRYTGWGRLSRKLINGIRDKQSGKTILDFLKSDGFANRNFMQLIHDDSLTFKEDIQKAQVSGQGDSLHEHIANLAGSPAIKKGILQTVKVVDELVKVMGRHKPENIVIEMARENQTTQKGQKNSRERMKRIEEGIKELGSQILKEHPVENTQLQNEKLYLYYLQNGRDMYVDQELDINRLSDYDVDHIVPQSFLKDDSIDNKVLTRSDKARGKSDNVPSEEVVKKMKNYWRQLLNAKLITQRKFDNLTKAERGGLSELDKAGFIKRQLVETRQITKHVAQILDSRMNTKYDENDKLIREVKVITLKSKLVSDFRKDFQFYKVREINNYHHAHDAYLNAVVGTALIKKYPKLESEFVYGDYKVYDVRKMIAKSEQEIGKATAKYFFYSNIMNFFKTEITLANGEIRKRPLIETNGETGEIVWDKGRDFATVRKVLSMPQVNIVKKTEVQTGGFSKESILPKRNSDKLIARKKDWDPKKYGGFDSPTVAYSVLVVAKVEKGKSKKLKSVKELLGITIMERSSFEKNPIDFLEAKGYKEVKKDLIIKLPKYSLFELENGRKRMLASAGELQKGNELALPSKYVNFLYLASHYEKLKGSPEDNEQKQLFVEQHKHYLDEIIEQISEFSKRVILADANLDKVLSAYNKHRDKPIREQAENIIHLFTLTNLGAPAAFKYFDTTIDRKRYTSTKEVLDATLIHQSITGLYETRIDLSQLGGDGGGSSGGSGGTAPLEEEYRLFLEAPIQNVTLLEQWKREIPKVWAEINPPGLASTQAPIHVQLLSTALPVRVRQYPITLEAKRSLRETIRKFRAAGILRPVHSPWNTPLLPVRKSGTSEYRMVQDLREVNKRVETIHPTVPNPYTLLSLLPPDRIWYSVLDLKDAFFCIPLAPESQLIFAFEWADAEEGESGQLTWTRLPQGFKNSPTLFDEALNRDLQGFRLDHPSVSLLQYVDDLLIAADTQAACLSATRDLLMTLAELGYRVSGKKAQLCQEEVTYLGFKIHKGSRSLSNSRTQAILQIPVPKTKRQVREFLGTIGYCRLWIPGFAELAQPLYAATRGGNDPLVWGEKEEEAFQSLKLALTQPPALALPSLDKPFQLFVEETSGAAKGVLTQALGPWKRPVAYLSKRLDPVAAGWPRCLRAIAAAALLTREASKLTFGQDIEITSSHNLESLLRSPPDKWLTNARITQYQVLLLDPPRVRFKQTAALNPATLLPETDDTLPIHHCLDTLDSLTSTRPDLTDQPLAQAEATLFTDGSSYIRDGKRYAGAAVVTLDSVIWAEPLPIGTSAQKAELIALTKALEWSKDKSVNIYTDSRYAFATLHVHGMIYRERGLLTAGGKAIKNAPEILALLTAVWLPKRVAVMHCKGHQKDDAPTSTGNRRADEVAREVAIRPLSTQATISAGKRTADGSEFEKRTADGSEFESPKKKAKVE

SEQ ID NO: 6614 - protein, 2097 aa, synthetic construct
MPAAKRVKLDGGDKKYSIGLDIGTNSVGWAVITDEYKVPSKKFKVLGNTDRHSIKKNLIGALLFDSGETAEATRLKRTARRRYTRRKNRICYLQEIFSNEMAKVDDSFFHRLEESFLVEEDKKHERHPIFGNIVDEVAYHEKYPTIYHLRKKLVDSTDKADLRLIYLALAHMIKFRGHFLIEGDLNPDNSDVDKLFIQLVQTYNQLFEENPINASGVDAKAILSARLSKSRRLENLIAQLPGEKKNGLFGNLIALSLGLTPNFKSNFDLAEDAKLQLSKDTYDDDLDNLLAQIGDQYADLFLAAKNLSDAILLSDILRVNTEITKAPLSASMIKRYDEHHQDLTLLKALVRQQLPEKYKEIFFDQSKNGYAGYIDGGASQEEFYKFIKPILEKMDGTEELLVKLNREDLLRKQRTFDNGSIPHQIHLGELHAILRRQEDFYPFLKDNREKIEKILTFRIPYYVGPLARGNSRFAWMTRKSEETITPWNFEEVVDKGASAQSFIERMTNFDKNLPNEKVLPKHSLLYEYFTVYNELTKVKYVTEGMRKPAFLSGEQKKAIVDLLFKTNRKVTVKQLKEDYFKKIECFDSVEISGVEDRFNASLGTYHDLLKIIKDKDFLDNEENEDILEDIVLTLTLFEDREMIEERLKTYAHLFDDKVMKQLKRRRYTGWGRLSRKLINGIRDKQSGKTILDFLKSDGFANRNFMQLIHDDSLTFKEDIQKAQVSGQGDSLHEHIANLAGSPAIKKGILQTVKVVDELVKVMGRHKPENIVIEMARENQTTQKGQKNSRERMKRIEEGIKELGSQILKEHPVENTQLQNEKLYLYYLQNGRDMYVDQELDINRLSDYDVDHIVPQSFLKDDSIDNKVLTRSDKARGKSDNVPSEEVVKKMKNYWRQLLNAKLITQRKFDNLTKAERGGLSELDKAGFIKRQLVETRQITKHVAQILDSRMNTKYDENDKLIREVKVITLKSKLVSDFRKDFQFYKVREINNYHHAHDAYLNAVVGTALIKKYPKLESEFVYGDYKVYDVRKMIAKSEQEIGKATAKYFFYSNIMNFFKTEITLANGEIRKRPLIETNGETGEIVWDKGRDFATVRKVLSMPQVNIVKKTEVQTGGFSKESILPKRNSDKLIARKKDWDPKKYGGFDSPTVAYSVLVVAKVEKGKSKKLKSVKELLGITIMERSSFEKNPIDFLEAKGYKEVKKDLIIKLPKYSLFELENGRKRMLASAGELQKGNELALPSKYVNFLYLASHYEKLKGSPEDNEQKQLFVEQHKHYLDEIIEQISEFSKRVILADANLDKVLSAYNKHRDKPIREQAENIIHLFTLTNLGAPAAFKYFDTTIDRKRYTSTKEVLDATLIHQSITGLYETRIDLSQLGGDGGGSSGGSGGTVSLQDEHRLFDIPVTTSLPDVWLQDFPQAWAETGGLGRAKCQAPIIIDLKPTAVPVSIKQYPMSLEAHMGIRQHIIKFLELGVLRPCRSPWNTPLLPVKKPGTQDYRPVQDLREINKRTVDIHPTVPNPYNLLSTLKPDYSWYTVLDLKDAFFCLPLAPQSQELFAFEWKDPERGISGQLTWTRLPQGFKNSPTLFNEALHRDLTDFRTQHPEVTLLQYVDDLLLAAPTKKACTQGTRHLLQELGEKGYRASAKKAQICQTKVTYLGYILSEGKRWLTPGRIETVARIPPPRNPREVREFLGTAGFCRLWIPGFAELAAPLYALTKPSTPFTWQTEHQLAFEALKKALLSAPALGLPDTSKPFTLFLDERQGIAKGVLTQKLGPWKRPVAYLSKKLDPVAAGWPPCLRIMAATAMLVKDSAKLTLGQPLTVITPHTLEAIVRQPPDRWITNARLTHYQALLLDTDRVQFGPPVTLNPATLLPVPENQPSPHDCRQVLAETHGTREDLKDQELPDADHTWYTDGSSYLDSGTRRAGAAVVDGHNTIWAQSLPPGTSAQKAELIALTKALELSKGKKANIYTDSRYAFATAHTHGSIYERRGWLTSEGKEIKNKAEIIALLKALFLPQEVAIIHCPGHQKGQDPVAVGNRQADRVARQAAMAEVLTLATEPDNTSHITAGKRTADGSEFEKRTADGSEFESPKKKAKVE

SEQ ID NO: 6615 - protein, 2090 aa, synthetic construct
MPAAKRVKLDGGDKKYSIGLDIGTNSVGWAVITDEYKVPSKKFKVLGNTDRHSIKKNLIGALLFDSGETAEATRLKRTARRRYTRRKNRICYLQEIFSNEMAKVDDSFFHRLEESFLVEEDKKHERHPIFGNIVDEVAYHEKYPTIYHLRKKLVDSTDKADLRLIYLALAHMIKFRGHFLIEGDLNPDNSDVDKLFIQLVQTYNQLFEENPINASGVDAKAILSARLSKSRRLENLIAQLPGEKKNGLFGNLIALSLGLTPNFKSNFDLAEDAKLQLSKDTYDDDLDNLLAQIGDQYADLFLAAKNLSDAILLSDILRVNTEITKAPLSASMIKRYDEHHQDLTLLKALVRQQLPEKYKEIFFDQSKNGYAGYIDGGASQEEFYKFIKPILEKMDGTEELLVKLNREDLLRKQRTFDNGSIPHQIHLGELHAILRRQEDFYPFLKDNREKIEKILTFRIPYYVGPLARGNSRFAWMTRKSEETITPWNFEEVVDKGASAQSFIERMTNFDKNLPNEKVLPKHSLLYEYFTVYNELTKVKYVTEGMRKPAFLSGEQKKAIVDLLFKTNRKVTVKQLKEDYFKKIECFDSVEISGVEDRFNASLGTYHDLLKIIKDKDFLDNEENEDILEDIVLTLTLFEDREMIEERLKTYAHLFDDKVMKQLKRRRYTGWGRLSRKLINGIRDKQSGKTILDFLKSDGFANRNFMQLIHDDSLTFKEDIQKAQVSGQGDSLHEHIANLAGSPAIKKGILQTVKVVDELVKVMGRHKPENIVIEMARENQTTQKGQKNSRERMKRIEEGIKELGSQILKEHPVENTQLQNEKLYLYYLQNGRDMYVDQELDINRLSDYDVDHIVPQSFLKDDSIDNKVLTRSDKARGKSDNVPSEEVVKKMKNYWRQLLNAKLITQRKFDNLTKAERGGLSELDKAGFIKRQLVETRQITKHVAQILDSRMNTKYDENDKLIREVKVITLKSKLVSDFRKDFQFYKVREINNYHHAHDAYLNAVVGTALIKKYPKLESEFVYGDYKVYDVRKMIAKSEQEIGKATAKYFFYSNIMNFFKTEITLANGEIRKRPLIETNGETGEIVWDKGRDFATVRKVLSMPQVNIVKKTEVQTGGFSKESILPKRNSDKLIARKKDWDPKKYGGFDSPTVAYSVLVVAKVEKGKSKKLKSVKELLGITIMERSSFEKNPIDFLEAKGYKEVKKDLIIKLPKYSLFELENGRKRMLASAGELQKGNELALPSKYVNFLYLASHYEKLKGSPEDNEQKQLFVEQHKHYLDEIIEQISEFSKRVILADANLDKVLSAYNKHRDKPIREQAENIIHLFTLTNLGAPAAFKYFDTTIDRKRYTSTKEVLDATLIHQSITGLYETRIDLSQLGGDGGGSSGGSGGTLQLEEEYRLFEPESTQKQEMDIWLKNFPQAWAETGGMGTAHCQAPVLIQLKATATPISIRQYPMPHEAYQGIKPHIRRMLDQGILKPCQSPWNTPLLPVKKPGTEDYRPVQDLREVNKRVEDIHPTVPNPYNLLSTLPPSHPWYTVLDLKDAFFCLRLHSESQLLFAFEWRDPEIGLSGQLTWTRLPQGFKNSPTLFNEALHSDLADFRVRYPALVLLQYVDDLLLAAATRTECLEGTKALLETLGNKGYRASAKKAQICLQEVTYLGYSLKDGQRWLTKARKEAILSIPVPKNSRQVREFLGKAGYCRLFIPGFAELAAPLYPLTRPGTLFQWGTEQQLAFEDIKKALLSSPALGLPDITKPFELFIDENSGFAKGVLVQKLGPWKRPVAYLSKKLDTVASGWPPCLRMVAAIAILVKDAGKLTLGQPLTILTSHPVEALVRQPPNKWLSNARMTHYQAMLLDAERVHFGPTVSLNPATLLPLPSGGNHHDCLQILAETHGTRPDLTDQPLPDADLTWYTDGSSFIRNGEREAGAAVTTESEVIWAAPLPPGTSAQRAELIALTQALKMAEGKKLTVYTDSRYAFATTHVHGEIYRRRGWLTSEGKEIKNKNEILALLEALFLPKRLSIIHCPGHQKGDSPQAKGNRLADDTAKKAATETHSSLTVLPAGKRTADGSEFEKRTADGSEFESPKKKAKVE

SEQ ID NO: 6616 - protein, 2213 aa, synthetic construct
MPAAKRVKLDGGDKKYSIGLDIGTNSVGWAVITDEYKVPSKKFKVLGNTDRHSIKKNLIGALLFDSGETAEATRLKRTARRRYTRRKNRICYLQEIFSNEMAKVDDSFFHRLEESFLVEEDKKHERHPIFGNIVDEVAYHEKYPTIYHLRKKLVDSTDKADLRLIYLALAHMIKFRGHFLIEGDLNPDNSDVDKLFIQLVQTYNQLFEENPINASGVDAKAILSARLSKSRRLENLIAQLPGEKKNGLFGNLIALSLGLTPNFKSNFDLAEDAKLQLSKDTYDDDLDNLLAQIGDQYADLFLAAKNLSDAILLSDILRVNTEITKAPLSASMIKRYDEHHQDLTLLKALVRQQLPEKYKEIFFDQSKNGYAGYIDGGASQEEFYKFIKPILEKMDGTEELLVKLNREDLLRKQRTFDNGSIPHQIHLGELHAILRRQEDFYPFLKDNREKIEKILTFRIPYYVGPLARGNSRFAWMTRKSEETITPWNFEEVVDKGASAQSFIERMTNFDKNLPNEKVLPKHSLLYEYFTVYNELTKVKYVTEGMRKPAFLSGEQKKAIVDLLFKTNRKVTVKQLKEDYFKKIECFDSVEISGVEDRFNASLGTYHDLLKIIKDKDFLDNEENEDILEDIVLTLTLFEDREMIEERLKTYAHLFDDKVMKQLKRRRYTGWGRLSRKLINGIRDKQSGKTILDFLKSDGFANRNFMQLIHDDSLTFKEDIQKAQVSGQGDSLHEHIANLAGSPAIKKGILQTVKVVDELVKVMGRHKPENIVIEMARENQTTQKGQKNSRERMKRIEEGIKELGSQILKEHPVENTQLQNEKLYLYYLQNGRDMYVDQELDINRLSDYDVDHIVPQSFLKDDSIDNKVLTRSDKARGKSDNVPSEEVVKKMKNYWRQLLNAKLITQRKFDNLTKAERGGLSELDKAGFIKRQLVETRQITKHVAQILDSRMNTKYDENDKLIREVKVITLKSKLVSDFRKDFQFYKVREINNYHHAHDAYLNAVVGTALIKKYPKLESEFVYGDYKVYDVRKMIAKSEQEIGKATAKYFFYSNIMNFFKTEITLANGEIRKRPLIETNGETGEIVWDKGRDFATVRKVLSMPQVNIVKKTEVQTGGFSKESILPKRNSDKLIARKKDWDPKKYGGFDSPTVAYSVLVVAKVEKGKSKKLKSVKELLGITIMERSSFEKNPIDFLEAKGYKEVKKDLIIKLPKYSLFELENGRKRMLASAGELQKGNELALPSKYVNFLYLASHYEKLKGSPEDNEQKQLFVEQHKHYLDEIIEQISEFSKRVILADANLDKVLSAYNKHRDKPIREQAENIIHLFTLTNLGAPAAFKYFDTTIDRKRYTSTKEVLDATLIHQSITGLYETRIDLSQLGGDGGGSSGGSGGTLGDQGSRGSDPLPEPRVTLTVEGIPTEFLVNTGAEHSVLTKPMGKMGSKRTVVAGATGSKVYPWTTKRLLKIGQKQVTHSFLVIPECPAPLLGRDLLTKLKAQIQFSTEGPQVTWEDRPAMCLVLNLEEEYRLHEKPVPPSIDPSWLQLFPMVWAEKAGMGLANQVPPVVVELKSDASPVAVRQYPMSKEAREGIRPHIQRFLDLGILVPCQSPWNTPLLPVKKPGTNDYRPVQDLREVNKRVQDIHPTVPNPYNLLSSLPPSHTWYSVLDLKDAFFCLKLHPNSQPLFAFEWRDPEKGNTGQLTWTRLPQGFKNSPTLFNEALHRDLASFRALNPQVVMLQYVDDLLVAAPTYRDCKEGTRRLLQELSKLGYRVSAKKAQLCREEVTYLGYLLKGGKRWLTPARKATVMKIPTPTTPRQVREFLGKAGFCRLFIPGFASLAAPLYPLTRPKVPFTWTEAHQEAFGRIKEALLSAPALALPDLTKPFALYVDEKEGVARGVLTQTLGPWRRPVAYLSKKLDPVASGWPTCLKAIAAVALLLKDADKLTLGQNVLVIAPHNLESIVRQPPDRWMTNARMTHYQSLLLNERVSFAPPAILNPATLLPVESDDTPIHICSEILAEETGTRPDLRDQPLPGVPAWYTDGSSFIMDGRRQAGAAIVDNKRTVWASNLPEGTSAQKAELIALTQALRLAEGKSINIYTDSRYAFATAHVHGAIYKQRGWLTSAGKDIKNKEEILALLEAIHLPKRVAIIHCPGHQRGTDPVATGNRKADEAAKQAAQSTRILTETTKNAGKRTADGSEFEKRTADGSEFESPKKKAKVE

SEQ ID NO: 6617 - protein, 2091 aa, synthetic construct
MPAAKRVKLDGGDKKYSIGLDIGTNSVGWAVITDEYKVPSKKFKVLGNTDRHSIKKNLIGALLFDSGETAEATRLKRTARRRYTRRKNRICYLQEIFSNEMAKVDDSFFHRLEESFLVEEDKKHERHPIFGNIVDEVAYHEKYPTIYHLRKKLVDSTDKADLRLIYLALAHMIKFRGHFLIEGDLNPDNSDVDKLFIQLVQTYNQLFEENPINASGVDAKAILSARLSKSRRLENLIAQLPGEKKNGLFGNLIALSLGLTPNFKSNFDLAEDAKLQLSKDTYDDDLDNLLAQIGDQYADLFLAAKNLSDAILLSDILRVNTEITKAPLSASMIKRYDEHHQDLTLLKALVRQQLPEKYKEIFFDQSKNGYAGYIDGGASQEEFYKFIKPILEKMDGTEELLVKLNREDLLRKQRTFDNGSIPHQIHLGELHAILRRQEDFYPFLKDNREKIEKILTFRIPYYVGPLARGNSRFAWMTRKSEETITPWNFEEVVDKGASAQSFIERMTNFDKNLPNEKVLPKHSLLYEYFTVYNELTKVKYVTEGMRKPAFLSGEQKKAIVDLLFKTNRKVTVKQLKEDYFKKIECFDSVEISGVEDRFNASLGTYHDLLKIIKDKDFLDNEENEDILEDIVLTLTLFEDREMIEERLKTYAHLFDDKVMKQLKRRRYTGWGRLSRKLINGIRDKQSGKTILDFLKSDGFANRNFMQLIHDDSLTFKEDIQKAQVSGQGDSLHEHIANLAGSPAIKKGILQTVKVVDELVKVMGRHKPENIVIEMARENQTTQKGQKNSRERMKRIEEGIKELGSQILKEHPVENTQLQNEKLYLYYLQNGRDMYVDQELDINRLSDYDVDHIVPQSFLKDDSIDNKVLTRSDKARGKSDNVPSEEVVKKMKNYWRQLLNAKLITQRKFDNLTKAERGGLSELDKAGFIKRQLVETRQITKHVAQILDSRMNTKYDENDKLIREVKVITLKSKLVSDFRKDFQFYKVREINNYHHAHDAYLNAVVGTALIKKYPKLESEFVYGDYKVYDVRKMIAKSEQEIGKATAKYFFYSNIMNFFKTEITLANGEIRKRPLIETNGETGEIVWDKGRDFATVRKVLSMPQVNIVKKTEVQTGGFSKESILPKRNSDKLIARKKDWDPKKYGGFDSPTVAYSVLVVAKVEKGKSKKLKSVKELLGITIMERSSFEKNPIDFLEAKGYKEVKKDLIIKLPKYSLFELENGRKRMLASAGELQKGNELALPSKYVNFLYLASHYEKLKGSPEDNEQKQLFVEQHKHYLDEIIEQISEFSKRVILADANLDKVLSAYNKHRDKPIREQAENIIHLFTLTNLGAPAAFKYFDTTIDRKRYTSTKEVLDATLIHQSITGLYETRIDLSQLGGDGGGSSGGSGGTLGIEDEYRLHETSTEPDVSLGSTWLSDFPQAWAETGGMGLAVRQAPLIIPLKATSTPVSIQQYPMSHEARLGIKPHIQRLLDQGILVPCQSPWNTPLLPVKKPGTNDYRPVQDLREVNKRVEDIHPTVPNPYNLLSGLPPSHQWYTVLDLKDAFFCLRLHPTSQPLFAFEWRDPGMGISGQLTWTRLPQGFKNSPTLFNEALHRDLADFRIQHPDLILLQYVDDILLAATSELDCQQGTRALLQTLGDLGYRASAKKAQICQKQVKYLGYLLREGQRWLTEARKETVMGQPVPKTPRQLREFLGTAGFCRLWIPGFAEMAAPLYPLTKPGTLFSWGPDQQKAYQEIKQALLTAPALGLPDLTKPFELFVDEKQGYAKGVLTQKLGPWRRPVAYLSKKLDPVAAGWPPCLRMVAAIAVLTKDAGKLTMGQPLVILAPHAVEALVKQPPDRWLSNARMTHYQAMLLDTDRVQFGPVVALNPATLLPLPEEGAPHDCLEILAETHGTRPDLTDQPIPDADHTWYTDGSSFLQEGQRKAGAAVTTETEVIWAGALPAGTSAQRAELIALTQALKMAEGKRLNVYTDSRYAFATAHIHGEIYRRRGWLTSEGREIKNKSEILALLKALFLPKRLSIIHCLGHQKGDSAEARGNRLADQAAREAAIKTPPDTSTLLAGKRTADGSEFEKRTADGSEFESPKKKAKVE

SEQ ID NO: 6618 - protein, 2091 aa, synthetic construct
MPAAKRVKLDGGDKKYSIGLDIGTNSVGWAVITDEYKVPSKKFKVLGNTDRHSIKKNLIGALLFDSGETAEATRLKRTARRRYTRRKNRICYLQEIFSNEMAKVDDSFFHRLEESFLVEEDKKHERHPIFGNIVDEVAYHEKYPTIYHLRKKLVDSTDKADLRLIYLALAHMIKFRGHFLIEGDLNPDNSDVDKLFIQLVQTYNQLFEENPINASGVDAKAILSARLSKSRRLENLIAQLPGEKKNGLFGNLIALSLGLTPNFKSNFDLAEDAKLQLSKDTYDDDLDNLLAQIGDQYADLFLAAKNLSDAILLSDILRVNTEITKAPLSASMIKRYDEHHQDLTLLKALVRQQLPEKYKEIFFDQSKNGYAGYIDGGASQEEFYKFIKPILEKMDGTEELLVKLNREDLLRKQRTFDNGSIPHQIHLGELHAILRRQEDFYPFLKDNREKIEKILTFRIPYYVGPLARGNSRFAWMTRKSEETITPWNFEEVVDKGASAQSFIERMTNFDKNLPNEKVLPKHSLLYEYFTVYNELTKVKYVTEGMRKPAFLSGEQKKAIVDLLFKTNRKVTVKQLKEDYFKKIECFDSVEISGVEDRFNASLGTYHDLLKIIKDKDFLDNEENEDILEDIVLTLTLFEDREMIEERLKTYAHLFDDKVMKQLKRRRYTGWGRLSRKLINGIRDKQSGKTILDFLKSDGFANRNFMQLIHDDSLTFKEDIQKAQVSGQGDSLHEHIANLAGSPAIKKGILQTVKVVDELVKVMGRHKPENIVIEMARENQTTQKGQKNSRERMKRIEEGIKELGSQILKEHPVENTQLQNEKLYLYYLQNGRDMYVDQELDINRLSDYDVDHIVPQSFLKDDSIDNKVLTRSDKARGKSDNVPSEEVVKKMKNYWRQLLNAKLITQRKFDNLTKAERGGLSELDKAGFIKRQLVETRQITKHVAQILDSRMNTKYDENDKLIREVKVITLKSKLVSDFRKDFQFYKVREINNYHHAHDAYLNAVVGTALIKKYPKLESEFVYGDYKVYDVRKMIAKSEQEIGKATAKYFFYSNIMNFFKTEITLANGEIRKRPLIETNGETGEIVWDKGRDFATVRKVLSMPQVNIVKKTEVQTGGFSKESILPKRNSDKLIARKKDWDPKKYGGFDSPTVAYSVLVVAKVEKGKSKKLKSVKELLGITIMERSSFEKNPIDFLEAKGYKEVKKDLIIKLPKYSLFELENGRKRMLASAGELQKGNELALPSKYVNFLYLASHYEKLKGSPEDNEQKQLFVEQHKHYLDEIIEQISEFSKRVILADANLDKVLSAYNKHRDKPIREQAENIIHLFTLTNLGAPAAFKYFDTTIDRKRYTSTKEVLDATLIHQSITGLYETRIDLSQLGGDGGGSSGGSGGTLNIEDEYRLHETSKEPDVSLGSTWLSDFPQAWAETGGMGLAVRQAPLIIPLKATSTPVSIKQYPMSQEARLGIKPHIQRLLDQGILVPCQSPWNTPLLPVKKPGTNDYRPVQDLREVNKRVEDIHPTVPNPYNLLSGLPPSHQWYTVLDLKDAFFCLRLHPTSQPLFAFEWRDPEMGISGQLTWTRLPQGFKNSPTLFNEALHRDLAGFRIQHPDLILLQYVDDLLLAATSELDCQQGTRALLQTLGDLGYRASAKKAQICQKQVKYLGYLLKEGQRWLTEARKETVMGQPIPKTPRQLREFLGTAGFCRLWIPGFAEMAAPLYPLTKPGTLFNWGPDQQKAFQEIKQALLTAPALGLPDLTKPFELFVDEKQGYAKGVLTQKLGPWRRPVAYLSKKLDPVAAGWPPCLRMVAAIAVLTKDAGKLTMGQPLVILAPHAVEALVKQPPDRWLSNARMTHYQALLLDTDRVQFGPVVALNPATLLPLPEEGLQHDCLDILAEAHGTRSDLMDQPLPDADHTWYTDGSSFLQEGQRKAGAAVTTETEVIWARALPAGTSAQRAELIALTQALKMAEGKKLNVYTDSRYAFATAHIHGEIYRRRGWLTSEGKEIKNKDEILALLKALFLPKRLSIIHCPGHQKGNSAEARGNRMADQAAREVATRETPETSTLLAGKRTADGSEFEKRTADGSEFESPKKKAKVE

SEQ ID NO: 6619 - protein, 2089 aa, synthetic construct
MPAAKRVKLDGGDKKYSIGLDIGTNSVGWAVITDEYKVPSKKFKVLGNTDRHSIKKNLIGALLFDSGETAEATRLKRTARRRYTRRKNRICYLQEIFSNEMAKVDDSFFHRLEESFLVEEDKKHERHPIFGNIVDEVAYHEKYPTIYHLRKKLVDSTDKADLRLIYLALAHMIKFRGHFLIEGDLNPDNSDVDKLFIQLVQTYNQLFEENPINASGVDAKAILSARLSKSRRLENLIAQLPGEKKNGLFGNLIALSLGLTPNFKSNFDLAEDAKLQLSKDTYDDDLDNLLAQIGDQYADLFLAAKNLSDAILLSDILRVNTEITKAPLSASMIKRYDEHHQDLTLLKALVRQQLPEKYKEIFFDQSKNGYAGYIDGGASQEEFYKFIKPILEKMDGTEELLVKLNREDLLRKQRTFDNGSIPHQIHLGELHAILRRQEDFYPFLKDNREKIEKILTFRIPYYVGPLARGNSRFAWMTRKSEETITPWNFEEVVDKGASAQSFIERMTNFDKNLPNEKVLPKHSLLYEYFTVYNELTKVKYVTEGMRKPAFLSGEQKKAIVDLLFKTNRKVTVKQLKEDYFKKIECFDSVEISGVEDRFNASLGTYHDLLKIIKDKDFLDNEENEDILEDIVLTLTLFEDREMIEERLKTYAHLFDDKVMKQLKRRRYTGWGRLSRKLINGIRDKQSGKTILDFLKSDGFANRNFMQLIHDDSLTFKEDIQKAQVSGQGDSLHEHIANLAGSPAIKKGILQTVKVVDELVKVMGRHKPENIVIEMARENQTTQKGQKNSRERMKRIEEGIKELGSQILKEHPVENTQLQNEKLYLYYLQNGRDMYVDQELDINRLSDYDVDHIVPQSFLKDDSIDNKVLTRSDKARGKSDNVPSEEVVKKMKNYWRQLLNAKLITQRKFDNLTKAERGGLSELDKAGFIKRQLVETRQITKHVAQILDSRMNTKYDENDKLIREVKVITLKSKLVSDFRKDFQFYKVREINNYHHAHDAYLNAVVGTALIKKYPKLESEFVYGDYKVYDVRKMIAKSEQEIGKATAKYFFYSNIMNFFKTEITLANGEIRKRPLIETNGETGEIVWDKGRDFATVRKVLSMPQVNIVKKTEVQTGGFSKESILPKRNSDKLIARKKDWDPKKYGGFDSPTVAYSVLVVAKVEKGKSKKLKSVKELLGITIMERSSFEKNPIDFLEAKGYKEVKKDLIIKLPKYSLFELENGRKRMLASAGELQKGNELALPSKYVNFLYLASHYEKLKGSPEDNEQKQLFVEQHKHYLDEIIEQISEFSKRVILADANLDKVLSAYNKHRDKPIREQAENIIHLFTLTNLGAPAAFKYFDTTIDRKRYTSTKEVLDATLIHQSITGLYETRIDLSQLGGDGGGSSGGSGGVLNLEEEYRLHEKPVPSSIDPSWLQLFPTVWAERAGMGLANQVPPVVVELRSGASPVAVRQYPMSKEAREGIRPHIQRFLDLGVLVPCQSPWNTPLLPVKKPGTNDYRPVQDLREINKRVQDIHPTVPNPYNLLSSLPPSHTWYSVLDLKDAFFCLKLHPNSQPLFAFEWRDPEKGNTGQLTWTRLPQGFKNSPTLFNEALHRDLAPFRALNPQVVLLQYVDDLLVAAPTYRDCKEGTQKLLQELSKLGYRVSAKKAQLCQKEVTYLGYLLKEGKRWLTPARKATVMKIPPPTTPRQVREFLGTAGFCRLWIPGFASLAAPLYPLTKPSIPFIWTEEHQKAFDRIKEALLSAPALALPDLTKPFTLYVDERAGVARGVLTQTLGPWRRPVAYLSKKLDPVASGWPTCLKAVAAVALLLKDADKLTLGQNVTVIASHSLESIVRQPPDRWMTNARMTHYQSLLLNERVSFAPPAVLNPATLLPVESEATPVHRCSEILAEETGTRRDLKDQPLPGVPAWYTDGSSFIAEGKRRAGAAIVDGKRTVWASSLPEGTSAQKAELVALTQALRLAEGKDINIYTDSRYAFATAHIHGAIYKQRGWLTSAGKDIKNKEEILALLEAIHLPKRVAIIHCPGHQKGNDPVATGNRRADEAAKQAALSTRVLAETTKPAGKRTADGSEFEKRTADGSEFESPKKKAKVE

SEQ ID NO: 6620 - protein, 2091 aa, synthetic construct
MPAAKRVKLDGGDKKYSIGLDIGTNSVGWAVITDEYKVPSKKFKVLGNTDRHSIKKNLIGALLFDSGETAEATRLKRTARRRYTRRKNRICYLQEIFSNEMAKVDDSFFHRLEESFLVEEDKKHERHPIFGNIVDEVAYHEKYPTIYHLRKKLVDSTDKADLRLIYLALAHMIKFRGHFLIEGDLNPDNSDVDKLFIQLVQTYNQLFEENPINASGVDAKAILSARLSKSRRLENLIAQLPGEKKNGLFGNLIALSLGLTPNFKSNFDLAEDAKLQLSKDTYDDDLDNLLAQIGDQYADLFLAAKNLSDAILLSDILRVNTEITKAPLSASMIKRYDEHHQDLTLLKALVRQQLPEKYKEIFFDQSKNGYAGYIDGGASQEEFYKFIKPILEKMDGTEELLVKLNREDLLRKQRTFDNGSIPHQIHLGELHAILRRQEDFYPFLKDNREKIEKILTFRIPYYVGPLARGNSRFAWMTRKSEETITPWNFEEVVDKGASAQSFIERMTNFDKNLPNEKVLPKHSLLYEYFTVYNELTKVKYVTEGMRKPAFLSGEQKKAIVDLLFKTNRKVTVKQLKEDYFKKIECFDSVEISGVEDRFNASLGTYHDLLKIIKDKDFLDNEENEDILEDIVLTLTLFEDREMIEERLKTYAHLFDDKVMKQLKRRRYTGWGRLSRKLINGIRDKQSGKTILDFLKSDGFANRNFMQLIHDDSLTFKEDIQKAQVSGQGDSLHEHIANLAGSPAIKKGILQTVKVVDELVKVMGRHKPENIVIEMARENQTTQKGQKNSRERMKRIEEGIKELGSQILKEHPVENTQLQNEKLYLYYLQNGRDMYVDQELDINRLSDYDVDHIVPQSFLKDDSIDNKVLTRSDKARGKSDNVPSEEVVKKMKNYWRQLLNAKLITQRKFDNLTKAERGGLSELDKAGFIKRQLVETRQITKHVAQILDSRMNTKYDENDKLIREVKVITLKSKLVSDFRKDFQFYKVREINNYHHAHDAYLNAVVGTALIKKYPKLESEFVYGDYKVYDVRKMIAKSEQEIGKATAKYFFYSNIMNFFKTEITLANGEIRKRPLIETNGETGEIVWDKGRDFATVRKVLSMPQVNIVKKTEVQTGGFSKESILPKRNSDKLIARKKDWDPKKYGGFDSPTVAYSVLVVAKVEKGKSKKLKSVKELLGITIMERSSFEKNPIDFLEAKGYKEVKKDLIIKLPKYSLFELENGRKRMLASAGELQKGNELALPSKYVNFLYLASHYEKLKGSPEDNEQKQLFVEQHKHYLDEIIEQISEFSKRVILADANLDKVLSAYNKHRDKPIREQAENIIHLFTLTNLGAPAAFKYFDTTIDRKRYTSTKEVLDATLIHQSITGLYETRIDLSQLGGDGGGSSGGSGGTLNIEDEYRLHETSKEPDVPLGSTWLSDFPQAWAETGGMGLAVRQAPLIIPLKATSTPVSIKQYPMSQEARLGIKPHIQRLLDQGILVPCQSPWNTPLLPVKKPGTNDYRPVQDLREVNKRVEDIHPTVPNPYNLLSGLPPSHQWYTVLDLKDAFFCLRLHPTSQPLFAFEWRDPEMGISGQLTWTRLPQGFKNSPTLFNEALHRDLADFRIQHPDLILLQYVDDLLLAATSEQDCQRGTRALLQTLGNLGYRASAKKAQICQKQVKYLGYLLKEGQRWLTEARKETVMGQPTPKTPRQLREFLGTAGFCRLWIPGFAEMAAPLYPLTKPGTLFNWGPDQQKAYQEIKQALLTAPALGLPDLTKPFELFVDEKQGYAKGVLTQKLGPWRRPVAYLSKKLDPVAAGWPPCLRMVAAIAVLTKDAGKLTMGQPLVILAPHAVEALVKQPPDRWLSNARMTHYQAMLLDTDRVQFGPVVALNPATLLPLPEKEAPHDCLEILAETHGTRPDLTDQPIPDADYTWYTDGSSFLQEGQRRAGAAVTTETEVIWARALPAGTSAQRAELIALTQALKMAEGKKLNVYTDSRYAFATAHVHGEIYRRRGWLTSEGREIKNKNEILALLKALFLPKRLSIIHCPGHQKGNSAEARGNRMADQAAREAAMKAVLETSTLLAGKRTADGSEFEKRTADGSEFESPKKKAKVE

SEQ ID NO: 6621 - protein, 2095 aa, synthetic construct
MPAAKRVKLDGGDKKYSIGLDIGTNSVGWAVITDEYKVPSKKFKVLGNTDRHSIKKNLIGALLFDSGETAEATRLKRTARRRYTRRKNRICYLQEIFSNEMAKVDDSFFHRLEESFLVEEDKKHERHPIFGNIVDEVAYHEKYPTIYHLRKKLVDSTDKADLRLIYLALAHMIKFRGHFLIEGDLNPDNSDVDKLFIQLVQTYNQLFEENPINASGVDAKAILSARLSKSRRLENLIAQLPGEKKNGLFGNLIALSLGLTPNFKSNFDLAEDAKLQLSKDTYDDDLDNLLAQIGDQYADLFLAAKNLSDAILLSDILRVNTEITKAPLSASMIKRYDEHHQDLTLLKALVRQQLPEKYKEIFFDQSKNGYAGYIDGGASQEEFYKFIKPILEKMDGTEELLVKLNREDLLRKQRTFDNGSIPHQIHLGELHAILRRQEDFYPFLKDNREKIEKILTFRIPYYVGPLARGNSRFAWMTRKSEETITPWNFEEVVDKGASAQSFIERMTNFDKNLPNEKVLPKHSLLYEYFTVYNELTKVKYVTEGMRKPAFLSGEQKKAIVDLLFKTNRKVTVKQLKEDYFKKIECFDSVEISGVEDRFNASLGTYHDLLKIIKDKDFLDNEENEDILEDIVLTLTLFEDREMIEERLKTYAHLFDDKVMKQLKRRRYTGWGRLSRKLINGIRDKQSGKTILDFLKSDGFANRNFMQLIHDDSLTFKEDIQKAQVSGQGDSLHEHIANLAGSPAIKKGILQTVKVVDELVKVMGRHKPENIVIEMARENQTTQKGQKNSRERMKRIEEGIKELGSQILKEHPVENTQLQNEKLYLYYLQNGRDMYVDQELDINRLSDYDVDHIVPQSFLKDDSIDNKVLTRSDKARGKSDNVPSEEVVKKMKNYWRQLLNAKLITQRKFDNLTKAERGGLSELDKAGFIKRQLVETRQITKHVAQILDSRMNTKYDENDKLIREVKVITLKSKLVSDFRKDFQFYKVREINNYHHAHDAYLNAVVGTALIKKYPKLESEFVYGDYKVYDVRKMIAKSEQEIGKATAKYFFYSNIMNFFKTEITLANGEIRKRPLIETNGETGEIVWDKGRDFATVRKVLSMPQVNIVKKTEVQTGGFSKESILPKRNSDKLIARKKDWDPKKYGGFDSPTVAYSVLVVAKVEKGKSKKLKSVKELLGITIMERSSFEKNPIDFLEAKGYKEVKKDLIIKLPKYSLFELENGRKRMLASAGELQKGNELALPSKYVNFLYLASHYEKLKGSPEDNEQKQLFVEQHKHYLDEIIEQISEFSKRVILADANLDKVLSAYNKHRDKPIREQAENIIHLFTLTNLGAPAAFKYFDTTIDRKRYTSTKEVLDATLIHQSITGLYETRIDLSQLGGDGGGGSEAAAKGGTAPLEEEYRLFLEAPIQNVTLLEQWKREIPKVWAEINPPGLASTQAPIHVQLLSTALPVRVRQYPITLEAKRSLRETIRKFRAAGILRPVHSPWNTPLLPVRKSGTSEYRMVQDLREVNKRVETIHPTVPNPYTLLSLLPPDRIWYSVLDLKDAFFCIPLAPESQLIFAFEWADAEEGESGQLTWTRLPQGFKNSPTLFNEALNRDLQGFRLDHPSVSLLQYVDDLLIAADTQAACLSATRDLLMTLAELGYRVSGKKAQLCQEEVTYLGFKIHKGSRSLSNSRTQAILQIPVPKTKRQVREFLGTIGYCRLWIPGFAELAQPLYAATRPGNDPLVWGEKEEEAFQSLKLALTQPPALALPSLDKPFQLFVEETSGAAKGVLTQALGPWKRPVAYLSKRLDPVAAGWPRCLRAIAAAALLTREASKLTFGQDIEITSSHNLESLLRSPPDKWLTNARITQYQVLLLDPPRVRFKQTAALNPATLLPETDDTLPIHHCLDTLDSLTSTRPDLTDQPLAQAEATLFTDGSSYIRDGKRYAGAAVVTLDSVIWAEPLPIGTSAQKAELIALTKALEWSKDKSVNIYTDSRYAFATLHVHGMIYRERGWLTAGGKAIKNAPEILALLTAVWLPKRVAVMHCKGHQKDDAPTSTGNRRADEVAREVAIRPLSTQATISAGKRTADGSEFEKRTADGSEFESPKKKAKVE

SEQ ID NO: 6622 - protein, 2095 aa, synthetic construct
MPAAKRVKLDGGDKKYSIGLDIGTNSVGWAVITDEYKVPSKKFKVLGNTDRHSIKKNLIGALLFDSGETAEATRLKRTARRRYTRRKNRICYLQEIFSNEMAKVDDSFFHRLEESFLVEEDKKHERHPIFGNIVDEVAYHEKYPTIYHLRKKLVDSTDKADLRLIYLALAHMIKFRGHFLIEGDLNPDNSDVDKLFIQLVQTYNQLFEENPINASGVDAKAILSARLSKSRRLENLIAQLPGEKKNGLFGNLIALSLGLTPNFKSNFDLAEDAKLQLSKDTYDDDLDNLLAQIGDQYADLFLAAKNLSDAILLSDILRVNTEITKAPLSASMIKRYDEHHQDLTLLKALVRQQLPEKYKEIFFDQSKNGYAGYIDGGASQEEFYKFIKPILEKMDGTEELLVKLNREDLLRKQRTFDNGSIPHQIHLGELHAILRRQEDFYPFLKDNREKIEKILTFRIPYYVGPLARGNSRFAWMTRKSEETITPWNFEEVVDKGASAQSFIERMTNFDKNLPNEKVLPKHSLLYEYFTVYNELTKVKYVTEGMRKPAFLSGEQKKAIVDLLFKTNRKVTVKQLKEDYFKKIECFDSVEISGVEDRFNASLGTYHDLLKIIKDKDFLDNEENEDILEDIVLTLTLFEDREMIEERLKTYAHLFDDKVMKQLKRRRYTGWGRLSRKLINGIRDKQSGKTILDFLKSDGFANRNFMQLIHDDSLTFKEDIQKAQVSGQGDSLHEHIANLAGSPAIKKGILQTVKVVDELVKVMGRHKPENIVIEMARENQTTQKGQKNSRERMKRIEEGIKELGSQILKEHPVENTQLQNEKLYLYYLQNGRDMYVDQELDINRLSDYDVDHIVPQSFLKDDSIDNKVLTRSDKARGKSDNVPSEEVVKKMKNYWRQLLNAKLITQRKFDNLTKAERGGLSELDKAGFIKRQLVETRQITKHVAQILDSRMNTKYDENDKLIREVKVITLKSKLVSDFRKDFQFYKVREINNYHHAHDAYLNAVVGTALIKKYPKLESEFVYGDYKVYDVRKMIAKSEQEIGKATAKYFFYSNIMNFFKTEITLANGEIRKRPLIETNGETGEIVWDKGRDFATVRKVLSMPQVNIVKKTEVQTGGFSKESILPKRNSDKLIARKKDWDPKKYGGFDSPTVAYSVLVVAKVEKGKSKKLKSVKELLGITIMERSSFEKNPIDFLEAKGYKEVKKDLIIKLPKYSLFELENGRKRMLASAGELQKGNELALPSKYVNFLYLASHYEKLKGSPEDNEQKQLFVEQHKHYLDEIIEQISEFSKRVILADANLDKVLSAYNKHRDKPIREQAENIIHLFTLTNLGAPAAFKYFDTTIDRKRYTSTKEVLDATLIHQSITGLYETRIDLSQLGGDGGGGSEAAAKGGTAPLEEEYRLFLEAPIQNVTLLEQWKREIPKVWAEINPPGLASTQAPIHVQLLSTALPVRVRQYPITLEAKRSLRETIRKFRAAGILRPVHSPWNTPLLPVRKSGTSEYRMVQDLREVNKRVETIHPTVPNPYTLLSLLPPDRIWYSVLDLKDAFFCIPLAPESQLIFAFEWADAEEGESGQLTWTRLPQGFKNSPTLFNEALNRDLQGFRLDHPSVSLLQYVDDLLIAADTQAACLSATRDLLMTLAELGYRVSGKKAQLCQEEVTYLGFKIHKGSRSLSNSRTQAILQIPVPKTKRQVREFLGKIGYCRLFIPGFAELAQPLYAATRPGNDPLVWGEKEEEAFQSLKLALTQPPALALPSLDKPFQLFVEETSGAAKGVLTQALGPWKRPVAYLSKRLDPVAAGWPRCLRAIAAAALLTREASKLTFGQDIEITSSHNLESLLRSPPDKWLTNARITQYQVLLLDPPRVRFKQTAALNPATLLPETDDTLPIHHCLDTLDSLTSTRPDLTDQPLAQAEATLFTDGSSYIRDGKRYAGAAVVTLDSVIWAEPLPIGTSAQKAELIALTKALEWSKDKSVNIYTDSRYAFATLHVHGMIYRERGWLTAGGKAIKNAPEILALLTAVWLPKRVAVMHCKGHQKDDAPTSTGNRRADEVAREVAIRPLSTQATISAGKRTADGSEFEKRTADGSEFESPKKKAKVE

SEQ ID NO: 6623 - protein, 2092 aa, synthetic construct
MPAAKRVKLDGGDKKYSIGLDIGTNSVGWAVITDEYKVPSKKFKVLGNTDRHSIKKNLIGALLFDSGETAEATRLKRTARRRYTRRKNRICYLQEIFSNEMAKVDDSFFHRLEESFLVEEDKKHERHPIFGNIVDEVAYHEKYPTIYHLRKKLVDSTDKADLRLIYLALAHMIKFRGHFLIEGDLNPDNSDVDKLFIQLVQTYNQLFEENPINASGVDAKAILSARLSKSRRLENLIAQLPGEKKNGLFGNLIALSLGLTPNFKSNFDLAEDAKLQLSKDTYDDDLDNLLAQIGDQYADLFLAAKNLSDAILLSDILRVNTEITKAPLSASMIKRYDEHHQDLTLLKALVRQQLPEKYKEIFFDQSKNGYAGYIDGGASQEEFYKFIKPILEKMDGTEELLVKLNREDLLRKQRTFDNGSIPHQIHLGELHAILRRQEDFYPFLKDNREKIEKILTFRIPYYVGPLARGNSRFAWMTRKSEETITPWNFEEVVDKGASAQSFIERMTNFDKNLPNEKVLPKHSLLYEYFTVYNELTKVKYVTEGMRKPAFLSGEQKKAIVDLLFKTNRKVTVKQLKEDYFKKIECFDSVEISGVEDRFNASLGTYHDLLKIIKDKDFLDNEENEDILEDIVLTLTLFEDREMIEERLKTYAHLFDDKVMKQLKRRRYTGWGRLSRKLINGIRDKQSGKTILDFLKSDGFANRNFMQLIHDDSLTFKEDIQKAQVSGQGDSLHEHIANLAGSPAIKKGILQTVKVVDELVKVMGRHKPENIVIEMARENQTTQKGQKNSRERMKRIEEGIKELGSQILKEHPVENTQLQNEKLYLYYLQNGRDMYVDQELDINRLSDYDVDHIVPQSFLKDDSIDNKVLTRSDKARGKSDNVPSEEVVKKMKNYWRQLLNAKLITQRKFDNLTKAERGGLSELDKAGFIKRQLVETRQITKHVAQILDSRMNTKYDENDKLIREVKVITLKSKLVSDFRKDFQFYKVREINNYHHAHDAYLNAVVGTALIKKYPKLESEFVYGDYKVYDVRKMIAKSEQEIGKATAKYFFYSNIMNFFKTEITLANGEIRKRPLIETNGETGEIVWDKGRDFATVRKVLSMPQVNIVKKTEVQTGGFSKESILPKRNSDKLIARKKDWDPKKYGGFDSPTVAYSVLVVAKVEKGKSKKLKSVKELLGITIMERSSFEKNPIDFLEAKGYKEVKKDLIIKLPKYSLFELENGRKRMLASAGELQKGNELALPSKYVNFLYLASHYEKLKGSPEDNEQKQLFVEQHKHYLDEIIEQISEFSKRVILADANLDKVLSAYNKHRDKPIREQAENIIHLFTLTNLGAPAAFKYFDTTIDRKRYTSTKEVLDATLIHQSITGLYETRIDLSQLGGDGGGGSEAAAKGGTLQLEEEYRLFEPESTQKQEMDIWLKNFPQAWAETGGMGTAHCQAPVLIQLKATATPISIRQYPMPHEAYQGIKPHIRRMLDQGILKPCQSPWNTPLLPVKKPGTEDYRPVQDLREVNKRVEDIHPTVPNPYNLLSTLPPSHPWYTVLDLKDAFFCLRLHSESQLLFAFEWRDPEIGLSGQLTWTRLPQGFKNSPTLFNEALHSDLADFRVRYPALVLLQYVDDLLLAAATRTECLEGTKALLETLGNKGYRASAKKAQICLQEVTYLGYSLKDGQRWLTKARKEAILSIPVPKNSRQVREFLGTAGYCRLWIPGFAELAAPLYPLTRPGTLFQWGTEQQLAFEDIKKALLSSPALGLPDITKPFELFIDENSGFAKGVLVQKLGPWKRPVAYLSKKLDTVASGWPPCLRMVAAIAILVKDAGKLTLGQPLTILTSHPVEALVRQPPNKWLSNARMTHYQAMLLDAERVHFGPTVSLNPATLLPLPSGGNHHDCLQILAETHGTRPDLTDQPLPDADLTWYTDGSSFIRNGEREAGAAVTTESEVIWAAPLPPGTSAQRAELIALTQALKMAEGKKLTVYTDSRYAFATTHVHGEIYRRRGWLTSEGKEIKNKNEILALLEALFLPKRLSIIHCPGHQKGDSPQAKGNRLADDTAKKAATETHSSLTVLPAGKRTADGSEFEKRTADGSEFESPKKKAKVE

SEQ ID NO: 6624 - protein, 2124 aa, synthetic construct
MPAAKRVKLDGGDKKYSIGLDIGTNSVGWAVITDEYKVPSKKFKVLGNTDRHSIKKNLIGALLFDSGETAEATRLKRTARRRYTRRKNRICYLQEIFSNEMAKVDDSFFHRLEESFLVEEDKKHERHPIFGNIVDEVAYHEKYPTIYHLRKKLVDSTDKADLRLIYLALAHMIKFRGHFLIEGDLNPDNSDVDKLFIQLVQTYNQLFEENPINASGVDAKAILSARLSKSRRLENLIAQLPGEKKNGLFGNLIALSLGLTPNFKSNFDLAEDAKLQLSKDTYDDDLDNLLAQIGDQYADLFLAAKNLSDAILLSDILRVNTEITKAPLSASMIKRYDEHHQDLTLLKALVRQQLPEKYKEIFFDQSKNGYAGYIDGGASQEEFYKFIKPILEKMDGTEELLVKLNREDLLRKQRTFDNGSIPHQIHLGELHAILRRQEDFYPFLKDNREKIEKILTFRIPYYVGPLARGNSRFAWMTRKSEETITPWNFEEVVDKGASAQSFIERMTNFDKNLPNEKVLPKHSLLYEYFTVYNELTKVKYVTEGMRKPAFLSGEQKKAIVDLLFKTNRKVTVKQLKEDYFKKIECFDSVEISGVEDRFNASLGTYHDLLKIIKDKDFLDNEENEDILEDIVLTLTLFEDREMIEERLKTYAHLFDDKVMKQLKRRRYTGWGRLSRKLINGIRDKQSGKTILDFLKSDGFANRNFMQLIHDDSLTFKEDIQKAQVSGQGDSLHEHIANLAGSPAIKKGILQTVKVVDELVKVMGRHKPENIVIEMARENQTTQKGQKNSRERMKRIEEGIKELGSQILKEHPVENTQLQNEKLYLYYLQNGRDMYVDQELDINRLSDYDVDHIVPQSFLKDDSIDNKVLTRSDKARGKSDNVPSEEVVKKMKNYWRQLLNAKLITQRKFDNLTKAERGGLSELDKAGFIKRQLVETRQITKHVAQILDSRMNTKYDENDKLIREVKVITLKSKLVSDFRKDFQFYKVREINNYHHAHDAYLNAVVGTALIKKYPKLESEFVYGDYKVYDVRKMIAKSEQEIGKATAKYFFYSNIMNFFKTEITLANGEIRKRPLIETNGETGEIVWDKGRDFATVRKVLSMPQVNIVKKTEVQTGGFSKESILPKRNSDKLIARKKDWDPKKYGGFDSPTVAYSVLVVAKVEKGKSKKLKSVKELLGITIMERSSFEKNPIDFLEAKGYKEVKKDLIIKLPKYSLFELENGRKRMLASAGELQKGNELALPSKYVNFLYLASHYEKLKGSPEDNEQKQLFVEQHKHYLDEIIEQISEFSKRVILADANLDKVLSAYNKHRDKPIREQAENIIHLFTLTNLGAPAAFKYFDTTIDRKRYTSTKEVLDATLIHQSITGLYETRIDLSQLGGDGGGGSEAAAKGGLLGRDLLTKLKAQIQFSTEGPQVTWEDRPAMCLVLNLEEEYRLHEKPVPPSIDPSWLQLFPMVWAEKAGMGLANQVPPVVVELKSDASPVAVRQYPMSKEAREGIRPHIQRFLDLGILVPCQSPWNTPLLPVKKPGTNDYRPVQDLREVNKRVQDIHPTVPNPYNLLSSLPPSHTWYSVLDLKDAFFCLKLHPNSQPLFAFEWRDPEKGNTGQLTWTRLPQGFKNSPTLFNEALHRDLASFRALNPQVVMLQYVDDLLVAAPTYRDCKEGTRRLLQELSKLGYRVSAKKAQLCREEVTYLGYLLKGGKRWLTPARKATVMKIPTPTTPRQVREFLGTAGFCRLWIPGFASLAAPLYPLTRPKVPFTWTEAHQEAFGRIKEALLSAPALALPDLTKPFALYVDEKEGVARGVLTQTLGPWRRPVAYLSKKLDPVASGWPTCLKAIAAVALLLKDADKLTLGQNVLVIAPHNLESIVRQPPDRWMTNARMTHYQSLLLNERVSFAPPAILNPATLLPVESDDTPIHICSEILAEETGTRPDLRDQPLPGVPAWYTDGSSFIMDGRRQAGAAIVDNKRTVWASNLPEGTSAQKAELIALTQALRLAEGKSINIYTDSRYAFATAHVHGAIYKQRGWLTSAGKDIKNKEEILALLEAIHLPKRVAIIHCPGHQRGTDPVATGNRKADEAAKQAAQSTRILTETTKNAGKRTADGSEFEKRTADGSEFESPKKKAKVE

SEQ ID NO: 6625 - protein, 2215 aa, synthetic construct
MPAAKRVKLDGGDKKYSIGLDIGTNSVGWAVITDEYKVPSKKFKVLGNTDRHSIKKNLIGALLFDSGETAEATRLKRTARRRYTRRKNRICYLQEIFSNEMAKVDDSFFHRLEESFLVEEDKKHERHPIFGNIVDEVAYHEKYPTIYHLRKKLVDSTDKADLRLIYLALAHMIKFRGHFLIEGDLNPDNSDVDKLFIQLVQTYNQLFEENPINASGVDAKAILSARLSKSRRLENLIAQLPGEKKNGLFGNLIALSLGLTPNFKSNFDLAEDAKLQLSKDTYDDDLDNLLAQIGDQYADLFLAAKNLSDAILLSDILRVNTEITKAPLSASMIKRYDEHHQDLTLLKALVRQQLPEKYKEIFFDQSKNGYAGYIDGGASQEEFYKFIKPILEKMDGTEELLVKLNREDLLRKQRTFDNGSIPHQIHLGELHAILRRQEDFYPFLKDNREKIEKILTFRIPYYVGPLARGNSRFAWMTRKSEETITPWNFEEVVDKGASAQSFIERMTNFDKNLPNEKVLPKHSLLYEYFTVYNELTKVKYVTEGMRKPAFLSGEQKKAIVDLLFKTNRKVTVKQLKEDYFKKIECFDSVEISGVEDRFNASLGTYHDLLKIIKDKDFLDNEENEDILEDIVLTLTLFEDREMIEERLKTYAHLFDDKVMKQLKRRRYTGWGRLSRKLINGIRDKQSGKTILDFLKSDGFANRNFMQLIHDDSLTFKEDIQKAQVSGQGDSLHEHIANLAGSPAIKKGILQTVKVVDELVKVMGRHKPENIVIEMARENQTTQKGQKNSRERMKRIEEGIKELGSQILKEHPVENTQLQNEKLYLYYLQNGRDMYVDQELDINRLSDYDVDHIVPQSFLKDDSIDNKVLTRSDKARGKSDNVPSEEVVKKMKNYWRQLLNAKLITQRKFDNLTKAERGGLSELDKAGFIKRQLVETRQITKHVAQILDSRMNTKYDENDKLIREVKVITLKSKLVSDFRKDFQFYKVREINNYHHAHDAYLNAVVGTALIKKYPKLESEFVYGDYKVYDVRKMIAKSEQEIGKATAKYFFYSNIMNFFKTEITLANGEIRKRPLIETNGETGEIVWDKGRDFATVRKVLSMPQVNIVKKTEVQTGGFSKESILPKRNSDKLIARKKDWDPKKYGGFDSPTVAYSVLVVAKVEKGKSKKLKSVKELLGITIMERSSFEKNPIDFLEAKGYKEVKKDLIIKLPKYSLFELENGRKRMLASAGELQKGNELALPSKYVNFLYLASHYEKLKGSPEDNEQKQLFVEQHKHYLDEIIEQISEFSKRVILADANLDKVLSAYNKHRDKPIREQAENIIHLFTLTNLGAPAAFKYFDTTIDRKRYTSTKEVLDATLIHQSITGLYETRIDLSQLGGDGGGGSEAAAKGGTLGDQGSRGSDPLPEPRVTLTVEGIPTEFLVNTGAEHSVLTKPMGKMGSKRTVVAGATGSKVYPWTTKRLLKIGQKQVTHSFLVIPECPAPLLGRDLLTKLKAQIQFSTEGPQVTWEDRPAMCLVLNLEEEYRLHEKPVPPSIDPSWLQLFPMVWAEKAGMGLANQVPPVVVELKSDASPVAVRQYPMSKEAREGIRPHIQRFLDLGILVPCQSPWNTPLLPVKKPGTNDYRPVQDLREVNKRVQDIHPTVPNPYNLLSSLPPSHTWYSVLDLKDAFFCLKLHPNSQPLFAFEWRDPEKGNTGQLTWTRLPQGFKNSPTLFNEALHRDLASFRALNPQVVMLQYVDDLLVAAPTYRDCKEGTRRLLQELSKLGYRVSAKKAQLCREEVTYLGYLLKGGKRWLTPARKATVMKIPTPTTPRQVREFLGTAGFCRLWIPGFASLAAPLYPLTRPKVPFTWTEAHQEAFGRIKEALLSAPALALPDLTKPFALYVDEKEGVARGVLTQTLGPWRRPVAYLSKKLDPVASGWPTCLKAIAAVALLLKDADKLTLGQNVLVIAPHNLESIVRQPPDRWMTNARMTHYQSLLLNERVSFAPPAILNPATLLPVESDDTPIHICSEILAEETGTRPDLRDQPLPGVPAWYTDGSSFIMDGRRQAGAAIVDNKRTVWASNLPEGTSAQKAELIALTQALRLAEGKSINIYTDSRYAFATAHVHGAIYKQRGWLTSAGKDIKNKEEILALLEAIHLPKRVAIIHCPGHQRGTDPVATGNRKADEAAKQAAQSTRILTETTKNAGKRTADGSEFEKRTADGSEFESPKKKAKVE

SEQ ID NO: 6626 - protein, 2093 aa, synthetic construct
MPAAKRVKLDGGDKKYSIGLDIGTNSVGWAVITDEYKVPSKKFKVLGNTDRHSIKKNLIGALLFDSGETAEATRLKRTARRRYTRRKNRICYLQEIFSNEMAKVDDSFFHRLEESFLVEEDKKHERHPIFGNIVDEVAYHEKYPTIYHLRKKLVDSTDKADLRLIYLALAHMIKFRGHFLIEGDLNPDNSDVDKLFIQLVQTYNQLFEENPINASGVDAKAILSARLSKSRRLENLIAQLPGEKKNGLFGNLIALSLGLTPNFKSNFDLAEDAKLQLSKDTYDDDLDNLLAQIGDQYADLFLAAKNLSDAILLSDILRVNTEITKAPLSASMIKRYDEHHQDLTLLKALVRQQLPEKYKEIFFDQSKNGYAGYIDGGASQEEFYKFIKPILEKMDGTEELLVKLNREDLLRKQRTFDNGSIPHQIHLGELHAILRRQEDFYPFLKDNREKIEKILTFRIPYYVGPLARGNSRFAWMTRKSEETITPWNFEEVVDKGASAQSFIERMTNFDKNLPNEKVLPKHSLLYEYFTVYNELTKVKYVTEGMRKPAFLSGEQKKAIVDLLFKTNRKVTVKQLKEDYFKKIECFDSVEISGVEDRFNASLGTYHDLLKIIKDKDFLDNEENEDILEDIVLTLTLFEDREMIEERLKTYAHLFDDKVMKQLKRRRYTGWGRLSRKLINGIRDKQSGKTILDFLKSDGFANRNFMQLIHDDSLTFKEDIQKAQVSGQGDSLHEHIANLAGSPAIKKGILQTVKVVDELVKVMGRHKPENIVIEMARENQTTQKGQKNSRERMKRIEEGIKELGSQILKEHPVENTQLQNEKLYLYYLQNGRDMYVDQELDINRLSDYDVDHIVPQSFLKDDSIDNKVLTRSDKARGKSDNVPSEEVVKKMKNYWRQLLNAKLITQRKFDNLTKAERGGLSELDKAGFIKRQLVETRQITKHVAQILDSRMNTKYDENDKLIREVKVITLKSKLVSDFRKDFQFYKVREINNYHHAHDAYLNAVVGTALIKKYPKLESEFVYGDYKVYDVRKMIAKSEQEIGKATAKYFFYSNIMNFFKTEITLANGEIRKRPLIETNGETGEIVWDKGRDFATVRKVLSMPQVNIVKKTEVQTGGFSKESILPKRNSDKLIARKKDWDPKKYGGFDSPTVAYSVLVVAKVEKGKSKKLKSVKELLGITIMERSSFEKNPIDFLEAKGYKEVKKDLIIKLPKYSLFELENGRKRMLASAGELQKGNELALPSKYVNFLYLASHYEKLKGSPEDNEQKQLFVEQHKHYLDEIIEQISEFSKRVILADANLDKVLSAYNKHRDKPIREQAENIIHLFTLTNLGAPAAFKYFDTTIDRKRYTSTKEVLDATLIHQSITGLYETRIDLSQLGGDGGGGSEAAAKGGTLNIEDEYRLHETSKEPDVSLGSTWLSDFPQAWAETGGMGLAVRQAPLIIPLKATSTPVSIKQYPMSQEARLGIKPHIQRLLDQGILVPCQSPWNTPLLPVKKPGTNDYRPVQDLREVNKRVEDIHPTVPNPYNLLSGLPPSHQWYTVLDLKDAFFCLRLHPTSQPLFAFEWRDPEMGISGQLTWTRLPQGFKNSPTLFNEALHRDLAGFRIQHPDLILLQYVDDLLLAATSELDCQQGTRALLQTLGDLGYRASAKKAQICQKQVKYLGYLLKEGQRWLTEARKETVMGQPIPKTPRQLREFLGTAGFCRLWIPGFAEMAAPLYPLTKPGTLFNWGPDQQKAFQEIKQALLTAPALGLPDLTKPFELFVDEKQGYAKGVLTQKLGPWRRPVAYLSKKLDPVAAGWPPCLRMVAAIAVLTKDAGKLTMGQPLVILAPHAVEALVKQPPDRWLSNARMTHYQALLLDTDRVQFGPVVALNPATLLPLPEEGLQHDCLDILAEAHGTRSDLMDQPLPDADHTWYTDGSSFLQEGQRKAGAAVTTETEVIWARALPAGTSAQRAELIALTQALKMAEGKKLNVYTDSRYAFATAHIHGEIYRRRGWLTSEGKEIKNKDEILALLKALFLPKRLSIIHCPGHQKGNSAEARGNRMADQAAREVATRETPETSTLLAGKRTADGSEFEKRTADGSEFESPKKKAKVE

SEQ ID NO: 6627 - protein, 2093 aa, synthetic construct
MPAAKRVKLDGGDKKYSIGLDIGTNSVGWAVITDEYKVPSKKFKVLGNTDRHSIKKNLIGALLFDSGETAEATRLKRTARRRYTRRKNRICYLQEIFSNEMAKVDDSFFHRLEESFLVEEDKKHERHPIFGNIVDEVAYHEKYPTIYHLRKKLVDSTDKADLRLIYLALAHMIKFRGHFLIEGDLNPDNSDVDKLFIQLVQTYNQLFEENPINASGVDAKAILSARLSKSRRLENLIAQLPGEKKNGLFGNLIALSLGLTPNFKSNFDLAEDAKLQLSKDTYDDDLDNLLAQIGDQYADLFLAAKNLSDAILLSDILRVNTEITKAPLSASMIKRYDEHHQDLTLLKALVRQQLPEKYKEIFFDQSKNGYAGYIDGGASQEEFYKFIKPILEKMDGTEELLVKLNREDLLRKQRTFDNGSIPHQIHLGELHAILRRQEDFYPFLKDNREKIEKILTFRIPYYVGPLARGNSRFAWMTRKSEETITPWNFEEVVDKGASAQSFIERMTNFDKNLPNEKVLPKHSLLYEYFTVYNELTKVKYVTEGMRKPAFLSGEQKKAIVDLLFKTNRKVTVKQLKEDYFKKIECFDSVEISGVEDRFNASLGTYHDLLKIIKDKDFLDNEENEDILEDIVLTLTLFEDREMIEERLKTYAHLFDDKVMKQLKRRRYTGWGRLSRKLINGIRDKQSGKTILDFLKSDGFANRNFMQLIHDDSLTFKEDIQKAQVSGQGDSLHEHIANLAGSPAIKKGILQTVKVVDELVKVMGRHKPENIVIEMARENQTTQKGQKNSRERMKRIEEGIKELGSQILKEHPVENTQLQNEKLYLYYLQNGRDMYVDQELDINRLSDYDVDHIVPQSFLKDDSIDNKVLTRSDKARGKSDNVPSEEVVKKMKNYWRQLLNAKLITQRKFDNLTKAERGGLSELDKAGFIKRQLVETRQITKHVAQILDSRMNTKYDENDKLIREVKVITLKSKLVSDFRKDFQFYKVREINNYHHAHDAYLNAVVGTALIKKYPKLESEFVYGDYKVYDVRKMIAKSEQEIGKATAKYFFYSNIMNFFKTEITLANGEIRKRPLIETNGETGEIVWDKGRDFATVRKVLSMPQVNIVKKTEVQTGGFSKESILPKRNSDKLIARKKDWDPKKYGGFDSPTVAYSVLVVAKVEKGKSKKLKSVKELLGITIMERSSFEKNPIDFLEAKGYKEVKKDLIIKLPKYSLFELENGRKRMLASAGELQKGNELALPSKYVNFLYLASHYEKLKGSPEDNEQKQLFVEQHKHYLDEIIEQISEFSKRVILADANLDKVLSAYNKHRDKPIREQAENIIHLFTLTNLGAPAAFKYFDTTIDRKRYTSTKEVLDATLIHQSITGLYETRIDLSQLGGDGGGGSEAAAKGGTLNIEDEYRLHETSKGPDVPLGSTWLSDFPQAWAETGGMGLAVRQAPLIIPLKATSTPVSIKQYPMSQEARLGIKPHIQRLLDQGILVPCQSPWNTPLLPVKKPGTNDYRPVQDLREVNKRVEDIHPTVPNPYNLLSGLPPSHQWYTVLDLKDAFFCLRLHPTSQSLFAFEWRDPEMGISGQLTWTRLPQGFKNSPTLFNEALHRDLADFRIQHPDLILLQYVDDLLLAATSELDCQQGTRALLQTLGDLGYRASAKKAQICQKQVKYLGYLLKEGQRWLTEARKETVMGQPTPKTPRQLREFLGTAGFCRLWIPGFAEMAAPLYPLTKPGTLFEWGPDQQKAYQEIKQALLTAPALGLPDLTKPFELFVDEKQGYAKGVLTQKLGPWRRPVAYLSKKLDPVAAGWPPCLRMVAAIAVLTKDAGKLTMGQPLVILAPHAVEALVKQPPDRWLSNARMTHYQALLLDTDRVQFGPIVALNPATLLPLPEEGLQHDCLDILAEAHGTRPDLTDQPLPDADHTWYTDGSSFLQEGQRKAGAAVTTETEVVWAKALPAGTSAQRAELIALTQALKMAEGKKLNVYTDSRYAFATAHIHGEIYRRRGWLTSEGKEIKNKDEILALLKALFLPKRLSIIHCPGHQKGNRAEARGNRMADQAAREVATRETPETSTLLAGKRTADGSEFEKRTADGSEFESPKKKAKVE

SEQ ID NO: 6628 - protein, 2084 aa, synthetic construct
MPAAKRVKLDGGDKKYSIGLDIGTNSVGWAVITDEYKVPSKKFKVLGNTDRHSIKKNLIGALLFDSGETAEATRLKRTARRRYTRRKNRICYLQEIFSNEMAKVDDSFFHRLEESFLVEEDKKHERHPIFGNIVDEVAYHEKYPTIYHLRKKLVDSTDKADLRLIYLALAHMIKFRGHFLIEGDLNPDNSDVDKLFIQLVQTYNQLFEENPINASGVDAKAILSARLSKSRRLENLIAQLPGEKKNGLFGNLIALSLGLTPNFKSNFDLAEDAKLQLSKDTYDDDLDNLLAQIGDQYADLFLAAKNLSDAILLSDILRVNTEITKAPLSASMIKRYDEHHQDLTLLKALVRQQLPEKYKEIFFDQSKNGYAGYIDGGASQEEFYKFIKPILEKMDGTEELLVKLNREDLLRKQRTFDNGSIPHQIHLGELHAILRRQEDFYPFLKDNREKIEKILTFRIPYYVGPLARGNSRFAWMTRKSEETITPWNFEEVVDKGASAQSFIERMTNFDKNLPNEKVLPKHSLLYEYFTVYNELTKVKYVTEGMRKPAFLSGEQKKAIVDLLFKTNRKVTVKQLKEDYFKKIECFDSVEISGVEDRFNASLGTYHDLLKIIKDKDFLDNEENEDILEDIVLTLTLFEDREMIEERLKTYAHLFDDKVMKQLKRRRYTGWGRLSRKLINGIRDKQSGKTILDFLKSDGFANRNFMQLIHDDSLTFKEDIQKAQVSGQGDSLHEHIANLAGSPAIKKGILQTVKVVDELVKVMGRHKPENIVIEMARENQTTQKGQKNSRERMKRIEEGIKELGSQILKEHPVENTQLQNEKLYLYYLQNGRDMYVDQELDINRLSDYDVDHIVPQSFLKDDSIDNKVLTRSDKARGKSDNVPSEEVVKKMKNYWRQLLNAKLITQRKFDNLTKAERGGLSELDKAGFIKRQLVETRQITKHVAQILDSRMNTKYDENDKLIREVKVITLKSKLVSDFRKDFQFYKVREINNYHHAHDAYLNAVVGTALIKKYPKLESEFVYGDYKVYDVRKMIAKSEQEIGKATAKYFFYSNIMNFFKTEITLANGEIRKRPLIETNGETGEIVWDKGRDFATVRKVLSMPQVNIVKKTEVQTGGFSKESILPKRNSDKLIARKKDWDPKKYGGFDSPTVAYSVLVVAKVEKGKSKKLKSVKELLGITIMERSSFEKNPIDFLEAKGYKEVKKDLIIKLPKYSLFELENGRKRMLASAGELQKGNELALPSKYVNFLYLASHYEKLKGSPEDNEQKQLFVEQHKHYLDEIIEQISEFSKRVILADANLDKVLSAYNKHRDKPIREQAENIIHLFTLTNLGAPAAFKYFDTTIDRKRYTSTKEVLDATLIHQSITGLYETRIDLSQLGGDGGGGSEAAAKGGIPWLMKKPLQLTTLVPLQEYEERLLKQTMLTGSYKEKLQSLFLKYDALWQHWENQVGHRRIKPHHIATGTVNPRPQKQYPINPKAKASIQTVINDLLKQGVLIQQNSIMNTPVYPVPKPDGKWRMVLDYREVNKTIPLIAAQNQHSAGILSSIFRGKYKTTLDLSNGFWAHSITPESYWLTAFTWLGQQYCWTRLPQGFLNSPALFNADVVDLLKEVPNVQVYVDDIYISHDDPREHLEQLEKVFSLLLNAGYVVSLKKSEIAQHEVEFLGFNITKEGRGLTETFKQKLLNITPPRDLKQLQSILGLLNFARNFIPNFSELVKPLYNIIATAPGKYITWTTDNSQQLQNIISMLNSAENLEERNPEVRLIMKVNTSPSAGYIRFYNEFAKRPIMYLNYVYTKAEVKFTNTEKLLTTIHKGLIKALDLGMGQEILVYSPIVSMTKIQKTPLPERKALPIRWITWMSYLEDPRIQFHYDKTLPELQQVPTVTDDIIAKIKHPSEFSMVFYTDGSAIKHPNVNKSHNAGMGIAQVQFKPEFTVINTWSIPLGDHTAQLAEVAAVEFACKKALKIDGPVLIVTDSFYVAESVNKELPYWQSNGFFNNKKKPLKHVSKWKSIADCIQLKPDIIIIHEKGHQPTASTFHTEGNNLADKLATQGSYVVNAGKRTADGSEFEKRTADGSEFESPKKKAKVE

SEQ ID NO: 6629 - protein, 2091 aa, synthetic construct
MPAAKRVKLDGGDKKYSIGLDIGTNSVGWAVITDEYKVPSKKFKVLGNTDRHSIKKNLIGALLFDSGETAEATRLKRTARRRYTRRKNRICYLQEIFSNEMAKVDDSFFHRLEESFLVEEDKKHERHPIFGNIVDEVAYHEKYPTIYHLRKKLVDSTDKADLRLIYLALAHMIKFRGHFLIEGDLNPDNSDVDKLFIQLVQTYNQLFEENPINASGVDAKAILSARLSKSRRLENLIAQLPGEKKNGLFGNLIALSLGLTPNFKSNFDLAEDAKLQLSKDTYDDDLDNLLAQIGDQYADLFLAAKNLSDAILLSDILRVNTEITKAPLSASMIKRYDEHHQDLTLLKALVRQQLPEKYKEIFFDQSKNGYAGYIDGGASQEEFYKFIKPILEKMDGTEELLVKLNREDLLRKQRTFDNGSIPHQIHLGELHAILRRQEDFYPFLKDNREKIEKILTFRIPYYVGPLARGNSRFAWMTRKSEETITPWNFEEVVDKGASAQSFIERMTNFDKNLPNEKVLPKHSLLYEYFTVYNELTKVKYVTEGMRKPAFLSGEQKKAIVDLLFKTNRKVTVKQLKEDYFKKIECFDSVEISGVEDRFNASLGTYHDLLKIIKDKDFLDNEENEDILEDIVLTLTLFEDREMIEERLKTYAHLFDDKVMKQLKRRRYTGWGRLSRKLINGIRDKQSGKTILDFLKSDGFANRNFMQLIHDDSLTFKEDIQKAQVSGQGDSLHEHIANLAGSPAIKKGILQTVKVVDELVKVMGRHKPENIVIEMARENQTTQKGQKNSRERMKRIEEGIKELGSQILKEHPVENTQLQNEKLYLYYLQNGRDMYVDQELDINRLSDYDVDHIVPQSFLKDDSIDNKVLTRSDKARGKSDNVPSEEVVKKMKNYWRQLLNAKLITQRKFDNLTKAERGGLSELDKAGFIKRQLVETRQITKHVAQILDSRMNTKYDENDKLIREVKVITLKSKLVSDFRKDFQFYKVREINNYHHAHDAYLNAVVGTALIKKYPKLESEFVYGDYKVYDVRKMIAKSEQEIGKATAKYFFYSNIMNFFKTEITLANGEIRKRPLIETNGETGEIVWDKGRDFATVRKVLSMPQVNIVKKTEVQTGGFSKESILPKRNSDKLIARKKDWDPKKYGGFDSPTVAYSVLVVAKVEKGKSKKLKSVKELLGITIMERSSFEKNPIDFLEAKGYKEVKKDLIIKLPKYSLFELENGRKRMLASAGELQKGNELALPSKYVNFLYLASHYEKLKGSPEDNEQKQLFVEQHKHYLDEIIEQISEFSKRVILADANLDKVLSAYNKHRDKPIREQAENIIHLFTLTNLGAPAAFKYFDTTIDRKRYTSTKEVLDATLIHQSITGLYETRIDLSQLGGDGGGGSEAAAKGGVLNLEEEYRLHEKPVPSSIDPSWLQLFPTVWAERAGMGLANQVPPVVVELRSGASPVAVRQYPMSKEAREGIRPHIQRFLDLGVLVPCQSPWNTPLLPVKKPGTNDYRPVQDLREINKRVQDIHPTVPNPYNLLSSLPPSHTWYSVLDLKDAFFCLKLHPNSQPLFAFEWRDPEKGNTGQLTWTRLPQGFKNSPTLFNEALHRDLAPFRALNPQVVLLQYVDDLLVAAPTYRDCKEGTQKLLQELSKLGYRVSAKKAQLCQKEVTYLGYLLKEGKRWLTPARKATVMKIPPPTTPRQVREFLGKAGFCRLFIPGFASLAAPLYPLTKPSIPFIWTEEHQKAFDRIKEALLSAPALALPDLTKPFTLYVDERAGVARGVLTQTLGPWRRPVAYLSKKLDPVASGWPTCLKAVAAVALLLKDADKLTLGQNVTVIASHSLESIVRQPPDRWMTNARMTHYQSLLLNERVSFAPPAVLNPATLLPVESEATPVHRCSEILAEETGTRRDLKDQPLPGVPAWYTDGSSFIAEGKRRAGAAIVDGKRTVWASSLPEGTSAQKAELVALTQALRLAEGKDINIYTDSRYAFATAHIHGAIYKQRGWLTSAGKDIKNKEEILALLEAIHLPKRVAIIHCPGHQKGNDPVATGNRRADEAAKQAALSTRVLAETTKPAGKRTADGSEFEKRTADGSEFESPKKKAKVE

SEQ ID NO: 6630 - protein, 2092 aa, synthetic construct
MPAAKRVKLDGGDKKYSIGLDIGTNSVGWAVITDEYKVPSKKFKVLGNTDRHSIKKNLIGALLFDSGETAEATRLKRTARRRYTRRKNRICYLQEIFSNEMAKVDDSFFHRLEESFLVEEDKKHERHPIFGNIVDEVAYHEKYPTIYHLRKKLVDSTDKADLRLIYLALAHMIKFRGHFLIEGDLNPDNSDVDKLFIQLVQTYNQLFEENPINASGVDAKAILSARLSKSRRLENLIAQLPGEKKNGLFGNLIALSLGLTPNFKSNFDLAEDAKLQLSKDTYDDDLDNLLAQIGDQYADLFLAAKNLSDAILLSDILRVNTEITKAPLSASMIKRYDEHHQDLTLLKALVRQQLPEKYKEIFFDQSKNGYAGYIDGGASQEEFYKFIKPILEKMDGTEELLVKLNREDLLRKQRTFDNGSIPHQIHLGELHAILRRQEDFYPFLKDNREKIEKILTFRIPYYVGPLARGNSRFAWMTRKSEETITPWNFEEVVDKGASAQSFIERMTNFDKNLPNEKVLPKHSLLYEYFTVYNELTKVKYVTEGMRKPAFLSGEQKKAIVDLLFKTNRKVTVKQLKEDYFKKIECFDSVEISGVEDRFNASLGTYHDLLKIIKDKDFLDNEENEDILEDIVLTLTLFEDREMIEERLKTYAHLFDDKVMKQLKRRRYTGWGRLSRKLINGIRDKQSGKTILDFLKSDGFANRNFMQLIHDDSLTFKEDIQKAQVSGQGDSLHEHIANLAGSPAIKKGILQTVKVVDELVKVMGRHKPENIVIEMARENQTTQKGQKNSRERMKRIEEGIKELGSQILKEHPVENTQLQNEKLYLYYLQNGRDMYVDQELDINRLSDYDVDHIVPQSFLKDDSIDNKVLTRSDKARGKSDNVPSEEVVKKMKNYWRQLLNAKLITQRKFDNLTKAERGGLSELDKAGFIKRQLVETRQITKHVAQILDSRMNTKYDENDKLIREVKVITLKSKLVSDFRKDFQFYKVREINNYHHAHDAYLNAVVGTALIKKYPKLESEFVYGDYKVYDVRKMIAKSEQEIGKATAKYFFYSNIMNFFKTEITLANGEIRKRPLIETNGETGEIVWDKGRDFATVRKVLSMPQVNIVKKTEVQTGGFSKESILPKRNSDKLIARKKDWDPKKYGGFDSPTVAYSVLVVAKVEKGKSKKLKSVKELLGITIMERSSFEKNPIDFLEAKGYKEVKKDLIIKLPKYSLFELENGRKRMLASAGELQKGNELALPSKYVNFLYLASHYEKLKGSPEDNEQKQLFVEQHKHYLDEIIEQISEFSKRVILADANLDKVLSAYNKHRDKPIREQAENIIHLFTLTNLGAPAAFKYFDTTIDRKRYTSTKEVLDATLIHQSITGLYETRIDLSQLGGDGGEAAAKGGSGGTLQLEEEYRLFEPESTQKQEMDIWLKNFPQAWAETGGMGTAHCQAPVLIQLKATATPISIRQYPMPHEAYQGIKPHIRRMLDQGILKPCQSPWNTPLLPVKKPGTEDYRPVQDLREVNKRVEDIHPTVPNPYNLLSTLPPSHPWYTVLDLKDAFFCLRLHSESQLLFAFEWRDPEIGLSGQLTWTRLPQGFKNSPTLFNEALHSDLADFRVRYPALVLLQYVDDLLLAAATRTECLEGTKALLETLGNKGYRASAKKAQICLQEVTYLGYSLKDGQRWLTKARKEAILSIPVPKNSRQVREFLGKAGYCRLFIPGFAELAAPLYPLTRPGTLFQWGTEQQLAFEDIKKALLSSPALGLPDITKPFELFIDENSGFAKGVLVQKLGPWKRPVAYLSKKLDTVASGWPPCLRMVAAIAILVKDAGKLTLGQPLTILTSHPVEALVRQPPNKWLSNARMTHYQAMLLDAERVHFGPTVSLNPATLLPLPSGGNHHDCLQILAETHGTRPDLTDQPLPDADLTWYTDGSSFIRNGEREAGAAVTTESEVIWAAPLPPGTSAQRAELIALTQALKMAEGKKLTVYTDSRYAFATTHVHGEIYRRRGWLTSEGKEIKNKNEILALLEALFLPKRLSIIHCPGHQKGDSPQAKGNRLADDTAKKAATETHSSLTVLPAGKRTADGSEFEKRTADGSEFESPKKKAKVE

SEQ ID NO: 6631 - protein, 2091 aa, synthetic construct
MPAAKRVKLDGGDKKYSIGLDIGTNSVGWAVITDEYKVPSKKFKVLGNTDRHSIKKNLIGALLFDSGETAEATRLKRTARRRYTRRKNRICYLQEIFSNEMAKVDDSFFHRLEESFLVEEDKKHERHPIFGNIVDEVAYHEKYPTIYHLRKKLVDSTDKADLRLIYLALAHMIKFRGHFLIEGDLNPDNSDVDKLFIQLVQTYNQLFEENPINASGVDAKAILSARLSKSRRLENLIAQLPGEKKNGLFGNLIALSLGLTPNFKSNFDLAEDAKLQLSKDTYDDDLDNLLAQIGDQYADLFLAAKNLSDAILLSDILRVNTEITKAPLSASMIKRYDEHHQDLTLLKALVRQQLPEKYKEIFFDQSKNGYAGYIDGGASQEEFYKFIKPILEKMDGTEELLVKLNREDLLRKQRTFDNGSIPHQIHLGELHAILRRQEDFYPFLKDNREKIEKILTFRIPYYVGPLARGNSRFAWMTRKSEETITPWNFEEVVDKGASAQSFIERMTNFDKNLPNEKVLPKHSLLYEYFTVYNELTKVKYVTEGMRKPAFLSGEQKKAIVDLLFKTNRKVTVKQLKEDYFKKIECFDSVEISGVEDRFNASLGTYHDLLKIIKDKDFLDNEENEDILEDIVLTLTLFEDREMIEERLKTYAHLFDDKVMKQLKRRRYTGWGRLSRKLINGIRDKQSGKTILDFLKSDGFANRNFMQLIHDDSLTFKEDIQKAQVSGQGDSLHEHIANLAGSPAIKKGILQTVKVVDELVKVMGRHKPENIVIEMARENQTTQKGQKNSRERMKRIEEGIKELGSQILKEHPVENTQLQNEKLYLYYLQNGRDMYVDQELDINRLSDYDVDHIVPQSFLKDDSIDNKVLTRSDKARGKSDNVPSEEVVKKMKNYWRQLLNAKLITQRKFDNLTKAERGGLSELDKAGFIKRQLVETRQITKHVAQILDSRMNTKYDENDKLIREVKVITLKSKLVSDFRKDFQFYKVREINNYHHAHDAYLNAVVGTALIKKYPKLESEFVYGDYKVYDVRKMIAKSEQEIGKATAKYFFYSNIMNFFKTEITLANGEIRKRPLIETNGETGEIVWDKGRDFATVRKVLSMPQVNIVKKTEVQTGGFSKESILPKRNSDKLIARKKDWDPKKYGGFDSPTVAYSVLVVAKVEKGKSKKLKSVKELLGITIMERSSFEKNPIDFLEAKGYKEVKKDLIIKLPKYSLFELENGRKRMLASAGELQKGNELALPSKYVNFLYLASHYEKLKGSPEDNEQKQLFVEQHKHYLDEIIEQISEFSKRVILADANLDKVLSAYNKHRDKPIREQAENIIHLFTLTNLGAPAAFKYFDTTIDRKRYTSTKEVLDATLIHQSITGLYETRIDLSQLGGDGGEAAAKGGSGGVLNLEEEYRLHEKPVPSSIDPSWLQLFPTVWAERAGMGLANQVPPVVVELRSGASPVAVRQYPMSKEAREGIRPHIQKFLDLGVLVPCRSPWNTPLLPVKKPGTNDYRPVQDLREINKRVQDIHPTVPNPYNLLSSLPPSYTWYSVLDLKDAFFCLRLHPNSQPLFAFEWKDPEKGNTGQLTWTRLPQGFKNSPTLFNEALHRDLAPFRALNPQVVLLQYVDDLLVAAPTYEDCKKGTQKLLQELSKLGYRVSAKKAQLCQREVTYLGYLLKEGKRWLTPARKATVMKIPVPTTPRQVREFLGKAGFCRLFIPGFASLAAPLYPLTKPSIPFIWTEEHQQAFDHIKKALLSAPALALPDLTKPFTLYIDERAGVARGVLTQTLGPWRRPVAYLSKKLDPVASGWPTCLKAVAAVALLLKDADKLTLGQNVTVIASHSLESIVRQPPDRWMTNARMTHYQSLLLNERVSFAPPAVLNPATLLPVESEATPVHRCSEILAEETGTRRDLEDQPLPGVPTWYTDGSSFITEGKRRAGAPIVDGKRTVWASSLPEGTSAQKAELVALTQALRLAEGKNINIYTDSRYAFATAHIHGAIYKQRGWLTSAGKDIKNKEEILALLEAIHLPRRVAIIHCPGHQRGSNPVATGNRRADEAAKQAALSTRVLAGTTKPAGKRTADGSEFEKRTADGSEFESPKKKAKVE

SEQ ID NO: 6632 - protein, 2093 aa, synthetic construct
MPAAKRVKLDGGDKKYSIGLDIGTNSVGWAVITDEYKVPSKKFKVLGNTDRHSIKKNLIGALLFDSGETAEATRLKRTARRRYTRRKNRICYLQEIFSNEMAKVDDSFFHRLEESFLVEEDKKHERHPIFGNIVDEVAYHEKYPTIYHLRKKLVDSTDKADLRLIYLALAHMIKFRGHFLIEGDLNPDNSDVDKLFIQLVQTYNQLFEENPINASGVDAKAILSARLSKSRRLENLIAQLPGEKKNGLFGNLIALSLGLTPNFKSNFDLAEDAKLQLSKDTYDDDLDNLLAQIGDQYADLFLAAKNLSDAILLSDILRVNTEITKAPLSASMIKRYDEHHQDLTLLKALVRQQLPEKYKEIFFDQSKNGYAGYIDGGASQEEFYKFIKPILEKMDGTEELLVKLNREDLLRKQRTFDNGSIPHQIHLGELHAILRRQEDFYPFLKDNREKIEKILTFRIPYYVGPLARGNSRFAWMTRKSEETITPWNFEEVVDKGASAQSFIERMTNFDKNLPNEKVLPKHSLLYEYFTVYNELTKVKYVTEGMRKPAFLSGEQKKAIVDLLFKTNRKVTVKQLKEDYFKKIECFDSVEISGVEDRFNASLGTYHDLLKIIKDKDFLDNEENEDILEDIVLTLTLFEDREMIEERLKTYAHLFDDKVMKQLKRRRYTGWGRLSRKLINGIRDKQSGKTILDFLKSDGFANRNFMQLIHDDSLTFKEDIQKAQVSGQGDSLHEHIANLAGSPAIKKGILQTVKVVDELVKVMGRHKPENIVIEMARENQTTQKGQKNSRERMKRIEEGIKELGSQILKEHPVENTQLQNEKLYLYYLQNGRDMYVDQELDINRLSDYDVDHIVPQSFLKDDSIDNKVLTRSDKARGKSDNVPSEEVVKKMKNYWRQLLNAKLITQRKFDNLTKAERGGLSELDKAGFIKRQLVETRQITKHVAQILDSRMNTKYDENDKLIREVKVITLKSKLVSDFRKDFQFYKVREINNYHHAHDAYLNAVVGTALIKKYPKLESEFVYGDYKVYDVRKMIAKSEQEIGKATAKYFFYSNIMNFFKTEITLANGEIRKRPLIETNGETGEIVWDKGRDFATVRKVLSMPQVNIVKKTEVQTGGFSKESILPKRNSDKLIARKKDWDPKKYGGFDSPTVAYSVLVVAKVEKGKSKKLKSVKELLGITIMERSSFEKNPIDFLEAKGYKEVKKDLIIKLPKYSLFELENGRKRMLASAGELQKGNELALPSKYVNFLYLASHYEKLKGSPEDNEQKQLFVEQHKHYLDEIIEQISEFSKRVILADANLDKVLSAYNKHRDKPIREQAENIIHLFTLTNLGAPAAFKYFDTTIDRKRYTSTKEVLDATLIHQSITGLYETRIDLSQLGGDGGEAAAKGGSGGTLGIEDEYRLHETSTEPDVSLGSTWLSDFPQAWAETGGMGLAVRQAPLIIPLKATSTPVSIQQYPMSHEARLGIKPHIQRLLDQGILVPCQSPWNTPLLPVKKPGTNDYRPVQDLREVNKRVEDIHPTVPNPYNLLSGLPPSHQWYTVLDLKDAFFCLRLHPTSQPLFAFEWRDPGMGISGQLTWTRLPQGFKNSPTLFNEALHRDLADFRIQHPDLILLQYVDDILLAATSELDCQQGTRALLQTLGDLGYRASAKKAQICQKQVKYLGYLLREGQRWLTEARKETVMGQPVPKTPRQLREFLGTAGFCRLWIPGFAEMAAPLYPLTKPGTLFSWGPDQQKAYQEIKQALLTAPALGLPDLTKPFELFVDEKQGYAKGVLTQKLGPWRRPVAYLSKKLDPVAAGWPPCLRMVAAIAVLTKDAGKLTMGQPLVILAPHAVEALVKQPPDRWLSNARMTHYQAMLLDTDRVQFGPVVALNPATLLPLPEEGAPHDCLEILAETHGTRPDLTDQPIPDADHTWYTDGSSFLQEGQRKAGAAVTTETEVIWAGALPAGTSAQRAELIALTQALKMAEGKRLNVYTDSRYAFATAHIHGEIYRRRGWLTSEGREIKNKSEILALLKALFLPKRLSIIHCLGHQKGDSAEARGNRLADQAAREAAIKTPPDTSTLLAGKRTADGSEFEKRTADGSEFESPKKKAKVE

SEQ ID NO: 6633 - protein, 2093 aa, synthetic construct
MPAAKRVKLDGGDKKYSIGLDIGTNSVGWAVITDEYKVPSKKFKVLGNTDRHSIKKNLIGALLFDSGETAEATRLKRTARRRYTRRKNRICYLQEIFSNEMAKVDDSFFHRLEESFLVEEDKKHERHPIFGNIVDEVAYHEKYPTIYHLRKKLVDSTDKADLRLIYLALAHMIKFRGHFLIEGDLNPDNSDVDKLFIQLVQTYNQLFEENPINASGVDAKAILSARLSKSRRLENLIAQLPGEKKNGLFGNLIALSLGLTPNFKSNFDLAEDAKLQLSKDTYDDDLDNLLAQIGDQYADLFLAAKNLSDAILLSDILRVNTEITKAPLSASMIKRYDEHHQDLTLLKALVRQQLPEKYKEIFFDQSKNGYAGYIDGGASQEEFYKFIKPILEKMDGTEELLVKLNREDLLRKQRTFDNGSIPHQIHLGELHAILRRQEDFYPFLKDNREKIEKILTFRIPYYVGPLARGNSRFAWMTRKSEETITPWNFEEVVDKGASAQSFIERMTNFDKNLPNEKVLPKHSLLYEYFTVYNELTKVKYVTEGMRKPAFLSGEQKKAIVDLLFKTNRKVTVKQLKEDYFKKIECFDSVEISGVEDRFNASLGTYHDLLKIIKDKDFLDNEENEDILEDIVLTLTLFEDREMIEERLKTYAHLFDDKVMKQLKRRRYTGWGRLSRKLINGIRDKQSGKTILDFLKSDGFANRNFMQLIHDDSLTFKEDIQKAQVSGQGDSLHEHIANLAGSPAIKKGILQTVKVVDELVKVMGRHKPENIVIEMARENQTTQKGQKNSRERMKRIEEGIKELGSQILKEHPVENTQLQNEKLYLYYLQNGRDMYVDQELDINRLSDYDVDHIVPQSFLKDDSIDNKVLTRSDKARGKSDNVPSEEVVKKMKNYWRQLLNAKLITQRKFDNLTKAERGGLSELDKAGFIKRQLVETRQITKHVAQILDSRMNTKYDENDKLIREVKVITLKSKLVSDFRKDFQFYKVREINNYHHAHDAYLNAVVGTALIKKYPKLESEFVYGDYKVYDVRKMIAKSEQEIGKATAKYFFYSNIMNFFKTEITLANGEIRKRPLIETNGETGEIVWDKGRDFATVRKVLSMPQVNIVKKTEVQTGGFSKESILPKRNSDKLIARKKDWDPKKYGGFDSPTVAYSVLVVAKVEKGKSKKLKSVKELLGITIMERSSFEKNPIDFLEAKGYKEVKKDLIIKLPKYSLFELENGRKRMLASAGELQKGNELALPSKYVNFLYLASHYEKLKGSPEDNEQKQLFVEQHKHYLDEIIEQISEFSKRVILADANLDKVLSAYNKHRDKPIREQAENIIHLFTLTNLGAPAAFKYFDTTIDRKRYTSTKEVLDATLIHQSITGLYETRIDLSQLGGDGGEAAAKGGSGGTLGIEDEYRLHETSTEPDVSLGSTWLSDFPQAWAETGGMGLAVRQAPLIIPLKATSTPVSIQQYPMSHEARLGIKPHIQRLLDQGILVPCQSPWNTPLLPVKKPGTNDYRPVQDLREVNKRVEDIHPTVPNPYNLLSGLPPSHQWYTVLDLKDAFFCLRLHPTSQPLFAFEWRDPGMGISGQLTWTRLPQGFKNSPTLFDEALHRDLADFRIQHPDLILLQYVDDILLAATSELDCQQGTRALLQTLGDLGYRASAKKAQICQKQVKYLGYLLREGQRWLTEARKETVMGQPVPKTPRQLREFLGTAGFCRLWIPGFAEMAAPLYPLTKTGTLFSWGPDQQKAYQEIKQALLTAPALGLPDLTKPFELFVDEKQGYAKGVLTQKLGPWRRPVAYLSKKLDPVAAGWPPCLRMVAAIAVLTKDAGKLTMGQPLVILAPHAVEALVKQPPDRWLSNARMTHYQAMLLDTDRVQFGPVVALNPATLLPLPEEGAPHDCLEILAETHGTRPDLTDQPIPDADHTWYTDGSSFLQEGQRKAGAAVTTETEVIWAGALPAGTSAQRAELIALTQALKMAEGKRLNVYTDSRYAFATAHIHGEIYRRRGLLTSEGREIKNKSEILALLKALFLPKRLSIIHCLGHQKGDSAEARGNRLADQAAREAAIKTPPDTSTLLAGKRTADGSEFEKRTADGSEFESPKKKAKVE

SEQ ID NO: 6634 - protein, 2093 aa, synthetic construct; identical to SEQ ID NO: 6632

SEQ ID NO: 6635 - protein, 2087 aa, synthetic construct
MPAAKRVKLDGGDKKYSIGLDIGTNSVGWAVITDEYKVPSKKFKVLGNTDRHSIKKNLIGALLFDSGETAEATRLKRTARRRYTRRKNRICYLQEIFSNEMAKVDDSFFHRLEESFLVEEDKKHERHPIFGNIVDEVAYHEKYPTIYHLRKKLVDSTDKADLRLIYLALAHMIKFRGHFLIEGDLNPDNSDVDKLFIQLVQTYNQLFEENPINASGVDAKAILSARLSKSRRLENLIAQLPGEKKNGLFGNLIALSLGLTPNFKSNFDLAEDAKLQLSKDTYDDDLDNLLAQIGDQYADLFLAAKNLSDAILLSDILRVNTEITKAPLSASMIKRYDEHHQDLTLLKALVRQQLPEKYKEIFFDQSKNGYAGYIDGGASQEEFYKFIKPILEKMDGTEELLVKLNREDLLRKQRTFDNGSIPHQIHLGELHAILRRQEDFYPFLKDNREKIEKILTFRIPYYVGPLARGNSRFAWMTRKSEETITPWNFEEVVDKGASAQSFIERMTNFDKNLPNEKVLPKHSLLYEYFTVYNELTKVKYVTEGMRKPAFLSGEQKKAIVDLLFKTNRKVTVKQLKEDYFKKIECFDSVEISGVEDRFNASLGTYHDLLKIIKDKDFLDNEENEDILEDIVLTLTLFEDREMIEERLKTYAHLFDDKVMKQLKRRRYTGWGRLSRKLINGIRDKQSGKTILDFLKSDGFANRNFMQLIHDDSLTFKEDIQKAQVSGQGDSLHEHIANLAGSPAIKKGILQTVKVVDELVKVMGRHKPENIVIEMARENQTTQKGQKNSRERMKRIEEGIKELGSQILKEHPVENTQLQNEKLYLYYLQNGRDMYVDQELDINRLSDYDVDHIVPQSFLKDDSIDNKVLTRSDKARGKSDNVPSEEVVKKMKNYWRQLLNAKLITQRKFDNLTKAERGGLSELDKAGFIKRQLVETRQITKHVAQILDSRMNTKYDENDKLIREVKVITLKSKLVSDFRKDFQFYKVREINNYHHAHDAYLNAVVGTALIKKYPKLESEFVYGDYKVYDVRKMIAKSEQEIGKATAKYFFYSNIMNFFKTEITLANGEIRKRPLIETNGETGEIVWDKGRDFATVRKVLSMPQVNIVKKTEVQTGGFSKESILPKRNSDKLIARKKDWDPKKYGGFDSPTVAYSVLVVAKVEKGKSKKLKSVKELLGITIMERSSFEKNPIDFLEAKGYKEVKKDLIIKLPKYSLFELENGRKRMLASAGELQKGNELALPSKYVNFLYLASHYEKLKGSPEDNEQKQLFVEQHKHYLDEIIEQISEFSKRVILADANLDKVLSAYNKHRDKPIREQAENIIHLFTLTNLGAPAAFKYFDTTIDRKRYTSTKEVLDATLIHQSITGLYETRIDLSQLGGDGGEAAAKGGSGGTLQLDDEYRLYSPLVKPDQNIQFWLEQFPQAWAETAGMGLAKQVPPQVIQLKASATPVSVRQYPLSKEAQEGIRPHVQRLIQQGILVPVQSPWNTPLLPVRKPGTNDYRPVQDLREVNKRVQDIHPTVPNPYNLLCALPPQRSWYTVLDLKDAFFCLRLHPTSQPLFAFEWRDPGTGRTGQLTWTRLPQGFKNSPTIFDEALHRDLANFRIQHPQVTLLQYVDDLLLAGATKQDCLEGTKALLLELSDLGYRASAKKAQICRREVTYLGYSLRDGQRWLTEARKKTVVQIPAPTTAKQVREFLGTAGFCRLWIPGFATLAAPLYPLTKEKGEFSWAPEHQKAFDAIKKALLSAPALALPDVTKPFTLYVDERKGVARGVLTQTLGPWRRPVAYLSKKLDPVASGWPVCLKAIAAVAILVKDADKLTLGQNITVIAPHALENIVRQPPDRWMTNARMTHYQSLLLTERVTFAPPAALNPATLLPEETDEPVTHDCHQLLIEETGVRKDLTDIPLTGEVLTWFTDGSSYVVEGKRMAGAAVVDGTRTIWASSLPEGTSAQKAELMALTQALRLAEGKSINIYTDSRYAFATAHVHGAIYKQRGLLTSAGREIKNKEEILSLLEALHLPKRLAIIHCPGHQKAKDPISRGNQMADRVAKQAAQGVNLLAGKRTADGSEFEKRTADGSEFESPKKKAKVE

SEQ ID NO: 6636 - protein, 2087 aa, synthetic construct; identical to SEQ ID NO: 6635

SEQ ID NO: 6637 - protein, 2084 aa, synthetic construct
MPAAKRVKLDGGDKKYSIGLDIGTNSVGWAVITDEYKVPSKKFKVLGNTDRHSIKKNLIGALLFDSGETAEATRLKRTARRRYTRRKNRICYLQEIFSNEMAKVDDSFFHRLEESFLVEEDKKHERHPIFGNIVDEVAYHEKYPTIYHLRKKLVDSTDKADLRLIYLALAHMIKFRGHFLIEGDLNPDNSDVDKLFIQLVQTYNQLFEENPINASGVDAKAILSARLSKSRRLENLIAQLPGEKKNGLFGNLIALSLGLTPNFKSNFDLAEDAKLQLSKDTYDDDLDNLLAQIGDQYADLFLAAKNLSDAILLSDILRVNTEITKAPLSASMIKRYDEHHQDLTLLKALVRQQLPEKYKEIFFDQSKNGYAGYIDGGASQEEFYKFIKPILEKMDGTEELLVKLNREDLLRKQRTFDNGSIPHQIHLGELHAILRRQEDFYPFLKDNREKIEKILTFRIPYYVGPLARGNSRFAWMTRKSEETITPWNFEEVVDKGASAQSFIERMTNFDKNLPNEKVLPKHSLLYEYFTVYNELTKVKYVTEGMRKPAFLSGEQKKAIVDLLFKTNRKVTVKQLKEDYFKKIECFDSVEISGVEDRFNASLGTYHDLLKIIKDKDFLDNEENEDILEDIVLTLTLFEDREMIEERLKTYAHLFDDKVMKQLKRRRYTGWGRLSRKLINGIRDKQSGKTILDFLKSDGFANRNFMQLIHDDSLTFKEDIQKAQVSGQGDSLHEHIANLAGSPAIKKGILQTVKVVDELVKVMGRHKPENIVIEMARENQTTQKGQKNSRERMKRIEEGIKELGSQILKEHPVENTQLQNEKLYLYYLQNGRDMYVDQELDINRLSDYDVDHIVPQSFLKDDSIDNKVLTRSDKARGKSDNVPSEEVVKKMKNYWRQLLNAKLITQRKFDNLTKAERGGLSELDKAGFIKRQLVETRQITKHVAQILDSRMNTKYDENDKLIREVKVITLKSKLVSDFRKDFQFYKVREINNYHHAHDAYLNAVVGTALIKKYPKLESEFVYGDYKVYDVRKMIAKSEQEIGKATAKYFFYSNIMNFFKTEITLANGEIRKRPLIETNGETGEIVWDKGRDFATVRKVLSMPQVNIVKKTEVQTGGFSKESILPKRNSDKLIARKKDWDPKKYGGFDSPTVAYSVLVVAKVEKGKSKKLKSVKELLGITIMERSSFEKNPIDFLEAKGYKEVKKDLIIKLPKYSLFELENGRKRMLASAGELQKGNELALPSKYVNFLYLASHYEKLKGSPEDNEQKQLFVEQHKHYLDEIIEQISEFSKRVILADANLDKVLSAYNKHRDKPIREQAENIIHLFTLTNLGAPAAFKYFDTTIDRKRYTSTKEVLDATLIHQSITGLYETRIDLSQLGGDGGEAAAKGGSGGIPWLMKKPLQLTTLVPLQEYEERLLKQTMLTGSYKEKLQSLFLKYDALWQHWENQVGHRRIKPHHIATGTVNPRPQKQYPINPKAKASIQTVINDLLKQGVLIQQNSIMNTPVYPVPKPDGKWRMVLDYREVNKTIPLIAAQNQHSAGILSSIFRGKYKTTLDLSNGFWAHSITPESYWLTAFTWLGQQYCWTRLPQGFLNSPALFNADVVDLLKEVPNVQVYVDDIYISHDDPREHLEQLEKVFSLLLNAGYVVSLKKSEIAQHEVEFLGFNITKEGRGLTETFKQKLLNITPPRDLKQLQSILGLLNFARNFIPNFSELVKPLYNIIATAPGKYITWTTDNSQQLQNIISMLNSAENLEERNPEVRLIMKVNTSPSAGYIRFYNEFAKRPIMYLNYVYTKAEVKFTNTEKLLTTIHKGLIKALDLGMGQEILVYSPIVSMTKIQKTPLPERKALPIRWITWMSYLEDPRIQFHYDKTLPELQQVPTVTDDIIAKIKHPSEFSMVFYTDGSAIKHPNVNKSHNAGMGIAQVQFKPEFTVINTWSIPLGDHTAQLAEVAAVEFACKKALKIDGPVLIVTDSFYVAESVNKELPYWQSNGFFNNKKKPLKHVSKWKSIADCIQLKPDIIIIHEKGHQPTASTFHTEGNNLADKLATQGSYVVNAGKRTADGSEFEKRTADGSEFESPKKKAKVE

SEQ ID NO: 6638 - protein, 2084 aa, synthetic construct
MPAAKRVKLDGGDKKYSIGLDIGTNSVGWAVITDEYKVPSKKFKVLGNTDRHSIKKNLIGALLFDSGETAEATRLKRTARRRYTRRKNRICYLQEIFSNEMAKVDDSFFHRLEESFLVEEDKKHERHPIFGNIVDEVAYHEKYPTIYHLRKKLVDSTDKADLRLIYLALAHMIKFRGHFLIEGDLNPDNSDVDKLFIQLVQTYNQLFEENPINASGVDAKAILSARLSKSRRLENLIAQLPGEKKNGLFGNLIALSLGLTPNFKSNFDLAEDAKLQLSKDTYDDDLDNLLAQIGDQYADLFLAAKNLSDAILLSDILRVNTEITKAPLSASMIKRYDEHHQDLTLLKALVRQQLPEKYKEIFFDQSKNGYAGYIDGGASQEEFYKFIKPILEKMDGTEELLVKLNREDLLRKQRTFDNGSIPHQIHLGELHAILRRQEDFYPFLKDNREKIEKILTFRIPYYVGPLARGNSRFAWMTRKSEETITPWNFEEVVDKGASAQSFIERMTNFDKNLPNEKVLPKHSLLYEYFTVYNELTKVKYVTEGMRKPAFLSGEQKKAIVDLLFKTNRKVTVKQLKEDYFKKIECFDSVEISGVEDRFNASLGTYHDLLKIIKDKDFLDNEENEDILEDIVLTLTLFEDREMIEERLKTYAHLFDDKVMKQLKRRRYTGWGRLSRKLINGIRDKQSGKTILDFLKSDGFANRNFMQLIHDDSLTFKEDIQKAQVSGQGDSLHEHIANLAGSPAIKKGILQTVKVVDELVKVMGRHKPENIVIEMARENQTTQKGQKNSRERMKRIEEGIKELGSQILKEHPVENTQLQNEKLYLYYLQNGRDMYVDQELDINRLSDYDVDHIVPQSFLKDDSIDNKVLTRSDKARGKSDNVPSEEVVKKMKNYWRQLLNAKLITQRKFDNLTKAERGGLSELDKAGFIKRQLVETRQITKHVAQILDSRMNTKYDENDKLIREVKVITLKSKLVSDFRKDFQFYKVREINNYHHAHDAYLNAVVGTALIKKYPKLESEFVYGDYKVYDVRKMIAKSEQEIGKATAKYFFYSNIMNFFKTEITLANGEIRKRPLIETNGETGEIVWDKGRDFATVRKVLSMPQVNIVKKTEVQTGGFSKESILPKRNSDKLIARKKDWDPKKYGGFDSPTVAYSVLVVAKVEKGKSKKLKSVKELLGITIMERSSFEKNPIDFLEAKGYKEVKKDLIIKLPKYSLFELENGRKRMLASAGELQKGNELALPSKYVNFLYLASHYEKLKGSPEDNEQKQLFVEQHKHYLDEIIEQISEFSKRVILADANLDKVLSAYNKHRDKPIREQAENIIHLFTLTNLGAPAAFKYFDTTIDRKRYTSTKEVLDATLIHQSITGLYETRIDLSQLGGDGGEAAAKGGSGGIPWLMKKPLQLTTLVPLQEYEERLLKQTMLTGSYKEKLQSLFLKYDALWQHWENQVGHRRIKPHHIATGTVNPRPQKQYPINPKAKASIQTVINDLLKQGVLIQQNSIMNTPVYPVPKPDGKWRMVLDYREVNKTIPLIAAQNQHSAGILSSIFRGKYKTTLDLSNGFWAHSITPESYWLTAFTWLGQQYCWTRLPQGFLNSPALFNADVVDLLKEVPNVQVYVDDIYISHDDPREHLEQLEKVFSLLLNAGYVVSLKKSEIAQHEVEFLGFNITKEGRGLTETFKQKLLNITPPRDLKQLQSILGKLNFARNFIPNFSELVKPLYNIIATAPGKYITWTTDNSQQLQNIISMLNSAENLEERNPEVRLIMKVNTSPSAGYIRFYNEFAKRPIMYLNYVYTKAEVKFTNTEKLLTTIHKGLIKALDLGMGQEILVYSPIVSMTKIQKTPLPERKALPIRWITWMSYLEDPRIQFHYDKTLPELQQVPTVTDDIIAKIKHPSEFSMVFYTDGSAIKHPNVNKSHNAGMGIAQVQFKPEFTVINTWSIPLGDHTAQLAEVAAVEFACKKALKIDGPVLIVTDSFYVAESVNKELPYWQSNGFFNNKKKPLKHVSKWKSIADCIQLKPDIIIIHEKGHQPTASTFHTEGNNLADKLATQGSYVVNAGKRTADGSEFEKRTADGSEFESPKKKAKVE

SEQ ID NO: 6639 - protein, 2093 aa, synthetic construct
MPAAKRVKLDGGDKKYSIGLDIGTNSVGWAVITDEYKVPSKKFKVLGNTDRHSIKKNLIGALLFDSGETAEATRLKRTARRRYTRRKNRICYLQEIFSNEMAKVDDSFFHRLEESFLVEEDKKHERHPIFGNIVDEVAYHEKYPTIYHLRKKLVDSTDKADLRLIYLALAHMIKFRGHFLIEGDLNPDNSDVDKLFIQLVQTYNQLFEENPINASGVDAKAILSARLSKSRRLENLIAQLPGEKKNGLFGNLIALSLGLTPNFKSNFDLAEDAKLQLSKDTYDDDLDNLLAQIGDQYADLFLAAKNLSDAILLSDILRVNTEITKAPLSASMIKRYDEHHQDLTLLKALVRQQLPEKYKEIFFDQSKNGYAGYIDGGASQEEFYKFIKPILEKMDGTEELLVKLNREDLLRKQRTFDNGSIPHQIHLGELHAILRRQEDFYPFLKDNREKIEKILTFRIPYYVGPLARGNSRFAWMTRKSEETITPWNFEEVVDKGASAQSFIERMTNFDKNLPNEKVLPKHSLLYEYFTVYNELTKVKYVTEGMRKPAFLSGEQKKAIVDLLFKTNRKVTVKQLKEDYFKKIECFDSVEISGVEDRFNASLGTYHDLLKIIKDKDFLDNEENEDILEDIVLTLTLFEDREMIEERLKTYAHLFDDKVMKQLKRRRYTGWGRLSRKLINGIRDKQSGKTILDFLKSDGFANRNFMQLIHDDSLTFKEDIQKAQVSGQGDSLHEHIANLAGSPAIKKGILQTVKVVDELVKVMGRHKPENIVIEMARENQTTQKGQKNSRERMKRIEEGIKELGSQILKEHPVENTQLQNEKLYLYYLQNGRDMYVDQELDINRLSDYDVDHIVPQSFLKDDSIDNKVLTRSDKARGKSDNVPSEEVVKKMKNYWRQLLNAKLITQRKFDNLTKAERGGLSELDKAGFIKRQLVETRQITKHVAQILDSRMNTKYDENDKLIREVKVITLKSKLVSDFRKDFQFYKVREINNYHHAHDAYLNAVVGTALIKKYPKLESEFVYGDYKVYDVRKMIAKSEQEIGKATAKYFFYSNIMNFFKTEITLANGEIRKRPLIETNGETGEIVWDKGRDFATVRKVLSMPQVNIVKKTEVQTGGFSKESILPKRNSDKLIARKKDWDPKKYGGFDSPTVAYSVLVVAKVEKGKSKKLKSVKELLGITIMERSSFEKNPIDFLEAKGYKEVKKDLIIKLPKYSLFELENGRKRMLASAGELQKGNELALPSKYVNFLYLASHYEKLKGSPEDNEQKQLFVEQHKHYLDEIIEQISEFSKRVILADANLDKVLSAYNKHRDKPIREQAENIIHLFTLTNLGAPAAFKYFDTTIDRKRYTSTKEVLDATLIHQSITGLYETRIDLSQLGGDGGEAAAKGGSGGTLNIEDEYRLHETSKEPDVPLGSTWLSDFPQAWAETGGMGLAVRQAPLIIPLKATSTPVSIKQYPMSQEARLGIKPHIQRLLDQGILVPCQSPWNTPLLPVKKPGTNDYRPVQDLREVNKRVEDIHPTVPNPYNLLSGLPPSHQWYTVLDLKDAFFCLRLHPTSQPLFAFEWRDPEMGISGQLTWTRLPQGFKNSPTLFNEALHRDLADFRIQHPDLILLQYVDDLLLAATSEQDCQRGTRALLQTLGNLGYRASAKKAQICQKQVKYLGYLLKEGQRWLTEARKETVMGQPTPKTPRQLREFLGTAGFCRLWIPGFAEMAAPLYPLTKPGTLFNWGPDQQKAYQEIKQALLTAPALGLPDLTKPFELFVDEKQGYAKGVLTQKLGPWRRPVAYLSKKLDPVAAGWPPCLRMVAAIAVLTKDAGKLTMGQPLVILAPHAVEALVKQPPDRWLSNARMTHYQAMLLDTDRVQFGPVVALNPATLLPLPEKEAPHDCLEILAETHGTRPDLTDQPIPDADYTWYTDGSSFLQEGQRRAGAAVTTETEVIWARALPAGTSAQRAELIALTQALKMAEGKKLNVYTDSRYAFATAHVHGEIYRRRGWLTSEGREIKNKNEILALLKALFLPKRLSIIHCPGHQKGNSAEARGNRMADQAAREAAMKAVLETSTLLAGKRTADGSEFEKRTADGSEFESPKKKAKVE

SEQ ID NO: 6640 - protein, 2097 aa, synthetic construct
MPAAKRVKLDGGDKKYSIGLDIGTNSVGWAVITDEYKVPSKKFKVLGNTDRHSIKKNLIGALLFDSGETAEATRLKRTARRRYTRRKNRICYLQEIFSNEMAKVDDSFFHRLEESFLVEEDKKHERHPIFGNIVDEVAYHEKYPTIYHLRKKLVDSTDKADLRLIYLALAHMIKFRGHFLIEGDLNPDNSDVDKLFIQLVQTYNQLFEENPINASGVDAKAILSARLSKSRRLENLIAQLPGEKKNGLFGNLIALSLGLTPNFKSNFDLAEDAKLQLSKDTYDDDLDNLLAQIGDQYADLFLAAKNLSDAILLSDILRVNTEITKAPLSASMIKRYDEHHQDLTLLKALVRQQLPEKYKEIFFDQSKNGYAGYIDGGASQEEFYKFIKPILEKMDGTEELLVKLNREDLLRKQRTFDNGSIPHQIHLGELHAILRRQEDFYPFLKDNREKIEKILTFRIPYYVGPLARGNSRFAWMTRKSEETITPWNFEEVVDKGASAQSFIERMTNFDKNLPNEKVLPKHSLLYEYFTVYNELTKVKYVTEGMRKPAFLSGEQKKAIVDLLFKTNRKVTVKQLKEDYFKKIECFDSVEISGVEDRFNASLGTYHDLLKIIKDKDFLDNEENEDILEDIVLTLTLFEDREMIEERLKTYAHLFDDKVMKQLKRRRYTGWGRLSRKLINGIRDKQSGKTILDFLKSDGFANRNFMQLIHDDSLTFKEDIQKAQVSGQGDSLHEHIANLAGSPAIKKGILQTVKVVDELVKVMGRHKPENIVIEMARENQTTQKGQKNSRERMKRIEEGIKELGSQILKEHPVENTQLQNEKLYLYYLQNGRDMYVDQELDINRLSDYDVDHIVPQSFLKDDSIDNKVLTRSDKARGKSDNVPSEEVVKKMKNYWRQLLNAKLITQRKFDNLTKAERGGLSELDKAGFIKRQLVETRQITKHVAQILDSRMNTKYDENDKLIREVKVITLKSKLVSDFRKDFQFYKVREINNYHHAHDAYLNAVVGTALIKKYPKLESEFVYGDYKVYDVRKMIAKSEQEIGKATAKYFFYSNIMNFFKTEITLANGEIRKRPLIETNGETGEIVWDKGRDFATVRKVLSMPQVNIVKKTEVQTGGFSKESILPKRNSDKLIARKKDWDPKKYGGFDSPTVAYSVLVVAKVEKGKSKKLKSVKELLGITIMERSSFEKNPIDFLEAKGYKEVKKDLIIKLPKYSLFELENGRKRMLASAGELQKGNELALPSKYVNFLYLASHYEKLKGSPEDNEQKQLFVEQHKHYLDEIIEQISEFSKRVILADANLDKVLSAYNKHRDKPIREQAENIIHLFTLTNLGAPAAFKYFDTTIDRKRYTSTKEVLDATLIHQSITGLYETRIDLSQLGGDGGGGSPAPGGTVSLQDEHRLFDIPVTTSLPDVWLQDFPQAWAETGGLGRAKCQAPIIIDLKPTAVPVSIKQYPMSLEAHMGIRQHIIKFLELGVLRPCRSPWNTPLLPVKKPGTQDYRPVQDLREINKRTVDIHPTVPNPYNLLSTLKPDYSWYTVLDLKDAFFCLPLAPQSQELFAFEWKDPERGISGQLTWTRLPQGFKNSPTLFNEALHRDLTDFRTQHPEVTLLQYVDDLLLAAPTKKACTQGTRHLLQELGEKGYRASAKKAQICQTKVTYLGYILSEGKRWLTPGRIETVARIPPPRNPREVREFLGTAGFCRLWIPGFAELAAPLYALTKPSTPFTWQTEHQLAFEALKKALLSAPALGLPDTSKPFTLFLDERQGIAKGVLTQKLGPWKRPVAYLSKKLDPVAAGWPPCLRIMAATAMLVKDSAKLTLGQPLTVITPHTLEAIVRQPPDRWITNARLTHYQALLLDTDRVQFGPPVTLNPATLLPVPENQPSPHDCRQVLAETHGTREDLKDQELPDADHTWYTDGSSYLDSGTRRAGAAVVDGHNTIWAQSLPPGTSAQKAELIALTKALELSKGKKANIYTDSRYAFATAHTHGSIYERRGWLTSEGKEIKNKAEIIALLKALFLPQEVAIIHCPGHQKGQDPVAVGNRQADRVARQAAMAEVLTLATEPDNTSHITAGKRTADGSEFEKRTADGSEFESPKKKAKVE

SEQ ID NO: 6641 - protein, 2168 aa, synthetic construct
MPAAKRVKLDGGDKKYSIGLDIGTNSVGWAVITDEYKVPSKKFKVLGNTDRHSIKKNLIGALLFDSGETAEATRLKRTARRRYTRRKNRICYLQEIFSNEMAKVDDSFFHRLEESFLVEEDKKHERHPIFGNIVDEVAYHEKYPTIYHLRKKLVDSTDKADLRLIYLALAHMIKFRGHFLIEGDLNPDNSDVDKLFIQLVQTYNQLFEENPINASGVDAKAILSARLSKSRRLENLIAQLPGEKKNGLFGNLIALSLGLTPNFKSNFDLAEDAKLQLSKDTYDDDLDNLLAQIGDQYADLFLAAKNLSDAILLSDILRVNTEITKAPLSASMIKRYDEHHQDLTLLKALVRQQLPEKYKEIFFDQSKNGYAGYIDGGASQEEFYKFIKPILEKMDGTEELLVKLNREDLLRKQRTFDNGSIPHQIHLGELHAILRRQEDFYPFLKDNREKIEKILTFRIPYYVGPLARGNSRFAWMTRKSEETITPWNFEEVVDKGASAQSFIERMTNFDKNLPNEKVLPKHSLLYEYFTVYNELTKVKYVTEGMRKPAFLSGEQKKAIVDLLFKTNRKVTVKQLKEDYFKKIECFDSVEISGVEDRFNASLGTYHDLLKIIKDKDFLDNEENEDILEDIVLTLTLFEDREMIEERLKTYAHLFDDKVMKQLKRRRYTGWGRLSRKLINGIRDKQSGKTILDFLKSDGFANRNFMQLIHDDSLTFKEDIQKAQVSGQGDSLHEHIANLAGSPAIKKGILQTVKVVDELVKVMGRHKPENIVIEMARENQTTQKGQKNSRERMKRIEEGIKELGSQILKEHPVENTQLQNEKLYLYYLQNGRDMYVDQELDINRLSDYDVDHIVPQSFLKDDSIDNKVLTRSDKARGKSDNVPSEEVVKKMKNYWRQLLNAKLITQRKFDNLTKAERGGLSELDKAGFIKRQLVETRQITKHVAQILDSRMNTKYDENDKLIREVKVITLKSKLVSDFRKDFQFYKVREINNYHHAHDAYLNAVVGTALIKKYPKLESEFVYGDYKVYDVRKMIAKSEQEIGKATAKYFFYSNIMNFFKTEITLANGEIRKRPLIETNGETGEIVWDKGRDFATVRKVLSMPQVNIVKKTEVQTGGFSKESILPKRNSDKLIARKKDWDPKKYGGFDSPTVAYSVLVVAKVEKGKSKKLKSVKELLGITIMERSSFEKNPIDFLEAKGYKEVKKDLIIKLPKYSLFELENGRKRMLASAGELQKGNELALPSKYVNFLYLASHYEKLKGSPEDNEQKQLFVEQHKHYLDEIIEQISEFSKRVILADANLDKVLSAYNKHRDKPIREQAENIIHLFTLTNLGAPAAFKYFDTTIDRKRYTSTKEVLDATLIHQSITGLYETRIDLSQLGGDGGGGSPAPGGMDLLKPLTVERKGVKIKGYWNSQADITCVPKDLLQGEEPVRQQNVTTIHGTQEGDVYYVNLKIDGRRINTEVIGTTLDYAIITPGDVPWILKKPLELTIKLDLEEQQGTLLNNSILSKKGKEELKQLFEKYSALWQSWENQVGHRRIRPHKIATGTVKPTPQKQYHINPKAKPDIQIVINDLLKQGVLIQKESTMNTPVYPVPKPNGRWRMVLDYRAVNKVTPLIAVQNQHSYGILGSLFKGRYKTTIDLSNGFWAHPIVPEDYWITAFTWQGKQYCWTVLPQGFLNSPGLFNGDVVDLLQGIPNVEVYVDDVYISHDSEKEHLEYLDILFNRLKEAGYIISLKKSNIANSIVDFLGFQITNEGRGLTDTFKEKLENITAPTTLKQLQSILGLLNFARNFIPDFTELIAPLYALIPKSPKNYVPWQIEHSTTLETLITKLNGAEYLQGRKGDKTLIMKVNASYTTGYIRYYNEGEKKPISYVSIVFSKTELKFTELEKLLTTVHKGLLKALDLSMGQNIHVYSPIVSMQNIQKTPQTAKKALASRWLSWLSYLEDPRIRFFYDPQMPALKDLPAVDTGKDNKKHPSNFQHIFYTDGSAITSPTKEGHLNAGMGIVYFINKDGNLQKQQEWSISLGNHTAQFAEIAAFEFALKKCLPLGGNILVVTDSNYVAKAYNEELDVWASNGFVNNRKKPLKHISKWKSVADLKRLRPDVVVTHEPGHQKLDSSPHAYGNNLADQLATQASFKVHAGKRTADGSEFEKRTADGSEFESPKKKAKVE

SEQ ID NO: 6642 - protein, 2090 aa, synthetic construct
MPAAKRVKLDGGDKKYSIGLDIGTNSVGWAVITDEYKVPSKKFKVLGNTDRHSIKKNLIGALLFDSGETAEATRLKRTARRRYTRRKNRICYLQEIFSNEMAKVDDSFFHRLEESFLVEEDKKHERHPIFGNIVDEVAYHEKYPTIYHLRKKLVDSTDKADLRLIYLALAHMIKFRGHFLIEGDLNPDNSDVDKLFIQLVQTYNQLFEENPINASGVDAKAILSARLSKSRRLENLIAQLPGEKKNGLFGNLIALSLGLTPNFKSNFDLAEDAKLQLSKDTYDDDLDNLLAQIGDQYADLFLAAKNLSDAILLSDILRVNTEITKAPLSASMIKRYDEHHQDLTLLKALVRQQLPEKYKEIFFDQSKNGYAGYIDGGASQEEFYKFIKPILEKMDGTEELLVKLNREDLLRKQRTFDNGSIPHQIHLGELHAILRRQEDFYPFLKDNREKIEKILTFRIPYYVGPLARGNSRFAWMTRKSEETITPWNFEEVVDKGASAQSFIERMTNFDKNLPNEKVLPKHSLLYEYFTVYNELTKVKYVTEGMRKPAFLSGEQKKAIVDLLFKTNRKVTVKQLKEDYFKKIECFDSVEISGVEDRFNASLGTYHDLLKIIKDKDFLDNEENEDILEDIVLTLTLFEDREMIEERLKTYAHLFDDKVMKQLKRRRYTGWGRLSRKLINGIRDKQSGKTILDFLKSDGFANRNFMQLIHDDSLTFKEDIQKAQVSGQGDSLHEHIANLAGSPAIKKGILQTVKVVDELVKVMGRHKPENIVIEMARENQTTQKGQKNSRERMKRIEEGIKELGSQILKEHPVENTQLQNEKLYLYYLQNGRDMYVDQELDINRLSDYDVDHIVPQSFLKDDSIDNKVLTRSDKARGKSDNVPSEEVVKKMKNYWRQLLNAKLITQRKFDNLTKAERGGLSELDKAGFIKRQLVETRQITKHVAQILDSRMNTKYDENDKLIREVKVITLKSKLVSDFRKDFQFYKVREINNYHHAHDAYLNAVVGTALIKKYPKLESEFVYGDYKVYDVRKMIAKSEQEIGKATAKYFFYSNIMNFFKTEITLANGEIRKRPLIETNGETGEIVWDKGRDFATVRKVLSMPQVNIVKKTEVQTGGFSKESILPKRNSDKLIARKKDWDPKKYGGFDSPTVAYSVLVVAKVEKGKSKKLKSVKELLGITIMERSSFEKNPIDFLEAKGYKEVKKDLIIKLPKYSLFELENGRKRMLASAGELQKGNELALPSKYVNFLYLASHYEKLKGSPEDNEQKQLFVEQHKHYLDEIIEQISEFSKRVILADANLDKVLSAYNKHRDKPIREQAENIIHLFTLTNLGAPAAFKYFDTTIDRKRYTSTKEVLDATLIHQSITGLYETRIDLSQLGGDGGGGSPAPGGTLQLEEEYRLFEPESTQKQEMDIWLKNFPQAWAETGGMGTAHCQAPVLIQLKATATPISIRQYPMPHEAYQGIKPHIRRMLDQGILKPCQSPWNTPLLPVKKPGTEDYRPVQDLREVNKRVEDIHPTVPNPYNLLSTLPPSHPWYTVLDLKDAFFCLRLHSESQLLFAFEWRDPEIGLSGQLTWTRLPQGFKNSPTLFNEALHSDLADFRVRYPALVLLQYVDDLLLAAATRTECLEGTKALLETLGNKGYRASAKKAQICLQEVTYLGYSLKDGQRWLTKARKEAILSIPVPKNSRQVREFLGKAGYCRLFIPGFAELAAPLYPLTRPGTLFQWGTEQQLAFEDIKKALLSSPALGLPDITKPFELFIDENSGFAKGVLVQKLGPWKRPVAYLSKKLDTVASGWPPCLRMVAAIAILVKDAGKLTLGQPLTILTSHPVEALVRQPPNKWLSNARMTHYQAMLLDAERVHFGPTVSLNPATLLPLPSGGNHHDCLQILAETHGTRPDLTDQPLPDADLTWYTDGSSFIRNGEREAGAAVTTESEVIWAAPLPPGTSAQRAELIALTQALKMAEGKKLTVYTDSRYAFATTHVHGEIYRRRGWLTSEGKEIKNKNEILALLEALFLPKRLSIIHCPGHQKGDSPQAKGNRLADDTAKKAATETHSSLTVLPAGKRTADGSEFEKRTADGSEFESPKKKAKVE

SEQ ID NO: 6643 - protein, 2171 aa, synthetic construct
MPAAKRVKLDGGDKKYSIGLDIGTNSVGWAVITDEYKVPSKKFKVLGNTDRHSIKKNLIGALLFDSGETAEATRLKRTARRRYTRRKNRICYLQEIFSNEMAKVDDSFFHRLEESFLVEEDKKHERHPIFGNIVDEVAYHEKYPTIYHLRKKLVDSTDKADLRLIYLALAHMIKFRGHFLIEGDLNPDNSDVDKLFIQLVQTYNQLFEENPINASGVDAKAILSARLSKSRRLENLIAQLPGEKKNGLFGNLIALSLGLTPNFKSNFDLAEDAKLQLSKDTYDDDLDNLLAQIGDQYADLFLAAKNLSDAILLSDILRVNTEITKAPLSASMIKRYDEHHQDLTLLKALVRQQLPEKYKEIFFDQSKNGYAGYIDGGASQEEFYKFIKPILEKMDGTEELLVKLNREDLLRKQRTFDNGSIPHQIHLGELHAILRRQEDFYPFLKDNREKIEKILTFRIPYYVGPLARGNSRFAWMTRKSEETITPWNFEEVVDKGASAQSFIERMTNFDKNLPNEKVLPKHSLLYEYFTVYNELTKVKYVTEGMRKPAFLSGEQKKAIVDLLFKTNRKVTVKQLKEDYFKKIECFDSVEISGVEDRFNASLGTYHDLLKIIKDKDFLDNEENEDILEDIVLTLTLFEDREMIEERLKTYAHLFDDKVMKQLKRRRYTGWGRLSRKLINGIRDKQSGKTILDFLKSDGFANRNFMQLIHDDSLTFKEDIQKAQVSGQGDSLHEHIANLAGSPAIKKGILQTVKVVDELVKVMGRHKPENIVIEMARENQTTQKGQKNSRERMKRIEEGIKELGSQILKEHPVENTQLQNEKLYLYYLQNGRDMYVDQELDINRLSDYDVDHIVPQSFLKDDSIDNKVLTRSDKARGKSDNVPSEEVVKKMKNYWRQLLNAKLITQRKFDNLTKAERGGLSELDKAGFIKRQLVETRQITKHVAQILDSRMNTKYDENDKLIREVKVITLKSKLVSDFRKDFQFYKVREINNYHHAHDAYLNAVVGTALIKKYPKLESEFVYGDYKVYDVRKMIAKSEQEIGKATAKYFFYSNIMNFFKTEITLANGEIRKRPLIETNGETGEIVWDKGRDFATVRKVLSMPQVNIVKKTEVQTGGFSKESILPKRNSDKLIARKKDWDPKKYGGFDSPTVAYSVLVVAKVEKGKSKKLKSVKELLGITIMERSSFEKNPIDFLEAKGYKEVKKDLIIKLPKYSLFELENGRKRMLASAGELQKGNELALPSKYVNFLYLASHYEKLKGSPEDNEQKQLFVEQHKHYLDEIIEQISEFSKRVILADANLDKVLSAYNKHRDKPIREQAENIIHLFTLTNLGAPAAFKYFDTTIDRKRYTSTKEVLDATLIHQSITGLYETRIDLSQLGGDGGGGSPAPGGMNPLQLLQPLPAEIKGTKLLAHWNSGATITCIPESFLEDEQPIKKTLIKTIHGEKQQNVYYVTFKVKGRKVEAEVIASPYEYILLSPTDVPWLTQQPLQLTILVPLQEYQEKILSKTALPEDQKQQLKTLFVKYDNLWQHWENQVGHRKIRPHNIATGDYPPRPQKQYPINPKAKPSIQIVIDDLLKQGVLTPQNSTMNTPVYPVPKPDGRWRMVLDYREVNKTIPLTAAQNQHSAGILATIVRQKYKTTLDLANGFWAHPITPESYWLTAFTWQGKQYCWTRLPQGFLNSPALFNADVVDLLKEIPNVQVYVDDIYLSHDDPKEHVQQLEKVFQILLQAGYVVSLKKSEIGQKTVEFLGFNITKEGRGLTDTFKTKLLNITPPKDLKQLQSILGKLNFARNFIPNFAELVQPLYNLIAPAKGKYIEWSEENTKQLNMVIEALNTASNLEERLPEQRLVIKVNTSPSAGYVRYYNETGKKPIMYLNYVFSKAELKFSMLEKLLTTMHKALIKAMDLAMGQEILVYSPIVSMTKIQKTPLPERKALPIRWITWMTYLEDPRIQFHYDKTLPELKHIPDVYTSSQSPVKHPSQYEGVFYTDGSAIKSPDPTKSNNAGMGIVHATYKPEYQVLNQWSIPLGNHTAQMAEIAAVEFACKKALKIPGPVLVITDSFYVAESANKELPYWKSNGFVNNKKKPLKHISKWKSIAECLSMKPDITIQHEKGISLQIPVFILKGNALADKLATQGSYVVNAGKRTADGSEFEKRTADGSEFESPKKKAKVE

SEQ ID NO: 6644 - protein, 2089 aa, synthetic construct
MPAAKRVKLDGGDKKYSIGLDIGTNSVGWAVITDEYKVPSKKFKVLGNTDRHSIKKNLIGALLFDSGETAEATRLKRTARRRYTRRKNRICYLQEIFSNEMAKVDDSFFHRLEESFLVEEDKKHERHPIFGNIVDEVAYHEKYPTIYHLRKKLVDSTDKADLRLIYLALAHMIKFRGHFLIEGDLNPDNSDVDKLFIQLVQTYNQLFEENPINASGVDAKAILSARLSKSRRLENLIAQLPGEKKNGLFGNLIALSLGLTPNFKSNFDLAEDAKLQLSKDTYDDDLDNLLAQIGDQYADLFLAAKNLSDAILLSDILRVNTEITKAPLSASMIKRYDEHHQDLTLLKALVRQQLPEKYKEIFFDQSKNGYAGYIDGGASQEEFYKFIKPILEKMDGTEELLVKLNREDLLRKQRTFDNGSIPHQIHLGELHAILRRQEDFYPFLKDNREKIEKILTFRIPYYVGPLARGNSRFAWMTRKSEETITPWNFEEVVDKGASAQSFIERMTNFDKNLPNEKVLPKHSLLYEYFTVYNELTKVKYVTEGMRKPAFLSGEQKKAIVDLLFKTNRKVTVKQLKEDYFKKIECFDSVEISGVEDRFNASLGTYHDLLKIIKDKDFLDNEENEDILEDIVLTLTLFEDREMIEERLKTYAHLFDDKVMKQLKRRRYTGWGRLSRKLINGIRDKQSGKTILDFLKSDGFANRNFMQLIHDDSLTFKEDIQKAQVSGQGDSLHEHIANLAGSPAIKKGILQTVKVVDELVKVMGRHKPENIVIEMARENQTTQKGQKNSRERMKRIEEGIKELGSQILKEHPVENTQLQNEKLYLYYLQNGRDMYVDQELDINRLSDYDVDHIVPQSFLKDDSIDNKVLTRSDKARGKSDNVPSEEVVKKMKNYWRQLLNAKLITQRKFDNLTKAERGGLSELDKAGFIKRQLVETRQITKHVAQILDSRMNTKYDENDKLIREVKVITLKSKLVSDFRKDFQFYKVREINNYHHAHDAYLNAVVGTALIKKYPKLESEFVYGDYKVYDVRKMIAKSEQEIGKATAKYFFYSNIMNFFKTEITLANGEIRKRPLIETNGETGEIVWDKGRDFATVRKVLSMPQVNIVKKTEVQTGGFSKESILPKRNSDKLIARKKDWDPKKYGGFDSPTVAYSVLVVAKVEKGKSKKLKSVKELLGITIMERSSFEKNPIDFLEAKGYKEVKKDLIIKLPKYSLFELENGRKRMLASAGELQKGNELALPSKYVNFLYLASHYEKLKGSPEDNEQKQLFVEQHKHYLDEIIEQISEFSKRVILADANLDKVLSAYNKHRDKPIREQAENIIHLFTLTNLGAPAAFKYFDTTIDRKRYTSTKEVLDATLIHQSITGLYETRIDLSQLGGDGGGGSPAPGGVLNLEEEYRLHEKPVPSSIDPSWLQLFPTVWAERAGMGLANQVPPVVVELRSGASPVAVRQYPMSKEAREGIRPHIQKFLDLGVLVPCRSPWNTPLLPVKKPGTNDYRPVQDLREINKRVQDIHPTVPNPYNLLSSLPPSYTWYSVLDLKDAFFCLRLHPNSQPLFAFEWKDPEKGNTGQLTWTRLPQGFKNSPTLFNEALHRDLAPFRALNPQVVLLQYVDDLLVAAPTYEDCKKGTQKLLQELSKLGYRVSAKKAQLCQREVTYLGYLLKEGKRWLTPARKATVMKIPVPTTPRQVREFLGTAGFCRLWIPGFASLAAPLYPLTKPSIPFIWTEEHQQAFDHIKKALLSAPALALPDLTKPFTLYIDERAGVARGVLTQTLGPWRRPVAYLSKKLDPVASGWPTCLKAVAAVALLLKDADKLTLGQNVTVIASHSLESIVRQPPDRWMTNARMTHYQSLLLNERVSFAPPAVLNPATLLPVESEATPVHRCSEILAEETGTRRDLEDQPLPGVPTWYTDGSSFITEGKRRAGAPIVDGKRTVWASSLPEGTSAQKAELVALTQALRLAEGKNINIYTDSRYAFATAHIHGAIYKQRGWLTSAGKDIKNKEEILALLEAIHLPRRVAIIHCPGHQRGSNPVATGNRRADEAAKQAALSTRVLAGTTKPAGKRTADGSEFEKRTADGSEFESPKKKAKVE

SEQ ID NO: 6645 - protein, 2213 aa, synthetic construct
MPAAKRVKLDGGDKKYSIGLDIGTNSVGWAVITDEYKVPSKKFKVLGNTDRHSIKKNLIGALLFDSGETAEATRLKRTARRRYTRRKNRICYLQEIFSNEMAKVDDSFFHRLEESFLVEEDKKHERHPIFGNIVDEVAYHEKYPTIYHLRKKLVDSTDKADLRLIYLALAHMIKFRGHFLIEGDLNPDNSDVDKLFIQLVQTYNQLFEENPINASGVDAKAILSARLSKSRRLENLIAQLPGEKKNGLFGNLIALSLGLTPNFKSNFDLAEDAKLQLSKDTYDDDLDNLLAQIGDQYADLFLAAKNLSDAILLSDILRVNTEITKAPLSASMIKRYDEHHQDLTLLKALVRQQLPEKYKEIFFDQSKNGYAGYIDGGASQEEFYKFIKPILEKMDGTEELLVKLNREDLLRKQRTFDNGSIPHQIHLGELHAILRRQEDFYPFLKDNREKIEKILTFRIPYYVGPLARGNSRFAWMTRKSEETITPWNFEEVVDKGASAQSFIERMTNFDKNLPNEKVLPKHSLLYEYFTVYNELTKVKYVTEGMRKPAFLSGEQKKAIVDLLFKTNRKVTVKQLKEDYFKKIECFDSVEISGVEDRFNASLGTYHDLLKIIKDKDFLDNEENEDILEDIVLTLTLFEDREMIEERLKTYAHLFDDKVMKQLKRRRYTGWGRLSRKLINGIRDKQSGKTILDFLKSDGFANRNFMQLIHDDSLTFKEDIQKAQVSGQGDSLHEHIANLAGSPAIKKGILQTVKVVDELVKVMGRHKPENIVIEMARENQTTQKGQKNSRERMKRIEEGIKELGSQILKEHPVENTQLQNEKLYLYYLQNGRDMYVDQELDINRLSDYDVDHIVPQSFLKDDSIDNKVLTRSDKARGKSDNVPSEEVVKKMKNYWRQLLNAKLITQRKFDNLTKAERGGLSELDKAGFIKRQLVETRQITKHVAQILDSRMNTKYDENDKLIREVKVITLKSKLVSDFRKDFQFYKVREINNYHHAHDAYLNAVVGTALIKKYPKLESEFVYGDYKVYDVRKMIAKSEQEIGKATAKYFFYSNIMNFFKTEITLANGEIRKRPLIETNGETGEIVWDKGRDFATVRKVLSMPQVNIVKKTEVQTGGFSKESILPKRNSDKLIARKKDWDPKKYGGFDSPTVAYSVLVVAKVEKGKSKKLKSVKELLGITIMERSSFEKNPIDFLEAKGYKEVKKDLIIKLPKYSLFELENGRKRMLASAGELQKGNELALPSKYVNFLYLASHYEKLKGSPEDNEQKQLFVEQHKHYLDEIIEQISEFSKRVILADANLDKVLSAYNKHRDKPIREQAENIIHLFTLTNLGAPAAFKYFDTTIDRKRYTSTKEVLDATLIHQSITGLYETRIDLSQLGGDGGGGSPAPGGTLGDQGSRGSDPLPEPRVTLTVEGIPTEFLVNTGAEHSVLTKPMGKMGSKRTVVAGATGSKVYPWTTKRLLKIGQKQVTHSFLVIPECPAPLLGRDLLTKLKAQIQFSTEGPQVTWEDRPAMCLVLNLEEEYRLHEKPVPPSIDPSWLQLFPMVWAEKAGMGLANQVPPVVVELKSDASPVAVRQYPMSKEAREGIRPHIQRFLDLGILVPCQSPWNTPLLPVKKPGTNDYRPVQDLREVNKRVQDIHPTVPNPYNLLSSLPPSHTWYSVLDLKDAFFCLKLHPNSQPLFAFEWRDPEKGNTGQLTWTRLPQGFKNSPTLFNEALHRDLASFRALNPQVVMLQYVDDLLVAAPTYRDCKEGTRRLLQELSKLGYRVSAKKAQLCREEVTYLGYLLKGGKRWLTPARKATVMKIPTPTTPRQVREFLGTAGFCRLWIPGFASLAAPLYPLTRPKVPFTWTEAHQEAFGRIKEALLSAPALALPDLTKPFALYVDEKEGVARGVLTQTLGPWRRPVAYLSKKLDPVASGWPTCLKAIAAVALLLKDADKLTLGQNVLVIAPHNLESIVRQPPDRWMTNARMTHYQSLLLNERVSFAPPAILNPATLLPVESDDTPIHICSEILAEETGTRPDLRDQPLPGVPAWYTDGSSFIMDGRRQAGAAIVDNKRTVWASNLPEGTSAQKAELIALTQALRLAEGKSINIYTDSRYAFATAHVHGAIYKQRGWLTSAGKDIKNKEEILALLEAIHLPKRVAIIHCPGHQRGTDPVATGNRKADEAAKQAAQSTRILTETTKNAGKRTADGSEFEKRTADGSEFESPKKKAKVE

SEQ ID NO: 6646 - protein, 2213 aa, synthetic construct
MPAAKRVKLDGGDKKYSIGLDIGTNSVGWAVITDEYKVPSKKFKVLGNTDRHSIKKNLIGALLFDSGETAEATRLKRTARRRYTRRKNRICYLQEIFSNEMAKVDDSFFHRLEESFLVEEDKKHERHPIFGNIVDEVAYHEKYPTIYHLRKKLVDSTDKADLRLIYLALAHMIKFRGHFLIEGDLNPDNSDVDKLFIQLVQTYNQLFEENPINASGVDAKAILSARLSKSRRLENLIAQLPGEKKNGLFGNLIALSLGLTPNFKSNFDLAEDAKLQLSKDTYDDDLDNLLAQIGDQYADLFLAAKNLSDAILLSDILRVNTEITKAPLSASMIKRYDEHHQDLTLLKALVRQQLPEKYKEIFFDQSKNGYAGYIDGGASQEEFYKFIKPILEKMDGTEELLVKLNREDLLRKQRTFDNGSIPHQIHLGELHAILRRQEDFYPFLKDNREKIEKILTFRIPYYVGPLARGNSRFAWMTRKSEETITPWNFEEVVDKGASAQSFIERMTNFDKNLPNEKVLPKHSLLYEYFTVYNELTKVKYVTEGMRKPAFLSGEQKKAIVDLLFKTNRKVTVKQLKEDYFKKIECFDSVEISGVEDRFNASLGTYHDLLKIIKDKDFLDNEENEDILEDIVLTLTLFEDREMIEERLKTYAHLFDDKVMKQLKRRRYTGWGRLSRKLINGIRDKQSGKTILDFLKSDGFANRNFMQLIHDDSLTFKEDIQKAQVSGQGDSLHEHIANLAGSPAIKKGILQTVKVVDELVKVMGRHKPENIVIEMARENQTTQKGQKNSRERMKRIEEGIKELGSQILKEHPVENTQLQNEKLYLYYLQNGRDMYVDQELDINRLSDYDVDHIVPQSFLKDDSIDNKVLTRSDKARGKSDNVPSEEVVKKMKNYWRQLLNAKLITQRKFDNLTKAERGGLSELDKAGFIKRQLVETRQITKHVAQILDSRMNTKYDENDKLIREVKVITLKSKLVSDFRKDFQFYKVREINNYHHAHDAYLNAVVGTALIKKYPKLESEFVYGDYKVYDVRKMIAKSEQEIGKATAKYFFYSNIMNFFKTEITLANGEIRKRPLIETNGETGEIVWDKGRDFATVRKVLSMPQVNIVKKTEVQTGGFSKESILPKRNSDKLIARKKDWDPKKYGGFDSPTVAYSVLVVAKVEKGKSKKLKSVKELLGITIMERSSFEKNPIDFLEAKGYKEVKKDLIIKLPKYSLFELENGRKRMLASAGELQKGNELALPSKYVNFLYLASHYEKLKGSPEDNEQKQLFVEQHKHYLDEIIEQISEFSKRVILADANLDKVLSAYNKHRDKPIREQAENIIHLFTLTNLGAPAAFKYFDTTIDRKRYTSTKEVLDATLIHQSITGLYETRIDLSQLGGDGGGGSPAPGGTLGDQGSRGSDPLPEPRVTLTVEGIPTEFLVNTGAEHSVLTKPMGKMGSKRTVVAGATGSKVYPWTTKRLLKIGQKQVTHSFLVIPECPAPLLGRDLLTKLKAQIQFSTEGPQVTWEDRPAMCLVLNLEEEYRLHEKPVPPSIDPSWLQLFPMVWAEKAGMGLANQVPPVVVELKSDASPVAVRQYPMSKEAREGIRPHIQRFLDLGILVPCQSPWNTPLLPVKKPGTNDYRPVQDLREVNKRVQDIHPTVPNPYNLLSSLPPSHTWYSVLDLKDAFFCLKLHPNSQPLFAFEWRDPEKGNTGQLTWTRLPQGFKNSPTLFNEALHRDLASFRALNPQVVMLQYVDDLLVAAPTYRDCKEGTRRLLQELSKLGYRVSAKKAQLCREEVTYLGYLLKGGKRWLTPARKATVMKIPTPTTPRQVREFLGKAGFCRLFIPGFASLAAPLYPLTRPKVPFTWTEAHQEAFGRIKEALLSAPALALPDLTKPFALYVDEKEGVARGVLTQTLGPWRRPVAYLSKKLDPVASGWPTCLKAIAAVALLLKDADKLTLGQNVLVIAPHNLESIVRQPPDRWMTNARMTHYQSLLLNERVSFAPPAILNPATLLPVESDDTPIHICSEILAEETGTRPDLRDQPLPGVPAWYTDGSSFIMDGRRQAGAAIVDNKRTVWASNLPEGTSAQKAELIALTQALRLAEGKSINIYTDSRYAFATAHVHGAIYKQRGWLTSAGKDIKNKEEILALLEAIHLPKRVAIIHCPGHQRGTDPVATGNRKADEAAKQAAQSTRILTETTKNAGKRTADGSEFEKRTADGSEFESPKKKAKVE

SEQ ID NO: 6647 - protein, 2091 aa, synthetic construct
MPAAKRVKLDGGDKKYSIGLDIGTNSVGWAVITDEYKVPSKKFKVLGNTDRHSIKKNLIGALLFDSGETAEATRLKRTARRRYTRRKNRICYLQEIFSNEMAKVDDSFFHRLEESFLVEEDKKHERHPIFGNIVDEVAYHEKYPTIYHLRKKLVDSTDKADLRLIYLALAHMIKFRGHFLIEGDLNPDNSDVDKLFIQLVQTYNQLFEENPINASGVDAKAILSARLSKSRRLENLIAQLPGEKKNGLFGNLIALSLGLTPNFKSNFDLAEDAKLQLSKDTYDDDLDNLLAQIGDQYADLFLAAKNLSDAILLSDILRVNTEITKAPLSASMIKRYDEHHQDLTLLKALVRQQLPEKYKEIFFDQSKNGYAGYIDGGASQEEFYKFIKPILEKMDGTEELLVKLNREDLLRKQRTFDNGSIPHQIHLGELHAILRRQEDFYPFLKDNREKIEKILTFRIPYYVGPLARGNSRFAWMTRKSEETITPWNFEEVVDKGASAQSFIERMTNFDKNLPNEKVLPKHSLLYEYFTVYNELTKVKYVTEGMRKPAFLSGEQKKAIVDLLFKTNRKVTVKQLKEDYFKKIECFDSVEISGVEDRFNASLGTYHDLLKIIKDKDFLDNEENEDILEDIVLTLTLFEDREMIEERLKTYAHLFDDKVMKQLKRRRYTGWGRLSRKLINGIRDKQSGKTILDFLKSDGFANRNFMQLIHDDSLTFKEDIQKAQVSGQGDSLHEHIANLAGSPAIKKGILQTVKVVDELVKVMGRHKPENIVIEMARENQTTQKGQKNSRERMKRIEEGIKELGSQILKEHPVENTQLQNEKLYLYYLQNGRDMYVDQELDINRLSDYDVDHIVPQSFLKDDSIDNKVLTRSDKARGKSDNVPSEEVVKKMKNYWRQLLNAKLITQRKFDNLTKAERGGLSELDKAGFIKRQLVETRQITKHVAQILDSRMNTKYDENDKLIREVKVITLKSKLVSDFRKDFQFYKVREINNYHHAHDAYLNAVVGTALIKKYPKLESEFVYGDYKVYDVRKMIAKSEQEIGKATAKYFFYSNIMNFFKTEITLANGEIRKRPLIETNGETGEIVWDKGRDFATVRKVLSMPQVNIVKKTEVQTGGFSKESILPKRNSDKLIARKKDWDPKKYGGFDSPTVAYSVLVVAKVEKGKSKKLKSVKELLGITIMERSSFEKNPIDFLEAKGYKEVKKDLIIKLPKYSLFELENGRKRMLASAGELQKGNELALPSKYVNFLYLASHYEKLKGSPEDNEQKQLFVEQHKHYLDEIIEQISEFSKRVILADANLDKVLSAYNKHRDKPIREQAENIIHLFTLTNLGAPAAFKYFDTTIDRKRYTSTKEVLDATLIHQSITGLYETRIDLSQLGGDGGGGSPAPGGTLNIEDEYRLHETSKEPDVSLGSTWLSDFPQAWAETGGMGLAVRQAPLIIPLKATSTPVSIKQYPMSQEARLGIKPHIQRLLDQGILVPCQSPWNTPLLPVKKPGTNDYRPVQDLREVNKRVEDIHPTVPNPYNLLSGLPPSHQWYTVLDLKDAFFCLRLHPTSQPLFAFEWRDPEMGISGQLTWTRLPQGFKNSPTLFNEALHRDLAGFRIQHPDLILLQYVDDLLLAATSELDCQQGTRALLQTLGDLGYRASAKKAQICQKQVKYLGYLLKEGQRWLTEARKETVMGQPIPKTPRQLREFLGTAGFCRLWIPGFAEMAAPLYPLTKPGTLFNWGPDQQKAFQEIKQALLTAPALGLPDLTKPFELFVDEKQGYAKGVLTQKLGPWRRPVAYLSKKLDPVAAGWPPCLRMVAAIAVLTKDAGKLTMGQPLVILAPHAVEALVKQPPDRWLSNARMTHYQALLLDTDRVQFGPVVALNPATLLPLPEEGLQHDCLDILAEAHGTRSDLMDQPLPDADHTWYTDGSSFLQEGQRKAGAAVTTETEVIWARALPAGTSAQRAELIALTQALKMAEGKKLNVYTDSRYAFATAHIHGEIYRRRGWLTSEGKEIKNKDEILALLKALFLPKRLSIIHCPGHQKGNSAEARGNRMADQAAREVATRETPETSTLLAGKRTADGSEFEKRTADGSEFESPKKKAKVE

SEQ ID NO: 6648 - protein, 2091 aa, synthetic construct
MPAAKRVKLDGGDKKYSIGLDIGTNSVGWAVITDEYKVPSKKFKVLGNTDRHSIKKNLIGALLFDSGETAEATRLKRTARRRYTRRKNRICYLQEIFSNEMAKVDDSFFHRLEESFLVEEDKKHERHPIFGNIVDEVAYHEKYPTIYHLRKKLVDSTDKADLRLIYLALAHMIKFRGHFLIEGDLNPDNSDVDKLFIQLVQTYNQLFEENPINASGVDAKAILSARLSKSRRLENLIAQLPGEKKNGLFGNLIALSLGLTPNFKSNFDLAEDAKLQLSKDTYDDDLDNLLAQIGDQYADLFLAAKNLSDAILLSDILRVNTEITKAPLSASMIKRYDEHHQDLTLLKALVRQQLPEKYKEIFFDQSKNGYAGYIDGGASQEEFYKFIKPILEKMDGTEELLVKLNREDLLRKQRTFDNGSIPHQIHLGELHAILRRQEDFYPFLKDNREKIEKILTFRIPYYVGPLARGNSRFAWMTRKSEETITPWNFEEVVDKGASAQSFIERMTNFDKNLPNEKVLPKHSLLYEYFTVYNELTKVKYVTEGMRKPAFLSGEQKKAIVDLLFKTNRKVTVKQLKEDYFKKIECFDSVEISGVEDRFNASLGTYHDLLKIIKDKDFLDNEENEDILEDIVLTLTLFEDREMIEERLKTYAHLFDDKVMKQLKRRRYTGWGRLSRKLINGIRDKQSGKTILDFLKSDGFANRNFMQLIHDDSLTFKEDIQKAQVSGQGDSLHEHIANLAGSPAIKKGILQTVKVVDELVKVMGRHKPENIVIEMARENQTTQKGQKNSRERMKRIEEGIKELGSQILKEHPVENTQLQNEKLYLYYLQNGRDMYVDQELDINRLSDYDVDHIVPQSFLKDDSIDNKVLTRSDKARGKSDNVPSEEVVKKMKNYWRQLLNAKLITQRKFDNLTKAERGGLSELDKAGFIKRQLVETRQITKHVAQILDSRMNTKYDENDKLIREVKVITLKSKLVSDFRKDFQFYKVREINNYHHAHDAYLNAVVGTALIKKYPKLESEFVYGDYKVYDVRKMIAKSEQEIGKATAKYFFYSNIMNFFKTEITLANGEIRKRPLIETNGETGEIVWDKGRDFATVRKVLSMPQVNIVKKTEVQTGGFSKESILPKRNSDKLIARKKDWDPKKYGGFDSPTVAYSVLVVAKVEKGKSKKLKSVKELLGITIMERSSFEKNPIDFLEAKGYKEVKKDLIIKLPKYSLFELENGRKRMLASAGELQKGNELALPSKYVNFLYLASHYEKLKGSPEDNEQKQLFVEQHKHYLDEIIEQISEFSKRVILADANLDKVLSAYNKHRDKPIREQAENIIHLFTLTNLGAPAAFKYFDTTIDRKRYTSTKEVLDATLIHQSITGLYETRIDLSQLGGDGGGGSPAPGGTLNIEDEYRLHETSKGPDVPLGSTWLSDFPQAWAETGGMGLAVRQAPLIIPLKATSTPVSIKQYPMSQEARLGIKPHIQRLLDQGILVPCQSPWNTPLLPVKKPGTNDYRPVQDLREVNKRVEDIHPTVPNPYNLLSGLPPSHQWYTVLDLKDAFFCLRLHPTSQSLFAFEWRDPEMGISGQLTWTRLPQGFKNSPTLFNEALHRDLADFRIQHPDLILLQYVDDLLLAATSELDCQQGTRALLQTLGDLGYRASAKKAQICQKQVKYLGYLLKEGQRWLTEARKETVMGQPTPKTPRQLREFLGKAGFCRLFIPGFAEMAAPLYPLTKPGTLFEWGPDQQKAYQEIKQALLTAPALGLPDLTKPFELFVDEKQGYAKGVLTQKLGPWRRPVAYLSKKLDPVAAGWPPCLRMVAAIAVLTKDAGKLTMGQPLVILAPHAVEALVKQPPDRWLSNARMTHYQALLLDTDRVQFGPIVALNPATLLPLPEEGLQHDCLDILAEAHGTRPDLTDQPLPDADHTWYTDGSSFLQEGQRKAGAAVTTETEVVWAKALPAGTSAQRAELIALTQALKMAEGKKLNVYTDSRYAFATAHIHGEIYRRRGWLTSEGKEIKNKDEILALLKALFLPKRLSIIHCPGHQKGNRAEARGNRMADQAAREVATRETPETSTLLAGKRTADGSEFEKRTADGSEFESPKKKAKVE

SEQ ID NO: 6649 - protein, 2082 aa, synthetic construct
MPAAKRVKLDGGDKKYSIGLDIGTNSVGWAVITDEYKVPSKKFKVLGNTDRHSIKKNLIGALLFDSGETAEATRLKRTARRRYTRRKNRICYLQEIFSNEMAKVDDSFFHRLEESFLVEEDKKHERHPIFGNIVDEVAYHEKYPTIYHLRKKLVDSTDKADLRLIYLALAHMIKFRGHFLIEGDLNPDNSDVDKLFIQLVQTYNQLFEENPINASGVDAKAILSARLSKSRRLENLIAQLPGEKKNGLFGNLIALSLGLTPNFKSNFDLAEDAKLQLSKDTYDDDLDNLLAQIGDQYADLFLAAKNLSDAILLSDILRVNTEITKAPLSASMIKRYDEHHQDLTLLKALVRQQLPEKYKEIFFDQSKNGYAGYIDGGASQEEFYKFIKPILEKMDGTEELLVKLNREDLLRKQRTFDNGSIPHQIHLGELHAILRRQEDFYPFLKDNREKIEKILTFRIPYYVGPLARGNSRFAWMTRKSEETITPWNFEEVVDKGASAQSFIERMTNFDKNLPNEKVLPKHSLLYEYFTVYNELTKVKYVTEGMRKPAFLSGEQKKAIVDLLFKTNRKVTVKQLKEDYFKKIECFDSVEISGVEDRFNASLGTYHDLLKIIKDKDFLDNEENEDILEDIVLTLTLFEDREMIEERLKTYAHLFDDKVMKQLKRRRYTGWGRLSRKLINGIRDKQSGKTILDFLKSDGFANRNFMQLIHDDSLTFKEDIQKAQVSGQGDSLHEHIANLAGSPAIKKGILQTVKVVDELVKVMGRHKPENIVIEMARENQTTQKGQKNSRERMKRIEEGIKELGSQILKEHPVENTQLQNEKLYLYYLQNGRDMYVDQELDINRLSDYDVDHIVPQSFLKDDSIDNKVLTRSDKARGKSDNVPSEEVVKKMKNYWRQLLNAKLITQRKFDNLTKAERGGLSELDKAGFIKRQLVETRQITKHVAQILDSRMNTKYDENDKLIREVKVITLKSKLVSDFRKDFQFYKVREINNYHHAHDAYLNAVVGTALIKKYPKLESEFVYGDYKVYDVRKMIAKSEQEIGKATAKYFFYSNIMNFFKTEITLANGEIRKRPLIETNGETGEIVWDKGRDFATVRKVLSMPQVNIVKKTEVQTGGFSKESILPKRNSDKLIARKKDWDPKKYGGFDSPTVAYSVLVVAKVEKGKSKKLKSVKELLGITIMERSSFEKNPIDFLEAKGYKEVKKDLIIKLPKYSLFELENGRKRMLASAGELQKGNELALPSKYVNFLYLASHYEKLKGSPEDNEQKQLFVEQHKHYLDEIIEQISEFSKRVILADANLDKVLSAYNKHRDKPIREQAENIIHLFTLTNLGAPAAFKYFDTTIDRKRYTSTKEVLDATLIHQSITGLYETRIDLSQLGGDGGGGSPAPGGIPWLMKKPLQLTTLVPLQEYEERLLKQTMLTGSYKEKLQSLFLKYDALWQHWENQVGHRRIKPHHIATGTVNPRPQKQYPINPKAKASIQTVINDLLKQGVLIQQNSIMNTPVYPVPKPDGKWRMVLDYREVNKTIPLIAAQNQHSAGILSSIFRGKYKTTLDLSNGFWAHSITPESYWLTAFTWLGQQYCWTRLPQGFLNSPALFNADVVDLLKEVPNVQVYVDDIYISHDDPREHLEQLEKVFSLLLNAGYVVSLKKSEIAQHEVEFLGFNITKEGRGLTETFKQKLLNITPPRDLKQLQSILGKLNFARNFIPNFSELVKPLYNIIATAPGKYITWTTDNSQQLQNIISMLNSAENLEERNPEVRLIMKVNTSPSAGYIRFYNEFAKRPIMYLNYVYTKAEVKFTNTEKLLTTIHKGLIKALDLGMGQEILVYSPIVSMTKIQKTPLPERKALPIRWITWMSYLEDPRIQFHYDKTLPELQQVPTVTDDIIAKIKHPSEFSMVFYTDGSAIKHPNVNKSHNAGMGIAQVQFKPEFTVINTWSIPLGDHTAQLAEVAAVEFACKKALKIDGPVLIVTDSFYVAESVNKELPYWQSNGFFNNKKKPLKHVSKWKSIADCIQLKPDIIIIHEKGHQPTASTFHTEGNNLADKLATQGSYVVNAGKRTADGSEFEKRTADGSEFESPKKKAKVE

SEQ ID NO: 6650 - protein, 2089 aa, synthetic construct
MPAAKRVKLDGGDKKYSIGLDIGTNSVGWAVITDEYKVPSKKFKVLGNTDRHSIKKNLIGALLFDSGETAEATRLKRTARRRYTRRKNRICYLQEIFSNEMAKVDDSFFHRLEESFLVEEDKKHERHPIFGNIVDEVAYHEKYPTIYHLRKKLVDSTDKADLRLIYLALAHMIKFRGHFLIEGDLNPDNSDVDKLFIQLVQTYNQLFEENPINASGVDAKAILSARLSKSRRLENLIAQLPGEKKNGLFGNLIALSLGLTPNFKSNFDLAEDAKLQLSKDTYDDDLDNLLAQIGDQYADLFLAAKNLSDAILLSDILRVNTEITKAPLSASMIKRYDEHHQDLTLLKALVRQQLPEKYKEIFFDQSKNGYAGYIDGGASQEEFYKFIKPILEKMDGTEELLVKLNREDLLRKQRTFDNGSIPHQIHLGELHAILRRQEDFYPFLKDNREKIEKILTFRIPYYVGPLARGNSRFAWMTRKSEETITPWNFEEVVDKGASAQSFIERMTNFDKNLPNEKVLPKHSLLYEYFTVYNELTKVKYVTEGMRKPAFLSGEQKKAIVDLLFKTNRKVTVKQLKEDYFKKIECFDSVEISGVEDRFNASLGTYHDLLKIIKDKDFLDNEENEDILEDIVLTLTLFEDREMIEERLKTYAHLFDDKVMKQLKRRRYTGWGRLSRKLINGIRDKQSGKTILDFLKSDGFANRNFMQLIHDDSLTFKEDIQKAQVSGQGDSLHEHIANLAGSPAIKKGILQTVKVVDELVKVMGRHKPENIVIEMARENQTTQKGQKNSRERMKRIEEGIKELGSQILKEHPVENTQLQNEKLYLYYLQNGRDMYVDQELDINRLSDYDVDHIVPQSFLKDDSIDNKVLTRSDKARGKSDNVPSEEVVKKMKNYWRQLLNAKLITQRKFDNLTKAERGGLSELDKAGFIKRQLVETRQITKHVAQILDSRMNTKYDENDKLIREVKVITLKSKLVSDFRKDFQFYKVREINNYHHAHDAYLNAVVGTALIKKYPKLESEFVYGDYKVYDVRKMIAKSEQEIGKATAKYFFYSNIMNFFKTEITLANGEIRKRPLIETNGETGEIVWDKGRDFATVRKVLSMPQVNIVKKTEVQTGGFSKESILPKRNSDKLIARKKDWDPKKYGGFDSPTVAYSVLVVAKVEKGKSKKLKSVKELLGITIMERSSFEKNPIDFLEAKGYKEVKKDLIIKLPKYSLFELENGRKRMLASAGELQKGNELALPSKYVNFLYLASHYEKLKGSPEDNEQKQLFVEQHKHYLDEIIEQISEFSKRVILADANLDKVLSAYNKHRDKPIREQAENIIHLFTLTNLGAPAAFKYFDTTIDRKRYTSTKEVLDATLIHQSITGLYETRIDLSQLGGDGGGGSPAPGGVLNLEEEYRLHEKPVPSSIDPSWLQLFPTVWAERAGMGLANQVPPVVVELRSGASPVAVRQYPMSKEAREGIRPHIQRFLDLGVLVPCQSPWNTPLLPVKKPGTNDYRPVQDLREINKRVQDIHPTVPNPYNLLSSLPPSHTWYSVLDLKDAFFCLKLHPNSQPLFAFEWRDPEKGNTGQLTWTRLPQGFKNSPTLFNEALHRDLAPFRALNPQVVLLQYVDDLLVAAPTYRDCKEGTQKLLQELSKLGYRVSAKKAQLCQKEVTYLGYLLKEGKRWLTPARKATVMKIPPPTTPRQVREFLGKAGFCRLFIPGFASLAAPLYPLTKPSIPFIWTEEHQKAFDRIKEALLSAPALALPDLTKPFTLYVDERAGVARGVLTQTLGPWRRPVAYLSKKLDPVASGWPTCLKAVAAVALLLKDADKLTLGQNVTVIASHSLESIVRQPPDRWMTNARMTHYQSLLLNERVSFAPPAVLNPATLLPVESEATPVHRCSEILAEETGTRRDLKDQPLPGVPAWYTDGSSFIAEGKRRAGAAIVDGKRTVWASSLPEGTSAQKAELVALTQALRLAEGKDINIYTDSRYAFATAHIHGAIYKQRGWLTSAGKDIKNKEEILALLEAIHLPKRVAIIHCPGHQKGNDPVATGNRRADEAAKQAALSTRVLAETTKPAGKRTADGSEFEKRTADGSEFESPKKKAKVE

SEQ ID NO: 6651 - protein, 2093 aa, synthetic construct
MPAAKRVKLDGGDKKYSIGLDIGTNSVGWAVITDEYKVPSKKFKVLGNTDRHSIKKNLIGALLFDSGETAEATRLKRTARRRYTRRKNRICYLQEIFSNEMAKVDDSFFHRLEESFLVEEDKKHERHPIFGNIVDEVAYHEKYPTIYHLRKKLVDSTDKADLRLIYLALAHMIKFRGHFLIEGDLNPDNSDVDKLFIQLVQTYNQLFEENPINASGVDAKAILSARLSKSRRLENLIAQLPGEKKNGLFGNLIALSLGLTPNFKSNFDLAEDAKLQLSKDTYDDDLDNLLAQIGDQYADLFLAAKNLSDAILLSDILRVNTEITKAPLSASMIKRYDEHHQDLTLLKALVRQQLPEKYKEIFFDQSKNGYAGYIDGGASQEEFYKFIKPILEKMDGTEELLVKLNREDLLRKQRTFDNGSIPHQIHLGELHAILRRQEDFYPFLKDNREKIEKILTFRIPYYVGPLARGNSRFAWMTRKSEETITPWNFEEVVDKGASAQSFIERMTNFDKNLPNEKVLPKHSLLYEYFTVYNELTKVKYVTEGMRKPAFLSGEQKKAIVDLLFKTNRKVTVKQLKEDYFKKIECFDSVEISGVEDRFNASLGTYHDLLKIIKDKDFLDNEENEDILEDIVLTLTLFEDREMIEERLKTYAHLFDDKVMKQLKRRRYTGWGRLSRKLINGIRDKQSGKTILDFLKSDGFANRNFMQLIHDDSLTFKEDIQKAQVSGQGDSLHEHIANLAGSPAIKKGILQTVKVVDELVKVMGRHKPENIVIEMARENQTTQKGQKNSRERMKRIEEGIKELGSQILKEHPVENTQLQNEKLYLYYLQNGRDMYVDQELDINRLSDYDVDHIVPQSFLKDDSIDNKVLTRSDKARGKSDNVPSEEVVKKMKNYWRQLLNAKLITQRKFDNLTKAERGGLSELDKAGFIKRQLVETRQITKHVAQILDSRMNTKYDENDKLIREVKVITLKSKLVSDFRKDFQFYKVREINNYHHAHDAYLNAVVGTALIKKYPKLESEFVYGDYKVYDVRKMIAKSEQEIGKATAKYFFYSNIMNFFKTEITLANGEIRKRPLIETNGETGEIVWDKGRDFATVRKVLSMPQVNIVKKTEVQTGGFSKESILPKRNSDKLIARKKDWDPKKYGGFDSPTVAYSVLVVAKVEKGKSKKLKSVKELLGITIMERSSFEKNPIDFLEAKGYKEVKKDLIIKLPKYSLFELENGRKRMLASAGELQKGNELALPSKYVNFLYLASHYEKLKGSPEDNEQKQLFVEQHKHYLDEIIEQISEFSKRVILADANLDKVLSAYNKHRDKPIREQAENIIHLFTLTNLGAPAAFKYFDTTIDRKRYTSTKEVLDATLIHQSITGLYETRIDLSQLGGDGGPAPGGSGGTAPLEEEYRLFLEAPIQNVTLLEQWKREIPKVWAEINPPGLASTQAPIHVQLLSTALPVRVRQYPITLEAKRSLRETIRKFRAAGILRPVHSPWNTPLLPVRKSGTSEYRMVQDLREVNKRVETIHPTVPNPYTLLSLLPPDRIWYSVLDLKDAFFCIPLAPESQLIFAFEWADAEEGESGQLTWTRLPQGFKNSPTLFNEALNRDLQGFRLDHPSVSLLQYVDDLLIAADTQAACLSATRDLLMTLAELGYRVSGKKAQLCQEEVTYLGFKIHKGSRSLSNSRTQAILQIPVPKTKRQVREFLGTIGYCRLWIPGFAELAQPLYAATRPGNDPLVWGEKEEEAFQSLKLALTQPPALALPSLDKPFQLFVEETSGAAKGVLTQALGPWKRPVAYLSKRLDPVAAGWPRCLRAIAAAALLTREASKLTFGQDIEITSSHNLESLLRSPPDKWLTNARITQYQVLLLDPPRVRFKQTAALNPATLLPETDDTLPIHHCLDTLDSLTSTRPDLTDQPLAQAEATLFTDGSSYIRDGKRYAGAAVVTLDSVIWAEPLPIGTSAQKAELIALTKALEWSKDKSVNIYTDSRYAFATLHVHGMIYRERGWLTAGGKAIKNAPEILALLTAVWLPKRVAVMHCKGHQKDDAPTSTGNRRADEVAREVAIRPLSTQATISAGKRTADGSEFEKRTADGSEFESPKKKAKVE

SEQ ID NO: 6652 - protein, 2093 aa, synthetic construct
MPAAKRVKLDGGDKKYSIGLDIGTNSVGWAVITDEYKVPSKKFKVLGNTDRHSIKKNLIGALLFDSGETAEATRLKRTARRRYTRRKNRICYLQEIFSNEMAKVDDSFFHRLEESFLVEEDKKHERHPIFGNIVDEVAYHEKYPTIYHLRKKLVDSTDKADLRLIYLALAHMIKFRGHFLIEGDLNPDNSDVDKLFIQLVQTYNQLFEENPINASGVDAKAILSARLSKSRRLENLIAQLPGEKKNGLFGNLIALSLGLTPNFKSNFDLAEDAKLQLSKDTYDDDLDNLLAQIGDQYADLFLAAKNLSDAILLSDILRVNTEITKAPLSASMIKRYDEHHQDLTLLKALVRQQLPEKYKEIFFDQSKNGYAGYIDGGASQEEFYKFIKPILEKMDGTEELLVKLNREDLLRKQRTFDNGSIPHQIHLGELHAILRRQEDFYPFLKDNREKIEKILTFRIPYYVGPLARGNSRFAWMTRKSEETITPWNFEEVVDKGASAQSFIERMTNFDKNLPNEKVLPKHSLLYEYFTVYNELTKVKYVTEGMRKPAFLSGEQKKAIVDLLFKTNRKVTVKQLKEDYFKKIECFDSVEISGVEDRFNASLGTYHDLLKIIKDKDFLDNEENEDILEDIVLTLTLFEDREMIEERLKTYAHLFDDKVMKQLKRRRYTGWGRLSRKLINGIRDKQSGKTILDFLKSDGFANRNFMQLIHDDSLTFKEDIQKAQVSGQGDSLHEHIANLAGSPAIKKGILQTVKVVDELVKVMGRHKPENIVIEMARENQTTQKGQKNSRERMKRIEEGIKELGSQILKEHPVENTQLQNEKLYLYYLQNGRDMYVDQELDINRLSDYDVDHIVPQSFLKDDSIDNKVLTRSDKARGKSDNVPSEEVVKKMKNYWRQLLNAKLITQRKFDNLTKAERGGLSELDKAGFIKRQLVETRQITKHVAQILDSRMNTKYDENDKLIREVKVITLKSKLVSDFRKDFQFYKVREINNYHHAHDAYLNAVVGTALIKKYPKLESEFVYGDYKVYDVRKMIAKSEQEIGKATAKYFFYSNIMNFFKTEITLANGEIRKRPLIETNGETGEIVWDKGRDFATVRKVLSMPQVNIVKKTEVQTGGFSKESILPKRNSDKLIARKKDWDPKKYGGFDSPTVAYSVLVVAKVEKGKSKKLKSVKELLGITIMERSSFEKNPIDFLEAKGYKEVKKDLIIKLPKYSLFELENGRKRMLASAGELQKGNELALPSKYVNFLYLASHYEKLKGSPEDNEQKQLFVEQHKHYLDEIIEQISEFSKRVILADANLDKVLSAYNKHRDKPIREQAENIIHLFTLTNLGAPAAFKYFDTTIDRKRYTSTKEVLDATLIHQSITGLYETRIDLSQLGGDGGPAPGGSGGTAPLEEEYRLFLEAPIQNVTLLEQWKREIPKVWAEINPPGLASTQAPIHVQLLSTALPVRVRQYPITLEAKRSLRETIRKFRAAGILRPVHSPWNTPLLPVRKSGTSEYRMVQDLREVNKRVETIHPTVPNPYTLLSLLPPDRIWYSVLDLKDAFFCIPLAPESQLIFAFEWADAEEGESGQLTWTRLPQGFKNSPTLFNEALNRDLQGFRLDHPSVSLLQYVDDLLIAADTQAACLSATRDLLMTLAELGYRVSGKKAQLCQEEVTYLGFKIHKGSRSLSNSRTQAILQIPVPKTKRQVREFLGKIGYCRLFIPGFAELAQPLYAATRPGNDPLVWGEKEEEAFQSLKLALTQPPALALPSLDKPFQLFVEETSGAAKGVLTQALGPWKRPVAYLSKRLDPVAAGWPRCLRAIAAAALLTREASKLTFGQDIEITSSHNLESLLRSPPDKWLTNARITQYQVLLLDPPRVRFKQTAALNPATLLPETDDTLPIHHCLDTLDSLTSTRPDLTDQPLAQAEATLFTDGSSYIRDGKRYAGAAVVTLDSVIWAEPLPIGTSAQKAELIALTKALEWSKDKSVNIYTDSRYAFATLHVHGMIYRERGWLTAGGKAIKNAPEILALLTAVWLPKRVAVMHCKGHQKDDAPTSTGNRRADEVAREVAIRPLSTQATISAGKRTADGSEFEKRTADGSEFESPKKKAKVE

SEQ ID NO: 6653 - protein, 2089 aa, synthetic construct
MPAAKRVKLDGGDKKYSIGLDIGTNSVGWAVITDEYKVPSKKFKVLGNTDRHSIKKNLIGALLFDSGETAEATRLKRTARRRYTRRKNRICYLQEIFSNEMAKVDDSFFHRLEESFLVEEDKKHERHPIFGNIVDEVAYHEKYPTIYHLRKKLVDSTDKADLRLIYLALAHMIKFRGHFLIEGDLNPDNSDVDKLFIQLVQTYNQLFEENPINASGVDAKAILSARLSKSRRLENLIAQLPGEKKNGLFGNLIALSLGLTPNFKSNFDLAEDAKLQLSKDTYDDDLDNLLAQIGDQYADLFLAAKNLSDAILLSDILRVNTEITKAPLSASMIKRYDEHHQDLTLLKALVRQQLPEKYKEIFFDQSKNGYAGYIDGGASQEEFYKFIKPILEKMDGTEELLVKLNREDLLRKQRTFDNGSIPHQIHLGELHAILRRQEDFYPFLKDNREKIEKILTFRIPYYVGPLARGNSRFAWMTRKSEETITPWNFEEVVDKGASAQSFIERMTNFDKNLPNEKVLPKHSLLYEYFTVYNELTKVKYVTEGMRKPAFLSGEQKKAIVDLLFKTNRKVTVKQLKEDYFKKIECFDSVEISGVEDRFNASLGTYHDLLKIIKDKDFLDNEENEDILEDIVLTLTLFEDREMIEERLKTYAHLFDDKVMKQLKRRRYTGWGRLSRKLINGIRDKQSGKTILDFLKSDGFANRNFMQLIHDDSLTFKEDIQKAQVSGQGDSLHEHIANLAGSPAIKKGILQTVKVVDELVKVMGRHKPENIVIEMARENQTTQKGQKNSRERMKRIEEGIKELGSQILKEHPVENTQLQNEKLYLYYLQNGRDMYVDQELDINRLSDYDVDHIVPQSFLKDDSIDNKVLTRSDKARGKSDNVPSEEVVKKMKNYWRQLLNAKLITQRKFDNLTKAERGGLSELDKAGFIKRQLVETRQITKHVAQILDSRMNTKYDENDKLIREVKVITLKSKLVSDFRKDFQFYKVREINNYHHAHDAYLNAVVGTALIKKYPKLESEFVYGDYKVYDVRKMIAKSEQEIGKATAKYFFYSNIMNFFKTEITLANGEIRKRPLIETNGETGEIVWDKGRDFATVRKVLSMPQVNIVKKTEVQTGGFSKESILPKRNSDKLIARKKDWDPKKYGGFDSPTVAYSVLVVAKVEKGKSKKLKSVKELLGITIMERSSFEKNPIDFLEAKGYKEVKKDLIIKLPKYSLFELENGRKRMLASAGELQKGNELALPSKYVNFLYLASHYEKLKGSPEDNEQKQLFVEQHKHYLDEIIEQISEFSKRVILADANLDKVLSAYNKHRDKPIREQAENIIHLFTLTNLGAPAAFKYFDTTIDRKRYTSTKEVLDATLIHQSITGLYETRIDLSQLGGDGGPAPGGSGGVLNLEEEYRLHEKPVPSSIDPSWLQLFPTVWAERAGMGLANQVPPVVVELRSGASPVAVRQYPMSKEAREGIRPHIQKFLDLGVLVPCRSPWNTPLLPVKKPGTNDYRPVQDLREINKRVQDIHPTVPNPYNLLSSLPPSYTWYSVLDLKDAFFCLRLHPNSQPLFAFEWKDPEKGNTGQLTWTRLPQGFKNSPTLFDEALHRDLAPFRALNPQVVLLQYVDDLLVAAPTYEDCKKGTQKLLQELSKLGYRVSAKKAQLCQREVTYLGYLLKEGKRWLTPARKATVMKIPVPTTPRQVREFLGTAGFCRLWIPGFASLAAPLYPLTKESIPFIWTEEHQQAFDHIKKALLSAPALALPDLTKPFTLYIDERAGVARGVLTQTLGPWRRPVAYLSKKLDPVASGWPTCLKAVAAVALLLKDADKLTLGQNVTVIASHSLESIVRQPPDRWMTNARMTHYQSLLLNERVSFAPPAVLNPATLLPVESEATPVHRCSEILAEETGTRRDLEDQPLPGVPTWYTDGSSFITEGKRRAGAPIVDGKRTVWASSLPEGTSAQKAELVALTQALRLAEGKNINIYTDSRYAFATAHIHGAIYKQRGLLTSAGKDIKNKEEILALLEAIHLPRRVAIIHCPGHQRGSNPVATGNRRADEAAKQAALSTRVLAGTTKPAGKRTADGSEFEKRTADGSEFESPKKKAKVE

SEQ ID NO: 6654 - protein, 2213 aa, synthetic construct
MPAAKRVKLDGGDKKYSIGLDIGTNSVGWAVITDEYKVPSKKFKVLGNTDRHSIKKNLIGALLFDSGETAEATRLKRTARRRYTRRKNRICYLQEIFSNEMAKVDDSFFHRLEESFLVEEDKKHERHPIFGNIVDEVAYHEKYPTIYHLRKKLVDSTDKADLRLIYLALAHMIKFRGHFLIEGDLNPDNSDVDKLFIQLVQTYNQLFEENPINASGVDAKAILSARLSKSRRLENLIAQLPGEKKNGLFGNLIALSLGLTPNFKSNFDLAEDAKLQLSKDTYDDDLDNLLAQIGDQYADLFLAAKNLSDAILLSDILRVNTEITKAPLSASMIKRYDEHHQDLTLLKALVRQQLPEKYKEIFFDQSKNGYAGYIDGGASQEEFYKFIKPILEKMDGTEELLVKLNREDLLRKQRTFDNGSIPHQIHLGELHAILRRQEDFYPFLKDNREKIEKILTFRIPYYVGPLARGNSRFAWMTRKSEETITPWNFEEVVDKGASAQSFIERMTNFDKNLPNEKVLPKHSLLYEYFTVYNELTKVKYVTEGMRKPAFLSGEQKKAIVDLLFKTNRKVTVKQLKEDYFKKIECFDSVEISGVEDRFNASLGTYHDLLKIIKDKDFLDNEENEDILEDIVLTLTLFEDREMIEERLKTYAHLFDDKVMKQLKRRRYTGWGRLSRKLINGIRDKQSGKTILDFLKSDGFANRNFMQLIHDDSLTFKEDIQKAQVSGQGDSLHEHIANLAGSPAIKKGILQTVKVVDELVKVMGRHKPENIVIEMARENQTTQKGQKNSRERMKRIEEGIKELGSQILKEHPVENTQLQNEKLYLYYLQNGRDMYVDQELDINRLSDYDVDHIVPQSFLKDDSIDNKVLTRSDKARGKSDNVPSEEVVKKMKNYWRQLLNAKLITQRKFDNLTKAERGGLSELDKAGFIKRQLVETRQITKHVAQILDSRMNTKYDENDKLIREVKVITLKSKLVSDFRKDFQFYKVREINNYHHAHDAYLNAVVGTALIKKYPKLESEFVYGDYKVYDVRKMIAKSEQEIGKATAKYFFYSNIMNFFKTEITLANGEIRKRPLIETNGETGEIVWDKGRDFATVRKVLSMPQVNIVKKTEVQTGGFSKESILPKRNSDKLIARKKDWDPKKYGGFDSPTVAYSVLVVAKVEKGKSKKLKSVKELLGITIMERSSFEKNPIDFLEAKGYKEVKKDLIIKLPKYSLFELENGRKRMLASAGELQKGNELALPSKYVNFLYLASHYEKLKGSPEDNEQKQLFVEQHKHYLDEIIEQISEFSKRVILADANLDKVLSAYNKHRDKPIREQAENIIHLFTLTNLGAPAAFKYFDTTIDRKRYTSTKEVLDATLIHQSITGLYETRIDLSQLGGDGGPAPGGSGGTLGDQGSRGSDPLPEPRVTLTVEGIPTEFLVNTGAEHSVLTKPMGKMGSKRTVVAGATGSKVYPWTTKRLLKIGQKQVTHSFLVIPECPAPLLGRDLLTKLKAQIQFSTEGPQVTWEDRPAMCLVLNLEEEYRLHEKPVPPSIDPSWLQLFPMVWAEKAGMGLANQVPPVVVELKSDASPVAVRQYPMSKEAREGIRPHIQRFLDLGILVPCQSPWNTPLLPVKKPGTNDYRPVQDLREVNKRVQDIHPTVPNPYNLLSSLPPSHTWYSVLDLKDAFFCLKLHPNSQPLFAFEWRDPEKGNTGQLTWTRLPQGFKNSPTLFNEALHRDLASFRALNPQVVMLQYVDDLLVAAPTYRDCKEGTRRLLQELSKLGYRVSAKKAQLCREEVTYLGYLLKGGKRWLTPARKATVMKIPTPTTPRQVREFLGTAGFCRLWIPGFASLAAPLYPLTRPKVPFTWTEAHQEAFGRIKEALLSAPALALPDLTKPFALYVDEKEGVARGVLTQTLGPWRRPVAYLSKKLDPVASGWPTCLKAIAAVALLLKDADKLTLGQNVLVIAPHNLESIVRQPPDRWMTNARMTHYQSLLLNERVSFAPPAILNPATLLPVESDDTPIHICSEILAEETGTRPDLRDQPLPGVPAWYTDGSSFIMDGRRQAGAAIVDNKRTVWASNLPEGTSAQKAELIALTQALRLAEGKSINIYTDSRYAFATAHVHGAIYKQRGWLTSAGKDIKNKEEILALLEAIHLPKRVAIIHCPGHQRGTDPVATGNRKADEAAKQAAQSTRILTETTKNAGKRTADGSEFEKRTADGSEFESPKKKAKVE

SEQ ID NO: 6655 - protein, 2091 aa, synthetic construct
MPAAKRVKLDGGDKKYSIGLDIGTNSVGWAVITDEYKVPSKKFKVLGNTDRHSIKKNLIGALLFDSGETAEATRLKRTARRRYTRRKNRICYLQEIFSNEMAKVDDSFFHRLEESFLVEEDKKHERHPIFGNIVDEVAYHEKYPTIYHLRKKLVDSTDKADLRLIYLALAHMIKFRGHFLIEGDLNPDNSDVDKLFIQLVQTYNQLFEENPINASGVDAKAILSARLSKSRRLENLIAQLPGEKKNGLFGNLIALSLGLTPNFKSNFDLAEDAKLQLSKDTYDDDLDNLLAQIGDQYADLFLAAKNLSDAILLSDILRVNTEITKAPLSASMIKRYDEHHQDLTLLKALVRQQLPEKYKEIFFDQSKNGYAGYIDGGASQEEFYKFIKPILEKMDGTEELLVKLNREDLLRKQRTFDNGSIPHQIHLGELHAILRRQEDFYPFLKDNREKIEKILTFRIPYYVGPLARGNSRFAWMTRKSEETITPWNFEEVVDKGASAQSFIERMTNFDKNLPNEKVLPKHSLLYEYFTVYNELTKVKYVTEGMRKPAFLSGEQKKAIVDLLFKTNRKVTVKQLKEDYFKKIECFDSVEISGVEDRFNASLGTYHDLLKIIKDKDFLDNEENEDILEDIVLTLTLFEDREMIEERLKTYAHLFDDKVMKQLKRRRYTGWGRLSRKLINGIRDKQSGKTILDFLKSDGFANRNFMQLIHDDSLTFKEDIQKAQVSGQGDSLHEHIANLAGSPAIKKGILQTVKVVDELVKVMGRHKPENIVIEMARENQTTQKGQKNSRERMKRIEEGIKELGSQILKEHPVENTQLQNEKLYLYYLQNGRDMYVDQELDINRLSDYDVDHIVPQSFLKDDSIDNKVLTRSDKARGKSDNVPSEEVVKKMKNYWRQLLNAKLITQRKFDNLTKAERGGLSELDKAGFIKRQLVETRQITKHVAQILDSRMNTKYDENDKLIREVKVITLKSKLVSDFRKDFQFYKVREINNYHHAHDAYLNAVVGTALIKKYPKLESEFVYGDYKVYDVRKMIAKSEQEIGKATAKYFFYSNIMNFFKTEITLANGEIRKRPLIETNGETGEIVWDKGRDFATVRKVLSMPQVNIVKKTEVQTGGFSKESILPKRNSDKLIARKKDWDPKKYGGFDSPTVAYSVLVVAKVEKGKSKKLKSVKELLGITIMERSSFEKNPIDFLEAKGYKEVKKDLIIKLPKYSLFELENGRKRMLASAGELQKGNELALPSKYVNFLYLASHYEKLKGSPEDNEQKQLFVEQHKHYLDEIIEQISEFSKRVILADANLDKVLSAYNKHRDKPIREQAENIIHLFTLTNLGAPAAFKYFDTTIDRKRYTSTKEVLDATLIHQSITGLYETRIDLSQLGGDGGPAPGGSGGTLNLEDEYRLYETSAEPEVSPGSTWLSDFPQAWAETGGMGLAVRQAPLIIPLKATSTPVSIKQYPMSQEAKLGIKPHIQRLLDQGILVPCQSPWNTPLLPVKKPGTNDYRPVQDLREVNKRVEDIHPTVPNPYNLLSGLPPSHRWYTVLDLKDAFFCLRLHPTSQPLFAFEWRDPGMGISGQLTWTRLPQGFKNSPTLFNEALHRDLADFRIQHPDLILLQYVDDILLAATSELDCQQGTRALLLTLGNLGYRASAKKAQLCQKQVKYLGYLLKEGQRWLTEARKETVMGQPTPKTPRQLREFLGKAGFCRLFIPGFAEMAAPLYPLTKPGTLFNWGPDQQKAYQEIKQALLTAPALGLPDLTKPFELFVDEKQGYAKGVLTQKLGPWRRPVAYLSKKLDPVAAGWPPCLRMVAAIAVLRKDAGKLTMGQPLVILAPHAVEALVKQPPDRWLSNARMTHYQAMLLDTDRVQFGPVVALNPATLLPLPEEGAPHDCLEILAETHGTRPDLTDQPIPDADHTWYTDGSSFLQEGQRKAGAAVTTETEVIWARALPAGTSAQRAELIALTQALKMAEGKRLNVYTDSRYAFATAHIHGEIYRRRGWLTSEGREIKNKSEILALLKALFLPKRLSIIHCLGHQKGDSAEARGNRLADQAAREAAIKTPPDTSTLLAGKRTADGSEFEKRTADGSEFESPKKKAKVE

SEQ ID NO: 6656 - protein, 2082 aa, synthetic construct
MPAAKRVKLDGGDKKYSIGLDIGTNSVGWAVITDEYKVPSKKFKVLGNTDRHSIKKNLIGALLFDSGETAEATRLKRTARRRYTRRKNRICYLQEIFSNEMAKVDDSFFHRLEESFLVEEDKKHERHPIFGNIVDEVAYHEKYPTIYHLRKKLVDSTDKADLRLIYLALAHMIKFRGHFLIEGDLNPDNSDVDKLFIQLVQTYNQLFEENPINASGVDAKAILSARLSKSRRLENLIAQLPGEKKNGLFGNLIALSLGLTPNFKSNFDLAEDAKLQLSKDTYDDDLDNLLAQIGDQYADLFLAAKNLSDAILLSDILRVNTEITKAPLSASMIKRYDEHHQDLTLLKALVRQQLPEKYKEIFFDQSKNGYAGYIDGGASQEEFYKFIKPILEKMDGTEELLVKLNREDLLRKQRTFDNGSIPHQIHLGELHAILRRQEDFYPFLKDNREKIEKILTFRIPYYVGPLARGNSRFAWMTRKSEETITPWNFEEVVDKGASAQSFIERMTNFDKNLPNEKVLPKHSLLYEYFTVYNELTKVKYVTEGMRKPAFLSGEQKKAIVDLLFKTNRKVTVKQLKEDYFKKIECFDSVEISGVEDRFNASLGTYHDLLKIIKDKDFLDNEENEDILEDIVLTLTLFEDREMIEERLKTYAHLFDDKVMKQLKRRRYTGWGRLSRKLINGIRDKQSGKTILDFLKSDGFANRNFMQLIHDDSLTFKEDIQKAQVSGQGDSLHEHIANLAGSPAIKKGILQTVKVVDELVKVMGRHKPENIVIEMARENQTTQKGQKNSRERMKRIEEGIKELGSQILKEHPVENTQLQNEKLYLYYLQNGRDMYVDQELDINRLSDYDVDHIVPQSFLKDDSIDNKVLTRSDKARGKSDNVPSEEVVKKMKNYWRQLLNAKLITQRKFDNLTKAERGGLSELDKAGFIKRQLVETRQITKHVAQILDSRMNTKYDENDKLIREVKVITLKSKLVSDFRKDFQFYKVREINNYHHAHDAYLNAVVGTALIKKYPKLESEFVYGDYKVYDVRKMIAKSEQEIGKATAKYFFYSNIMNFFKTEITLANGEIRKRPLIETNGETGEIVWDKGRDFATVRKVLSMPQVNIVKKTEVQTGGFSKESILPKRNSDKLIARKKDWDPKKYGGFDSPTVAYSVLVVAKVEKGKSKKLKSVKELLGITIMERSSFEKNPIDFLEAKGYKEVKKDLIIKLPKYSLFELENGRKRMLASAGELQKGNELALPSKYVNFLYLASHYEKLKGSPEDNEQKQLFVEQHKHYLDEIIEQISEFSKRVILADANLDKVLSAYNKHRDKPIREQAENIIHLFTLTNLGAPAAFKYFDTTIDRKRYTSTKEVLDATLIHQSITGLYETRIDLSQLGGDGGPAPGGSGGIPWLMKKPLQLTTLVPLQEYEERLLKQTMLTGSYKEKLQSLFLKYDALWQHWENQVGHRRIKPHHIATGTVNPRPQKQYPINPKAKASIQTVINDLLKQGVLIQQNSIMNTPVYPVPKPDGKWRMVLDYREVNKTIPLIAAQNQHSAGILSSIFRGKYKTTLDLSNGFWAHSITPESYWLTAFTWLGQQYCWTRLPQGFLNSPALFNADVVDLLKEVPNVQVYVDDIYISHDDPREHLEQLEKVFSLLLNAGYVVSLKKSEIAQHEVEFLGFNITKEGRGLTETFKQKLLNITPPRDLKQLQSILGKLNFARNFIPNFSELVKPLYNIIATAPGKYITWTTDNSQQLQNIISMLNSAENLEERNPEVRLIMKVNTSPSAGYIRFYNEFAKRPIMYLNYVYTKAEVKFTNTEKLLTTIHKGLIKALDLGMGQEILVYSPIVSMTKIQKTPLPERKALPIRWITWMSYLEDPRIQFHYDKTLPELQQVPTVTDDIIAKIKHPSEFSMVFYTDGSAIKHPNVNKSHNAGMGIAQVQFKPEFTVINTWSIPLGDHTAQLAEVAAVEFACKKALKIDGPVLIVTDSFYVAESVNKELPYWQSNGFFNNKKKPLKHVSKWKSIADCIQLKPDIIIIHEKGHQPTASTFHTEGNNLADKLATQGSYVVNAGKRTADGSEFEKRTADGSEFESPKKKAKVE

SEQ ID NO: 6657 - protein, 2089 aa, synthetic construct
MPAAKRVKLDGGDKKYSIGLDIGTNSVGWAVITDEYKVPSKKFKVLGNTDRHSIKKNLIGALLFDSGETAEATRLKRTARRRYTRRKNRICYLQEIFSNEMAKVDDSFFHRLEESFLVEEDKKHERHPIFGNIVDEVAYHEKYPTIYHLRKKLVDSTDKADLRLIYLALAHMIKFRGHFLIEGDLNPDNSDVDKLFIQLVQTYNQLFEENPINASGVDAKAILSARLSKSRRLENLIAQLPGEKKNGLFGNLIALSLGLTPNFKSNFDLAEDAKLQLSKDTYDDDLDNLLAQIGDQYADLFLAAKNLSDAILLSDILRVNTEITKAPLSASMIKRYDEHHQDLTLLKALVRQQLPEKYKEIFFDQSKNGYAGYIDGGASQEEFYKFIKPILEKMDGTEELLVKLNREDLLRKQRTFDNGSIPHQIHLGELHAILRRQEDFYPFLKDNREKIEKILTFRIPYYVGPLARGNSRFAWMTRKSEETITPWNFEEVVDKGASAQSFIERMTNFDKNLPNEKVLPKHSLLYEYFTVYNELTKVKYVTEGMRKPAFLSGEQKKAIVDLLFKTNRKVTVKQLKEDYFKKIECFDSVEISGVEDRFNASLGTYHDLLKIIKDKDFLDNEENEDILEDIVLTLTLFEDREMIEERLKTYAHLFDDKVMKQLKRRRYTGWGRLSRKLINGIRDKQSGKTILDFLKSDGFANRNFMQLIHDDSLTFKEDIQKAQVSGQGDSLHEHIANLAGSPAIKKGILQTVKVVDELVKVMGRHKPENIVIEMARENQTTQKGQKNSRERMKRIEEGIKELGSQILKEHPVENTQLQNEKLYLYYLQNGRDMYVDQELDINRLSDYDVDHIVPQSFLKDDSIDNKVLTRSDKARGKSDNVPSEEVVKKMKNYWRQLLNAKLITQRKFDNLTKAERGGLSELDKAGFIKRQLVETRQITKHVAQILDSRMNTKYDENDKLIREVKVITLKSKLVSDFRKDFQFYKVREINNYHHAHDAYLNAVVGTALIKKYPKLESEFVYGDYKVYDVRKMIAKSEQEIGKATAKYFFYSNIMNFFKTEITLANGEIRKRPLIETNGETGEIVWDKGRDFATVRKVLSMPQVNIVKKTEVQTGGFSKESILPKRNSDKLIARKKDWDPKKYGGFDSPTVAYSVLVVAKVEKGKSKKLKSVKELLGITIMERSSFEKNPIDFLEAKGYKEVKKDLIIKLPKYSLFELENGRKRMLASAGELQKGNELALPSKYVNFLYLASHYEKLKGSPEDNEQKQLFVEQHKHYLDEIIEQISEFSKRVILADANLDKVLSAYNKHRDKPIREQAENIIHLFTLTNLGAPAAFKYFDTTIDRKRYTSTKEVLDATLIHQSITGLYETRIDLSQLGGDGGPAPGGSGGVLNLEEEYRLHEKPVPSSIDPSWLQLFPTVWAERAGMGLANQVPPVVVELRSGASPVAVRQYPMSKEAREGIRPHIQRFLDLGVLVPCQSPWNTPLLPVKKPGTNDYRPVQDLREINKRVQDIHPTVPNPYNLLSSLPPSHTWYSVLDLKDAFFCLKLHPNSQPLFAFEWRDPEKGNTGQLTWTRLPQGFKNSPTLFNEALHRDLAPFRALNPQVVLLQYVDDLLVAAPTYRDCKEGTQKLLQELSKLGYRVSAKKAQLCQKEVTYLGYLLKEGKRWLTPARKATVMKIPPPTTPRQVREFLGTAGFCRLWIPGFASLAAPLYPLTKPSIPFIWTEEHQKAFDRIKEALLSAPALALPDLTKPFTLYVDERAGVARGVLTQTLGPWRRPVAYLSKKLDPVASGWPTCLKAVAAVALLLKDADKLTLGQNVTVIASHSLESIVRQPPDRWMTNARMTHYQSLLLNERVSFAPPAVLNPATLLPVESEATPVHRCSEILAEETGTRRDLKDQPLPGVPAWYTDGSSFIAEGKRRAGAAIVDGKRTVWASSLPEGTSAQKAELVALTQALRLAEGKDINIYTDSRYAFATAHIHGAIYKQRGWLTSAGKDIKNKEEILALLEAIHLPKRVAIIHCPGHQKGNDPVATGNRRADEAAKQAALSTRVLAETTKPAGKRTADGSEFEKRTADGSEFESPKKKAKVE

SEQ ID NO: 6658 - protein, 2091 aa, synthetic construct
MPAAKRVKLDGGDKKYSIGLDIGTNSVGWAVITDEYKVPSKKFKVLGNTDRHSIKKNLIGALLFDSGETAEATRLKRTARRRYTRRKNRICYLQEIFSNEMAKVDDSFFHRLEESFLVEEDKKHERHPIFGNIVDEVAYHEKYPTIYHLRKKLVDSTDKADLRLIYLALAHMIKFRGHFLIEGDLNPDNSDVDKLFIQLVQTYNQLFEENPINASGVDAKAILSARLSKSRRLENLIAQLPGEKKNGLFGNLIALSLGLTPNFKSNFDLAEDAKLQLSKDTYDDDLDNLLAQIGDQYADLFLAAKNLSDAILLSDILRVNTEITKAPLSASMIKRYDEHHQDLTLLKALVRQQLPEKYKEIFFDQSKNGYAGYIDGGASQEEFYKFIKPILEKMDGTEELLVKLNREDLLRKQRTFDNGSIPHQIHLGELHAILRRQEDFYPFLKDNREKIEKILTFRIPYYVGPLARGNSRFAWMTRKSEETITPWNFEEVVDKGASAQSFIERMTNFDKNLPNEKVLPKHSLLYEYFTVYNELTKVKYVTEGMRKPAFLSGEQKKAIVDLLFKTNRKVTVKQLKEDYFKKIECFDSVEISGVEDRFNASLGTYHDLLKIIKDKDFLDNEENEDILEDIVLTLTLFEDREMIEERLKTYAHLFDDKVMKQLKRRRYTGWGRLSRKLINGIRDKQSGKTILDFLKSDGFANRNFMQLIHDDSLTFKEDIQKAQVSGQGDSLHEHIANLAGSPAIKKGILQTVKVVDELVKVMGRHKPENIVIEMARENQTTQKGQKNSRERMKRIEEGIKELGSQILKEHPVENTQLQNEKLYLYYLQNGRDMYVDQELDINRLSDYDVDHIVPQSFLKDDSIDNKVLTRSDKARGKSDNVPSEEVVKKMKNYWRQLLNAKLITQRKFDNLTKAERGGLSELDKAGFIKRQLVETRQITKHVAQILDSRMNTKYDENDKLIREVKVITLKSKLVSDFRKDFQFYKVREINNYHHAHDAYLNAVVGTALIKKYPKLESEFVYGDYKVYDVRKMIAKSEQEIGKATAKYFFYSNIMNFFKTEITLANGEIRKRPLIETNGETGEIVWDKGRDFATVRKVLSMPQVNIVKKTEVQTGGFSKESILPKRNSDKLIARKKDWDPKKYGGFDSPTVAYSVLVVAKVEKGKSKKLKSVKELLGITIMERSSFEKNPIDFLEAKGYKEVKKDLIIKLPKYSLFELENGRKRMLASAGELQKGNELALPSKYVNFLYLASHYEKLKGSPEDNEQKQLFVEQHKHYLDEIIEQISEFSKRVILADANLDKVLSAYNKHRDKPIREQAENIIHLFTLTNLGAPAAFKYFDTTIDRKRYTSTKEVLDATLIHQSITGLYETRIDLSQLGGDGGPAPGGSGGTLNIEDEYRLHETSKEPDVPLGSTWLSDFPQAWAETGGMGLAVRQAPLIIPLKATSTPVSIKQYPMSQEARLGIKPHIQRLLDQGILVPCQSPWNTPLLPVKKPGTNDYRPVQDLREVNKRVEDIHPTVPNPYNLLSGLPPSHQWYTVLDLKDAFFCLRLHPTSQPLFAFEWRDPEMGISGQLTWTRLPQGFKNSPTLFNEALHRDLADFRIQHPDLILLQYVDDLLLAATSEQDCQRGTRALLQTLGNLGYRASAKKAQICQKQVKYLGYLLKEGQRWLTEARKETVMGQPTPKTPRQLREFLGTAGFCRLWIPGFAEMAAPLYPLTKPGTLFNWGPDQQKAYQEIKQALLTAPALGLPDLTKPFELFVDEKQGYAKGVLTQKLGPWRRPVAYLSKKLDPVAAGWPPCLRMVAAIAVLTKDAGKLTMGQPLVILAPHAVEALVKQPPDRWLSNARMTHYQAMLLDTDRVQFGPVVALNPATLLPLPEKEAPHDCLEILAETHGTRPDLTDQPIPDADYTWYTDGSSFLQEGQRRAGAAVTTETEVIWARALPAGTSAQRAELIALTQALKMAEGKKLNVYTDSRYAFATAHVHGEIYRRRGWLTSEGREIKNKNEILALLKALFLPKRLSIIHCPGHQKGNSAEARGNRMADQAAREAAMKAVLETSTLLAGKRTADGSEFEKRTADGSEFESPKKKAKVE

SEQ ID NO: 6659 - protein, 2093 aa, synthetic construct
MPAAKRVKLDGGDKKYSIGLDIGTNSVGWAVITDEYKVPSKKFKVLGNTDRHSIKKNLIGALLFDSGETAEATRLKRTARRRYTRRKNRICYLQEIFSNEMAKVDDSFFHRLEESFLVEEDKKHERHPIFGNIVDEVAYHEKYPTIYHLRKKLVDSTDKADLRLIYLALAHMIKFRGHFLIEGDLNPDNSDVDKLFIQLVQTYNQLFEENPINASGVDAKAILSARLSKSRRLENLIAQLPGEKKNGLFGNLIALSLGLTPNFKSNFDLAEDAKLQLSKDTYDDDLDNLLAQIGDQYADLFLAAKNLSDAILLSDILRVNTEITKAPLSASMIKRYDEHHQDLTLLKALVRQQLPEKYKEIFFDQSKNGYAGYIDGGASQEEFYKFIKPILEKMDGTEELLVKLNREDLLRKQRTFDNGSIPHQIHLGELHAILRRQEDFYPFLKDNREKIEKILTFRIPYYVGPLARGNSRFAWMTRKSEETITPWNFEEVVDKGASAQSFIERMTNFDKNLPNEKVLPKHSLLYEYFTVYNELTKVKYVTEGMRKPAFLSGEQKKAIVDLLFKTNRKVTVKQLKEDYFKKIECFDSVEISGVEDRFNASLGTYHDLLKIIKDKDFLDNEENEDILEDIVLTLTLFEDREMIEERLKTYAHLFDDKVMKQLKRRRYTGWGRLSRKLINGIRDKQSGKTILDFLKSDGFANRNFMQLIHDDSLTFKEDIQKAQVSGQGDSLHEHIANLAGSPAIKKGILQTVKVVDELVKVMGRHKPENIVIEMARENQTTQKGQKNSRERMKRIEEGIKELGSQILKEHPVENTQLQNEKLYLYYLQNGRDMYVDQELDINRLSDYDVDHIVPQSFLKDDSIDNKVLTRSDKARGKSDNVPSEEVVKKMKNYWRQLLNAKLITQRKFDNLTKAERGGLSELDKAGFIKRQLVETRQITKHVAQILDSRMNTKYDENDKLIREVKVITLKSKLVSDFRKDFQFYKVREINNYHHAHDAYLNAVVGTALIKKYPKLESEFVYGDYKVYDVRKMIAKSEQEIGKATAKYFFYSNIMNFFKTEITLANGEIRKRPLIETNGETGEIVWDKGRDFATVRKVLSMPQVNIVKKTEVQTGGFSKESILPKRNSDKLIARKKDWDPKKYGGFDSPTVAYSVLVVAKVEKGKSKKLKSVKELLGITIMERSSFEKNPIDFLEAKGYKEVKKDLIIKLPKYSLFELENGRKRMLASAGELQKGNELALPSKYVNFLYLASHYEKLKGSPEDNEQKQLFVEQHKHYLDEIIEQISEFSKRVILADANLDKVLSAYNKHRDKPIREQAENIIHLFTLTNLGAPAAFKYFDTTIDRKRYTSTKEVLDATLIHQSITGLYETRIDLSQLGGDGGGGGGSSGGTAPLEEEYRLFLEAPIQNVTLLEQWKREIPKVWAEINPPGLASTQAPIHVQLLSTALPVRVRQYPITLEAKRSLRETIRKFRAAGILRPVHSPWNTPLLPVRKSGTSEYRMVQDLREVNKRVETIHPTVPNPYTLLSLLPPDRIWYSVLDLKDAFFCIPLAPESQLIFAFEWADAEEGESGQLTWTRLPQGFKNSPTLFNEALNRDLQGFRLDHPSVSLLQYVDDLLIAADTQAACLSATRDLLMTLAELGYRVSGKKAQLCQEEVTYLGFKIHKGSRSLSNSRTQAILQIPVPKTKRQVREFLGTIGYCRLWIPGFAELAQPLYAATRPGNDPLVWGEKEEEAFQSLKLALTQPPALALPSLDKPFQLFVEETSGAAKGVLTQALGPWKRPVAYLSKRLDPVAAGWPRCLRAIAAAALLTREASKLTFGQDIEITSSHNLESLLRSPPDKWLTNARITQYQVLLLDPPRVRFKQTAALNPATLLPETDDTLPIHHCLDTLDSLTSTRPDLTDQPLAQAEATLFTDGSSYIRDGKRYAGAAVVTLDSVIWAEPLPIGTSAQKAELIALTKALEWSKDKSVNIYTDSRYAFATLHVHGMIYRERGWLTAGGKAIKNAPEILALLTAVWLPKRVAVMHCKGHQKDDAPTSTGNRRADEVAREVAIRPLSTQATISAGKRTADGSEFEKRTADGSEFESPKKKAKVE

SEQ ID NO: 6660 - protein, 2082 aa, synthetic construct
MPAAKRVKLDGGDKKYSIGLDIGTNSVGWAVITDEYKVPSKKFKVLGNTDRHSIKKNLIGALLFDSGETAEATRLKRTARRRYTRRKNRICYLQEIFSNEMAKVDDSFFHRLEESFLVEEDKKHERHPIFGNIVDEVAYHEKYPTIYHLRKKLVDSTDKADLRLIYLALAHMIKFRGHFLIEGDLNPDNSDVDKLFIQLVQTYNQLFEENPINASGVDAKAILSARLSKSRRLENLIAQLPGEKKNGLFGNLIALSLGLTPNFKSNFDLAEDAKLQLSKDTYDDDLDNLLAQIGDQYADLFLAAKNLSDAILLSDILRVNTEITKAPLSASMIKRYDEHHQDLTLLKALVRQQLPEKYKEIFFDQSKNGYAGYIDGGASQEEFYKFIKPILEKMDGTEELLVKLNREDLLRKQRTFDNGSIPHQIHLGELHAILRRQEDFYPFLKDNREKIEKILTFRIPYYVGPLARGNSRFAWMTRKSEETITPWNFEEVVDKGASAQSFIERMTNFDKNLPNEKVLPKHSLLYEYFTVYNELTKVKYVTEGMRKPAFLSGEQKKAIVDLLFKTNRKVTVKQLKEDYFKKIECFDSVEISGVEDRFNASLGTYHDLLKIIKDKDFLDNEENEDILEDIVLTLTLFEDREMIEERLKTYAHLFDDKVMKQLKRRRYTGWGRLSRKLINGIRDKQSGKTILDFLKSDGFANRNFMQLIHDDSLTFKEDIQKAQVSGQGDSLHEHIANLAGSPAIKKGILQTVKVVDELVKVMGRHKPENIVIEMARENQTTQKGQKNSRERMKRIEEGIKELGSQILKEHPVENTQLQNEKLYLYYLQNGRDMYVDQELDINRLSDYDVDHIVPQSFLKDDSIDNKVLTRSDKARGKSDNVPSEEVVKKMKNYWRQLLNAKLITQRKFDNLTKAERGGLSELDKAGFIKRQLVETRQITKHVAQILDSRMNTKYDENDKLIREVKVITLKSKLVSDFRKDFQFYKVREINNYHHAHDAYLNAVVGTALIKKYPKLESEFVYGDYKVYDVRKMIAKSEQEIGKATAKYFFYSNIMNFFKTEITLANGEIRKRPLIETNGETGEIVWDKGRDFATVRKVLSMPQVNIVKKTEVQTGGFSKESILPKRNSDKLIARKKDWDPKKYGGFDSPTVAYSVLVVAKVEKGKSKKLKSVKELLGITIMERSSFEKNPIDFLEAKGYKEVKKDLIIKLPKYSLFELENGRKRMLASAGELQKGNELALPSKYVNFLYLASHYEKLKGSPEDNEQKQLFVEQHKHYLDEIIEQISEFSKRVILADANLDKVLSAYNKHRDKPIREQAENIIHLFTLTNLGAPAAFKYFDTTIDRKRYTSTKEVLDATLIHQSITGLYETRIDLSQLGGDGGGGGGSSGGVPWILKKPLELTIKLDLEEQQGTLLNNSILSKKGKEELKQLFEKYSALWQSWENQVGHRRIRPHKIATGTVKPTPQKQYHINPKAKPDIQIVINDLLKQGVLIQKESTMNTPVYPVPKPNGRWRMVLDYRAVNKVTPLIAVQNQHSYGILGSLFKGRYKTTIDLSNGFWAHPIVPEDYWITAFTWQGKQYCWTVLPQGFLNSPGLFTGDVVDLLQGIPNVEVYVDDVYISHDSEKEHLEYLDILFNRLKEAGYIISLKKSNIANSIVDFLGFQITNEGRGLTDTFKEKLENITAPTTLKQLQSILGLLNFARNFIPDFTELIAPLYALIPKSTKNYVPWQIEHSTTLETLITKLNGAEYLQGRKGDKTLIMKVNASYTTGYIRYYNEGEKKPISYVSIVFSKTELKFTELEKLLTTVHKGLLKALDLSMGQNIHVYSPIVSMQNIQKTPQTAKKALASRWLSWLSYLEDPRIRFFYDPQMPALKDLPAVDTGKDNKKHPSNFQHIFYTDGSAITSPTKEGHLNAGMGIVYFINKDGNLQKQQEWSISLGNHTAQFAEIAAFEFALKKCLPLGGNILVVTDSNYVAKAYNEELDVWASNGFVNNRKKPLKHISKWKSVADLKRLRPDVVVTHEPGHQKLDSSPHAYGNNLADQLATQASFKVHAGKRTADGSEFEKRTADGSEFESPKKKAKVE

SEQ ID NO: 6661 - protein, 2091 aa, synthetic construct
MPAAKRVKLDGGDKKYSIGLDIGTNSVGWAVITDEYKVPSKKFKVLGNTDRHSIKKNLIGALLFDSGETAEATRLKRTARRRYTRRKNRICYLQEIFSNEMAKVDDSFFHRLEESFLVEEDKKHERHPIFGNIVDEVAYHEKYPTIYHLRKKLVDSTDKADLRLIYLALAHMIKFRGHFLIEGDLNPDNSDVDKLFIQLVQTYNQLFEENPINASGVDAKAILSARLSKSRRLENLIAQLPGEKKNGLFGNLIALSLGLTPNFKSNFDLAEDAKLQLSKDTYDDDLDNLLAQIGDQYADLFLAAKNLSDAILLSDILRVNTEITKAPLSASMIKRYDEHHQDLTLLKALVRQQLPEKYKEIFFDQSKNGYAGYIDGGASQEEFYKFIKPILEKMDGTEELLVKLNREDLLRKQRTFDNGSIPHQIHLGELHAILRRQEDFYPFLKDNREKIEKILTFRIPYYVGPLARGNSRFAWMTRKSEETITPWNFEEVVDKGASAQSFIERMTNFDKNLPNEKVLPKHSLLYEYFTVYNELTKVKYVTEGMRKPAFLSGEQKKAIVDLLFKTNRKVTVKQLKEDYFKKIECFDSVEISGVEDRFNASLGTYHDLLKIIKDKDFLDNEENEDILEDIVLTLTLFEDREMIEERLKTYAHLFDDKVMKQLKRRRYTGWGRLSRKLINGIRDKQSGKTILDFLKSDGFANRNFMQLIHDDSLTFKEDIQKAQVSGQGDSLHEHIANLAGSPAIKKGILQTVKVVDELVKVMGRHKPENIVIEMARENQTTQKGQKNSRERMKRIEEGIKELGSQILKEHPVENTQLQNEKLYLYYLQNGRDMYVDQELDINRLSDYDVDHIVPQSFLKDDSIDNKVLTRSDKARGKSDNVPSEEVVKKMKNYWRQLLNAKLITQRKFDNLTKAERGGLSELDKAGFIKRQLVETRQITKHVAQILDSRMNTKYDENDKLIREVKVITLKSKLVSDFRKDFQFYKVREINNYHHAHDAYLNAVVGTALIKKYPKLESEFVYGDYKVYDVRKMIAKSEQEIGKATAKYFFYSNIMNFFKTEITLANGEIRKRPLIETNGETGEIVWDKGRDFATVRKVLSMPQVNIVKKTEVQTGGFSKESILPKRNSDKLIARKKDWDPKKYGGFDSPTVAYSVLVVAKVEKGKSKKLKSVKELLGITIMERSSFEKNPIDFLEAKGYKEVKKDLIIKLPKYSLFELENGRKRMLASAGELQKGNELALPSKYVNFLYLASHYEKLKGSPEDNEQKQLFVEQHKHYLDEIIEQISEFSKRVILADANLDKVLSAYNKHRDKPIREQAENIIHLFTLTNLGAPAAFKYFDTTIDRKRYTSTKEVLDATLIHQSITGLYETRIDLSQLGGDGGGGGGSSGGTLGIEDEYRLHETSTEPDVSLGSTWLSDFPQAWAETGGMGLAVRQAPLIIPLKATSTPVSIQQYPMSHEARLGIKPHIQRLLDQGILVPCQSPWNTPLLPVKKPGTNDYRPVQDLREVNKRVEDIHPTVPNPYNLLSGLPPSHQWYTVLDLKDAFFCLRLHPTSQPLFAFEWRDPGMGISGQLTWTRLPQGFKNSPTLFDEALHRDLADFRIQHPDLILLQYVDDILLAATSELDCQQGTRALLQTLGDLGYRASAKKAQICQKQVKYLGYLLREGQRWLTEARKETVMGQPVPKTPRQLREFLGTAGFCRLWIPGFAEMAAPLYPLTKTGTLFSWGPDQQKAYQEIKQALLTAPALGLPDLTKPFELFVDEKQGYAKGVLTQKLGPWRRPVAYLSKKLDPVAAGWPPCLRMVAAIAVLTKDAGKLTMGQPLVILAPHAVEALVKQPPDRWLSNARMTHYQAMLLDTDRVQFGPVVALNPATLLPLPEEGAPHDCLEILAETHGTRPDLTDQPIPDADHTWYTDGSSFLQEGQRKAGAAVTTETEVIWAGALPAGTSAQRAELIALTQALKMAEGKRLNVYTDSRYAFATAHIHGEIYRRRGLLTSEGREIKNKSEILALLKALFLPKRLSIIHCLGHQKGDSAEARGNRLADQAAREAAIKTPPDTSTLLAGKRTADGSEFEKRTADGSEFESPKKKAKVE

SEQ ID NO: 6662 - protein, 2091 aa, synthetic construct
MPAAKRVKLDGGDKKYSIGLDIGTNSVGWAVITDEYKVPSKKFKVLGNTDRHSIKKNLIGALLFDSGETAEATRLKRTARRRYTRRKNRICYLQEIFSNEMAKVDDSFFHRLEESFLVEEDKKHERHPIFGNIVDEVAYHEKYPTIYHLRKKLVDSTDKADLRLIYLALAHMIKFRGHFLIEGDLNPDNSDVDKLFIQLVQTYNQLFEENPINASGVDAKAILSARLSKSRRLENLIAQLPGEKKNGLFGNLIALSLGLTPNFKSNFDLAEDAKLQLSKDTYDDDLDNLLAQIGDQYADLFLAAKNLSDAILLSDILRVNTEITKAPLSASMIKRYDEHHQDLTLLKALVRQQLPEKYKEIFFDQSKNGYAGYIDGGASQEEFYKFIKPILEKMDGTEELLVKLNREDLLRKQRTFDNGSIPHQIHLGELHAILRRQEDFYPFLKDNREKIEKILTFRIPYYVGPLARGNSRFAWMTRKSEETITPWNFEEVVDKGASAQSFIERMTNFDKNLPNEKVLPKHSLLYEYFTVYNELTKVKYVTEGMRKPAFLSGEQKKAIVDLLFKTNRKVTVKQLKEDYFKKIECFDSVEISGVEDRFNASLGTYHDLLKIIKDKDFLDNEENEDILEDIVLTLTLFEDREMIEERLKTYAHLFDDKVMKQLKRRRYTGWGRLSRKLINGIRDKQSGKTILDFLKSDGFANRNFMQLIHDDSLTFKEDIQKAQVSGQGDSLHEHIANLAGSPAIKKGILQTVKVVDELVKVMGRHKPENIVIEMARENQTTQKGQKNSRERMKRIEEGIKELGSQILKEHPVENTQLQNEKLYLYYLQNGRDMYVDQELDINRLSDYDVDHIVPQSFLKDDSIDNKVLTRSDKARGKSDNVPSEEVVKKMKNYWRQLLNAKLITQRKFDNLTKAERGGLSELDKAGFIKRQLVETRQITKHVAQILDSRMNTKYDENDKLIREVKVITLKSKLVSDFRKDFQFYKVREINNYHHAHDAYLNAVVGTALIKKYPKLESEFVYGDYKVYDVRKMIAKSEQEIGKATAKYFFYSNIMNFFKTEITLANGEIRKRPLIETNGETGEIVWDKGRDFATVRKVLSMPQVNIVKKTEVQTGGFSKESILPKRNSDKLIARKKDWDPKKYGGFDSPTVAYSVLVVAKVEKGKSKKLKSVKELLGITIMERSSFEKNPIDFLEAKGYKEVKKDLIIKLPKYSLFELENGRKRMLASAGELQKGNELALPSKYVNFLYLASHYEKLKGSPEDNEQKQLFVEQHKHYLDEIIEQISEFSKRVILADANLDKVLSAYNKHRDKPIREQAENIIHLFTLTNLGAPAAFKYFDTTIDRKRYTSTKEVLDATLIHQSITGLYETRIDLSQLGGDGGGGGGSSGGTLNIEDEYRLHETSKEPDVSLGSTWLSDFPQAWAETGGMGLAVRQAPLIIPLKATSTPVSIKQYPMSQEARLGIKPHIQRLLDQGILVPCQSPWNTPLLPVKKPGTNDYRPVQDLREVNKRVEDIHPTVPNPYNLLSGLPPSHQWYTVLDLKDAFFCLRLHPTSQPLFAFEWRDPEMGISGQLTWTRLPQGFKNSPTLFNEALHRDLAGFRIQHPDLILLQYVDDLLLAATSELDCQQGTRALLQTLGDLGYRASAKKAQICQKQVKYLGYLLKEGQRWLTEARKETVMGQPIPKTPRQLREFLGTAGFCRLWIPGFAEMAAPLYPLTKPGTLFNWGPDQQKAFQEIKQALLTAPALGLPDLTKPFELFVDEKQGYAKGVLTQKLGPWRRPVAYLSKKLDPVAAGWPPCLRMVAAIAVLTKDAGKLTMGQPLVILAPHAVEALVKQPPDRWLSNARMTHYQALLLDTDRVQFGPVVALNPATLLPLPEEGLQHDCLDILAEAHGTRSDLMDQPLPDADHTWYTDGSSFLQEGQRKAGAAVTTETEVIWARALPAGTSAQRAELIALTQALKMAEGKKLNVYTDSRYAFATAHIHGEIYRRRGWLTSEGKEIKNKDEILALLKALFLPKRLSIIHCPGHQKGNSAEARGNRMADQAAREVATRETPETSTLLAGKRTADGSEFEKRTADGSEFESPKKKAKVE

SEQ ID NO: 6663 - protein, 2091 aa, synthetic construct
MPAAKRVKLDGGDKKYSIGLDIGTNSVGWAVITDEYKVPSKKFKVLGNTDRHSIKKNLIGALLFDSGETAEATRLKRTARRRYTRRKNRICYLQEIFSNEMAKVDDSFFHRLEESFLVEEDKKHERHPIFGNIVDEVAYHEKYPTIYHLRKKLVDSTDKADLRLIYLALAHMIKFRGHFLIEGDLNPDNSDVDKLFIQLVQTYNQLFEENPINASGVDAKAILSARLSKSRRLENLIAQLPGEKKNGLFGNLIALSLGLTPNFKSNFDLAEDAKLQLSKDTYDDDLDNLLAQIGDQYADLFLAAKNLSDAILLSDILRVNTEITKAPLSASMIKRYDEHHQDLTLLKALVRQQLPEKYKEIFFDQSKNGYAGYIDGGASQEEFYKFIKPILEKMDGTEELLVKLNREDLLRKQRTFDNGSIPHQIHLGELHAILRRQEDFYPFLKDNREKIEKILTFRIPYYVGPLARGNSRFAWMTRKSEETITPWNFEEVVDKGASAQSFIERMTNFDKNLPNEKVLPKHSLLYEYFTVYNELTKVKYVTEGMRKPAFLSGEQKKAIVDLLFKTNRKVTVKQLKEDYFKKIECFDSVEISGVEDRFNASLGTYHDLLKIIKDKDFLDNEENEDILEDIVLTLTLFEDREMIEERLKTYAHLFDDKVMKQLKRRRYTGWGRLSRKLINGIRDKQSGKTILDFLKSDGFANRNFMQLIHDDSLTFKEDIQKAQVSGQGDSLHEHIANLAGSPAIKKGILQTVKVVDELVKVMGRHKPENIVIEMARENQTTQKGQKNSRERMKRIEEGIKELGSQILKEHPVENTQLQNEKLYLYYLQNGRDMYVDQELDINRLSDYDVDHIVPQSFLKDDSIDNKVLTRSDKARGKSDNVPSEEVVKKMKNYWRQLLNAKLITQRKFDNLTKAERGGLSELDKAGFIKRQLVETRQITKHVAQILDSRMNTKYDENDKLIREVKVITLKSKLVSDFRKDFQFYKVREINNYHHAHDAYLNAVVGTALIKKYPKLESEFVYGDYKVYDVRKMIAKSEQEIGKATAKYFFYSNIMNFFKTEITLANGEIRKRPLIETNGETGEIVWDKGRDFATVRKVLSMPQVNIVKKTEVQTGGFSKESILPKRNSDKLIARKKDWDPKKYGGFDSPTVAYSVLVVAKVEKGKSKKLKSVKELLGITIMERSSFEKNPIDFLEAKGYKEVKKDLIIKLPKYSLFELENGRKRMLASAGELQKGNELALPSKYVNFLYLASHYEKLKGSPEDNEQKQLFVEQHKHYLDEIIEQISEFSKRVILADANLDKVLSAYNKHRDKPIREQAENIIHLFTLTNLGAPAAFKYFDTTIDRKRYTSTKEVLDATLIHQSITGLYETRIDLSQLGGDGGGGGGSSGGTLNIEDEHRLHETSKEPDVSLGSTWLSDFPQAWAETGGMGLAVRQAPLIIPLKATSTPVSIKQYPMSQEARLGIKPHIQRLLDQGILVPCQSPWNTPLLPVKKPGTNDYRPVQDLREVNKRVEDIHPTVPNPYNLLSGLPPSHQWYTVLDLKDAFFCLRLHPTSQPLFAFEWRDPEMGISGQLTWTRLPQGFKNSPTLFNEALHRDLADFRIQHPDLILLQYVDDLLLAATSELDCQQGTRALLQTLGNLGYRASAKKAQICQKQVKYLGYLLKEGQRWLTEARKETVMGQPTPKTPRQLREFLGTAGFCRLWIPGFAEMAAPLYPLTKPGTLFNWGPDQQKAYQEIKQALLTAPALGLPDLTKPFELFVDEKQGYAKGVLTQKLGPWRRPVAYLSKKLDPVAAGWPPCLRMVAAIAVLTKDAGKLTMGQPLVILAPHAVEALVKQPPDRWLSNARMTHYQALLLDTDRVQFGPVVALNPATLLPLPEEGLQHNCLDILAEAHGTRPDLTDQPLPDADHTWYTDGSSLLQEGQRKAGAAVTTETEVIWAKALPAGTSAQRAELIALTQALKMAEGKKLNVYTDSRYAFATAHIHGEIYRRRGWLTSEGKEIKNKDEILALLKALFLPKRLSIIHCPGHQKGHSAEARGNRMADQAARKAAITETPDTSTLLAGKRTADGSEFEKRTADGSEFESPKKKAKVE

SEQ ID NO: 6664 - protein, 2091 aa, synthetic construct; identical to SEQ ID NO: 6663

SEQ ID NO: 6665 - protein, 2083 aa, synthetic construct
MPAAKRVKLDGGDKKYSIGLDIGTNSVGWAVITDEYKVPSKKFKVLGNTDRHSIKKNLIGALLFDSGETAEATRLKRTARRRYTRRKNRICYLQEIFSNEMAKVDDSFFHRLEESFLVEEDKKHERHPIFGNIVDEVAYHEKYPTIYHLRKKLVDSTDKADLRLIYLALAHMIKFRGHFLIEGDLNPDNSDVDKLFIQLVQTYNQLFEENPINASGVDAKAILSARLSKSRRLENLIAQLPGEKKNGLFGNLIALSLGLTPNFKSNFDLAEDAKLQLSKDTYDDDLDNLLAQIGDQYADLFLAAKNLSDAILLSDILRVNTEITKAPLSASMIKRYDEHHQDLTLLKALVRQQLPEKYKEIFFDQSKNGYAGYIDGGASQEEFYKFIKPILEKMDGTEELLVKLNREDLLRKQRTFDNGSIPHQIHLGELHAILRRQEDFYPFLKDNREKIEKILTFRIPYYVGPLARGNSRFAWMTRKSEETITPWNFEEVVDKGASAQSFIERMTNFDKNLPNEKVLPKHSLLYEYFTVYNELTKVKYVTEGMRKPAFLSGEQKKAIVDLLFKTNRKVTVKQLKEDYFKKIECFDSVEISGVEDRFNASLGTYHDLLKIIKDKDFLDNEENEDILEDIVLTLTLFEDREMIEERLKTYAHLFDDKVMKQLKRRRYTGWGRLSRKLINGIRDKQSGKTILDFLKSDGFANRNFMQLIHDDSLTFKEDIQKAQVSGQGDSLHEHIANLAGSPAIKKGILQTVKVVDELVKVMGRHKPENIVIEMARENQTTQKGQKNSRERMKRIEEGIKELGSQILKEHPVENTQLQNEKLYLYYLQNGRDMYVDQELDINRLSDYDVDHIVPQSFLKDDSIDNKVLTRSDKARGKSDNVPSEEVVKKMKNYWRQLLNAKLITQRKFDNLTKAERGGLSELDKAGFIKRQLVETRQITKHVAQILDSRMNTKYDENDKLIREVKVITLKSKLVSDFRKDFQFYKVREINNYHHAHDAYLNAVVGTALIKKYPKLESEFVYGDYKVYDVRKMIAKSEQEIGKATAKYFFYSNIMNFFKTEITLANGEIRKRPLIETNGETGEIVWDKGRDFATVRKVLSMPQVNIVKKTEVQTGGFSKESILPKRNSDKLIARKKDWDPKKYGGFDSPTVAYSVLVVAKVEKGKSKKLKSVKELLGITIMERSSFEKNPIDFLEAKGYKEVKKDLIIKLPKYSLFELENGRKRMLASAGELQKGNELALPSKYVNFLYLASHYEKLKGSPEDNEQKQLFVEQHKHYLDEIIEQISEFSKRVILADANLDKVLSAYNKHRDKPIREQAENIIHLFTLTNLGAPAAFKYFDTTIDRKRYTSTKEVLDATLIHQSITGLYETRIDLSQLGGDGGGGGGSSGGLDDEYRLYSPLVKPDQNIQFWLEQFPQAWAETAGMGLAKQVPPQVIQLKASATPVSVRQYPLSKEAQEGIRPHVQRLIQQGILVPVQSPWNTPLLPVRKPGTNDYRPVQDLREVNKRVQDIHPTVPNPYNLLCALPPQRSWYTVLDLKDAFFCLRLHPTSQPLFAFEWRDPGTGRTGQLTWTRLPQGFKNSPTIFNEALHRDLANFRIQHPQVTLLQYVDDLLLAGATKQDCLEGTKALLLELSDLGYRASAKKAQICRREVTYLGYSLRDGQRWLTEARKKTVVQIPAPTTAKQVREFLGKAGFCRLFIPGFATLAAPLYPLTKPKGEFSWAPEHQKAFDAIKKALLSAPALALPDVTKPFTLYVDERKGVARGVLTQTLGPWRRPVAYLSKKLDPVASGWPVCLKAIAAVAILVKDADKLTLGQNITVIAPHALENIVRQPPDRWMTNARMTHYQSLLLTERVTFAPPAALNPATLLPEETDEPVTHDCHQLLIEETGVRKDLTDIPLTGEVLTWFTDGSSYVVEGKRMAGAAVVDGTRTIWASSLPEGTSAQKAELMALTQALRLAEGKSINIYTDSRYAFATAHVHGAIYKQRGWLTSAGREIKNKEEILSLLEALHLPKRLAIIHCPGHQKAKDPISRGNQMADRVAKQAAQGVNLLPAGKRTADGSEFEKRTADGSEFESPKKKAKVE

SEQ ID NO: 6666 - protein, 2083 aa, synthetic construct; identical to SEQ ID NO: 6665

SEQ ID NO: 6667 - protein, 2082 aa, synthetic construct
MPAAKRVKLDGGDKKYSIGLDIGTNSVGWAVITDEYKVPSKKFKVLGNTDRHSIKKNLIGALLFDSGETAEATRLKRTARRRYTRRKNRICYLQEIFSNEMAKVDDSFFHRLEESFLVEEDKKHERHPIFGNIVDEVAYHEKYPTIYHLRKKLVDSTDKADLRLIYLALAHMIKFRGHFLIEGDLNPDNSDVDKLFIQLVQTYNQLFEENPINASGVDAKAILSARLSKSRRLENLIAQLPGEKKNGLFGNLIALSLGLTPNFKSNFDLAEDAKLQLSKDTYDDDLDNLLAQIGDQYADLFLAAKNLSDAILLSDILRVNTEITKAPLSASMIKRYDEHHQDLTLLKALVRQQLPEKYKEIFFDQSKNGYAGYIDGGASQEEFYKFIKPILEKMDGTEELLVKLNREDLLRKQRTFDNGSIPHQIHLGELHAILRRQEDFYPFLKDNREKIEKILTFRIPYYVGPLARGNSRFAWMTRKSEETITPWNFEEVVDKGASAQSFIERMTNFDKNLPNEKVLPKHSLLYEYFTVYNELTKVKYVTEGMRKPAFLSGEQKKAIVDLLFKTNRKVTVKQLKEDYFKKIECFDSVEISGVEDRFNASLGTYHDLLKIIKDKDFLDNEENEDILEDIVLTLTLFEDREMIEERLKTYAHLFDDKVMKQLKRRRYTGWGRLSRKLINGIRDKQSGKTILDFLKSDGFANRNFMQLIHDDSLTFKEDIQKAQVSGQGDSLHEHIANLAGSPAIKKGILQTVKVVDELVKVMGRHKPENIVIEMARENQTTQKGQKNSRERMKRIEEGIKELGSQILKEHPVENTQLQNEKLYLYYLQNGRDMYVDQELDINRLSDYDVDHIVPQSFLKDDSIDNKVLTRSDKARGKSDNVPSEEVVKKMKNYWRQLLNAKLITQRKFDNLTKAERGGLSELDKAGFIKRQLVETRQITKHVAQILDSRMNTKYDENDKLIREVKVITLKSKLVSDFRKDFQFYKVREINNYHHAHDAYLNAVVGTALIKKYPKLESEFVYGDYKVYDVRKMIAKSEQEIGKATAKYFFYSNIMNFFKTEITLANGEIRKRPLIETNGETGEIVWDKGRDFATVRKVLSMPQVNIVKKTEVQTGGFSKESILPKRNSDKLIARKKDWDPKKYGGFDSPTVAYSVLVVAKVEKGKSKKLKSVKELLGITIMERSSFEKNPIDFLEAKGYKEVKKDLIIKLPKYSLFELENGRKRMLASAGELQKGNELALPSKYVNFLYLASHYEKLKGSPEDNEQKQLFVEQHKHYLDEIIEQISEFSKRVILADANLDKVLSAYNKHRDKPIREQAENIIHLFTLTNLGAPAAFKYFDTTIDRKRYTSTKEVLDATLIHQSITGLYETRIDLSQLGGDGGGGGGSSGGIPWLMKKPLQLTTLVPLQEYEERLLKQTMLTGSYKEKLQSLFLKYDALWQHWENQVGHRRIKPHHIATGTVNPRPQKQYPINPKAKASIQTVINDLLKQGVLIQQNSIMNTPVYPVPKPDGKWRMVLDYREVNKTIPLIAAQNQHSAGILSSIFRGKYKTTLDLSNGFWAHSITPESYWLTAFTWLGQQYCWTRLPQGFLNSPALFNADVVDLLKEVPNVQVYVDDIYISHDDPREHLEQLEKVFSLLLNAGYVVSLKKSEIAQHEVEFLGFNITKEGRGLTETFKQKLLNITPPRDLKQLQSILGLLNFARNFIPNFSELVKPLYNIIATAPGKYITWTTDNSQQLQNIISMLNSAENLEERNPEVRLIMKVNTSPSAGYIRFYNEFAKRPIMYLNYVYTKAEVKFTNTEKLLTTIHKGLIKALDLGMGQEILVYSPIVSMTKIQKTPLPERKALPIRWITWMSYLEDPRIQFHYDKTLPELQQVPTVTDDIIAKIKHPSEFSMVFYTDGSAIKHPNVNKSHNAGMGIAQVQFKPEFTVINTWSIPLGDHTAQLAEVAAVEFACKKALKIDGPVLIVTDSFYVAESVNKELPYWQSNGFFNNKKKPLKHVSKWKSIADCIQLKPDIIIIHEKGHQPTASTFHTEGNNLADKLATQGSYVVNAGKRTADGSEFEKRTADGSEFESPKKKAKVE

SEQ ID NO: 6668 - protein, 2089 aa, synthetic construct
MPAAKRVKLDGGDKKYSIGLDIGTNSVGWAVITDEYKVPSKKFKVLGNTDRHSIKKNLIGALLFDSGETAEATRLKRTARRRYTRRKNRICYLQEIFSNEMAKVDDSFFHRLEESFLVEEDKKHERHPIFGNIVDEVAYHEKYPTIYHLRKKLVDSTDKADLRLIYLALAHMIKFRGHFLIEGDLNPDNSDVDKLFIQLVQTYNQLFEENPINASGVDAKAILSARLSKSRRLENLIAQLPGEKKNGLFGNLIALSLGLTPNFKSNFDLAEDAKLQLSKDTYDDDLDNLLAQIGDQYADLFLAAKNLSDAILLSDILRVNTEITKAPLSASMIKRYDEHHQDLTLLKALVRQQLPEKYKEIFFDQSKNGYAGYIDGGASQEEFYKFIKPILEKMDGTEELLVKLNREDLLRKQRTFDNGSIPHQIHLGELHAILRRQEDFYPFLKDNREKIEKILTFRIPYYVGPLARGNSRFAWMTRKSEETITPWNFEEVVDKGASAQSFIERMTNFDKNLPNEKVLPKHSLLYEYFTVYNELTKVKYVTEGMRKPAFLSGEQKKAIVDLLFKTNRKVTVKQLKEDYFKKIECFDSVEISGVEDRFNASLGTYHDLLKIIKDKDFLDNEENEDILEDIVLTLTLFEDREMIEERLKTYAHLFDDKVMKQLKRRRYTGWGRLSRKLINGIRDKQSGKTILDFLKSDGFANRNFMQLIHDDSLTFKEDIQKAQVSGQGDSLHEHIANLAGSPAIKKGILQTVKVVDELVKVMGRHKPENIVIEMARENQTTQKGQKNSRERMKRIEEGIKELGSQILKEHPVENTQLQNEKLYLYYLQNGRDMYVDQELDINRLSDYDVDHIVPQSFLKDDSIDNKVLTRSDKARGKSDNVPSEEVVKKMKNYWRQLLNAKLITQRKFDNLTKAERGGLSELDKAGFIKRQLVETRQITKHVAQILDSRMNTKYDENDKLIREVKVITLKSKLVSDFRKDFQFYKVREINNYHHAHDAYLNAVVGTALIKKYPKLESEFVYGDYKVYDVRKMIAKSEQEIGKATAKYFFYSNIMNFFKTEITLANGEIRKRPLIETNGETGEIVWDKGRDFATVRKVLSMPQVNIVKKTEVQTGGFSKESILPKRNSDKLIARKKDWDPKKYGGFDSPTVAYSVLVVAKVEKGKSKKLKSVKELLGITIMERSSFEKNPIDFLEAKGYKEVKKDLIIKLPKYSLFELENGRKRMLASAGELQKGNELALPSKYVNFLYLASHYEKLKGSPEDNEQKQLFVEQHKHYLDEIIEQISEFSKRVILADANLDKVLSAYNKHRDKPIREQAENIIHLFTLTNLGAPAAFKYFDTTIDRKRYTSTKEVLDATLIHQSITGLYETRIDLSQLGGDGGGGGGSSGGVLNLEEEYRLHEKPVPSSIDPSWLQLFPTVWAERAGMGLANQVPPVVVELRSGASPVAVRQYPMSKEAREGIRPHIQRFLDLGVLVPCQSPWNTPLLPVKKPGTNDYRPVQDLREINKRVQDIHPTVPNPYNLLSSLPPSHTWYSVLDLKDAFFCLKLHPNSQPLFAFEWRDPEKGNTGQLTWTRLPQGFKNSPTLFNEALHRDLAPFRALNPQVVLLQYVDDLLVAAPTYRDCKEGTQKLLQELSKLGYRVSAKKAQLCQKEVTYLGYLLKEGKRWLTPARKATVMKIPPPTTPRQVREFLGTAGFCRLWIPGFASLAAPLYPLTKPSIPFIWTEEHQKAFDRIKEALLSAPALALPDLTKPFTLYVDERAGVARGVLTQTLGPWRRPVAYLSKKLDPVASGWPTCLKAVAAVALLLKDADKLTLGQNVTVIASHSLESIVRQPPDRWMTNARMTHYQSLLLNERVSFAPPAVLNPATLLPVESEATPVHRCSEILAEETGTRRDLKDQPLPGVPAWYTDGSSFIAEGKRRAGAAIVDGKRTVWASSLPEGTSAQKAELVALTQALRLAEGKDINIYTDSRYAFATAHIHGAIYKQRGWLTSAGKDIKNKEEILALLEAIHLPKRVAIIHCPGHQKGNDPVATGNRRADEAAKQAALSTRVLAETTKPAGKRTADGSEFEKRTADGSEFESPKKKAKVE

SEQ ID NO: 6669 - protein, 2089 aa, synthetic construct
MPAAKRVKLDGGDKKYSIGLDIGTNSVGWAVITDEYKVPSKKFKVLGNTDRHSIKKNLIGALLFDSGETAEATRLKRTARRRYTRRKNRICYLQEIFSNEMAKVDDSFFHRLEESFLVEEDKKHERHPIFGNIVDEVAYHEKYPTIYHLRKKLVDSTDKADLRLIYLALAHMIKFRGHFLIEGDLNPDNSDVDKLFIQLVQTYNQLFEENPINASGVDAKAILSARLSKSRRLENLIAQLPGEKKNGLFGNLIALSLGLTPNFKSNFDLAEDAKLQLSKDTYDDDLDNLLAQIGDQYADLFLAAKNLSDAILLSDILRVNTEITKAPLSASMIKRYDEHHQDLTLLKALVRQQLPEKYKEIFFDQSKNGYAGYIDGGASQEEFYKFIKPILEKMDGTEELLVKLNREDLLRKQRTFDNGSIPHQIHLGELHAILRRQEDFYPFLKDNREKIEKILTFRIPYYVGPLARGNSRFAWMTRKSEETITPWNFEEVVDKGASAQSFIERMTNFDKNLPNEKVLPKHSLLYEYFTVYNELTKVKYVTEGMRKPAFLSGEQKKAIVDLLFKTNRKVTVKQLKEDYFKKIECFDSVEISGVEDRFNASLGTYHDLLKIIKDKDFLDNEENEDILEDIVLTLTLFEDREMIEERLKTYAHLFDDKVMKQLKRRRYTGWGRLSRKLINGIRDKQSGKTILDFLKSDGFANRNFMQLIHDDSLTFKEDIQKAQVSGQGDSLHEHIANLAGSPAIKKGILQTVKVVDELVKVMGRHKPENIVIEMARENQTTQKGQKNSRERMKRIEEGIKELGSQILKEHPVENTQLQNEKLYLYYLQNGRDMYVDQELDINRLSDYDVDHIVPQSFLKDDSIDNKVLTRSDKARGKSDNVPSEEVVKKMKNYWRQLLNAKLITQRKFDNLTKAERGGLSELDKAGFIKRQLVETRQITKHVAQILDSRMNTKYDENDKLIREVKVITLKSKLVSDFRKDFQFYKVREINNYHHAHDAYLNAVVGTALIKKYPKLESEFVYGDYKVYDVRKMIAKSEQEIGKATAKYFFYSNIMNFFKTEITLANGEIRKRPLIETNGETGEIVWDKGRDFATVRKVLSMPQVNIVKKTEVQTGGFSKESILPKRNSDKLIARKKDWDPKKYGGFDSPTVAYSVLVVAKVEKGKSKKLKSVKELLGITIMERSSFEKNPIDFLEAKGYKEVKKDLIIKLPKYSLFELENGRKRMLASAGELQKGNELALPSKYVNFLYLASHYEKLKGSPEDNEQKQLFVEQHKHYLDEIIEQISEFSKRVILADANLDKVLSAYNKHRDKPIREQAENIIHLFTLTNLGAPAAFKYFDTTIDRKRYTSTKEVLDATLIHQSITGLYETRIDLSQLGGDGGGGGGSSGGVLNLEEEYRLHEKPVPSSIDPSWLQLFPTVWAERAGMGLANQVPPVVVELRSGASPVAVRQYPMSKEAREGIRPHIQRFLDLGVLVPCQSPWNTPLLPVKKPGTNDYRPVQDLREINKRVQDIHPTVPNPYNLLSSLPPSHTWYSVLDLKDAFFCLKLHPNSQPLFAFEWRDPEKGNTGQLTWTRLPQGFKNSPTLFNEALHRDLAPFRALNPQVVLLQYVDDLLVAAPTYRDCKEGTQKLLQELSKLGYRVSAKKAQLCQKEVTYLGYLLKEGKRWLTPARKATVMKIPPPTTPRQVREFLGKAGFCRLFIPGFASLAAPLYPLTKPSIPFIWTEEHQKAFDRIKEALLSAPALALPDLTKPFTLYVDERAGVARGVLTQTLGPWRRPVAYLSKKLDPVASGWPTCLKAVAAVALLLKDADKLTLGQNVTVIASHSLESIVRQPPDRWMTNARMTHYQSLLLNERVSFAPPAVLNPATLLPVESEATPVHRCSEILAEETGTRRDLKDQPLPGVPAWYTDGSSFIAEGKRRAGAAIVDGKRTVWASSLPEGTSAQKAELVALTQALRLAEGKDINIYTDSRYAFATAHIHGAIYKQRGWLTSAGKDIKNKEEILALLEAIHLPKRVAIIHCPGHQKGNDPVATGNRRADEAAKQAALSTRVLAETTKPAGKRTADGSEFEKRTADGSEFESPKKKAKVE

SEQ ID NO: 6670 - protein, 2091 aa, synthetic construct
MPAAKRVKLDGGDKKYSIGLDIGTNSVGWAVITDEYKVPSKKFKVLGNTDRHSIKKNLIGALLFDSGETAEATRLKRTARRRYTRRKNRICYLQEIFSNEMAKVDDSFFHRLEESFLVEEDKKHERHPIFGNIVDEVAYHEKYPTIYHLRKKLVDSTDKADLRLIYLALAHMIKFRGHFLIEGDLNPDNSDVDKLFIQLVQTYNQLFEENPINASGVDAKAILSARLSKSRRLENLIAQLPGEKKNGLFGNLIALSLGLTPNFKSNFDLAEDAKLQLSKDTYDDDLDNLLAQIGDQYADLFLAAKNLSDAILLSDILRVNTEITKAPLSASMIKRYDEHHQDLTLLKALVRQQLPEKYKEIFFDQSKNGYAGYIDGGASQEEFYKFIKPILEKMDGTEELLVKLNREDLLRKQRTFDNGSIPHQIHLGELHAILRRQEDFYPFLKDNREKIEKILTFRIPYYVGPLARGNSRFAWMTRKSEETITPWNFEEVVDKGASAQSFIERMTNFDKNLPNEKVLPKHSLLYEYFTVYNELTKVKYVTEGMRKPAFLSGEQKKAIVDLLFKTNRKVTVKQLKEDYFKKIECFDSVEISGVEDRFNASLGTYHDLLKIIKDKDFLDNEENEDILEDIVLTLTLFEDREMIEERLKTYAHLFDDKVMKQLKRRRYTGWGRLSRKLINGIRDKQSGKTILDFLKSDGFANRNFMQLIHDDSLTFKEDIQKAQVSGQGDSLHEHIANLAGSPAIKKGILQTVKVVDELVKVMGRHKPENIVIEMARENQTTQKGQKNSRERMKRIEEGIKELGSQILKEHPVENTQLQNEKLYLYYLQNGRDMYVDQELDINRLSDYDVDHIVPQSFLKDDSIDNKVLTRSDKARGKSDNVPSEEVVKKMKNYWRQLLNAKLITQRKFDNLTKAERGGLSELDKAGFIKRQLVETRQITKHVAQILDSRMNTKYDENDKLIREVKVITLKSKLVSDFRKDFQFYKVREINNYHHAHDAYLNAVVGTALIKKYPKLESEFVYGDYKVYDVRKMIAKSEQEIGKATAKYFFYSNIMNFFKTEITLANGEIRKRPLIETNGETGEIVWDKGRDFATVRKVLSMPQVNIVKKTEVQTGGFSKESILPKRNSDKLIARKKDWDPKKYGGFDSPTVAYSVLVVAKVEKGKSKKLKSVKELLGITIMERSSFEKNPIDFLEAKGYKEVKKDLIIKLPKYSLFELENGRKRMLASAGELQKGNELALPSKYVNFLYLASHYEKLKGSPEDNEQKQLFVEQHKHYLDEIIEQISEFSKRVILADANLDKVLSAYNKHRDKPIREQAENIIHLFTLTNLGAPAAFKYFDTTIDRKRYTSTKEVLDATLIHQSITGLYETRIDLSQLGGDGGGGGGSSGGTLNIEDEYRLHETSKEPDVPLGSTWLSDFPQAWAETGGMGLAVRQAPLIIPLKATSTPVSIKQYPMSQEARLGIKPHIQRLLDQGILVPCQSPWNTPLLPVKKPGTNDYRPVQDLREVNKRVEDIHPTVPNPYNLLSGLPPSHQWYTVLDLKDAFFCLRLHPTSQPLFAFEWRDPEMGISGQLTWTRLPQGFKNSPTLFNEALHRDLADFRIQHPDLILLQYVDDLLLAATSEQDCQRGTRALLQTLGNLGYRASAKKAQICQKQVKYLGYLLKEGQRWLTEARKETVMGQPTPKTPRQLREFLGTAGFCRLWIPGFAEMAAPLYPLTKPGTLFNWGPDQQKAYQEIKQALLTAPALGLPDLTKPFELFVDEKQGYAKGVLTQKLGPWRRPVAYLSKKLDPVAAGWPPCLRMVAAIAVLTKDAGKLTMGQPLVILAPHAVEALVKQPPDRWLSNARMTHYQAMLLDTDRVQFGPVVALNPATLLPLPEKEAPHDCLEILAETHGTRPDLTDQPIPDADYTWYTDGSSFLQEGQRRAGAAVTTETEVIWARALPAGTSAQRAELIALTQALKMAEGKKLNVYTDSRYAFATAHVHGEIYRRRGWLTSEGREIKNKNEILALLKALFLPKRLSIIHCPGHQKGNSAEARGNRMADQAAREAAMKAVLETSTLLAGKRTADGSEFEKRTADGSEFESPKKKAKVE

SEQ ID NO: 6671 - protein, 2093 aa, synthetic construct
MPAAKRVKLDGGDKKYSIGLDIGTNSVGWAVITDEYKVPSKKFKVLGNTDRHSIKKNLIGALLFDSGETAEATRLKRTARRRYTRRKNRICYLQEIFSNEMAKVDDSFFHRLEESFLVEEDKKHERHPIFGNIVDEVAYHEKYPTIYHLRKKLVDSTDKADLRLIYLALAHMIKFRGHFLIEGDLNPDNSDVDKLFIQLVQTYNQLFEENPINASGVDAKAILSARLSKSRRLENLIAQLPGEKKNGLFGNLIALSLGLTPNFKSNFDLAEDAKLQLSKDTYDDDLDNLLAQIGDQYADLFLAAKNLSDAILLSDILRVNTEITKAPLSASMIKRYDEHHQDLTLLKALVRQQLPEKYKEIFFDQSKNGYAGYIDGGASQEEFYKFIKPILEKMDGTEELLVKLNREDLLRKQRTFDNGSIPHQIHLGELHAILRRQEDFYPFLKDNREKIEKILTFRIPYYVGPLARGNSRFAWMTRKSEETITPWNFEEVVDKGASAQSFIERMTNFDKNLPNEKVLPKHSLLYEYFTVYNELTKVKYVTEGMRKPAFLSGEQKKAIVDLLFKTNRKVTVKQLKEDYFKKIECFDSVEISGVEDRFNASLGTYHDLLKIIKDKDFLDNEENEDILEDIVLTLTLFEDREMIEERLKTYAHLFDDKVMKQLKRRRYTGWGRLSRKLINGIRDKQSGKTILDFLKSDGFANRNFMQLIHDDSLTFKEDIQKAQVSGQGDSLHEHIANLAGSPAIKKGILQTVKVVDELVKVMGRHKPENIVIEMARENQTTQKGQKNSRERMKRIEEGIKELGSQILKEHPVENTQLQNEKLYLYYLQNGRDMYVDQELDINRLSDYDVDHIVPQSFLKDDSIDNKVLTRSDKARGKSDNVPSEEVVKKMKNYWRQLLNAKLITQRKFDNLTKAERGGLSELDKAGFIKRQLVETRQITKHVAQILDSRMNTKYDENDKLIREVKVITLKSKLVSDFRKDFQFYKVREINNYHHAHDAYLNAVVGTALIKKYPKLESEFVYGDYKVYDVRKMIAKSEQEIGKATAKYFFYSNIMNFFKTEITLANGEIRKRPLIETNGETGEIVWDKGRDFATVRKVLSMPQVNIVKKTEVQTGGFSKESILPKRNSDKLIARKKDWDPKKYGGFDSPTVAYSVLVVAKVEKGKSKKLKSVKELLGITIMERSSFEKNPIDFLEAKGYKEVKKDLIIKLPKYSLFELENGRKRMLASAGELQKGNELALPSKYVNFLYLASHYEKLKGSPEDNEQKQLFVEQHKHYLDEIIEQISEFSKRVILADANLDKVLSAYNKHRDKPIREQAENIIHLFTLTNLGAPAAFKYFDTTIDRKRYTSTKEVLDATLIHQSITGLYETRIDLSQLGGDGGGSSGGGGGTAPLEEEYRLFLEAPIQNVTLLEQWKREIPKVWAEINPPGLASTQAPIHVQLLSTALPVRVRQYPITLEAKRSLRETIRKFRAAGILRPVHSPWNTPLLPVRKSGTSEYRMVQDLREVNKRVETIHPTVPNPYTLLSLLPPDRIWYSVLDLKDAFFCIPLAPESQLIFAFEWADAEEGESGQLTWTRLPQGFKNSPTLFDEALNRDLQGFRLDHPSVSLLQYVDDLLIAADTQAACLSATRDLLMTLAELGYRVSGKKAQLCQEEVTYLGFKIHKGSRSLSNSRTQAILQIPVPKTKRQVREFLGTIGYCRLWIPGFAELAQPLYAATRGGNDPLVWGEKEEEAFQSLKLALTQPPALALPSLDKPFQLFVEETSGAAKGVLTQALGPWKRPVAYLSKRLDPVAAGWPRCLRAIAAAALLTREASKLTFGQDIEITSSHNLESLLRSPPDKWLTNARITQYQVLLLDPPRVRFKQTAALNPATLLPETDDTLPIHHCLDTLDSLTSTRPDLTDQPLAQAEATLFTDGSSYIRDGKRYAGAAVVTLDSVIWAEPLPIGTSAQKAELIALTKALEWSKDKSVNIYTDSRYAFATLHVHGMIYRERGLLTAGGKAIKNAPEILALLTAVWLPKRVAVMHCKGHQKDDAPTSTGNRRADEVAREVAIRPLSTQATISAGKRTADGSEFEKRTADGSEFESPKKKAKVE

SEQ ID NO: 6672 - protein, 2097 aa, synthetic construct
MPAAKRVKLDGGDKKYSIGLDIGTNSVGWAVITDEYKVPSKKFKVLGNTDRHSIKKNLIGALLFDSGETAEATRLKRTARRRYTRRKNRICYLQEIFSNEMAKVDDSFFHRLEESFLVEEDKKHERHPIFGNIVDEVAYHEKYPTIYHLRKKLVDSTDKADLRLIYLALAHMIKFRGHFLIEGDLNPDNSDVDKLFIQLVQTYNQLFEENPINASGVDAKAILSARLSKSRRLENLIAQLPGEKKNGLFGNLIALSLGLTPNFKSNFDLAEDAKLQLSKDTYDDDLDNLLAQIGDQYADLFLAAKNLSDAILLSDILRVNTEITKAPLSASMIKRYDEHHQDLTLLKALVRQQLPEKYKEIFFDQSKNGYAGYIDGGASQEEFYKFIKPILEKMDGTEELLVKLNREDLLRKQRTFDNGSIPHQIHLGELHAILRRQEDFYPFLKDNREKIEKILTFRIPYYVGPLARGNSRFAWMTRKSEETITPWNFEEVVDKGASAQSFIERMTNFDKNLPNEKVLPKHSLLYEYFTVYNELTKVKYVTEGMRKPAFLSGEQKKAIVDLLFKTNRKVTVKQLKEDYFKKIECFDSVEISGVEDRFNASLGTYHDLLKIIKDKDFLDNEENEDILEDIVLTLTLFEDREMIEERLKTYAHLFDDKVMKQLKRRRYTGWGRLSRKLINGIRDKQSGKTILDFLKSDGFANRNFMQLIHDDSLTFKEDIQKAQVSGQGDSLHEHIANLAGSPAIKKGILQTVKVVDELVKVMGRHKPENIVIEMARENQTTQKGQKNSRERMKRIEEGIKELGSQILKEHPVENTQLQNEKLYLYYLQNGRDMYVDQELDINRLSDYDVDHIVPQSFLKDDSIDNKVLTRSDKARGKSDNVPSEEVVKKMKNYWRQLLNAKLITQRKFDNLTKAERGGLSELDKAGFIKRQLVETRQITKHVAQILDSRMNTKYDENDKLIREVKVITLKSKLVSDFRKDFQFYKVREINNYHHAHDAYLNAVVGTALIKKYPKLESEFVYGDYKVYDVRKMIAKSEQEIGKATAKYFFYSNIMNFFKTEITLANGEIRKRPLIETNGETGEIVWDKGRDFATVRKVLSMPQVNIVKKTEVQTGGFSKESILPKRNSDKLIARKKDWDPKKYGGFDSPTVAYSVLVVAKVEKGKSKKLKSVKELLGITIMERSSFEKNPIDFLEAKGYKEVKKDLIIKLPKYSLFELENGRKRMLASAGELQKGNELALPSKYVNFLYLASHYEKLKGSPEDNEQKQLFVEQHKHYLDEIIEQISEFSKRVILADANLDKVLSAYNKHRDKPIREQAENIIHLFTLTNLGAPAAFKYFDTTIDRKRYTSTKEVLDATLIHQSITGLYETRIDLSQLGGDGGGSSGGGGGTVSLQDEHRLFDIPVTTSLPDVWLQDFPQAWAETGGLGRAKCQAPIIIDLKPTAVPVSIKQYPMSLEAHMGIRQHIIKFLELGVLRPCRSPWNTPLLPVKKPGTQDYRPVQDLREINKRTVDIHPTVPNPYNLLSTLKPDYSWYTVLDLKDAFFCLPLAPQSQELFAFEWKDPERGISGQLTWTRLPQGFKNSPTLFNEALHRDLTDFRTQHPEVTLLQYVDDLLLAAPTKKACTQGTRHLLQELGEKGYRASAKKAQICQTKVTYLGYILSEGKRWLTPGRIETVARIPPPRNPREVREFLGKAGFCRLFIPGFAELAAPLYALTKPSTPFTWQTEHQLAFEALKKALLSAPALGLPDTSKPFTLFLDERQGIAKGVLTQKLGPWKRPVAYLSKKLDPVAAGWPPCLRIMAATAMLVKDSAKLTLGQPLTVITPHTLEAIVRQPPDRWITNARLTHYQALLLDTDRVQFGPPVTLNPATLLPVPENQPSPHDCRQVLAETHGTREDLKDQELPDADHTWYTDGSSYLDSGTRRAGAAVVDGHNTIWAQSLPPGTSAQKAELIALTKALELSKGKKANIYTDSRYAFATAHTHGSIYERRGWLTSEGKEIKNKAEIIALLKALFLPQEVAIIHCPGHQKGQDPVAVGNRQADRVARQAAMAEVLTLATEPDNTSHITAGKRTADGSEFEKRTADGSEFESPKKKAKVE

SEQ ID NO: 6673 - protein, 2008 aa, synthetic construct
MPAAKRVKLDGGDKKYSIGLDIGTNSVGWAVITDEYKVPSKKFKVLGNTDRHSIKKNLIGALLFDSGETAEATRLKRTARRRYTRRKNRICYLQEIFSNEMAKVDDSFFHRLEESFLVEEDKKHERHPIFGNIVDEVAYHEKYPTIYHLRKKLVDSTDKADLRLIYLALAHMIKFRGHFLIEGDLNPDNSDVDKLFIQLVQTYNQLFEENPINASGVDAKAILSARLSKSRRLENLIAQLPGEKKNGLFGNLIALSLGLTPNFKSNFDLAEDAKLQLSKDTYDDDLDNLLAQIGDQYADLFLAAKNLSDAILLSDILRVNTEITKAPLSASMIKRYDEHHQDLTLLKALVRQQLPEKYKEIFFDQSKNGYAGYIDGGASQEEFYKFIKPILEKMDGTEELLVKLNREDLLRKQRTFDNGSIPHQIHLGELHAILRRQEDFYPFLKDNREKIEKILTFRIPYYVGPLARGNSRFAWMTRKSEETITPWNFEEVVDKGASAQSFIERMTNFDKNLPNEKVLPKHSLLYEYFTVYNELTKVKYVTEGMRKPAFLSGEQKKAIVDLLFKTNRKVTVKQLKEDYFKKIECFDSVEISGVEDRFNASLGTYHDLLKIIKDKDFLDNEENEDILEDIVLTLTLFEDREMIEERLKTYAHLFDDKVMKQLKRRRYTGWGRLSRKLINGIRDKQSGKTILDFLKSDGFANRNFMQLIHDDSLTFKEDIQKAQVSGQGDSLHEHIANLAGSPAIKKGILQTVKVVDELVKVMGRHKPENIVIEMARENQTTQKGQKNSRERMKRIEEGIKELGSQILKEHPVENTQLQNEKLYLYYLQNGRDMYVDQELDINRLSDYDVDHIVPQSFLKDDSIDNKVLTRSDKARGKSDNVPSEEVVKKMKNYWRQLLNAKLITQRKFDNLTKAERGGLSELDKAGFIKRQLVETRQITKHVAQILDSRMNTKYDENDKLIREVKVITLKSKLVSDFRKDFQFYKVREINNYHHAHDAYLNAVVGTALIKKYPKLESEFVYGDYKVYDVRKMIAKSEQEIGKATAKYFFYSNIMNFFKTEITLANGEIRKRPLIETNGETGEIVWDKGRDFATVRKVLSMPQVNIVKKTEVQTGGFSKESILPKRNSDKLIARKKDWDPKKYGGFDSPTVAYSVLVVAKVEKGKSKKLKSVKELLGITIMERSSFEKNPIDFLEAKGYKEVKKDLIIKLPKYSLFELENGRKRMLASAGELQKGNELALPSKYVNFLYLASHYEKLKGSPEDNEQKQLFVEQHKHYLDEIIEQISEFSKRVILADANLDKVLSAYNKHRDKPIREQAENIIHLFTLTNLGAPAAFKYFDTTIDRKRYTSTKEVLDATLIHQSITGLYETRIDLSQLGGDGGGSSGGGGGAVLGLEHLPRPPQISQFPLNPERLQALQHLVRKALEAGHIEPYTGPGNNPVFPVKKANGTWRFIHDLRATNSLTIDLSSSSPGPPDLSSLPTTLAHLQTIDLRDAFFQIPLPKQFQPYFAFTVPQQCNYGPGTRYAWKVLPQGFKNSPTLFEMQLAHILQPIRQAFPQCTILQYMDDILLASPSHEDLLLLSEATMASLISHGLPVSENKTQQTPGTIKFLGQIISPNHLTYDAVPTVPIRSRWALPELQALLGEIQWVSKGTPTLRQPLHSLYCALQRHTDPRDQIYLNPSQVQSLVQLRQALSQNCRSRLVQTLPLLGAIMLTLTGTTTVVFQSKEQWPLVWLHAPLPHTSQCPWGQLLASAVLLLDKYTLQSYGLLCQTIHHNISTQTFNQFIQTSDHPSVPILLHHSHRFKNLGAQTGELWNTFLKTAAPLAPVKALMPVFTLSPVIINTAPCLFSDGSTSRAAYILWDKQILSQRSFPLPPPHKSAQRAELLGLLHGLSSARSWRCLNIFLDSKYLYHYLRTLALGTFQGRSSQAPFQALLPRLLSRKVVYLHHVRSHTNLPDPISRLNALTDALLITPVLQLAGKRTADGSEFEKRTADGSEFESPKKKAKVE

SEQ ID NO: 6674 - protein, 2122 aa, synthetic construct
MPAAKRVKLDGGDKKYSIGLDIGTNSVGWAVITDEYKVPSKKFKVLGNTDRHSIKKNLIGALLFDSGETAEATRLKRTARRRYTRRKNRICYLQEIFSNEMAKVDDSFFHRLEESFLVEEDKKHERHPIFGNIVDEVAYHEKYPTIYHLRKKLVDSTDKADLRLIYLALAHMIKFRGHFLIEGDLNPDNSDVDKLFIQLVQTYNQLFEENPINASGVDAKAILSARLSKSRRLENLIAQLPGEKKNGLFGNLIALSLGLTPNFKSNFDLAEDAKLQLSKDTYDDDLDNLLAQIGDQYADLFLAAKNLSDAILLSDILRVNTEITKAPLSASMIKRYDEHHQDLTLLKALVRQQLPEKYKEIFFDQSKNGYAGYIDGGASQEEFYKFIKPILEKMDGTEELLVKLNREDLLRKQRTFDNGSIPHQIHLGELHAILRRQEDFYPFLKDNREKIEKILTFRIPYYVGPLARGNSRFAWMTRKSEETITPWNFEEVVDKGASAQSFIERMTNFDKNLPNEKVLPKHSLLYEYFTVYNELTKVKYVTEGMRKPAFLSGEQKKAIVDLLFKTNRKVTVKQLKEDYFKKIECFDSVEISGVEDRFNASLGTYHDLLKIIKDKDFLDNEENEDILEDIVLTLTLFEDREMIEERLKTYAHLFDDKVMKQLKRRRYTGWGRLSRKLINGIRDKQSGKTILDFLKSDGFANRNFMQLIHDDSLTFKEDIQKAQVSGQGDSLHEHIANLAGSPAIKKGILQTVKVVDELVKVMGRHKPENIVIEMARENQTTQKGQKNSRERMKRIEEGIKELGSQILKEHPVENTQLQNEKLYLYYLQNGRDMYVDQELDINRLSDYDVDHIVPQSFLKDDSIDNKVLTRSDKARGKSDNVPSEEVVKKMKNYWRQLLNAKLITQRKFDNLTKAERGGLSELDKAGFIKRQLVETRQITKHVAQILDSRMNTKYDENDKLIREVKVITLKSKLVSDFRKDFQFYKVREINNYHHAHDAYLNAVVGTALIKKYPKLESEFVYGDYKVYDVRKMIAKSEQEIGKATAKYFFYSNIMNFFKTEITLANGEIRKRPLIETNGETGEIVWDKGRDFATVRKVLSMPQVNIVKKTEVQTGGFSKESILPKRNSDKLIARKKDWDPKKYGGFDSPTVAYSVLVVAKVEKGKSKKLKSVKELLGITIMERSSFEKNPIDFLEAKGYKEVKKDLIIKLPKYSLFELENGRKRMLASAGELQKGNELALPSKYVNFLYLASHYEKLKGSPEDNEQKQLFVEQHKHYLDEIIEQISEFSKRVILADANLDKVLSAYNKHRDKPIREQAENIIHLFTLTNLGAPAAFKYFDTTIDRKRYTSTKEVLDATLIHQSITGLYETRIDLSQLGGDGGGSSGGGGGLLGRDLLTKLKAQIQFSTEGPQVTWEDRPAMCLVLNLEEEYRLHEKPVPPSIDPSWLQLFPMVWAEKAGMGLANQVPPVVVELKSDASPVAVRQYPMSKEAREGIRPHIQRFLDLGILVPCQSPWNTPLLPVKKPGTNDYRPVQDLREVNKRVQDIHPTVPNPYNLLSSLPPSHTWYSVLDLKDAFFCLKLHPNSQPLFAFEWRDPEKGNTGQLTWTRLPQGFKNSPTLFNEALHRDLASFRALNPQVVMLQYVDDLLVAAPTYRDCKEGTRRLLQELSKLGYRVSAKKAQLCREEVTYLGYLLKGGKRWLTPARKATVMKIPTPTTPRQVREFLGTAGFCRLWIPGFASLAAPLYPLTRPKVPFTWTEAHQEAFGRIKEALLSAPALALPDLTKPFALYVDEKEGVARGVLTQTLGPWRRPVAYLSKKLDPVASGWPTCLKAIAAVALLLKDADKLTLGQNVLVIAPHNLESIVRQPPDRWMTNARMTHYQSLLLNERVSFAPPAILNPATLLPVESDDTPIHICSEILAEETGTRPDLRDQPLPGVPAWYTDGSSFIMDGRRQAGAAIVDNKRTVWASNLPEGTSAQKAELIALTQALRLAEGKSINIYTDSRYAFATAHVHGAIYKQRGWLTSAGKDIKNKEEILALLEAIHLPKRVAIIHCPGHQRGTDPVATGNRKADEAAKQAAQSTRILTETTKNAGKRTADGSEFEKRTADGSEFESPKKKAKVE

SEQ ID NO: 6675 - protein, 2213 aa, synthetic construct
MPAAKRVKLDGGDKKYSIGLDIGTNSVGWAVITDEYKVPSKKFKVLGNTDRHSIKKNLIGALLFDSGETAEATRLKRTARRRYTRRKNRICYLQEIFSNEMAKVDDSFFHRLEESFLVEEDKKHERHPIFGNIVDEVAYHEKYPTIYHLRKKLVDSTDKADLRLIYLALAHMIKFRGHFLIEGDLNPDNSDVDKLFIQLVQTYNQLFEENPINASGVDAKAILSARLSKSRRLENLIAQLPGEKKNGLFGNLIALSLGLTPNFKSNFDLAEDAKLQLSKDTYDDDLDNLLAQIGDQYADLFLAAKNLSDAILLSDILRVNTEITKAPLSASMIKRYDEHHQDLTLLKALVRQQLPEKYKEIFFDQSKNGYAGYIDGGASQEEFYKFIKPILEKMDGTEELLVKLNREDLLRKQRTFDNGSIPHQIHLGELHAILRRQEDFYPFLKDNREKIEKILTFRIPYYVGPLARGNSRFAWMTRKSEETITPWNFEEVVDKGASAQSFIERMTNFDKNLPNEKVLPKHSLLYEYFTVYNELTKVKYVTEGMRKPAFLSGEQKKAIVDLLFKTNRKVTVKQLKEDYFKKIECFDSVEISGVEDRFNASLGTYHDLLKIIKDKDFLDNEENEDILEDIVLTLTLFEDREMIEERLKTYAHLFDDKVMKQLKRRRYTGWGRLSRKLINGIRDKQSGKTILDFLKSDGFANRNFMQLIHDDSLTFKEDIQKAQVSGQGDSLHEHIANLAGSPAIKKGILQTVKVVDELVKVMGRHKPENIVIEMARENQTTQKGQKNSRERMKRIEEGIKELGSQILKEHPVENTQLQNEKLYLYYLQNGRDMYVDQELDINRLSDYDVDHIVPQSFLKDDSIDNKVLTRSDKARGKSDNVPSEEVVKKMKNYWRQLLNAKLITQRKFDNLTKAERGGLSELDKAGFIKRQLVETRQITKHVAQILDSRMNTKYDENDKLIREVKVITLKSKLVSDFRKDFQFYKVREINNYHHAHDAYLNAVVGTALIKKYPKLESEFVYGDYKVYDVRKMIAKSEQEIGKATAKYFFYSNIMNFFKTEITLANGEIRKRPLIETNGETGEIVWDKGRDFATVRKVLSMPQVNIVKKTEVQTGGFSKESILPKRNSDKLIARKKDWDPKKYGGFDSPTVAYSVLVVAKVEKGKSKKLKSVKELLGITIMERSSFEKNPIDFLEAKGYKEVKKDLIIKLPKYSLFELENGRKRMLASAGELQKGNELALPSKYVNFLYLASHYEKLKGSPEDNEQKQLFVEQHKHYLDEIIEQISEFSKRVILADANLDKVLSAYNKHRDKPIREQAENIIHLFTLTNLGAPAAFKYFDTTIDRKRYTSTKEVLDATLIHQSITGLYETRIDLSQLGGDGGGSSGGGGGTLGDQGSRGSDPLPEPRVTLTVEGIPTEFLVNTGAEHSVLTKPMGKMGSKRTVVAGATGSKVYPWTTKRLLKIGQKQVTHSFLVIPECPAPLLGRDLLTKLKAQIQFSTEGPQVTWEDRPAMCLVLNLEEEYRLHEKPVPPSIDPSWLQLFPMVWAEKAGMGLANQVPPVVVELKSDASPVAVRQYPMSKEAREGIRPHIQRFLDLGILVPCQSPWNTPLLPVKKPGTNDYRPVQDLREVNKRVQDIHPTVPNPYNLLSSLPPSHTWYSVLDLKDAFFCLKLHPNSQPLFAFEWRDPEKGNTGQLTWTRLPQGFKNSPTLFNEALHRDLASFRALNPQVVMLQYVDDLLVAAPTYRDCKEGTRRLLQELSKLGYRVSAKKAQLCREEVTYLGYLLKGGKRWLTPARKATVMKIPTPTTPRQVREFLGTAGFCRLWIPGFASLAAPLYPLTRPKVPFTWTEAHQEAFGRIKEALLSAPALALPDLTKPFALYVDEKEGVARGVLTQTLGPWRRPVAYLSKKLDPVASGWPTCLKAIAAVALLLKDADKLTLGQNVLVIAPHNLESIVRQPPDRWMTNARMTHYQSLLLNERVSFAPPAILNPATLLPVESDDTPIHICSEILAEETGTRPDLRDQPLPGVPAWYTDGSSFIMDGRRQAGAAIVDNKRTVWASNLPEGTSAQKAELIALTQALRLAEGKSINIYTDSRYAFATAHVHGAIYKQRGWLTSAGKDIKNKEEILALLEAIHLPKRVAIIHCPGHQRGTDPVATGNRKADEAAKQAAQSTRILTETTKNAGKRTADGSEFEKRTADGSEFESPKKKAKVE

SEQ ID NO: 6676 - protein, 2213 aa, synthetic construct
MPAAKRVKLDGGDKKYSIGLDIGTNSVGWAVITDEYKVPSKKFKVLGNTDRHSIKKNLIGALLFDSGETAEATRLKRTARRRYTRRKNRICYLQEIFSNEMAKVDDSFFHRLEESFLVEEDKKHERHPIFGNIVDEVAYHEKYPTIYHLRKKLVDSTDKADLRLIYLALAHMIKFRGHFLIEGDLNPDNSDVDKLFIQLVQTYNQLFEENPINASGVDAKAILSARLSKSRRLENLIAQLPGEKKNGLFGNLIALSLGLTPNFKSNFDLAEDAKLQLSKDTYDDDLDNLLAQIGDQYADLFLAAKNLSDAILLSDILRVNTEITKAPLSASMIKRYDEHHQDLTLLKALVRQQLPEKYKEIFFDQSKNGYAGYIDGGASQEEFYKFIKPILEKMDGTEELLVKLNREDLLRKQRTFDNGSIPHQIHLGELHAILRRQEDFYPFLKDNREKIEKILTFRIPYYVGPLARGNSRFAWMTRKSEETITPWNFEEVVDKGASAQSFIERMTNFDKNLPNEKVLPKHSLLYEYFTVYNELTKVKYVTEGMRKPAFLSGEQKKAIVDLLFKTNRKVTVKQLKEDYFKKIECFDSVEISGVEDRFNASLGTYHDLLKIIKDKDFLDNEENEDILEDIVLTLTLFEDREMIEERLKTYAHLFDDKVMKQLKRRRYTGWGRLSRKLINGIRDKQSGKTILDFLKSDGFANRNFMQLIHDDSLTFKEDIQKAQVSGQGDSLHEHIANLAGSPAIKKGILQTVKVVDELVKVMGRHKPENIVIEMARENQTTQKGQKNSRERMKRIEEGIKELGSQILKEHPVENTQLQNEKLYLYYLQNGRDMYVDQELDINRLSDYDVDHIVPQSFLKDDSIDNKVLTRSDKARGKSDNVPSEEVVKKMKNYWRQLLNAKLITQRKFDNLTKAERGGLSELDKAGFIKRQLVETRQITKHVAQILDSRMNTKYDENDKLIREVKVITLKSKLVSDFRKDFQFYKVREINNYHHAHDAYLNAVVGTALIKKYPKLESEFVYGDYKVYDVRKMIAKSEQEIGKATAKYFFYSNIMNFFKTEITLANGEIRKRPLIETNGETGEIVWDKGRDFATVRKVLSMPQVNIVKKTEVQTGGFSKESILPKRNSDKLIARKKDWDPKKYGGFDSPTVAYSVLVVAKVEKGKSKKLKSVKELLGITIMERSSFEKNPIDFLEAKGYKEVKKDLIIKLPKYSLFELENGRKRMLASAGELQKGNELALPSKYVNFLYLASHYEKLKGSPEDNEQKQLFVEQHKHYLDEIIEQISEFSKRVILADANLDKVLSAYNKHRDKPIREQAENIIHLFTLTNLGAPAAFKYFDTTIDRKRYTSTKEVLDATLIHQSITGLYETRIDLSQLGGDGGGSSGGGGGTLGDQGSRGSDPLPEPRVTLTVEGIPTEFLVNTGAEHSVLTKPMGKMGSKRTVVAGATGSKVYPWTTKRLLKIGQKQVTHSFLVIPECPAPLLGRDLLTKLKAQIQFSTEGPQVTWEDRPAMCLVLNLEEEYRLHEKPVPPSIDPSWLQLFPMVWAEKAGMGLANQVPPVVVELKSDASPVAVRQYPMSKEAREGIRPHIQRFLDLGILVPCQSPWNTPLLPVKKPGTNDYRPVQDLREVNKRVQDIHPTVPNPYNLLSSLPPSHTWYSVLDLKDAFFCLKLHPNSQPLFAFEWRDPEKGNTGQLTWTRLPQGFKNSPTLFNEALHRDLASFRALNPQVVMLQYVDDLLVAAPTYRDCKEGTRRLLQELSKLGYRVSAKKAQLCREEVTYLGYLLKGGKRWLTPARKATVMKIPTPTTPRQVREFLGKAGFCRLFIPGFASLAAPLYPLTRPKVPFTWTEAHQEAFGRIKEALLSAPALALPDLTKPFALYVDEKEGVARGVLTQTLGPWRRPVAYLSKKLDPVASGWPTCLKAIAAVALLLKDADKLTLGQNVLVIAPHNLESIVRQPPDRWMTNARMTHYQSLLLNERVSFAPPAILNPATLLPVESDDTPIHICSEILAEETGTRPDLRDQPLPGVPAWYTDGSSFIMDGRRQAGAAIVDNKRTVWASNLPEGTSAQKAELIALTQALRLAEGKSINIYTDSRYAFATAHVHGAIYKQRGWLTSAGKDIKNKEEILALLEAIHLPKRVAIIHCPGHQRGTDPVATGNRKADEAAKQAAQSTRILTETTKNAGKRTADGSEFEKRTADGSEFESPKKKAKVE

SEQ ID NO: 6677 - protein, 2091 aa, synthetic construct
MPAAKRVKLDGGDKKYSIGLDIGTNSVGWAVITDEYKVPSKKFKVLGNTDRHSIKKNLIGALLFDSGETAEATRLKRTARRRYTRRKNRICYLQEIFSNEMAKVDDSFFHRLEESFLVEEDKKHERHPIFGNIVDEVAYHEKYPTIYHLRKKLVDSTDKADLRLIYLALAHMIKFRGHFLIEGDLNPDNSDVDKLFIQLVQTYNQLFEENPINASGVDAKAILSARLSKSRRLENLIAQLPGEKKNGLFGNLIALSLGLTPNFKSNFDLAEDAKLQLSKDTYDDDLDNLLAQIGDQYADLFLAAKNLSDAILLSDILRVNTEITKAPLSASMIKRYDEHHQDLTLLKALVRQQLPEKYKEIFFDQSKNGYAGYIDGGASQEEFYKFIKPILEKMDGTEELLVKLNREDLLRKQRTFDNGSIPHQIHLGELHAILRRQEDFYPFLKDNREKIEKILTFRIPYYVGPLARGNSRFAWMTRKSEETITPWNFEEVVDKGASAQSFIERMTNFDKNLPNEKVLPKHSLLYEYFTVYNELTKVKYVTEGMRKPAFLSGEQKKAIVDLLFKTNRKVTVKQLKEDYFKKIECFDSVEISGVEDRFNASLGTYHDLLKIIKDKDFLDNEENEDILEDIVLTLTLFEDREMIEERLKTYAHLFDDKVMKQLKRRRYTGWGRLSRKLINGIRDKQSGKTILDFLKSDGFANRNFMQLIHDDSLTFKEDIQKAQVSGQGDSLHEHIANLAGSPAIKKGILQTVKVVDELVKVMGRHKPENIVIEMARENQTTQKGQKNSRERMKRIEEGIKELGSQILKEHPVENTQLQNEKLYLYYLQNGRDMYVDQELDINRLSDYDVDHIVPQSFLKDDSIDNKVLTRSDKARGKSDNVPSEEVVKKMKNYWRQLLNAKLITQRKFDNLTKAERGGLSELDKAGFIKRQLVETRQITKHVAQILDSRMNTKYDENDKLIREVKVITLKSKLVSDFRKDFQFYKVREINNYHHAHDAYLNAVVGTALIKKYPKLESEFVYGDYKVYDVRKMIAKSEQEIGKATAKYFFYSNIMNFFKTEITLANGEIRKRPLIETNGETGEIVWDKGRDFATVRKVLSMPQVNIVKKTEVQTGGFSKESILPKRNSDKLIARKKDWDPKKYGGFDSPTVAYSVLVVAKVEKGKSKKLKSVKELLGITIMERSSFEKNPIDFLEAKGYKEVKKDLIIKLPKYSLFELENGRKRMLASAGELQKGNELALPSKYVNFLYLASHYEKLKGSPEDNEQKQLFVEQHKHYLDEIIEQISEFSKRVILADANLDKVLSAYNKHRDKPIREQAENIIHLFTLTNLGAPAAFKYFDTTIDRKRYTSTKEVLDATLIHQSITGLYETRIDLSQLGGDGGGSSGGGGGTLNLEDEYRLYETSAEPEVSPGSTWLSDFPQAWAETGGMGLAVRQAPLIIPLKATSTPVSIKQYPMSQEAKLGIKPHIQRLLDQGILVPCQSPWNTPLLPVKKPGTNDYRPVQDLREVNKRVEDIHPTVPNPYNLLSGLPPSHRWYTVLDLKDAFFCLRLHPTSQPLFAFEWRDPGMGISGQLTWTRLPQGFKNSPTLFNEALHRDLADFRIQHPDLILLQYVDDILLAATSELDCQQGTRALLLTLGNLGYRASAKKAQLCQKQVKYLGYLLKEGQRWLTEARKETVMGQPTPKTPRQLREFLGTAGFCRLWIPGFAEMAAPLYPLTKPGTLFNWGPDQQKAYQEIKQALLTAPALGLPDLTKPFELFVDEKQGYAKGVLTQKLGPWRRPVAYLSKKLDPVAAGWPPCLRMVAAIAVLRKDAGKLTMGQPLVILAPHAVEALVKQPPDRWLSNARMTHYQAMLLDTDRVQFGPVVALNPATLLPLPEEGAPHDCLEILAETHGTRPDLTDQPIPDADHTWYTDGSSFLQEGQRKAGAAVTTETEVIWARALPAGTSAQRAELIALTQALKMAEGKRLNVYTDSRYAFATAHIHGEIYRRRGWLTSEGREIKNKSEILALLKALFLPKRLSIIHCLGHQKGDSAEARGNRLADQAAREAAIKTPPDTSTLLAGKRTADGSEFEKRTADGSEFESPKKKAKVE

SEQ ID NO: 6678 - protein, 2091 aa, synthetic construct
MPAAKRVKLDGGDKKYSIGLDIGTNSVGWAVITDEYKVPSKKFKVLGNTDRHSIKKNLIGALLFDSGETAEATRLKRTARRRYTRRKNRICYLQEIFSNEMAKVDDSFFHRLEESFLVEEDKKHERHPIFGNIVDEVAYHEKYPTIYHLRKKLVDSTDKADLRLIYLALAHMIKFRGHFLIEGDLNPDNSDVDKLFIQLVQTYNQLFEENPINASGVDAKAILSARLSKSRRLENLIAQLPGEKKNGLFGNLIALSLGLTPNFKSNFDLAEDAKLQLSKDTYDDDLDNLLAQIGDQYADLFLAAKNLSDAILLSDILRVNTEITKAPLSASMIKRYDEHHQDLTLLKALVRQQLPEKYKEIFFDQSKNGYAGYIDGGASQEEFYKFIKPILEKMDGTEELLVKLNREDLLRKQRTFDNGSIPHQIHLGELHAILRRQEDFYPFLKDNREKIEKILTFRIPYYVGPLARGNSRFAWMTRKSEETITPWNFEEVVDKGASAQSFIERMTNFDKNLPNEKVLPKHSLLYEYFTVYNELTKVKYVTEGMRKPAFLSGEQKKAIVDLLFKTNRKVTVKQLKEDYFKKIECFDSVEISGVEDRFNASLGTYHDLLKIIKDKDFLDNEENEDILEDIVLTLTLFEDREMIEERLKTYAHLFDDKVMKQLKRRRYTGWGRLSRKLINGIRDKQSGKTILDFLKSDGFANRNFMQLIHDDSLTFKEDIQKAQVSGQGDSLHEHIANLAGSPAIKKGILQTVKVVDELVKVMGRHKPENIVIEMARENQTTQKGQKNSRERMKRIEEGIKELGSQILKEHPVENTQLQNEKLYLYYLQNGRDMYVDQELDINRLSDYDVDHIVPQSFLKDDSIDNKVLTRSDKARGKSDNVPSEEVVKKMKNYWRQLLNAKLITQRKFDNLTKAERGGLSELDKAGFIKRQLVETRQITKHVAQILDSRMNTKYDENDKLIREVKVITLKSKLVSDFRKDFQFYKVREINNYHHAHDAYLNAVVGTALIKKYPKLESEFVYGDYKVYDVRKMIAKSEQEIGKATAKYFFYSNIMNFFKTEITLANGEIRKRPLIETNGETGEIVWDKGRDFATVRKVLSMPQVNIVKKTEVQTGGFSKESILPKRNSDKLIARKKDWDPKKYGGFDSPTVAYSVLVVAKVEKGKSKKLKSVKELLGITIMERSSFEKNPIDFLEAKGYKEVKKDLIIKLPKYSLFELENGRKRMLASAGELQKGNELALPSKYVNFLYLASHYEKLKGSPEDNEQKQLFVEQHKHYLDEIIEQISEFSKRVILADANLDKVLSAYNKHRDKPIREQAENIIHLFTLTNLGAPAAFKYFDTTIDRKRYTSTKEVLDATLIHQSITGLYETRIDLSQLGGDGGGSSGGGGGTLGIEDEYRLHETSTEPDVSLGSTWLSDFPQAWAETGGMGLAVRQAPLIIPLKATSTPVSIQQYPMSHEARLGIKPHIQRLLDQGILVPCQSPWNTPLLPVKKPGTNDYRPVQDLREVNKRVEDIHPTVPNPYNLLSGLPPSHQWYTVLDLKDAFFCLRLHPTSQPLFAFEWRDPGMGISGQLTWTRLPQGFKNSPTLFDEALHRDLADFRIQHPDLILLQYVDDILLAATSELDCQQGTRALLQTLGDLGYRASAKKAQICQKQVKYLGYLLREGQRWLTEARKETVMGQPVPKTPRQLREFLGTAGFCRLWIPGFAEMAAPLYPLTKTGTLFSWGPDQQKAYQEIKQALLTAPALGLPDLTKPFELFVDEKQGYAKGVLTQKLGPWRRPVAYLSKKLDPVAAGWPPCLRMVAAIAVLTKDAGKLTMGQPLVILAPHAVEALVKQPPDRWLSNARMTHYQAMLLDTDRVQFGPVVALNPATLLPLPEEGAPHDCLEILAETHGTRPDLTDQPIPDADHTWYTDGSSFLQEGQRKAGAAVTTETEVIWAGALPAGTSAQRAELIALTQALKMAEGKRLNVYTDSRYAFATAHIHGEIYRRRGLLTSEGREIKNKSEILALLKALFLPKRLSIIHCLGHQKGDSAEARGNRLADQAAREAAIKTPPDTSTLLAGKRTADGSEFEKRTADGSEFESPKKKAKVE

SEQ ID NO: 6679 - protein, 2091 aa, synthetic construct
MPAAKRVKLDGGDKKYSIGLDIGTNSVGWAVITDEYKVPSKKFKVLGNTDRHSIKKNLIGALLFDSGETAEATRLKRTARRRYTRRKNRICYLQEIFSNEMAKVDDSFFHRLEESFLVEEDKKHERHPIFGNIVDEVAYHEKYPTIYHLRKKLVDSTDKADLRLIYLALAHMIKFRGHFLIEGDLNPDNSDVDKLFIQLVQTYNQLFEENPINASGVDAKAILSARLSKSRRLENLIAQLPGEKKNGLFGNLIALSLGLTPNFKSNFDLAEDAKLQLSKDTYDDDLDNLLAQIGDQYADLFLAAKNLSDAILLSDILRVNTEITKAPLSASMIKRYDEHHQDLTLLKALVRQQLPEKYKEIFFDQSKNGYAGYIDGGASQEEFYKFIKPILEKMDGTEELLVKLNREDLLRKQRTFDNGSIPHQIHLGELHAILRRQEDFYPFLKDNREKIEKILTFRIPYYVGPLARGNSRFAWMTRKSEETITPWNFEEVVDKGASAQSFIERMTNFDKNLPNEKVLPKHSLLYEYFTVYNELTKVKYVTEGMRKPAFLSGEQKKAIVDLLFKTNRKVTVKQLKEDYFKKIECFDSVEISGVEDRFNASLGTYHDLLKIIKDKDFLDNEENEDILEDIVLTLTLFEDREMIEERLKTYAHLFDDKVMKQLKRRRYTGWGRLSRKLINGIRDKQSGKTILDFLKSDGFANRNFMQLIHDDSLTFKEDIQKAQVSGQGDSLHEHIANLAGSPAIKKGILQTVKVVDELVKVMGRHKPENIVIEMARENQTTQKGQKNSRERMKRIEEGIKELGSQILKEHPVENTQLQNEKLYLYYLQNGRDMYVDQELDINRLSDYDVDHIVPQSFLKDDSIDNKVLTRSDKARGKSDNVPSEEVVKKMKNYWRQLLNAKLITQRKFDNLTKAERGGLSELDKAGFIKRQLVETRQITKHVAQILDSRMNTKYDENDKLIREVKVITLKSKLVSDFRKDFQFYKVREINNYHHAHDAYLNAVVGTALIKKYPKLESEFVYGDYKVYDVRKMIAKSEQEIGKATAKYFFYSNIMNFFKTEITLANGEIRKRPLIETNGETGEIVWDKGRDFATVRKVLSMPQVNIVKKTEVQTGGFSKESILPKRNSDKLIARKKDWDPKKYGGFDSPTVAYSVLVVAKVEKGKSKKLKSVKELLGITIMERSSFEKNPIDFLEAKGYKEVKKDLIIKLPKYSLFELENGRKRMLASAGELQKGNELALPSKYVNFLYLASHYEKLKGSPEDNEQKQLFVEQHKHYLDEIIEQISEFSKRVILADANLDKVLSAYNKHRDKPIREQAENIIHLFTLTNLGAPAAFKYFDTTIDRKRYTSTKEVLDATLIHQSITGLYETRIDLSQLGGDGGGSSGGGGGTLNIEDEYRLHETSKGPDVPLGSTWLSDFPQAWAETGGMGLAVRQAPLIIPLKATSTPVSIKQYPMSQEARLGIKPHIQRLLDQGILVPCQSPWNTPLLPVKKPGTNDYRPVQDLREVNKRVEDIHPTVPNPYNLLSGLPPSHQWYTVLDLKDAFFCLRLHPTSQSLFAFEWRDPEMGISGQLTWTRLPQGFKNSPTLFNEALHRDLADFRIQHPDLILLQYVDDLLLAATSELDCQQGTRALLQTLGDLGYRASAKKAQICQKQVKYLGYLLKEGQRWLTEARKETVMGQPTPKTPRQLREFLGTAGFCRLWIPGFAEMAAPLYPLTKPGTLFEWGPDQQKAYQEIKQALLTAPALGLPDLTKPFELFVDEKQGYAKGVLTQKLGPWRRPVAYLSKKLDPVAAGWPPCLRMVAAIAVLTKDAGKLTMGQPLVILAPHAVEALVKQPPDRWLSNARMTHYQALLLDTDRVQFGPIVALNPATLLPLPEEGLQHDCLDILAEAHGTRPDLTDQPLPDADHTWYTDGSSFLQEGQRKAGAAVTTETEVVWAKALPAGTSAQRAELIALTQALKMAEGKKLNVYTDSRYAFATAHIHGEIYRRRGWLTSEGKEIKNKDEILALLKALFLPKRLSIIHCPGHQKGNRAEARGNRMADQAAREVATRETPETSTLLAGKRTADGSEFEKRTADGSEFESPKKKAKVE

SEQ ID NO: 6680 - protein, 2085 aa, synthetic construct
MPAAKRVKLDGGDKKYSIGLDIGTNSVGWAVITDEYKVPSKKFKVLGNTDRHSIKKNLIGALLFDSGETAEATRLKRTARRRYTRRKNRICYLQEIFSNEMAKVDDSFFHRLEESFLVEEDKKHERHPIFGNIVDEVAYHEKYPTIYHLRKKLVDSTDKADLRLIYLALAHMIKFRGHFLIEGDLNPDNSDVDKLFIQLVQTYNQLFEENPINASGVDAKAILSARLSKSRRLENLIAQLPGEKKNGLFGNLIALSLGLTPNFKSNFDLAEDAKLQLSKDTYDDDLDNLLAQIGDQYADLFLAAKNLSDAILLSDILRVNTEITKAPLSASMIKRYDEHHQDLTLLKALVRQQLPEKYKEIFFDQSKNGYAGYIDGGASQEEFYKFIKPILEKMDGTEELLVKLNREDLLRKQRTFDNGSIPHQIHLGELHAILRRQEDFYPFLKDNREKIEKILTFRIPYYVGPLARGNSRFAWMTRKSEETITPWNFEEVVDKGASAQSFIERMTNFDKNLPNEKVLPKHSLLYEYFTVYNELTKVKYVTEGMRKPAFLSGEQKKAIVDLLFKTNRKVTVKQLKEDYFKKIECFDSVEISGVEDRFNASLGTYHDLLKIIKDKDFLDNEENEDILEDIVLTLTLFEDREMIEERLKTYAHLFDDKVMKQLKRRRYTGWGRLSRKLINGIRDKQSGKTILDFLKSDGFANRNFMQLIHDDSLTFKEDIQKAQVSGQGDSLHEHIANLAGSPAIKKGILQTVKVVDELVKVMGRHKPENIVIEMARENQTTQKGQKNSRERMKRIEEGIKELGSQILKEHPVENTQLQNEKLYLYYLQNGRDMYVDQELDINRLSDYDVDHIVPQSFLKDDSIDNKVLTRSDKARGKSDNVPSEEVVKKMKNYWRQLLNAKLITQRKFDNLTKAERGGLSELDKAGFIKRQLVETRQITKHVAQILDSRMNTKYDENDKLIREVKVITLKSKLVSDFRKDFQFYKVREINNYHHAHDAYLNAVVGTALIKKYPKLESEFVYGDYKVYDVRKMIAKSEQEIGKATAKYFFYSNIMNFFKTEITLANGEIRKRPLIETNGETGEIVWDKGRDFATVRKVLSMPQVNIVKKTEVQTGGFSKESILPKRNSDKLIARKKDWDPKKYGGFDSPTVAYSVLVVAKVEKGKSKKLKSVKELLGITIMERSSFEKNPIDFLEAKGYKEVKKDLIIKLPKYSLFELENGRKRMLASAGELQKGNELALPSKYVNFLYLASHYEKLKGSPEDNEQKQLFVEQHKHYLDEIIEQISEFSKRVILADANLDKVLSAYNKHRDKPIREQAENIIHLFTLTNLGAPAAFKYFDTTIDRKRYTSTKEVLDATLIHQSITGLYETRIDLSQLGGDGGGSSGGGGGTLQLDDEYRLYSPLVKPDQNIQFWLEQFPQAWAETAGMGLAKQVPPQVIQLKASATPVSVRQYPLSKEAQEGIRPHVQRLIQQGILVPVQSPWNTPLLPVRKPGTNDYRPVQDLREVNKRVQDIHPTVPNPYNLLCALPPQRSWYTVLDLKDAFFCLRLHPTSQPLFAFEWRDPGTGRTGQLTWTRLPQGFKNSPTIFDEALHRDLANFRIQHPQVTLLQYVDDLLLAGATKQDCLEGTKALLLELSDLGYRASAKKAQICRREVTYLGYSLRDGQRWLTEARKKTVVQIPAPTTAKQVREFLGTAGFCRLWIPGFATLAAPLYPLTKEKGEFSWAPEHQKAFDAIKKALLSAPALALPDVTKPFTLYVDERKGVARGVLTQTLGPWRRPVAYLSKKLDPVASGWPVCLKAIAAVAILVKDADKLTLGQNITVIAPHALENIVRQPPDRWMTNARMTHYQSLLLTERVTFAPPAALNPATLLPEETDEPVTHDCHQLLIEETGVRKDLTDIPLTGEVLTWFTDGSSYVVEGKRMAGAAVVDGTRTIWASSLPEGTSAQKAELMALTQALRLAEGKSINIYTDSRYAFATAHVHGAIYKQRGLLTSAGREIKNKEEILSLLEALHLPKRLAIIHCPGHQKAKDPISRGNQMADRVAKQAAQGVNLLAGKRTADGSEFEKRTADGSEFESPKKKAKVE

SEQ ID NO: 6681 - protein, 2171 aa, synthetic construct
MPAAKRVKLDGGDKKYSIGLDIGTNSVGWAVITDEYKVPSKKFKVLGNTDRHSIKKNLIGALLFDSGETAEATRLKRTARRRYTRRKNRICYLQEIFSNEMAKVDDSFFHRLEESFLVEEDKKHERHPIFGNIVDEVAYHEKYPTIYHLRKKLVDSTDKADLRLIYLALAHMIKFRGHFLIEGDLNPDNSDVDKLFIQLVQTYNQLFEENPINASGVDAKAILSARLSKSRRLENLIAQLPGEKKNGLFGNLIALSLGLTPNFKSNFDLAEDAKLQLSKDTYDDDLDNLLAQIGDQYADLFLAAKNLSDAILLSDILRVNTEITKAPLSASMIKRYDEHHQDLTLLKALVRQQLPEKYKEIFFDQSKNGYAGYIDGGASQEEFYKFIKPILEKMDGTEELLVKLNREDLLRKQRTFDNGSIPHQIHLGELHAILRRQEDFYPFLKDNREKIEKILTFRIPYYVGPLARGNSRFAWMTRKSEETITPWNFEEVVDKGASAQSFIERMTNFDKNLPNEKVLPKHSLLYEYFTVYNELTKVKYVTEGMRKPAFLSGEQKKAIVDLLFKTNRKVTVKQLKEDYFKKIECFDSVEISGVEDRFNASLGTYHDLLKIIKDKDFLDNEENEDILEDIVLTLTLFEDREMIEERLKTYAHLFDDKVMKQLKRRRYTGWGRLSRKLINGIRDKQSGKTILDFLKSDGFANRNFMQLIHDDSLTFKEDIQKAQVSGQGDSLHEHIANLAGSPAIKKGILQTVKVVDELVKVMGRHKPENIVIEMARENQTTQKGQKNSRERMKRIEEGIKELGSQILKEHPVENTQLQNEKLYLYYLQNGRDMYVDQELDINRLSDYDVDHIVPQSFLKDDSIDNKVLTRSDKARGKSDNVPSEEVVKKMKNYWRQLLNAKLITQRKFDNLTKAERGGLSELDKAGFIKRQLVETRQITKHVAQILDSRMNTKYDENDKLIREVKVITLKSKLVSDFRKDFQFYKVREINNYHHAHDAYLNAVVGTALIKKYPKLESEFVYGDYKVYDVRKMIAKSEQEIGKATAKYFFYSNIMNFFKTEITLANGEIRKRPLIETNGETGEIVWDKGRDFATVRKVLSMPQVNIVKKTEVQTGGFSKESILPKRNSDKLIARKKDWDPKKYGGFDSPTVAYSVLVVAKVEKGKSKKLKSVKELLGITIMERSSFEKNPIDFLEAKGYKEVKKDLIIKLPKYSLFELENGRKRMLASAGELQKGNELALPSKYVNFLYLASHYEKLKGSPEDNEQKQLFVEQHKHYLDEIIEQISEFSKRVILADANLDKVLSAYNKHRDKPIREQAENIIHLFTLTNLGAPAAFKYFDTTIDRKRYTSTKEVLDATLIHQSITGLYETRIDLSQLGGDGGGSSGGGGGMDPLQLLQPLEAEIKGTKLKAHWNSGATITCVPQAFLEEEVPIKNIWIKTIHGEKEQPVYYLTFKIQGRKVEAEVISSPYDYILVSPSDIPWLMKKPLQLTTLVPLQEYEERLLKQTMLTGSYKEKLQSLFLKYDALWQHWENQVGHRRIKPHHIATGTVNPRPQKQYPINPKAKASIQTVINDLLKQGVLIQQNSIMNTPVYPVPKPDGKWRMVLDYREVNKTIPLIAAQNQHSAGILSSIFRGKYKTTLDLSNGFWAHSITPESYWLTAFTWLGQQYCWTRLPQGFLNSPALFNADVVDLLKEVPNVQVYVDDIYISHDDPREHLEQLEKVFSLLLNAGYVVSLKKSEIAQHEVEFLGFNITKEGRGLTETFKQKLLNITPPRDLKQLQSILGKLNFARNFIPNFSELVKPLYNIIATAPGKYITWTTDNSQQLQNIISMLNSAENLEERNPEVRLIMKVNTSPSAGYIRFYNEFAKRPIMYLNYVYTKAEVKFTNTEKLLTTIHKGLIKALDLGMGQEILVYSPIVSMTKIQKTPLPERKALPIRWITWMSYLEDPRIQFHYDKTLPELQQVPTVTDDIIAKIKHPSEFSMVFYTDGSAIKHPNVNKSHNAGMGIAQVQFKPEFTVINTWSIPLGDHTAQLAEVAAVEFACKKALKIDGPVLIVTDSFYVAESVNKELPYWQSNGFFNNKKKPLKHVSKWKSIADCIQLKPDIIIIHEKGHQPTASTFHTEGNNLADKLATQGSYVVNAGKRTADGSEFEKRTADGSEFESPKKKAKVE

SEQ ID NO: 6682 - protein, 2089 aa, synthetic construct
MPAAKRVKLDGGDKKYSIGLDIGTNSVGWAVITDEYKVPSKKFKVLGNTDRHSIKKNLIGALLFDSGETAEATRLKRTARRRYTRRKNRICYLQEIFSNEMAKVDDSFFHRLEESFLVEEDKKHERHPIFGNIVDEVAYHEKYPTIYHLRKKLVDSTDKADLRLIYLALAHMIKFRGHFLIEGDLNPDNSDVDKLFIQLVQTYNQLFEENPINASGVDAKAILSARLSKSRRLENLIAQLPGEKKNGLFGNLIALSLGLTPNFKSNFDLAEDAKLQLSKDTYDDDLDNLLAQIGDQYADLFLAAKNLSDAILLSDILRVNTEITKAPLSASMIKRYDEHHQDLTLLKALVRQQLPEKYKEIFFDQSKNGYAGYIDGGASQEEFYKFIKPILEKMDGTEELLVKLNREDLLRKQRTFDNGSIPHQIHLGELHAILRRQEDFYPFLKDNREKIEKILTFRIPYYVGPLARGNSRFAWMTRKSEETITPWNFEEVVDKGASAQSFIERMTNFDKNLPNEKVLPKHSLLYEYFTVYNELTKVKYVTEGMRKPAFLSGEQKKAIVDLLFKTNRKVTVKQLKEDYFKKIECFDSVEISGVEDRFNASLGTYHDLLKIIKDKDFLDNEENEDILEDIVLTLTLFEDREMIEERLKTYAHLFDDKVMKQLKRRRYTGWGRLSRKLINGIRDKQSGKTILDFLKSDGFANRNFMQLIHDDSLTFKEDIQKAQVSGQGDSLHEHIANLAGSPAIKKGILQTVKVVDELVKVMGRHKPENIVIEMARENQTTQKGQKNSRERMKRIEEGIKELGSQILKEHPVENTQLQNEKLYLYYLQNGRDMYVDQELDINRLSDYDVDHIVPQSFLKDDSIDNKVLTRSDKARGKSDNVPSEEVVKKMKNYWRQLLNAKLITQRKFDNLTKAERGGLSELDKAGFIKRQLVETRQITKHVAQILDSRMNTKYDENDKLIREVKVITLKSKLVSDFRKDFQFYKVREINNYHHAHDAYLNAVVGTALIKKYPKLESEFVYGDYKVYDVRKMIAKSEQEIGKATAKYFFYSNIMNFFKTEITLANGEIRKRPLIETNGETGEIVWDKGRDFATVRKVLSMPQVNIVKKTEVQTGGFSKESILPKRNSDKLIARKKDWDPKKYGGFDSPTVAYSVLVVAKVEKGKSKKLKSVKELLGITIMERSSFEKNPIDFLEAKGYKEVKKDLIIKLPKYSLFELENGRKRMLASAGELQKGNELALPSKYVNFLYLASHYEKLKGSPEDNEQKQLFVEQHKHYLDEIIEQISEFSKRVILADANLDKVLSAYNKHRDKPIREQAENIIHLFTLTNLGAPAAFKYFDTTIDRKRYTSTKEVLDATLIHQSITGLYETRIDLSQLGGDGGGSSGGGGGVLNLEEEYRLHEKPVPSSIDPSWLQLFPTVWAERAGMGLANQVPPVVVELRSGASPVAVRQYPMSKEAREGIRPHIQRFLDLGVLVPCQSPWNTPLLPVKKPGTNDYRPVQDLREINKRVQDIHPTVPNPYNLLSSLPPSHTWYSVLDLKDAFFCLKLHPNSQPLFAFEWRDPEKGNTGQLTWTRLPQGFKNSPTLFDEALHRDLAPFRALNPQVVLLQYVDDLLVAAPTYRDCKEGTQKLLQELSKLGYRVSAKKAQLCQKEVTYLGYLLKEGKRWLTPARKATVMKIPPPTTPRQVREFLGTAGFCRLWIPGFASLAAPLYPLTKESIPFIWTEEHQKAFDRIKEALLSAPALALPDLTKPFTLYVDERAGVARGVLTQTLGPWRRPVAYLSKKLDPVASGWPTCLKAVAAVALLLKDADKLTLGQNVTVIASHSLESIVRQPPDRWMTNARMTHYQSLLLNERVSFAPPAVLNPATLLPVESEATPVHRCSEILAEETGTRRDLKDQPLPGVPAWYTDGSSFIAEGKRRAGAAIVDGKRTVWASSLPEGTSAQKAELVALTQALRLAEGKDINIYTDSRYAFATAHIHGAIYKQRGLLTSAGKDIKNKEEILALLEAIHLPKRVAIIHCPGHQKGNDPVATGNRRADEAAKQAALSTRVLAETTKPAGKRTADGSEFEKRTADGSEFESPKKKAKVE

SEQ ID NO: 6683 - protein, 2095 aa, synthetic construct
MPAAKRVKLDGGDKKYSIGLDIGTNSVGWAVITDEYKVPSKKFKVLGNTDRHSIKKNLIGALLFDSGETAEATRLKRTARRRYTRRKNRICYLQEIFSNEMAKVDDSFFHRLEESFLVEEDKKHERHPIFGNIVDEVAYHEKYPTIYHLRKKLVDSTDKADLRLIYLALAHMIKFRGHFLIEGDLNPDNSDVDKLFIQLVQTYNQLFEENPINASGVDAKAILSARLSKSRRLENLIAQLPGEKKNGLFGNLIALSLGLTPNFKSNFDLAEDAKLQLSKDTYDDDLDNLLAQIGDQYADLFLAAKNLSDAILLSDILRVNTEITKAPLSASMIKRYDEHHQDLTLLKALVRQQLPEKYKEIFFDQSKNGYAGYIDGGASQEEFYKFIKPILEKMDGTEELLVKLNREDLLRKQRTFDNGSIPHQIHLGELHAILRRQEDFYPFLKDNREKIEKILTFRIPYYVGPLARGNSRFAWMTRKSEETITPWNFEEVVDKGASAQSFIERMTNFDKNLPNEKVLPKHSLLYEYFTVYNELTKVKYVTEGMRKPAFLSGEQKKAIVDLLFKTNRKVTVKQLKEDYFKKIECFDSVEISGVEDRFNASLGTYHDLLKIIKDKDFLDNEENEDILEDIVLTLTLFEDREMIEERLKTYAHLFDDKVMKQLKRRRYTGWGRLSRKLINGIRDKQSGKTILDFLKSDGFANRNFMQLIHDDSLTFKEDIQKAQVSGQGDSLHEHIANLAGSPAIKKGILQTVKVVDELVKVMGRHKPENIVIEMARENQTTQKGQKNSRERMKRIEEGIKELGSQILKEHPVENTQLQNEKLYLYYLQNGRDMYVDQELDINRLSDYDVDHIVPQSFLKDDSIDNKVLTRSDKARGKSDNVPSEEVVKKMKNYWRQLLNAKLITQRKFDNLTKAERGGLSELDKAGFIKRQLVETRQITKHVAQILDSRMNTKYDENDKLIREVKVITLKSKLVSDFRKDFQFYKVREINNYHHAHDAYLNAVVGTALIKKYPKLESEFVYGDYKVYDVRKMIAKSEQEIGKATAKYFFYSNIMNFFKTEITLANGEIRKRPLIETNGETGEIVWDKGRDFATVRKVLSMPQVNIVKKTEVQTGGFSKESILPKRNSDKLIARKKDWDPKKYGGFDSPTVAYSVLVVAKVEKGKSKKLKSVKELLGITIMERSSFEKNPIDFLEAKGYKEVKKDLIIKLPKYSLFELENGRKRMLASAGELQKGNELALPSKYVNFLYLASHYEKLKGSPEDNEQKQLFVEQHKHYLDEIIEQISEFSKRVILADANLDKVLSAYNKHRDKPIREQAENIIHLFTLTNLGAPAAFKYFDTTIDRKRYTSTKEVLDATLIHQSITGLYETRIDLSQLGGDGGGGGEAAAKGGTAPLEEEYRLFLEAPIQNVTLLEQWKREIPKVWAEINPPGLASTQAPIHVQLLSTALPVRVRQYPITLEAKRSLRETIRKFRAAGILRPVHSPWNTPLLPVRKSGTSEYRMVQDLREVNKRVETIHPTVPNPYTLLSLLPPDRIWYSVLDLKDAFFCIPLAPESQLIFAFEWADAEEGESGQLTWTRLPQGFKNSPTLFNEALNRDLQGFRLDHPSVSLLQYVDDLLIAADTQAACLSATRDLLMTLAELGYRVSGKKAQLCQEEVTYLGFKIHKGSRSLSNSRTQAILQIPVPKTKRQVREFLGTIGYCRLWIPGFAELAQPLYAATRPGNDPLVWGEKEEEAFQSLKLALTQPPALALPSLDKPFQLFVEETSGAAKGVLTQALGPWKRPVAYLSKRLDPVAAGWPRCLRAIAAAALLTREASKLTFGQDIEITSSHNLESLLRSPPDKWLTNARITQYQVLLLDPPRVRFKQTAALNPATLLPETDDTLPIHHCLDTLDSLTSTRPDLTDQPLAQAEATLFTDGSSYIRDGKRYAGAAVVTLDSVIWAEPLPIGTSAQKAELIALTKALEWSKDKSVNIYTDSRYAFATLHVHGMIYRERGWLTAGGKAIKNAPEILALLTAVWLPKRVAVMHCKGHQKDDAPTSTGNRRADEVAREVAIRPLSTQATISAGKRTADGSEFEKRTADGSEFESPKKKAKVE

SEQ ID NO: 6684 - protein, 2099 aa, synthetic construct
MPAAKRVKLDGGDKKYSIGLDIGTNSVGWAVITDEYKVPSKKFKVLGNTDRHSIKKNLIGALLFDSGETAEATRLKRTARRRYTRRKNRICYLQEIFSNEMAKVDDSFFHRLEESFLVEEDKKHERHPIFGNIVDEVAYHEKYPTIYHLRKKLVDSTDKADLRLIYLALAHMIKFRGHFLIEGDLNPDNSDVDKLFIQLVQTYNQLFEENPINASGVDAKAILSARLSKSRRLENLIAQLPGEKKNGLFGNLIALSLGLTPNFKSNFDLAEDAKLQLSKDTYDDDLDNLLAQIGDQYADLFLAAKNLSDAILLSDILRVNTEITKAPLSASMIKRYDEHHQDLTLLKALVRQQLPEKYKEIFFDQSKNGYAGYIDGGASQEEFYKFIKPILEKMDGTEELLVKLNREDLLRKQRTFDNGSIPHQIHLGELHAILRRQEDFYPFLKDNREKIEKILTFRIPYYVGPLARGNSRFAWMTRKSEETITPWNFEEVVDKGASAQSFIERMTNFDKNLPNEKVLPKHSLLYEYFTVYNELTKVKYVTEGMRKPAFLSGEQKKAIVDLLFKTNRKVTVKQLKEDYFKKIECFDSVEISGVEDRFNASLGTYHDLLKIIKDKDFLDNEENEDILEDIVLTLTLFEDREMIEERLKTYAHLFDDKVMKQLKRRRYTGWGRLSRKLINGIRDKQSGKTILDFLKSDGFANRNFMQLIHDDSLTFKEDIQKAQVSGQGDSLHEHIANLAGSPAIKKGILQTVKVVDELVKVMGRHKPENIVIEMARENQTTQKGQKNSRERMKRIEEGIKELGSQILKEHPVENTQLQNEKLYLYYLQNGRDMYVDQELDINRLSDYDVDHIVPQSFLKDDSIDNKVLTRSDKARGKSDNVPSEEVVKKMKNYWRQLLNAKLITQRKFDNLTKAERGGLSELDKAGFIKRQLVETRQITKHVAQILDSRMNTKYDENDKLIREVKVITLKSKLVSDFRKDFQFYKVREINNYHHAHDAYLNAVVGTALIKKYPKLESEFVYGDYKVYDVRKMIAKSEQEIGKATAKYFFYSNIMNFFKTEITLANGEIRKRPLIETNGETGEIVWDKGRDFATVRKVLSMPQVNIVKKTEVQTGGFSKESILPKRNSDKLIARKKDWDPKKYGGFDSPTVAYSVLVVAKVEKGKSKKLKSVKELLGITIMERSSFEKNPIDFLEAKGYKEVKKDLIIKLPKYSLFELENGRKRMLASAGELQKGNELALPSKYVNFLYLASHYEKLKGSPEDNEQKQLFVEQHKHYLDEIIEQISEFSKRVILADANLDKVLSAYNKHRDKPIREQAENIIHLFTLTNLGAPAAFKYFDTTIDRKRYTSTKEVLDATLIHQSITGLYETRIDLSQLGGDGGGGGEAAAKGGTVSLQDEHRLFDIPVTTSLPDVWLQDFPQAWAETGGLGRAKCQAPIIIDLKPTAVPVSIKQYPMSLEAHMGIRQHIIKFLELGVLRPCRSPWNTPLLPVKKPGTQDYRPVQDLREINKRTVDIHPTVPNPYNLLSTLKPDYSWYTVLDLKDAFFCLPLAPQSQELFAFEWKDPERGISGQLTWTRLPQGFKNSPTLFDEALHRDLTDFRTQHPEVTLLQYVDDLLLAAPTKKACTQGTRHLLQELGEKGYRASAKKAQICQTKVTYLGYILSEGKRWLTPGRIETVARIPPPRNPREVREFLGTAGFCRLWIPGFAELAAPLYALTKESTPFTWQTEHQLAFEALKKALLSAPALGLPDTSKPFTLFLDERQGIAKGVLTQKLGPWKRPVAYLSKKLDPVAAGWPPCLRIMAATAMLVKDSAKLTLGQPLTVITPHTLEAIVRQPPDRWITNARLTHYQALLLDTDRVQFGPPVTLNPATLLPVPENQPSPHDCRQVLAETHGTREDLKDQELPDADHTWYTDGSSYLDSGTRRAGAAVVDGHNTIWAQSLPPGTSAQKAELIALTKALELSKGKKANIYTDSRYAFATAHTHGSIYERRGLLTSEGKEIKNKAEIIALLKALFLPQEVAIIHCPGHQKGQDPVAVGNRQADRVARQAAMAEVLTLATEPDNTSHITAGKRTADGSEFEKRTADGSEFESPKKKAKVE

SEQ ID NO: 6685 - protein, 2092 aa, synthetic construct
MPAAKRVKLDGGDKKYSIGLDIGTNSVGWAVITDEYKVPSKKFKVLGNTDRHSIKKNLIGALLFDSGETAEATRLKRTARRRYTRRKNRICYLQEIFSNEMAKVDDSFFHRLEESFLVEEDKKHERHPIFGNIVDEVAYHEKYPTIYHLRKKLVDSTDKADLRLIYLALAHMIKFRGHFLIEGDLNPDNSDVDKLFIQLVQTYNQLFEENPINASGVDAKAILSARLSKSRRLENLIAQLPGEKKNGLFGNLIALSLGLTPNFKSNFDLAEDAKLQLSKDTYDDDLDNLLAQIGDQYADLFLAAKNLSDAILLSDILRVNTEITKAPLSASMIKRYDEHHQDLTLLKALVRQQLPEKYKEIFFDQSKNGYAGYIDGGASQEEFYKFIKPILEKMDGTEELLVKLNREDLLRKQRTFDNGSIPHQIHLGELHAILRRQEDFYPFLKDNREKIEKILTFRIPYYVGPLARGNSRFAWMTRKSEETITPWNFEEVVDKGASAQSFIERMTNFDKNLPNEKVLPKHSLLYEYFTVYNELTKVKYVTEGMRKPAFLSGEQKKAIVDLLFKTNRKVTVKQLKEDYFKKIECFDSVEISGVEDRFNASLGTYHDLLKIIKDKDFLDNEENEDILEDIVLTLTLFEDREMIEERLKTYAHLFDDKVMKQLKRRRYTGWGRLSRKLINGIRDKQSGKTILDFLKSDGFANRNFMQLIHDDSLTFKEDIQKAQVSGQGDSLHEHIANLAGSPAIKKGILQTVKVVDELVKVMGRHKPENIVIEMARENQTTQKGQKNSRERMKRIEEGIKELGSQILKEHPVENTQLQNEKLYLYYLQNGRDMYVDQELDINRLSDYDVDHIVPQSFLKDDSIDNKVLTRSDKARGKSDNVPSEEVVKKMKNYWRQLLNAKLITQRKFDNLTKAERGGLSELDKAGFIKRQLVETRQITKHVAQILDSRMNTKYDENDKLIREVKVITLKSKLVSDFRKDFQFYKVREINNYHHAHDAYLNAVVGTALIKKYPKLESEFVYGDYKVYDVRKMIAKSEQEIGKATAKYFFYSNIMNFFKTEITLANGEIRKRPLIETNGETGEIVWDKGRDFATVRKVLSMPQVNIVKKTEVQTGGFSKESILPKRNSDKLIARKKDWDPKKYGGFDSPTVAYSVLVVAKVEKGKSKKLKSVKELLGITIMERSSFEKNPIDFLEAKGYKEVKKDLIIKLPKYSLFELENGRKRMLASAGELQKGNELALPSKYVNFLYLASHYEKLKGSPEDNEQKQLFVEQHKHYLDEIIEQISEFSKRVILADANLDKVLSAYNKHRDKPIREQAENIIHLFTLTNLGAPAAFKYFDTTIDRKRYTSTKEVLDATLIHQSITGLYETRIDLSQLGGDGGGGGEAAAKGGTLQLEEEYRLFEPESTQKQEMDIWLKNFPQAWAETGGMGTAHCQAPVLIQLKATATPISIRQYPMPHEAYQGIKPHIRRMLDQGILKPCQSPWNTPLLPVKKPGTEDYRPVQDLREVNKRVEDIHPTVPNPYNLLSTLPPSHPWYTVLDLKDAFFCLRLHSESQLLFAFEWRDPEIGLSGQLTWTRLPQGFKNSPTLFNEALHSDLADFRVRYPALVLLQYVDDLLLAAATRTECLEGTKALLETLGNKGYRASAKKAQICLQEVTYLGYSLKDGQRWLTKARKEAILSIPVPKNSRQVREFLGTAGYCRLWIPGFAELAAPLYPLTRPGTLFQWGTEQQLAFEDIKKALLSSPALGLPDITKPFELFIDENSGFAKGVLVQKLGPWKRPVAYLSKKLDTVASGWPPCLRMVAAIAILVKDAGKLTLGQPLTILTSHPVEALVRQPPNKWLSNARMTHYQAMLLDAERVHFGPTVSLNPATLLPLPSGGNHHDCLQILAETHGTRPDLTDQPLPDADLTWYTDGSSFIRNGEREAGAAVTTESEVIWAAPLPPGTSAQRAELIALTQALKMAEGKKLTVYTDSRYAFATTHVHGEIYRRRGWLTSEGKEIKNKNEILALLEALFLPKRLSIIHCPGHQKGDSPQAKGNRLADDTAKKAATETHSSLTVLPAGKRTADGSEFEKRTADGSEFESPKKKAKVE

SEQ ID NO: 6686 - protein, 2124 aa, synthetic construct
MPAAKRVKLDGGDKKYSIGLDIGTNSVGWAVITDEYKVPSKKFKVLGNTDRHSIKKNLIGALLFDSGETAEATRLKRTARRRYTRRKNRICYLQEIFSNEMAKVDDSFFHRLEESFLVEEDKKHERHPIFGNIVDEVAYHEKYPTIYHLRKKLVDSTDKADLRLIYLALAHMIKFRGHFLIEGDLNPDNSDVDKLFIQLVQTYNQLFEENPINASGVDAKAILSARLSKSRRLENLIAQLPGEKKNGLFGNLIALSLGLTPNFKSNFDLAEDAKLQLSKDTYDDDLDNLLAQIGDQYADLFLAAKNLSDAILLSDILRVNTEITKAPLSASMIKRYDEHHQDLTLLKALVRQQLPEKYKEIFFDQSKNGYAGYIDGGASQEEFYKFIKPILEKMDGTEELLVKLNREDLLRKQRTFDNGSIPHQIHLGELHAILRRQEDFYPFLKDNREKIEKILTFRIPYYVGPLARGNSRFAWMTRKSEETITPWNFEEVVDKGASAQSFIERMTNFDKNLPNEKVLPKHSLLYEYFTVYNELTKVKYVTEGMRKPAFLSGEQKKAIVDLLFKTNRKVTVKQLKEDYFKKIECFDSVEISGVEDRFNASLGTYHDLLKIIKDKDFLDNEENEDILEDIVLTLTLFEDREMIEERLKTYAHLFDDKVMKQLKRRRYTGWGRLSRKLINGIRDKQSGKTILDFLKSDGFANRNFMQLIHDDSLTFKEDIQKAQVSGQGDSLHEHIANLAGSPAIKKGILQTVKVVDELVKVMGRHKPENIVIEMARENQTTQKGQKNSRERMKRIEEGIKELGSQILKEHPVENTQLQNEKLYLYYLQNGRDMYVDQELDINRLSDYDVDHIVPQSFLKDDSIDNKVLTRSDKARGKSDNVPSEEVVKKMKNYWRQLLNAKLITQRKFDNLTKAERGGLSELDKAGFIKRQLVETRQITKHVAQILDSRMNTKYDENDKLIREVKVITLKSKLVSDFRKDFQFYKVREINNYHHAHDAYLNAVVGTALIKKYPKLESEFVYGDYKVYDVRKMIAKSEQEIGKATAKYFFYSNIMNFFKTEITLANGEIRKRPLIETNGETGEIVWDKGRDFATVRKVLSMPQVNIVKKTEVQTGGFSKESILPKRNSDKLIARKKDWDPKKYGGFDSPTVAYSVLVVAKVEKGKSKKLKSVKELLGITIMERSSFEKNPIDFLEAKGYKEVKKDLIIKLPKYSLFELENGRKRMLASAGELQKGNELALPSKYVNFLYLASHYEKLKGSPEDNEQKQLFVEQHKHYLDEIIEQISEFSKRVILADANLDKVLSAYNKHRDKPIREQAENIIHLFTLTNLGAPAAFKYFDTTIDRKRYTSTKEVLDATLIHQSITGLYETRIDLSQLGGDGGGGGEAAAKGGLLGRDLLTKLKAQIQFSTEGPQVTWEDRPAMCLVLNLEEEYRLHEKPVPPSIDPSWLQLFPMVWAEKAGMGLANQVPPVVVELKSDASPVAVRQYPMSKEAREGIRPHIQRFLDLGILVPCQSPWNTPLLPVKKPGTNDYRPVQDLREVNKRVQDIHPTVPNPYNLLSSLPPSHTWYSVLDLKDAFFCLKLHPNSQPLFAFEWRDPEKGNTGQLTWTRLPQGFKNSPTLFNEALHRDLASFRALNPQVVMLQYVDDLLVAAPTYRDCKEGTRRLLQELSKLGYRVSAKKAQLCREEVTYLGYLLKGGKRWLTPARKATVMKIPTPTTPRQVREFLGKAGFCRLFIPGFASLAAPLYPLTRPKVPFTWTEAHQEAFGRIKEALLSAPALALPDLTKPFALYVDEKEGVARGVLTQTLGPWRRPVAYLSKKLDPVASGWPTCLKAIAAVALLLKDADKLTLGQNVLVIAPHNLESIVRQPPDRWMTNARMTHYQSLLLNERVSFAPPAILNPATLLPVESDDTPIHICSEILAEETGTRPDLRDQPLPGVPAWYTDGSSFIMDGRRQAGAAIVDNKRTVWASNLPEGTSAQKAELIALTQALRLAEGKSINIYTDSRYAFATAHVHGAIYKQRGWLTSAGKDIKNKEEILALLEAIHLPKRVAIIHCPGHQRGTDPVATGNRKADEAAKQAAQSTRILTETTKNAGKRTADGSEFEKRTADGSEFESPKKKAKVE

SEQ ID NO: 6687 - protein, 2215 aa, synthetic construct
MPAAKRVKLDGGDKKYSIGLDIGTNSVGWAVITDEYKVPSKKFKVLGNTDRHSIKKNLIGALLFDSGETAEATRLKRTARRRYTRRKNRICYLQEIFSNEMAKVDDSFFHRLEESFLVEEDKKHERHPIFGNIVDEVAYHEKYPTIYHLRKKLVDSTDKADLRLIYLALAHMIKFRGHFLIEGDLNPDNSDVDKLFIQLVQTYNQLFEENPINASGVDAKAILSARLSKSRRLENLIAQLPGEKKNGLFGNLIALSLGLTPNFKSNFDLAEDAKLQLSKDTYDDDLDNLLAQIGDQYADLFLAAKNLSDAILLSDILRVNTEITKAPLSASMIKRYDEHHQDLTLLKALVRQQLPEKYKEIFFDQSKNGYAGYIDGGASQEEFYKFIKPILEKMDGTEELLVKLNREDLLRKQRTFDNGSIPHQIHLGELHAILRRQEDFYPFLKDNREKIEKILTFRIPYYVGPLARGNSRFAWMTRKSEETITPWNFEEVVDKGASAQSFIERMTNFDKNLPNEKVLPKHSLLYEYFTVYNELTKVKYVTEGMRKPAFLSGEQKKAIVDLLFKTNRKVTVKQLKEDYFKKIECFDSVEISGVEDRFNASLGTYHDLLKIIKDKDFLDNEENEDILEDIVLTLTLFEDREMIEERLKTYAHLFDDKVMKQLKRRRYTGWGRLSRKLINGIRDKQSGKTILDFLKSDGFANRNFMQLIHDDSLTFKEDIQKAQVSGQGDSLHEHIANLAGSPAIKKGILQTVKVVDELVKVMGRHKPENIVIEMARENQTTQKGQKNSRERMKRIEEGIKELGSQILKEHPVENTQLQNEKLYLYYLQNGRDMYVDQELDINRLSDYDVDHIVPQSFLKDDSIDNKVLTRSDKARGKSDNVPSEEVVKKMKNYWRQLLNAKLITQRKFDNLTKAERGGLSELDKAGFIKRQLVETRQITKHVAQILDSRMNTKYDENDKLIREVKVITLKSKLVSDFRKDFQFYKVREINNYHHAHDAYLNAVVGTALIKKYPKLESEFVYGDYKVYDVRKMIAKSEQEIGKATAKYFFYSNIMNFFKTEITLANGEIRKRPLIETNGETGEIVWDKGRDFATVRKVLSMPQVNIVKKTEVQTGGFSKESILPKRNSDKLIARKKDWDPKKYGGFDSPTVAYSVLVVAKVEKGKSKKLKSVKELLGITIMERSSFEKNPIDFLEAKGYKEVKKDLIIKLPKYSLFELENGRKRMLASAGELQKGNELALPSKYVNFLYLASHYEKLKGSPEDNEQKQLFVEQHKHYLDEIIEQISEFSKRVILADANLDKVLSAYNKHRDKPIREQAENIIHLFTLTNLGAPAAFKYFDTTIDRKRYTSTKEVLDATLIHQSITGLYETRIDLSQLGGDGGGGGEAAAKGGTLGDQGSRGSDPLPEPRVTLTVEGIPTEFLVNTGAEHSVLTKPMGKMGSKRTVVAGATGSKVYPWTTKRLLKIGQKQVTHSFLVIPECPAPLLGRDLLTKLKAQIQFSTEGPQVTWEDRPAMCLVLNLEEEYRLHEKPVPPSIDPSWLQLFPMVWAEKAGMGLANQVPPVVVELKSDASPVAVRQYPMSKEAREGIRPHIQRFLDLGILVPCQSPWNTPLLPVKKPGTNDYRPVQDLREVNKRVQDIHPTVPNPYNLLSSLPPSHTWYSVLDLKDAFFCLKLHPNSQPLFAFEWRDPEKGNTGQLTWTRLPQGFKNSPTLFNEALHRDLASFRALNPQVVMLQYVDDLLVAAPTYRDCKEGTRRLLQELSKLGYRVSAKKAQLCREEVTYLGYLLKGGKRWLTPARKATVMKIPTPTTPRQVREFLGTAGFCRLWIPGFASLAAPLYPLTRPKVPFTWTEAHQEAFGRIKEALLSAPALALPDLTKPFALYVDEKEGVARGVLTQTLGPWRRPVAYLSKKLDPVASGWPTCLKAIAAVALLLKDADKLTLGQNVLVIAPHNLESIVRQPPDRWMTNARMTHYQSLLLNERVSFAPPAILNPATLLPVESDDTPIHICSEILAEETGTRPDLRDQPLPGVPAWYTDGSSFIMDGRRQAGAAIVDNKRTVWASNLPEGTSAQKAELIALTQALRLAEGKSINIYTDSRYAFATAHVHGAIYKQRGWLTSAGKDIKNKEEILALLEAIHLPKRVAIIHCPGHQRGTDPVATGNRKADEAAKQAAQSTRILTETTKNAGKRTADGSEFEKRTADGSEFESPKKKAKVE

SEQ ID NO: 6688 - protein, 2215 aa, synthetic construct
MPAAKRVKLDGGDKKYSIGLDIGTNSVGWAVITDEYKVPSKKFKVLGNTDRHSIKKNLIGALLFDSGETAEATRLKRTARRRYTRRKNRICYLQEIFSNEMAKVDDSFFHRLEESFLVEEDKKHERHPIFGNIVDEVAYHEKYPTIYHLRKKLVDSTDKADLRLIYLALAHMIKFRGHFLIEGDLNPDNSDVDKLFIQLVQTYNQLFEENPINASGVDAKAILSARLSKSRRLENLIAQLPGEKKNGLFGNLIALSLGLTPNFKSNFDLAEDAKLQLSKDTYDDDLDNLLAQIGDQYADLFLAAKNLSDAILLSDILRVNTEITKAPLSASMIKRYDEHHQDLTLLKALVRQQLPEKYKEIFFDQSKNGYAGYIDGGASQEEFYKFIKPILEKMDGTEELLVKLNREDLLRKQRTFDNGSIPHQIHLGELHAILRRQEDFYPFLKDNREKIEKILTFRIPYYVGPLARGNSRFAWMTRKSEETITPWNFEEVVDKGASAQSFIERMTNFDKNLPNEKVLPKHSLLYEYFTVYNELTKVKYVTEGMRKPAFLSGEQKKAIVDLLFKTNRKVTVKQLKEDYFKKIECFDSVEISGVEDRFNASLGTYHDLLKIIKDKDFLDNEENEDILEDIVLTLTLFEDREMIEERLKTYAHLFDDKVMKQLKRRRYTGWGRLSRKLINGIRDKQSGKTILDFLKSDGFANRNFMQLIHDDSLTFKEDIQKAQVSGQGDSLHEHIANLAGSPAIKKGILQTVKVVDELVKVMGRHKPENIVIEMARENQTTQKGQKNSRERMKRIEEGIKELGSQILKEHPVENTQLQNEKLYLYYLQNGRDMYVDQELDINRLSDYDVDHIVPQSFLKDDSIDNKVLTRSDKARGKSDNVPSEEVVKKMKNYWRQLLNAKLITQRKFDNLTKAERGGLSELDKAGFIKRQLVETRQITKHVAQILDSRMNTKYDENDKLIREVKVITLKSKLVSDFRKDFQFYKVREINNYHHAHDAYLNAVVGTALIKKYPKLESEFVYGDYKVYDVRKMIAKSEQEIGKATAKYFFYSNIMNFFKTEITLANGEIRKRPLIETNGETGEIVWDKGRDFATVRKVLSMPQVNIVKKTEVQTGGFSKESILPKRNSDKLIARKKDWDPKKYGGFDSPTVAYSVLVVAKVEKGKSKKLKSVKELLGITIMERSSFEKNPIDFLEAKGYKEVKKDLIIKLPKYSLFELENGRKRMLASAGELQKGNELALPSKYVNFLYLASHYEKLKGSPEDNEQKQLFVEQHKHYLDEIIEQISEFSKRVILADANLDKVLSAYNKHRDKPIREQAENIIHLFTLTNLGAPAAFKYFDTTIDRKRYTSTKEVLDATLIHQSITGLYETRIDLSQLGGDGGGGGEAAAKGGTLGDQGSRGSDPLPEPRVTLTVEGIPTEFLVNTGAEHSVLTKPMGKMGSKRTVVAGATGSKVYPWTTKRLLKIGQKQVTHSFLVIPECPAPLLGRDLLTKLKAQIQFSTEGPQVTWEDRPAMCLVLNLEEEYRLHEKPVPPSIDPSWLQLFPMVWAEKAGMGLANQVPPVVVELKSDASPVAVRQYPMSKEAREGIRPHIQRFLDLGILVPCQSPWNTPLLPVKKPGTNDYRPVQDLREVNKRVQDIHPTVPNPYNLLSSLPPSHTWYSVLDLKDAFFCLKLHPNSQPLFAFEWRDPEKGNTGQLTWTRLPQGFKNSPTLFNEALHRDLASFRALNPQVVMLQYVDDLLVAAPTYRDCKEGTRRLLQELSKLGYRVSAKKAQLCREEVTYLGYLLKGGKRWLTPARKATVMKIPTPTTPRQVREFLGKAGFCRLFIPGFASLAAPLYPLTRPKVPFTWTEAHQEAFGRIKEALLSAPALALPDLTKPFALYVDEKEGVARGVLTQTLGPWRRPVAYLSKKLDPVASGWPTCLKAIAAVALLLKDADKLTLGQNVLVIAPHNLESIVRQPPDRWMTNARMTHYQSLLLNERVSFAPPAILNPATLLPVESDDTPIHICSEILAEETGTRPDLRDQPLPGVPAWYTDGSSFIMDGRRQAGAAIVDNKRTVWASNLPEGTSAQKAELIALTQALRLAEGKSINIYTDSRYAFATAHVHGAIYKQRGWLTSAGKDIKNKEEILALLEAIHLPKRVAIIHCPGHQRGTDPVATGNRKADEAAKQAAQSTRILTETTKNAGKRTADGSEFEKRTADGSEFESPKKKAKVE

SEQ ID NO: 6689 - protein, 2093 aa, synthetic construct
MPAAKRVKLDGGDKKYSIGLDIGTNSVGWAVITDEYKVPSKKFKVLGNTDRHSIKKNLIGALLFDSGETAEATRLKRTARRRYTRRKNRICYLQEIFSNEMAKVDDSFFHRLEESFLVEEDKKHERHPIFGNIVDEVAYHEKYPTIYHLRKKLVDSTDKADLRLIYLALAHMIKFRGHFLIEGDLNPDNSDVDKLFIQLVQTYNQLFEENPINASGVDAKAILSARLSKSRRLENLIAQLPGEKKNGLFGNLIALSLGLTPNFKSNFDLAEDAKLQLSKDTYDDDLDNLLAQIGDQYADLFLAAKNLSDAILLSDILRVNTEITKAPLSASMIKRYDEHHQDLTLLKALVRQQLPEKYKEIFFDQSKNGYAGYIDGGASQEEFYKFIKPILEKMDGTEELLVKLNREDLLRKQRTFDNGSIPHQIHLGELHAILRRQEDFYPFLKDNREKIEKILTFRIPYYVGPLARGNSRFAWMTRKSEETITPWNFEEVVDKGASAQSFIERMTNFDKNLPNEKVLPKHSLLYEYFTVYNELTKVKYVTEGMRKPAFLSGEQKKAIVDLLFKTNRKVTVKQLKEDYFKKIECFDSVEISGVEDRFNASLGTYHDLLKIIKDKDFLDNEENEDILEDIVLTLTLFEDREMIEERLKTYAHLFDDKVMKQLKRRRYTGWGRLSRKLINGIRDKQSGKTILDFLKSDGFANRNFMQLIHDDSLTFKEDIQKAQVSGQGDSLHEHIANLAGSPAIKKGILQTVKVVDELVKVMGRHKPENIVIEMARENQTTQKGQKNSRERMKRIEEGIKELGSQILKEHPVENTQLQNEKLYLYYLQNGRDMYVDQELDINRLSDYDVDHIVPQSFLKDDSIDNKVLTRSDKARGKSDNVPSEEVVKKMKNYWRQLLNAKLITQRKFDNLTKAERGGLSELDKAGFIKRQLVETRQITKHVAQILDSRMNTKYDENDKLIREVKVITLKSKLVSDFRKDFQFYKVREINNYHHAHDAYLNAVVGTALIKKYPKLESEFVYGDYKVYDVRKMIAKSEQEIGKATAKYFFYSNIMNFFKTEITLANGEIRKRPLIETNGETGEIVWDKGRDFATVRKVLSMPQVNIVKKTEVQTGGFSKESILPKRNSDKLIARKKDWDPKKYGGFDSPTVAYSVLVVAKVEKGKSKKLKSVKELLGITIMERSSFEKNPIDFLEAKGYKEVKKDLIIKLPKYSLFELENGRKRMLASAGELQKGNELALPSKYVNFLYLASHYEKLKGSPEDNEQKQLFVEQHKHYLDEIIEQISEFSKRVILADANLDKVLSAYNKHRDKPIREQAENIIHLFTLTNLGAPAAFKYFDTTIDRKRYTSTKEVLDATLIHQSITGLYETRIDLSQLGGDGGGGGEAAAKGGTLNLEDEYRLYETSAEPEVSPGSTWLSDFPQAWAETGGMGLAVRQAPLIIPLKATSTPVSIKQYPMSQEAKLGIKPHIQRLLDQGILVPCQSPWNTPLLPVKKPGTNDYRPVQDLREVNKRVEDIHPTVPNPYNLLSGLPPSHRWYTVLDLKDAFFCLRLHPTSQPLFAFEWRDPGMGISGQLTWTRLPQGFKNSPTLFNEALHRDLADFRIQHPDLILLQYVDDILLAATSELDCQQGTRALLLTLGNLGYRASAKKAQLCQKQVKYLGYLLKEGQRWLTEARKETVMGQPTPKTPRQLREFLGTAGFCRLWIPGFAEMAAPLYPLTKPGTLFNWGPDQQKAYQEIKQALLTAPALGLPDLTKPFELFVDEKQGYAKGVLTQKLGPWRRPVAYLSKKLDPVAAGWPPCLRMVAAIAVLRKDAGKLTMGQPLVILAPHAVEALVKQPPDRWLSNARMTHYQAMLLDTDRVQFGPVVALNPATLLPLPEEGAPHDCLEILAETHGTRPDLTDQPIPDADHTWYTDGSSFLQEGQRKAGAAVTTETEVIWARALPAGTSAQRAELIALTQALKMAEGKRLNVYTDSRYAFATAHIHGEIYRRRGWLTSEGREIKNKSEILALLKALFLPKRLSIIHCLGHQKGDSAEARGNRLADQAAREAAIKTPPDTSTLLAGKRTADGSEFEKRTADGSEFESPKKKAKVE

SEQ ID NO: 6690 - protein, 2093 aa, synthetic construct
MPAAKRVKLDGGDKKYSIGLDIGTNSVGWAVITDEYKVPSKKFKVLGNTDRHSIKKNLIGALLFDSGETAEATRLKRTARRRYTRRKNRICYLQEIFSNEMAKVDDSFFHRLEESFLVEEDKKHERHPIFGNIVDEVAYHEKYPTIYHLRKKLVDSTDKADLRLIYLALAHMIKFRGHFLIEGDLNPDNSDVDKLFIQLVQTYNQLFEENPINASGVDAKAILSARLSKSRRLENLIAQLPGEKKNGLFGNLIALSLGLTPNFKSNFDLAEDAKLQLSKDTYDDDLDNLLAQIGDQYADLFLAAKNLSDAILLSDILRVNTEITKAPLSASMIKRYDEHHQDLTLLKALVRQQLPEKYKEIFFDQSKNGYAGYIDGGASQEEFYKFIKPILEKMDGTEELLVKLNREDLLRKQRTFDNGSIPHQIHLGELHAILRRQEDFYPFLKDNREKIEKILTFRIPYYVGPLARGNSRFAWMTRKSEETITPWNFEEVVDKGASAQSFIERMTNFDKNLPNEKVLPKHSLLYEYFTVYNELTKVKYVTEGMRKPAFLSGEQKKAIVDLLFKTNRKVTVKQLKEDYFKKIECFDSVEISGVEDRFNASLGTYHDLLKIIKDKDFLDNEENEDILEDIVLTLTLFEDREMIEERLKTYAHLFDDKVMKQLKRRRYTGWGRLSRKLINGIRDKQSGKTILDFLKSDGFANRNFMQLIHDDSLTFKEDIQKAQVSGQGDSLHEHIANLAGSPAIKKGILQTVKVVDELVKVMGRHKPENIVIEMARENQTTQKGQKNSRERMKRIEEGIKELGSQILKEHPVENTQLQNEKLYLYYLQNGRDMYVDQELDINRLSDYDVDHIVPQSFLKDDSIDNKVLTRSDKARGKSDNVPSEEVVKKMKNYWRQLLNAKLITQRKFDNLTKAERGGLSELDKAGFIKRQLVETRQITKHVAQILDSRMNTKYDENDKLIREVKVITLKSKLVSDFRKDFQFYKVREINNYHHAHDAYLNAVVGTALIKKYPKLESEFVYGDYKVYDVRKMIAKSEQEIGKATAKYFFYSNIMNFFKTEITLANGEIRKRPLIETNGETGEIVWDKGRDFATVRKVLSMPQVNIVKKTEVQTGGFSKESILPKRNSDKLIARKKDWDPKKYGGFDSPTVAYSVLVVAKVEKGKSKKLKSVKELLGITIMERSSFEKNPIDFLEAKGYKEVKKDLIIKLPKYSLFELENGRKRMLASAGELQKGNELALPSKYVNFLYLASHYEKLKGSPEDNEQKQLFVEQHKHYLDEIIEQISEFSKRVILADANLDKVLSAYNKHRDKPIREQAENIIHLFTLTNLGAPAAFKYFDTTIDRKRYTSTKEVLDATLIHQSITGLYETRIDLSQLGGDGGGGGEAAAKGGTLNLEDEYRLYETSAEPEVSPGSTWLSDFPQAWAETGGMGLAVRQAPLIIPLKATSTPVSIKQYPMSQEAKLGIKPHIQRLLDQGILVPCQSPWNTPLLPVKKPGTNDYRPVQDLREVNKRVEDIHPTVPNPYNLLSGLPPSHRWYTVLDLKDAFFCLRLHPTSQPLFAFEWRDPGMGISGQLTWTRLPQGFKNSPTLFNEALHRDLADFRIQHPDLILLQYVDDILLAATSELDCQQGTRALLLTLGNLGYRASAKKAQLCQKQVKYLGYLLKEGQRWLTEARKETVMGQPTPKTPRQLREFLGKAGFCRLFIPGFAEMAAPLYPLTKPGTLFNWGPDQQKAYQEIKQALLTAPALGLPDLTKPFELFVDEKQGYAKGVLTQKLGPWRRPVAYLSKKLDPVAAGWPPCLRMVAAIAVLRKDAGKLTMGQPLVILAPHAVEALVKQPPDRWLSNARMTHYQAMLLDTDRVQFGPVVALNPATLLPLPEEGAPHDCLEILAETHGTRPDLTDQPIPDADHTWYTDGSSFLQEGQRKAGAAVTTETEVIWARALPAGTSAQRAELIALTQALKMAEGKRLNVYTDSRYAFATAHIHGEIYRRRGWLTSEGREIKNKSEILALLKALFLPKRLSIIHCLGHQKGDSAEARGNRLADQAAREAAIKTPPDTSTLLAGKRTADGSEFEKRTADGSEFESPKKKAKVE

SEQ ID NO: 6691 - protein, 2093 aa, synthetic construct
MPAAKRVKLDGGDKKYSIGLDIGTNSVGWAVITDEYKVPSKKFKVLGNTDRHSIKKNLIGALLFDSGETAEATRLKRTARRRYTRRKNRICYLQEIFSNEMAKVDDSFFHRLEESFLVEEDKKHERHPIFGNIVDEVAYHEKYPTIYHLRKKLVDSTDKADLRLIYLALAHMIKFRGHFLIEGDLNPDNSDVDKLFIQLVQTYNQLFEENPINASGVDAKAILSARLSKSRRLENLIAQLPGEKKNGLFGNLIALSLGLTPNFKSNFDLAEDAKLQLSKDTYDDDLDNLLAQIGDQYADLFLAAKNLSDAILLSDILRVNTEITKAPLSASMIKRYDEHHQDLTLLKALVRQQLPEKYKEIFFDQSKNGYAGYIDGGASQEEFYKFIKPILEKMDGTEELLVKLNREDLLRKQRTFDNGSIPHQIHLGELHAILRRQEDFYPFLKDNREKIEKILTFRIPYYVGPLARGNSRFAWMTRKSEETITPWNFEEVVDKGASAQSFIERMTNFDKNLPNEKVLPKHSLLYEYFTVYNELTKVKYVTEGMRKPAFLSGEQKKAIVDLLFKTNRKVTVKQLKEDYFKKIECFDSVEISGVEDRFNASLGTYHDLLKIIKDKDFLDNEENEDILEDIVLTLTLFEDREMIEERLKTYAHLFDDKVMKQLKRRRYTGWGRLSRKLINGIRDKQSGKTILDFLKSDGFANRNFMQLIHDDSLTFKEDIQKAQVSGQGDSLHEHIANLAGSPAIKKGILQTVKVVDELVKVMGRHKPENIVIEMARENQTTQKGQKNSRERMKRIEEGIKELGSQILKEHPVENTQLQNEKLYLYYLQNGRDMYVDQELDINRLSDYDVDHIVPQSFLKDDSIDNKVLTRSDKARGKSDNVPSEEVVKKMKNYWRQLLNAKLITQRKFDNLTKAERGGLSELDKAGFIKRQLVETRQITKHVAQILDSRMNTKYDENDKLIREVKVITLKSKLVSDFRKDFQFYKVREINNYHHAHDAYLNAVVGTALIKKYPKLESEFVYGDYKVYDVRKMIAKSEQEIGKATAKYFFYSNIMNFFKTEITLANGEIRKRPLIETNGETGEIVWDKGRDFATVRKVLSMPQVNIVKKTEVQTGGFSKESILPKRNSDKLIARKKDWDPKKYGGFDSPTVAYSVLVVAKVEKGKSKKLKSVKELLGITIMERSSFEKNPIDFLEAKGYKEVKKDLIIKLPKYSLFELENGRKRMLASAGELQKGNELALPSKYVNFLYLASHYEKLKGSPEDNEQKQLFVEQHKHYLDEIIEQISEFSKRVILADANLDKVLSAYNKHRDKPIREQAENIIHLFTLTNLGAPAAFKYFDTTIDRKRYTSTKEVLDATLIHQSITGLYETRIDLSQLGGDGGGGGEAAAKGGLGIEDEYRLHETSTEPDVSLGSTWLSDFPQAWAETGGMGLAVRQAPLIIPLKATSTPVSIQQYPMSHEARLGIKPHIQRLLDQGILVPCQSPWNTPLLPVKKPGTNDYRPVQDLREVNKRVEDIHPTVPNPYNLLSGLPPSHQWYTVLDLKDAFFCLRLHPTSQPLFAFEWRDPGMGISGQLTWTRLPQGFKNSPTLFNEALHRDLADFRIQHPDLILLQYVDDILLAATSELDCQQGTRALLQTLGDLGYRASAKKAQICQKQVKYLGYLLREGQRWLTEARKETVMGQPVPKTPRQLREFLGKAGFCRLFIPGFAEMAAPLYPLTKPGTLFSWGPDQQKAYQEIKQALLTAPALGLPDLTKPFELFVDEKQGYAKGVLTQKLGPWRRPVAYLSKKLDPVAAGWPPCLRMVAAIAVLTKDAGKLTMGQPLVILAPHAVEALVKQPPDRWLSNARMTHYQAMLLDTDRVQFGPVVALNPATLLPLPEEGAPHDCLEILAETHGTRPDLTDQPIPDADHTWYTDGSSFLQEGQRKAGAAVTTETEVIWAGALPAGTSAQRAELIALTQALKMAEGKRLNVYTDSRYAFATAHIHGEIYRRRGWLTSEGREIKNKSEILALLKALFLPKRLSIIHCLGHQKGDSAEARGNRLADQAAREAAIKTPPDTSTLLIAGKRTADGSEFEKRTADGSEFESPKKKAKVE

SEQ ID NO: 6692 - protein, 2093 aa, synthetic construct
MPAAKRVKLDGGDKKYSIGLDIGTNSVGWAVITDEYKVPSKKFKVLGNTDRHSIKKNLIGALLFDSGETAEATRLKRTARRRYTRRKNRICYLQEIFSNEMAKVDDSFFHRLEESFLVEEDKKHERHPIFGNIVDEVAYHEKYPTIYHLRKKLVDSTDKADLRLIYLALAHMIKFRGHFLIEGDLNPDNSDVDKLFIQLVQTYNQLFEENPINASGVDAKAILSARLSKSRRLENLIAQLPGEKKNGLFGNLIALSLGLTPNFKSNFDLAEDAKLQLSKDTYDDDLDNLLAQIGDQYADLFLAAKNLSDAILLSDILRVNTEITKAPLSASMIKRYDEHHQDLTLLKALVRQQLPEKYKEIFFDQSKNGYAGYIDGGASQEEFYKFIKPILEKMDGTEELLVKLNREDLLRKQRTFDNGSIPHQIHLGELHAILRRQEDFYPFLKDNREKIEKILTFRIPYYVGPLARGNSRFAWMTRKSEETITPWNFEEVVDKGASAQSFIERMTNFDKNLPNEKVLPKHSLLYEYFTVYNELTKVKYVTEGMRKPAFLSGEQKKAIVDLLFKTNRKVTVKQLKEDYFKKIECFDSVEISGVEDRFNASLGTYHDLLKIIKDKDFLDNEENEDILEDIVLTLTLFEDREMIEERLKTYAHLFDDKVMKQLKRRRYTGWGRLSRKLINGIRDKQSGKTILDFLKSDGFANRNFMQLIHDDSLTFKEDIQKAQVSGQGDSLHEHIANLAGSPAIKKGILQTVKVVDELVKVMGRHKPENIVIEMARENQTTQKGQKNSRERMKRIEEGIKELGSQILKEHPVENTQLQNEKLYLYYLQNGRDMYVDQELDINRLSDYDVDHIVPQSFLKDDSIDNKVLTRSDKARGKSDNVPSEEVVKKMKNYWRQLLNAKLITQRKFDNLTKAERGGLSELDKAGFIKRQLVETRQITKHVAQILDSRMNTKYDENDKLIREVKVITLKSKLVSDFRKDFQFYKVREINNYHHAHDAYLNAVVGTALIKKYPKLESEFVYGDYKVYDVRKMIAKSEQEIGKATAKYFFYSNIMNFFKTEITLANGEIRKRPLIETNGETGEIVWDKGRDFATVRKVLSMPQVNIVKKTEVQTGGFSKESILPKRNSDKLIARKKDWDPKKYGGFDSPTVAYSVLVVAKVEKGKSKKLKSVKELLGITIMERSSFEKNPIDFLEAKGYKEVKKDLIIKLPKYSLFELENGRKRMLASAGELQKGNELALPSKYVNFLYLASHYEKLKGSPEDNEQKQLFVEQHKHYLDEIIEQISEFSKRVILADANLDKVLSAYNKHRDKPIREQAENIIHLFTLTNLGAPAAFKYFDTTIDRKRYTSTKEVLDATLIHQSITGLYETRIDLSQLGGDGGGGGEAAAKGGTLNIEDEYRLHETSKGPDVPLGSTWLSDFPQAWAETGGMGLAVRQAPLIIPLKATSTPVSIKQYPMSQEARLGIKPHIQRLLDQGILVPCQSPWNTPLLPVKKPGTNDYRPVQDLREVNKRVEDIHPTVPNPYNLLSGLPPSHQWYTVLDLKDAFFCLRLHPTSQSLFAFEWRDPEMGISGQLTWTRLPQGFKNSPTLFNEALHRDLADFRIQHPDLILLQYVDDLLLAATSELDCQQGTRALLQTLGDLGYRASAKKAQICQKQVKYLGYLLKEGQRWLTEARKETVMGQPTPKTPRQLREFLGTAGFCRLWIPGFAEMAAPLYPLTKPGTLFEWGPDQQKAYQEIKQALLTAPALGLPDLTKPFELFVDEKQGYAKGVLTQKLGPWRRPVAYLSKKLDPVAAGWPPCLRMVAAIAVLTKDAGKLTMGQPLVILAPHAVEALVKQPPDRWLSNARMTHYQALLLDTDRVQFGPIVALNPATLLPLPEEGLQHDCLDILAEAHGTRPDLTDQPLPDADHTWYTDGSSFLQEGQRKAGAAVTTETEVVWAKALPAGTSAQRAELIALTQALKMAEGKKLNVYTDSRYAFATAHIHGEIYRRRGWLTSEGKEIKNKDEILALLKALFLPKRLSIIHCPGHQKGNRAEARGNRMADQAAREVATRETPETSTLLAGKRTADGSEFEKRTADGSEFESPKKKAKVE

SEQ ID NO: 6693 - protein, 2087 aa, synthetic construct
MPAAKRVKLDGGDKKYSIGLDIGTNSVGWAVITDEYKVPSKKFKVLGNTDRHSIKKNLIGALLFDSGETAEATRLKRTARRRYTRRKNRICYLQEIFSNEMAKVDDSFFHRLEESFLVEEDKKHERHPIFGNIVDEVAYHEKYPTIYHLRKKLVDSTDKADLRLIYLALAHMIKFRGHFLIEGDLNPDNSDVDKLFIQLVQTYNQLFEENPINASGVDAKAILSARLSKSRRLENLIAQLPGEKKNGLFGNLIALSLGLTPNFKSNFDLAEDAKLQLSKDTYDDDLDNLLAQIGDQYADLFLAAKNLSDAILLSDILRVNTEITKAPLSASMIKRYDEHHQDLTLLKALVRQQLPEKYKEIFFDQSKNGYAGYIDGGASQEEFYKFIKPILEKMDGTEELLVKLNREDLLRKQRTFDNGSIPHQIHLGELHAILRRQEDFYPFLKDNREKIEKILTFRIPYYVGPLARGNSRFAWMTRKSEETITPWNFEEVVDKGASAQSFIERMTNFDKNLPNEKVLPKHSLLYEYFTVYNELTKVKYVTEGMRKPAFLSGEQKKAIVDLLFKTNRKVTVKQLKEDYFKKIECFDSVEISGVEDRFNASLGTYHDLLKIIKDKDFLDNEENEDILEDIVLTLTLFEDREMIEERLKTYAHLFDDKVMKQLKRRRYTGWGRLSRKLINGIRDKQSGKTILDFLKSDGFANRNFMQLIHDDSLTFKEDIQKAQVSGQGDSLHEHIANLAGSPAIKKGILQTVKVVDELVKVMGRHKPENIVIEMARENQTTQKGQKNSRERMKRIEEGIKELGSQILKEHPVENTQLQNEKLYLYYLQNGRDMYVDQELDINRLSDYDVDHIVPQSFLKDDSIDNKVLTRSDKARGKSDNVPSEEVVKKMKNYWRQLLNAKLITQRKFDNLTKAERGGLSELDKAGFIKRQLVETRQITKHVAQILDSRMNTKYDENDKLIREVKVITLKSKLVSDFRKDFQFYKVREINNYHHAHDAYLNAVVGTALIKKYPKLESEFVYGDYKVYDVRKMIAKSEQEIGKATAKYFFYSNIMNFFKTEITLANGEIRKRPLIETNGETGEIVWDKGRDFATVRKVLSMPQVNIVKKTEVQTGGFSKESILPKRNSDKLIARKKDWDPKKYGGFDSPTVAYSVLVVAKVEKGKSKKLKSVKELLGITIMERSSFEKNPIDFLEAKGYKEVKKDLIIKLPKYSLFELENGRKRMLASAGELQKGNELALPSKYVNFLYLASHYEKLKGSPEDNEQKQLFVEQHKHYLDEIIEQISEFSKRVILADANLDKVLSAYNKHRDKPIREQAENIIHLFTLTNLGAPAAFKYFDTTIDRKRYTSTKEVLDATLIHQSITGLYETRIDLSQLGGDGGGGGEAAAKGGTLQLDDEYRLYSPLVKPDQNIQFWLEQFPQAWAETAGMGLAKQVPPQVIQLKASATPVSVRQYPLSKEAQEGIRPHVQRLIQQGILVPVQSPWNTPLLPVRKPGTNDYRPVQDLREVNKRVQDIHPTVPNPYNLLCALPPQRSWYTVLDLKDAFFCLRLHPTSQPLFAFEWRDPGTGRTGQLTWTRLPQGFKNSPTIFDEALHRDLANFRIQHPQVTLLQYVDDLLLAGATKQDCLEGTKALLLELSDLGYRASAKKAQICRREVTYLGYSLRDGQRWLTEARKKTVVQIPAPTTAKQVREFLGTAGFCRLWIPGFATLAAPLYPLTKEKGEFSWAPEHQKAFDAIKKALLSAPALALPDVTKPFTLYVDERKGVARGVLTQTLGPWRRPVAYLSKKLDPVASGWPVCLKAIAAVAILVKDADKLTLGQNITVIAPHALENIVRQPPDRWMTNARMTHYQSLLLTERVTFAPPAALNPATLLPEETDEPVTHDCHQLLIEETGVRKDLTDIPLTGEVLTWFTDGSSYVVEGKRMAGAAVVDGTRTIWASSLPEGTSAQKAELMALTQALRLAEGKSINIYTDSRYAFATAHVHGAIYKQRGLLTSAGREIKNKEEILSLLEALHLPKRLAIIHCPGHQKAKDPISRGNQMADRVAKQAAQGVNLLAGKRTADGSEFEKRTADGSEFESPKKKAKVE

SEQ ID NO: 6694 - protein, 2173 aa, synthetic construct
MPAAKRVKLDGGDKKYSIGLDIGTNSVGWAVITDEYKVPSKKFKVLGNTDRHSIKKNLIGALLFDSGETAEATRLKRTARRRYTRRKNRICYLQEIFSNEMAKVDDSFFHRLEESFLVEEDKKHERHPIFGNIVDEVAYHEKYPTIYHLRKKLVDSTDKADLRLIYLALAHMIKFRGHFLIEGDLNPDNSDVDKLFIQLVQTYNQLFEENPINASGVDAKAILSARLSKSRRLENLIAQLPGEKKNGLFGNLIALSLGLTPNFKSNFDLAEDAKLQLSKDTYDDDLDNLLAQIGDQYADLFLAAKNLSDAILLSDILRVNTEITKAPLSASMIKRYDEHHQDLTLLKALVRQQLPEKYKEIFFDQSKNGYAGYIDGGASQEEFYKFIKPILEKMDGTEELLVKLNREDLLRKQRTFDNGSIPHQIHLGELHAILRRQEDFYPFLKDNREKIEKILTFRIPYYVGPLARGNSRFAWMTRKSEETITPWNFEEVVDKGASAQSFIERMTNFDKNLPNEKVLPKHSLLYEYFTVYNELTKVKYVTEGMRKPAFLSGEQKKAIVDLLFKTNRKVTVKQLKEDYFKKIECFDSVEISGVEDRFNASLGTYHDLLKIIKDKDFLDNEENEDILEDIVLTLTLFEDREMIEERLKTYAHLFDDKVMKQLKRRRYTGWGRLSRKLINGIRDKQSGKTILDFLKSDGFANRNFMQLIHDDSLTFKEDIQKAQVSGQGDSLHEHIANLAGSPAIKKGILQTVKVVDELVKVMGRHKPENIVIEMARENQTTQKGQKNSRERMKRIEEGIKELGSQILKEHPVENTQLQNEKLYLYYLQNGRDMYVDQELDINRLSDYDVDHIVPQSFLKDDSIDNKVLTRSDKARGKSDNVPSEEVVKKMKNYWRQLLNAKLITQRKFDNLTKAERGGLSELDKAGFIKRQLVETRQITKHVAQILDSRMNTKYDENDKLIREVKVITLKSKLVSDFRKDFQFYKVREINNYHHAHDAYLNAVVGTALIKKYPKLESEFVYGDYKVYDVRKMIAKSEQEIGKATAKYFFYSNIMNFFKTEITLANGEIRKRPLIETNGETGEIVWDKGRDFATVRKVLSMPQVNIVKKTEVQTGGFSKESILPKRNSDKLIARKKDWDPKKYGGFDSPTVAYSVLVVAKVEKGKSKKLKSVKELLGITIMERSSFEKNPIDFLEAKGYKEVKKDLIIKLPKYSLFELENGRKRMLASAGELQKGNELALPSKYVNFLYLASHYEKLKGSPEDNEQKQLFVEQHKHYLDEIIEQISEFSKRVILADANLDKVLSAYNKHRDKPIREQAENIIHLFTLTNLGAPAAFKYFDTTIDRKRYTSTKEVLDATLIHQSITGLYETRIDLSQLGGDGGGGGEAAAKGGMDPLQLLQPLEAEIKGTKLKAHWNSGATITCVPQAFLEEEVPIKNIWIKTIHGEKEQPVYYLTFKIQGRKVEAEVISSPYDYILVSPSDIPWLMKKPLQLTTLVPLQEYEERLLKQTMLTGSYKEKLQSLFLKYDALWQHWENQVGHRRIKPHHIATGTVNPRPQKQYPINPKAKASIQTVINDLLKQGVLIQQNSIMNTPVYPVPKPDGKWRMVLDYREVNKTIPLIAAQNQHSAGILSSIFRGKYKTTLDLSNGFWAHSITPESYWLTAFTWLGQQYCWTRLPQGFLNSPALFNADVVDLLKEVPNVQVYVDDIYISHDDPREHLEQLEKVFSLLLNAGYVVSLKKSEIAQHEVEFLGFNITKEGRGLTETFKQKLLNITPPRDLKQLQSILGKLNFARNFIPNFSELVKPLYNIIATAPGKYITWTTDNSQQLQNIISMLNSAENLEERNPEVRLIMKVNTSPSAGYIRFYNEFAKRPIMYLNYVYTKAEVKFTNTEKLLTTIHKGLIKALDLGMGQEILVYSPIVSMTKIQKTPLPERKALPIRWITWMSYLEDPRIQFHYDKTLPELQQVPTVTDDIIAKIKHPSEFSMVFYTDGSAIKHPNVNKSHNAGMGIAQVQFKPEFTVINTWSIPLGDHTAQLAEVAAVEFACKKALKIDGPVLIVTDSFYVAESVNKELPYWQSNGFFNNKKKPLKHVSKWKSIADCIQLKPDIIIIHEKGHQPTASTFHTEGNNLADKLATQGSYVVNAGKRTADGSEFEKRTADGSEFESPKKKAKVE

SEQ ID NO: 6695 - protein, 2093 aa, synthetic construct
MPAAKRVKLDGGDKKYSIGLDIGTNSVGWAVITDEYKVPSKKFKVLGNTDRHSIKKNLIGALLFDSGETAEATRLKRTARRRYTRRKNRICYLQEIFSNEMAKVDDSFFHRLEESFLVEEDKKHERHPIFGNIVDEVAYHEKYPTIYHLRKKLVDSTDKADLRLIYLALAHMIKFRGHFLIEGDLNPDNSDVDKLFIQLVQTYNQLFEENPINASGVDAKAILSARLSKSRRLENLIAQLPGEKKNGLFGNLIALSLGLTPNFKSNFDLAEDAKLQLSKDTYDDDLDNLLAQIGDQYADLFLAAKNLSDAILLSDILRVNTEITKAPLSASMIKRYDEHHQDLTLLKALVRQQLPEKYKEIFFDQSKNGYAGYIDGGASQEEFYKFIKPILEKMDGTEELLVKLNREDLLRKQRTFDNGSIPHQIHLGELHAILRRQEDFYPFLKDNREKIEKILTFRIPYYVGPLARGNSRFAWMTRKSEETITPWNFEEVVDKGASAQSFIERMTNFDKNLPNEKVLPKHSLLYEYFTVYNELTKVKYVTEGMRKPAFLSGEQKKAIVDLLFKTNRKVTVKQLKEDYFKKIECFDSVEISGVEDRFNASLGTYHDLLKIIKDKDFLDNEENEDILEDIVLTLTLFEDREMIEERLKTYAHLFDDKVMKQLKRRRYTGWGRLSRKLINGIRDKQSGKTILDFLKSDGFANRNFMQLIHDDSLTFKEDIQKAQVSGQGDSLHEHIANLAGSPAIKKGILQTVKVVDELVKVMGRHKPENIVIEMARENQTTQKGQKNSRERMKRIEEGIKELGSQILKEHPVENTQLQNEKLYLYYLQNGRDMYVDQELDINRLSDYDVDHIVPQSFLKDDSIDNKVLTRSDKARGKSDNVPSEEVVKKMKNYWRQLLNAKLITQRKFDNLTKAERGGLSELDKAGFIKRQLVETRQITKHVAQILDSRMNTKYDENDKLIREVKVITLKSKLVSDFRKDFQFYKVREINNYHHAHDAYLNAVVGTALIKKYPKLESEFVYGDYKVYDVRKMIAKSEQEIGKATAKYFFYSNIMNFFKTEITLANGEIRKRPLIETNGETGEIVWDKGRDFATVRKVLSMPQVNIVKKTEVQTGGFSKESILPKRNSDKLIARKKDWDPKKYGGFDSPTVAYSVLVVAKVEKGKSKKLKSVKELLGITIMERSSFEKNPIDFLEAKGYKEVKKDLIIKLPKYSLFELENGRKRMLASAGELQKGNELALPSKYVNFLYLASHYEKLKGSPEDNEQKQLFVEQHKHYLDEIIEQISEFSKRVILADANLDKVLSAYNKHRDKPIREQAENIIHLFTLTNLGAPAAFKYFDTTIDRKRYTSTKEVLDATLIHQSITGLYETRIDLSQLGGDGGGGGEAAAKGGTLNIEDEYRLHETSKEPDVPLGSTWLSDFPQAWAETGGMGLAVRQAPLIIPLKATSTPVSIKQYPMSQEARLGIKPHIQRLLDQGILVPCQSPWNTPLLPVKKPGTNDYRPVQDLREVNKRVEDIHPTVPNPYNLLSGLPPSHQWYTVLDLKDAFFCLRLHPTSQPLFAFEWRDPEMGISGQLTWTRLPQGFKNSPTLFNEALHRDLADFRIQHPDLILLQYVDDLLLAATSEQDCQRGTRALLQTLGNLGYRASAKKAQICQKQVKYLGYLLKEGQRWLTEARKETVMGQPTPKTPRQLREFLGTAGFCRLWIPGFAEMAAPLYPLTKPGTLFNWGPDQQKAYQEIKQALLTAPALGLPDLTKPFELFVDEKQGYAKGVLTQKLGPWRRPVAYLSKKLDPVAAGWPPCLRMVAAIAVLTKDAGKLTMGQPLVILAPHAVEALVKQPPDRWLSNARMTHYQAMLLDTDRVQFGPVVALNPATLLPLPEKEAPHDCLEILAETHGTRPDLTDQPIPDADYTWYTDGSSFLQEGQRRAGAAVTTETEVIWARALPAGTSAQRAELIALTQALKMAEGKKLNVYTDSRYAFATAHVHGEIYRRRGWLTSEGREIKNKNEILALLKALFLPKRLSIIHCPGHQKGNSAEARGNRMADQAAREAAMKAVLETSTLLAGKRTADGSEFEKRTADGSEFESPKKKAKVE

SEQ ID NO: 6696 - protein, 2091 aa, synthetic construct
MPAAKRVKLDGGDKKYSIGLDIGTNSVGWAVITDEYKVPSKKFKVLGNTDRHSIKKNLIGALLFDSGETAEATRLKRTARRRYTRRKNRICYLQEIFSNEMAKVDDSFFHRLEESFLVEEDKKHERHPIFGNIVDEVAYHEKYPTIYHLRKKLVDSTDKADLRLIYLALAHMIKFRGHFLIEGDLNPDNSDVDKLFIQLVQTYNQLFEENPINASGVDAKAILSARLSKSRRLENLIAQLPGEKKNGLFGNLIALSLGLTPNFKSNFDLAEDAKLQLSKDTYDDDLDNLLAQIGDQYADLFLAAKNLSDAILLSDILRVNTEITKAPLSASMIKRYDEHHQDLTLLKALVRQQLPEKYKEIFFDQSKNGYAGYIDGGASQEEFYKFIKPILEKMDGTEELLVKLNREDLLRKQRTFDNGSIPHQIHLGELHAILRRQEDFYPFLKDNREKIEKILTFRIPYYVGPLARGNSRFAWMTRKSEETITPWNFEEVVDKGASAQSFIERMTNFDKNLPNEKVLPKHSLLYEYFTVYNELTKVKYVTEGMRKPAFLSGEQKKAIVDLLFKTNRKVTVKQLKEDYFKKIECFDSVEISGVEDRFNASLGTYHDLLKIIKDKDFLDNEENEDILEDIVLTLTLFEDREMIEERLKTYAHLFDDKVMKQLKRRRYTGWGRLSRKLINGIRDKQSGKTILDFLKSDGFANRNFMQLIHDDSLTFKEDIQKAQVSGQGDSLHEHIANLAGSPAIKKGILQTVKVVDELVKVMGRHKPENIVIEMARENQTTQKGQKNSRERMKRIEEGIKELGSQILKEHPVENTQLQNEKLYLYYLQNGRDMYVDQELDINRLSDYDVDHIVPQSFLKDDSIDNKVLTRSDKARGKSDNVPSEEVVKKMKNYWRQLLNAKLITQRKFDNLTKAERGGLSELDKAGFIKRQLVETRQITKHVAQILDSRMNTKYDENDKLIREVKVITLKSKLVSDFRKDFQFYKVREINNYHHAHDAYLNAVVGTALIKKYPKLESEFVYGDYKVYDVRKMIAKSEQEIGKATAKYFFYSNIMNFFKTEITLANGEIRKRPLIETNGETGEIVWDKGRDFATVRKVLSMPQVNIVKKTEVQTGGFSKESILPKRNSDKLIARKKDWDPKKYGGFDSPTVAYSVLVVAKVEKGKSKKLKSVKELLGITIMERSSFEKNPIDFLEAKGYKEVKKDLIIKLPKYSLFELENGRKRMLASAGELQKGNELALPSKYVNFLYLASHYEKLKGSPEDNEQKQLFVEQHKHYLDEIIEQISEFSKRVILADANLDKVLSAYNKHRDKPIREQAENIIHLFTLTNLGAPAAFKYFDTTIDRKRYTSTKEVLDATLIHQSITGLYETRIDLSQLGGDGGEAAAKGGGGGVLNLEEEYRLHEKPVPSSIDPSWLQLFPTVWAERAGMGLANQVPPVVVELRSGASPVAVRQYPMSKEAREGIRPHIQKFLDLGVLVPCRSPWNTPLLPVKKPGTNDYRPVQDLREINKRVQDIHPTVPNPYNLLSSLPPSYTWYSVLDLKDAFFCLRLHPNSQPLFAFEWKDPEKGNTGQLTWTRLPQGFKNSPTLFNEALHRDLAPFRALNPQVVLLQYVDDLLVAAPTYEDCKKGTQKLLQELSKLGYRVSAKKAQLCQREVTYLGYLLKEGKRWLTPARKATVMKIPVPTTPRQVREFLGTAGFCRLWIPGFASLAAPLYPLTKPSIPFIWTEEHQQAFDHIKKALLSAPALALPDLTKPFTLYIDERAGVARGVLTQTLGPWRRPVAYLSKKLDPVASGWPTCLKAVAAVALLLKDADKLTLGQNVTVIASHSLESIVRQPPDRWMTNARMTHYQSLLLNERVSFAPPAVLNPATLLPVESEATPVHRCSEILAEETGTRRDLEDQPLPGVPTWYTDGSSFITEGKRRAGAPIVDGKRTVWASSLPEGTSAQKAELVALTQALRLAEGKNINIYTDSRYAFATAHIHGAIYKQRGWLTSAGKDIKNKEEILALLEAIHLPRRVAIIHCPGHQRGSNPVATGNRRADEAAKQAALSTRVLAGTTKPAGKRTADGSEFEKRTADGSEFESPKKKAKVE

SEQ ID NO: 6697 - protein, 2091 aa, synthetic construct
MPAAKRVKLDGGDKKYSIGLDIGTNSVGWAVITDEYKVPSKKFKVLGNTDRHSIKKNLIGALLFDSGETAEATRLKRTARRRYTRRKNRICYLQEIFSNEMAKVDDSFFHRLEESFLVEEDKKHERHPIFGNIVDEVAYHEKYPTIYHLRKKLVDSTDKADLRLIYLALAHMIKFRGHFLIEGDLNPDNSDVDKLFIQLVQTYNQLFEENPINASGVDAKAILSARLSKSRRLENLIAQLPGEKKNGLFGNLIALSLGLTPNFKSNFDLAEDAKLQLSKDTYDDDLDNLLAQIGDQYADLFLAAKNLSDAILLSDILRVNTEITKAPLSASMIKRYDEHHQDLTLLKALVRQQLPEKYKEIFFDQSKNGYAGYIDGGASQEEFYKFIKPILEKMDGTEELLVKLNREDLLRKQRTFDNGSIPHQIHLGELHAILRRQEDFYPFLKDNREKIEKILTFRIPYYVGPLARGNSRFAWMTRKSEETITPWNFEEVVDKGASAQSFIERMTNFDKNLPNEKVLPKHSLLYEYFTVYNELTKVKYVTEGMRKPAFLSGEQKKAIVDLLFKTNRKVTVKQLKEDYFKKIECFDSVEISGVEDRFNASLGTYHDLLKIIKDKDFLDNEENEDILEDIVLTLTLFEDREMIEERLKTYAHLFDDKVMKQLKRRRYTGWGRLSRKLINGIRDKQSGKTILDFLKSDGFANRNFMQLIHDDSLTFKEDIQKAQVSGQGDSLHEHIANLAGSPAIKKGILQTVKVVDELVKVMGRHKPENIVIEMARENQTTQKGQKNSRERMKRIEEGIKELGSQILKEHPVENTQLQNEKLYLYYLQNGRDMYVDQELDINRLSDYDVDHIVPQSFLKDDSIDNKVLTRSDKARGKSDNVPSEEVVKKMKNYWRQLLNAKLITQRKFDNLTKAERGGLSELDKAGFIKRQLVETRQITKHVAQILDSRMNTKYDENDKLIREVKVITLKSKLVSDFRKDFQFYKVREINNYHHAHDAYLNAVVGTALIKKYPKLESEFVYGDYKVYDVRKMIAKSEQEIGKATAKYFFYSNIMNFFKTEITLANGEIRKRPLIETNGETGEIVWDKGRDFATVRKVLSMPQVNIVKKTEVQTGGFSKESILPKRNSDKLIARKKDWDPKKYGGFDSPTVAYSVLVVAKVEKGKSKKLKSVKELLGITIMERSSFEKNPIDFLEAKGYKEVKKDLIIKLPKYSLFELENGRKRMLASAGELQKGNELALPSKYVNFLYLASHYEKLKGSPEDNEQKQLFVEQHKHYLDEIIEQISEFSKRVILADANLDKVLSAYNKHRDKPIREQAENIIHLFTLTNLGAPAAFKYFDTTIDRKRYTSTKEVLDATLIHQSITGLYETRIDLSQLGGDGGEAAAKGGGGGVLNLEEEYRLHEKPVPSSIDPSWLQLFPTVWAERAGMGLANQVPPVVVELRSGASPVAVRQYPMSKEAREGIRPHIQKFLDLGVLVPCRSPWNTPLLPVKKPGTNDYRPVQDLREINKRVQDIHPTVPNPYNLLSSLPPSYTWYSVLDLKDAFFCLRLHPNSQPLFAFEWKDPEKGNTGQLTWTRLPQGFKNSPTLFNEALHRDLAPFRALNPQVVLLQYVDDLLVAAPTYEDCKKGTQKLLQELSKLGYRVSAKKAQLCQREVTYLGYLLKEGKRWLTPARKATVMKIPVPTTPRQVREFLGKAGFCRLFIPGFASLAAPLYPLTKPSIPFIWTEEHQQAFDHIKKALLSAPALALPDLTKPFTLYIDERAGVARGVLTQTLGPWRRPVAYLSKKLDPVASGWPTCLKAVAAVALLLKDADKLTLGQNVTVIASHSLESIVRQPPDRWMTNARMTHYQSLLLNERVSFAPPAVLNPATLLPVESEATPVHRCSEILAEETGTRRDLEDQPLPGVPTWYTDGSSFITEGKRRAGAPIVDGKRTVWASSLPEGTSAQKAELVALTQALRLAEGKNINIYTDSRYAFATAHIHGAIYKQRGWLTSAGKDIKNKEEILALLEAIHLPRRVAIIHCPGHQRGSNPVATGNRRADEAAKQAALSTRVLAGTTKPAGKRTADGSEFEKRTADGSEFESPKKKAKVE

SEQ ID NO: 6698 - protein, 2124 aa, synthetic construct
MPAAKRVKLDGGDKKYSIGLDIGTNSVGWAVITDEYKVPSKKFKVLGNTDRHSIKKNLIGALLFDSGETAEATRLKRTARRRYTRRKNRICYLQEIFSNEMAKVDDSFFHRLEESFLVEEDKKHERHPIFGNIVDEVAYHEKYPTIYHLRKKLVDSTDKADLRLIYLALAHMIKFRGHFLIEGDLNPDNSDVDKLFIQLVQTYNQLFEENPINASGVDAKAILSARLSKSRRLENLIAQLPGEKKNGLFGNLIALSLGLTPNFKSNFDLAEDAKLQLSKDTYDDDLDNLLAQIGDQYADLFLAAKNLSDAILLSDILRVNTEITKAPLSASMIKRYDEHHQDLTLLKALVRQQLPEKYKEIFFDQSKNGYAGYIDGGASQEEFYKFIKPILEKMDGTEELLVKLNREDLLRKQRTFDNGSIPHQIHLGELHAILRRQEDFYPFLKDNREKIEKILTFRIPYYVGPLARGNSRFAWMTRKSEETITPWNFEEVVDKGASAQSFIERMTNFDKNLPNEKVLPKHSLLYEYFTVYNELTKVKYVTEGMRKPAFLSGEQKKAIVDLLFKTNRKVTVKQLKEDYFKKIECFDSVEISGVEDRFNASLGTYHDLLKIIKDKDFLDNEENEDILEDIVLTLTLFEDREMIEERLKTYAHLFDDKVMKQLKRRRYTGWGRLSRKLINGIRDKQSGKTILDFLKSDGFANRNFMQLIHDDSLTFKEDIQKAQVSGQGDSLHEHIANLAGSPAIKKGILQTVKVVDELVKVMGRHKPENIVIEMARENQTTQKGQKNSRERMKRIEEGIKELGSQILKEHPVENTQLQNEKLYLYYLQNGRDMYVDQELDINRLSDYDVDHIVPQSFLKDDSIDNKVLTRSDKARGKSDNVPSEEVVKKMKNYWRQLLNAKLITQRKFDNLTKAERGGLSELDKAGFIKRQLVETRQITKHVAQILDSRMNTKYDENDKLIREVKVITLKSKLVSDFRKDFQFYKVREINNYHHAHDAYLNAVVGTALIKKYPKLESEFVYGDYKVYDVRKMIAKSEQEIGKATAKYFFYSNIMNFFKTEITLANGEIRKRPLIETNGETGEIVWDKGRDFATVRKVLSMPQVNIVKKTEVQTGGFSKESILPKRNSDKLIARKKDWDPKKYGGFDSPTVAYSVLVVAKVEKGKSKKLKSVKELLGITIMERSSFEKNPIDFLEAKGYKEVKKDLIIKLPKYSLFELENGRKRMLASAGELQKGNELALPSKYVNFLYLASHYEKLKGSPEDNEQKQLFVEQHKHYLDEIIEQISEFSKRVILADANLDKVLSAYNKHRDKPIREQAENIIHLFTLTNLGAPAAFKYFDTTIDRKRYTSTKEVLDATLIHQSITGLYETRIDLSQLGGDGGEAAAKGGGGGLLGRDLLTKLKAQIQFSTEGPQVTWEDRPAMCLVLNLEEEYRLHEKPVPPSIDPSWLQLFPMVWAEKAGMGLANQVPPVVVELKSDASPVAVRQYPMSKEAREGIRPHIQRFLDLGILVPCQSPWNTPLLPVKKPGTNDYRPVQDLREVNKRVQDIHPTVPNPYNLLSSLPPSHTWYSVLDLKDAFFCLKLHPNSQPLFAFEWRDPEKGNTGQLTWTRLPQGFKNSPTLFNEALHRDLASFRALNPQVVMLQYVDDLLVAAPTYRDCKEGTRRLLQELSKLGYRVSAKKAQLCREEVTYLGYLLKGGKRWLTPARKATVMKIPTPTTPRQVREFLGTAGFCRLWIPGFASLAAPLYPLTRPKVPFTWTEAHQEAFGRIKEALLSAPALALPDLTKPFALYVDEKEGVARGVLTQTLGPWRRPVAYLSKKLDPVASGWPTCLKAIAAVALLLKDADKLTLGQNVLVIAPHNLESIVRQPPDRWMTNARMTHYQSLLLNERVSFAPPAILNPATLLPVESDDTPIHICSEILAEETGTRPDLRDQPLPGVPAWYTDGSSFIMDGRRQAGAAIVDNKRTVWASNLPEGTSAQKAELIALTQALRLAEGKSINIYTDSRYAFATAHVHGAIYKQRGWLTSAGKDIKNKEEILALLEAIHLPKRVAIIHCPGHQRGTDPVATGNRKADEAAKQAAQSTRILTETTKNAGKRTADGSEFEKRTADGSEFESPKKKAKVE

SEQ ID NO: 6699 - protein, 2093 aa, synthetic construct
MPAAKRVKLDGGDKKYSIGLDIGTNSVGWAVITDEYKVPSKKFKVLGNTDRHSIKKNLIGALLFDSGETAEATRLKRTARRRYTRRKNRICYLQEIFSNEMAKVDDSFFHRLEESFLVEEDKKHERHPIFGNIVDEVAYHEKYPTIYHLRKKLVDSTDKADLRLIYLALAHMIKFRGHFLIEGDLNPDNSDVDKLFIQLVQTYNQLFEENPINASGVDAKAILSARLSKSRRLENLIAQLPGEKKNGLFGNLIALSLGLTPNFKSNFDLAEDAKLQLSKDTYDDDLDNLLAQIGDQYADLFLAAKNLSDAILLSDILRVNTEITKAPLSASMIKRYDEHHQDLTLLKALVRQQLPEKYKEIFFDQSKNGYAGYIDGGASQEEFYKFIKPILEKMDGTEELLVKLNREDLLRKQRTFDNGSIPHQIHLGELHAILRRQEDFYPFLKDNREKIEKILTFRIPYYVGPLARGNSRFAWMTRKSEETITPWNFEEVVDKGASAQSFIERMTNFDKNLPNEKVLPKHSLLYEYFTVYNELTKVKYVTEGMRKPAFLSGEQKKAIVDLLFKTNRKVTVKQLKEDYFKKIECFDSVEISGVEDRFNASLGTYHDLLKIIKDKDFLDNEENEDILEDIVLTLTLFEDREMIEERLKTYAHLFDDKVMKQLKRRRYTGWGRLSRKLINGIRDKQSGKTILDFLKSDGFANRNFMQLIHDDSLTFKEDIQKAQVSGQGDSLHEHIANLAGSPAIKKGILQTVKVVDELVKVMGRHKPENIVIEMARENQTTQKGQKNSRERMKRIEEGIKELGSQILKEHPVENTQLQNEKLYLYYLQNGRDMYVDQELDINRLSDYDVDHIVPQSFLKDDSIDNKVLTRSDKARGKSDNVPSEEVVKKMKNYWRQLLNAKLITQRKFDNLTKAERGGLSELDKAGFIKRQLVETRQITKHVAQILDSRMNTKYDENDKLIREVKVITLKSKLVSDFRKDFQFYKVREINNYHHAHDAYLNAVVGTALIKKYPKLESEFVYGDYKVYDVRKMIAKSEQEIGKATAKYFFYSNIMNFFKTEITLANGEIRKRPLIETNGETGEIVWDKGRDFATVRKVLSMPQVNIVKKTEVQTGGFSKESILPKRNSDKLIARKKDWDPKKYGGFDSPTVAYSVLVVAKVEKGKSKKLKSVKELLGITIMERSSFEKNPIDFLEAKGYKEVKKDLIIKLPKYSLFELENGRKRMLASAGELQKGNELALPSKYVNFLYLASHYEKLKGSPEDNEQKQLFVEQHKHYLDEIIEQISEFSKRVILADANLDKVLSAYNKHRDKPIREQAENIIHLFTLTNLGAPAAFKYFDTTIDRKRYTSTKEVLDATLIHQSITGLYETRIDLSQLGGDGGEAAAKGGGGGTLNIEDEHRLHETSKEPDVSLGSTWLSDFPQAWAETGGMGLAVRQAPLIIPLKATSTPVSIKQYPMSQEARLGIKPHIQRLLDQGILVPCQSPWNTPLLPVKKPGTNDYRPVQDLREVNKRVEDIHPTVPNPYNLLSGLPPSHQWYTVLDLKDAFFCLRLHPTSQPLFAFEWRDPEMGISGQLTWTRLPQGFKNSPTLFDEALHRDLADFRIQHPDLILLQYVDDLLLAATSELDCQQGTRALLQTLGNLGYRASAKKAQICQKQVKYLGYLLKEGQRWLTEARKETVMGQPTPKTPRQLREFLGTAGFCRLWIPGFAEMAAPLYPLTKTGTLFNWGPDQQKAYQEIKQALLTAPALGLPDLTKPFELFVDEKQGYAKGVLTQKLGPWRRPVAYLSKKLDPVAAGWPPCLRMVAAIAVLTKDAGKLTMGQPLVILAPHAVEALVKQPPDRWLSNARMTHYQALLLDTDRVQFGPVVALNPATLLPLPEEGLQHNCLDILAEAHGTRPDLTDQPLPDADHTWYTDGSSLLQEGQRKAGAAVTTETEVIWAKALPAGTSAQRAELIALTQALKMAEGKKLNVYTDSRYAFATAHIHGEIYRRRGLLTSEGKEIKNKDEILALLKALFLPKRLSIIHCPGHQKGHSAEARGNRMADQAARKAAITETPDTSTLLAGKRTADGSEFEKRTADGSEFESPKKKAKVE

SEQ ID NO: 6700 - protein, 2084 aa, synthetic construct
MPAAKRVKLDGGDKKYSIGLDIGTNSVGWAVITDEYKVPSKKFKVLGNTDRHSIKKNLIGALLFDSGETAEATRLKRTARRRYTRRKNRICYLQEIFSNEMAKVDDSFFHRLEESFLVEEDKKHERHPIFGNIVDEVAYHEKYPTIYHLRKKLVDSTDKADLRLIYLALAHMIKFRGHFLIEGDLNPDNSDVDKLFIQLVQTYNQLFEENPINASGVDAKAILSARLSKSRRLENLIAQLPGEKKNGLFGNLIALSLGLTPNFKSNFDLAEDAKLQLSKDTYDDDLDNLLAQIGDQYADLFLAAKNLSDAILLSDILRVNTEITKAPLSASMIKRYDEHHQDLTLLKALVRQQLPEKYKEIFFDQSKNGYAGYIDGGASQEEFYKFIKPILEKMDGTEELLVKLNREDLLRKQRTFDNGSIPHQIHLGELHAILRRQEDFYPFLKDNREKIEKILTFRIPYYVGPLARGNSRFAWMTRKSEETITPWNFEEVVDKGASAQSFIERMTNFDKNLPNEKVLPKHSLLYEYFTVYNELTKVKYVTEGMRKPAFLSGEQKKAIVDLLFKTNRKVTVKQLKEDYFKKIECFDSVEISGVEDRFNASLGTYHDLLKIIKDKDFLDNEENEDILEDIVLTLTLFEDREMIEERLKTYAHLFDDKVMKQLKRRRYTGWGRLSRKLINGIRDKQSGKTILDFLKSDGFANRNFMQLIHDDSLTFKEDIQKAQVSGQGDSLHEHIANLAGSPAIKKGILQTVKVVDELVKVMGRHKPENIVIEMARENQTTQKGQKNSRERMKRIEEGIKELGSQILKEHPVENTQLQNEKLYLYYLQNGRDMYVDQELDINRLSDYDVDHIVPQSFLKDDSIDNKVLTRSDKARGKSDNVPSEEVVKKMKNYWRQLLNAKLITQRKFDNLTKAERGGLSELDKAGFIKRQLVETRQITKHVAQILDSRMNTKYDENDKLIREVKVITLKSKLVSDFRKDFQFYKVREINNYHHAHDAYLNAVVGTALIKKYPKLESEFVYGDYKVYDVRKMIAKSEQEIGKATAKYFFYSNIMNFFKTEITLANGEIRKRPLIETNGETGEIVWDKGRDFATVRKVLSMPQVNIVKKTEVQTGGFSKESILPKRNSDKLIARKKDWDPKKYGGFDSPTVAYSVLVVAKVEKGKSKKLKSVKELLGITIMERSSFEKNPIDFLEAKGYKEVKKDLIIKLPKYSLFELENGRKRMLASAGELQKGNELALPSKYVNFLYLASHYEKLKGSPEDNEQKQLFVEQHKHYLDEIIEQISEFSKRVILADANLDKVLSAYNKHRDKPIREQAENIIHLFTLTNLGAPAAFKYFDTTIDRKRYTSTKEVLDATLIHQSITGLYETRIDLSQLGGDGGEAAAKGGGGGVPWLMKKPLQLTVLVPLHEYQERLLQQTALPKEQKELLQKLFLKYDALWQHWENQVGHRRIKPHNIATGTLAPRPQKQYPINPKAKPSIQIVIDDLLKQGVLIQQNSTMNTPVYPVPKPDGKWRMVLDYREVNKTIPLIAAQNQHSAGILSSIYRGKYKTTLDLTNGFWAHPITPESYWLTAFTWQGKQYCWTRLPQGFLNSPALFTADVVDLLKEIPNVQAYVDDIYISHDDPQEHLEQLEKIFSILLNAGYVVSLKKSEIAQREVEFLGFNITKEGRGLTDTFKQKLLNITPPKDLKQLQSILGLLNFARNFIPNYSELVKPLYTIVANANGKFISWTEDNSNQLQHIISVLNQADNLEERNPETRLIIKVNSSPSAGYIRYYNEGSKRPIMYVNYIFSKAEAKFTQTEKLLTTMHKGLIKAMDLAMGQEILVYSPIVSMTKIQRTPLPERKALPVRWITWMTYLEDPRIQFHYDKSLPELQQIPNVTEDVIAKTKHPSEFAMVFYTDGSAIKHPDVNKSHSAGMGIAQVQFIPEYKIVHQWSIPLGDHTAQLAEIAAVEFACKKALKISGPVLIVTDSFYVAESANKELPYWKSNGFLNNKKKPLRHVSKWKSIAECLQLKPDIIIMHEKGHQQPMTTLHTEGNNLADKLATQGSYVVHAGKRTADGSEFEKRTADGSEFESPKKKAKVE

SEQ ID NO: 6701 - protein, 2173 aa, synthetic construct
MPAAKRVKLDGGDKKYSIGLDIGTNSVGWAVITDEYKVPSKKFKVLGNTDRHSIKKNLIGALLFDSGETAEATRLKRTARRRYTRRKNRICYLQEIFSNEMAKVDDSFFHRLEESFLVEEDKKHERHPIFGNIVDEVAYHEKYPTIYHLRKKLVDSTDKADLRLIYLALAHMIKFRGHFLIEGDLNPDNSDVDKLFIQLVQTYNQLFEENPINASGVDAKAILSARLSKSRRLENLIAQLPGEKKNGLFGNLIALSLGLTPNFKSNFDLAEDAKLQLSKDTYDDDLDNLLAQIGDQYADLFLAAKNLSDAILLSDILRVNTEITKAPLSASMIKRYDEHHQDLTLLKALVRQQLPEKYKEIFFDQSKNGYAGYIDGGASQEEFYKFIKPILEKMDGTEELLVKLNREDLLRKQRTFDNGSIPHQIHLGELHAILRRQEDFYPFLKDNREKIEKILTFRIPYYVGPLARGNSRFAWMTRKSEETITPWNFEEVVDKGASAQSFIERMTNFDKNLPNEKVLPKHSLLYEYFTVYNELTKVKYVTEGMRKPAFLSGEQKKAIVDLLFKTNRKVTVKQLKEDYFKKIECFDSVEISGVEDRFNASLGTYHDLLKIIKDKDFLDNEENEDILEDIVLTLTLFEDREMIEERLKTYAHLFDDKVMKQLKRRRYTGWGRLSRKLINGIRDKQSGKTILDFLKSDGFANRNFMQLIHDDSLTFKEDIQKAQVSGQGDSLHEHIANLAGSPAIKKGILQTVKVVDELVKVMGRHKPENIVIEMARENQTTQKGQKNSRERMKRIEEGIKELGSQILKEHPVENTQLQNEKLYLYYLQNGRDMYVDQELDINRLSDYDVDHIVPQSFLKDDSIDNKVLTRSDKARGKSDNVPSEEVVKKMKNYWRQLLNAKLITQRKFDNLTKAERGGLSELDKAGFIKRQLVETRQITKHVAQILDSRMNTKYDENDKLIREVKVITLKSKLVSDFRKDFQFYKVREINNYHHAHDAYLNAVVGTALIKKYPKLESEFVYGDYKVYDVRKMIAKSEQEIGKATAKYFFYSNIMNFFKTEITLANGEIRKRPLIETNGETGEIVWDKGRDFATVRKVLSMPQVNIVKKTEVQTGGFSKESILPKRNSDKLIARKKDWDPKKYGGFDSPTVAYSVLVVAKVEKGKSKKLKSVKELLGITIMERSSFEKNPIDFLEAKGYKEVKKDLIIKLPKYSLFELENGRKRMLASAGELQKGNELALPSKYVNFLYLASHYEKLKGSPEDNEQKQLFVEQHKHYLDEIIEQISEFSKRVILADANLDKVLSAYNKHRDKPIREQAENIIHLFTLTNLGAPAAFKYFDTTIDRKRYTSTKEVLDATLIHQSITGLYETRIDLSQLGGDGGEAAAKGGGGGMDPLQLLQPLEAEIKGTKLKAHWNSGATITCVPQAFLEEEVPIKNIWIKTIHGEKEQPVYYLTFKIQGRKVEAEVISSPYDYILVSPSDIPWLMKKPLQLTTLVPLQEYEERLLKQTMLTGSYKEKLQSLFLKYDALWQHWENQVGHRRIKPHHIATGTVNPRPQKQYPINPKAKASIQTVINDLLKQGVLIQQNSIMNTPVYPVPKPDGKWRMVLDYREVNKTIPLIAAQNQHSAGILSSIFRGKYKTTLDLSNGFWAHSITPESYWLTAFTWLGQQYCWTRLPQGFLNSPALFNADVVDLLKEVPNVQVYVDDIYISHDDPREHLEQLEKVFSLLLNAGYVVSLKKSEIAQHEVEFLGFNITKEGRGLTETFKQKLLNITPPRDLKQLQSILGKLNFARNFIPNFSELVKPLYNIIATAPGKYITWTTDNSQQLQNIISMLNSAENLEERNPEVRLIMKVNTSPSAGYIRFYNEFAKRPIMYLNYVYTKAEVKFTNTEKLLTTIHKGLIKALDLGMGQEILVYSPIVSMTKIQKTPLPERKALPIRWITWMSYLEDPRIQFHYDKTLPELQQVPTVTDDIIAKIKHPSEFSMVFYTDGSAIKHPNVNKSHNAGMGIAQVQFKPEFTVINTWSIPLGDHTAQLAEVAAVEFACKKALKIDGPVLIVTDSFYVAESVNKELPYWQSNGFFNNKKKPLKHVSKWKSIADCIQLKPDIIIIHEKGHQPTASTFHTEGNNLADKLATQGSYVVNAGKRTADGSEFEKRTADGSEFESPKKKAKVE

SEQ ID NO: 6702 - protein, 2091 aa, synthetic construct
MPAAKRVKLDGGDKKYSIGLDIGTNSVGWAVITDEYKVPSKKFKVLGNTDRHSIKKNLIGALLFDSGETAEATRLKRTARRRYTRRKNRICYLQEIFSNEMAKVDDSFFHRLEESFLVEEDKKHERHPIFGNIVDEVAYHEKYPTIYHLRKKLVDSTDKADLRLIYLALAHMIKFRGHFLIEGDLNPDNSDVDKLFIQLVQTYNQLFEENPINASGVDAKAILSARLSKSRRLENLIAQLPGEKKNGLFGNLIALSLGLTPNFKSNFDLAEDAKLQLSKDTYDDDLDNLLAQIGDQYADLFLAAKNLSDAILLSDILRVNTEITKAPLSASMIKRYDEHHQDLTLLKALVRQQLPEKYKEIFFDQSKNGYAGYIDGGASQEEFYKFIKPILEKMDGTEELLVKLNREDLLRKQRTFDNGSIPHQIHLGELHAILRRQEDFYPFLKDNREKIEKILTFRIPYYVGPLARGNSRFAWMTRKSEETITPWNFEEVVDKGASAQSFIERMTNFDKNLPNEKVLPKHSLLYEYFTVYNELTKVKYVTEGMRKPAFLSGEQKKAIVDLLFKTNRKVTVKQLKEDYFKKIECFDSVEISGVEDRFNASLGTYHDLLKIIKDKDFLDNEENEDILEDIVLTLTLFEDREMIEERLKTYAHLFDDKVMKQLKRRRYTGWGRLSRKLINGIRDKQSGKTILDFLKSDGFANRNFMQLIHDDSLTFKEDIQKAQVSGQGDSLHEHIANLAGSPAIKKGILQTVKVVDELVKVMGRHKPENIVIEMARENQTTQKGQKNSRERMKRIEEGIKELGSQILKEHPVENTQLQNEKLYLYYLQNGRDMYVDQELDINRLSDYDVDHIVPQSFLKDDSIDNKVLTRSDKARGKSDNVPSEEVVKKMKNYWRQLLNAKLITQRKFDNLTKAERGGLSELDKAGFIKRQLVETRQITKHVAQILDSRMNTKYDENDKLIREVKVITLKSKLVSDFRKDFQFYKVREINNYHHAHDAYLNAVVGTALIKKYPKLESEFVYGDYKVYDVRKMIAKSEQEIGKATAKYFFYSNIMNFFKTEITLANGEIRKRPLIETNGETGEIVWDKGRDFATVRKVLSMPQVNIVKKTEVQTGGFSKESILPKRNSDKLIARKKDWDPKKYGGFDSPTVAYSVLVVAKVEKGKSKKLKSVKELLGITIMERSSFEKNPIDFLEAKGYKEVKKDLIIKLPKYSLFELENGRKRMLASAGELQKGNELALPSKYVNFLYLASHYEKLKGSPEDNEQKQLFVEQHKHYLDEIIEQISEFSKRVILADANLDKVLSAYNKHRDKPIREQAENIIHLFTLTNLGAPAAFKYFDTTIDRKRYTSTKEVLDATLIHQSITGLYETRIDLSQLGGDGGEAAAKGGGGGVLNLEEEYRLHEKPVPSSIDPSWLQLFPTVWAERAGMGLANQVPPVVVELRSGASPVAVRQYPMSKEAREGIRPHIQRFLDLGVLVPCQSPWNTPLLPVKKPGTNDYRPVQDLREINKRVQDIHPTVPNPYNLLSSLPPSHTWYSVLDLKDAFFCLKLHPNSQPLFAFEWRDPEKGNTGQLTWTRLPQGFKNSPTLFDEALHRDLAPFRALNPQVVLLQYVDDLLVAAPTYRDCKEGTQKLLQELSKLGYRVSAKKAQLCQKEVTYLGYLLKEGKRWLTPARKATVMKIPPPTTPRQVREFLGTAGFCRLWIPGFASLAAPLYPLTKESIPFIWTEEHQKAFDRIKEALLSAPALALPDLTKPFTLYVDERAGVARGVLTQTLGPWRRPVAYLSKKLDPVASGWPTCLKAVAAVALLLKDADKLTLGQNVTVIASHSLESIVRQPPDRWMTNARMTHYQSLLLNERVSFAPPAVLNPATLLPVESEATPVHRCSEILAEETGTRRDLKDQPLPGVPAWYTDGSSFIAEGKRRAGAAIVDGKRTVWASSLPEGTSAQKAELVALTQALRLAEGKDINIYTDSRYAFATAHIHGAIYKQRGLLTSAGKDIKNKEEILALLEAIHLPKRVAIIHCPGHQKGNDPVATGNRRADEAAKQAALSTRVLAETTKPAGKRTADGSEFEKRTADGSEFESPKKKAKVE

SEQ ID NO: 6703 - protein, 2093 aa, synthetic construct
MPAAKRVKLDGGDKKYSIGLDIGTNSVGWAVITDEYKVPSKKFKVLGNTDRHSIKKNLIGALLFDSGETAEATRLKRTARRRYTRRKNRICYLQEIFSNEMAKVDDSFFHRLEESFLVEEDKKHERHPIFGNIVDEVAYHEKYPTIYHLRKKLVDSTDKADLRLIYLALAHMIKFRGHFLIEGDLNPDNSDVDKLFIQLVQTYNQLFEENPINASGVDAKAILSARLSKSRRLENLIAQLPGEKKNGLFGNLIALSLGLTPNFKSNFDLAEDAKLQLSKDTYDDDLDNLLAQIGDQYADLFLAAKNLSDAILLSDILRVNTEITKAPLSASMIKRYDEHHQDLTLLKALVRQQLPEKYKEIFFDQSKNGYAGYIDGGASQEEFYKFIKPILEKMDGTEELLVKLNREDLLRKQRTFDNGSIPHQIHLGELHAILRRQEDFYPFLKDNREKIEKILTFRIPYYVGPLARGNSRFAWMTRKSEETITPWNFEEVVDKGASAQSFIERMTNFDKNLPNEKVLPKHSLLYEYFTVYNELTKVKYVTEGMRKPAFLSGEQKKAIVDLLFKTNRKVTVKQLKEDYFKKIECFDSVEISGVEDRFNASLGTYHDLLKIIKDKDFLDNEENEDILEDIVLTLTLFEDREMIEERLKTYAHLFDDKVMKQLKRRRYTGWGRLSRKLINGIRDKQSGKTILDFLKSDGFANRNFMQLIHDDSLTFKEDIQKAQVSGQGDSLHEHIANLAGSPAIKKGILQTVKVVDELVKVMGRHKPENIVIEMARENQTTQKGQKNSRERMKRIEEGIKELGSQILKEHPVENTQLQNEKLYLYYLQNGRDMYVDQELDINRLSDYDVDHIVPQSFLKDDSIDNKVLTRSDKARGKSDNVPSEEVVKKMKNYWRQLLNAKLITQRKFDNLTKAERGGLSELDKAGFIKRQLVETRQITKHVAQILDSRMNTKYDENDKLIREVKVITLKSKLVSDFRKDFQFYKVREINNYHHAHDAYLNAVVGTALIKKYPKLESEFVYGDYKVYDVRKMIAKSEQEIGKATAKYFFYSNIMNFFKTEITLANGEIRKRPLIETNGETGEIVWDKGRDFATVRKVLSMPQVNIVKKTEVQTGGFSKESILPKRNSDKLIARKKDWDPKKYGGFDSPTVAYSVLVVAKVEKGKSKKLKSVKELLGITIMERSSFEKNPIDFLEAKGYKEVKKDLIIKLPKYSLFELENGRKRMLASAGELQKGNELALPSKYVNFLYLASHYEKLKGSPEDNEQKQLFVEQHKHYLDEIIEQISEFSKRVILADANLDKVLSAYNKHRDKPIREQAENIIHLFTLTNLGAPAAFKYFDTTIDRKRYTSTKEVLDATLIHQSITGLYETRIDLSQLGGDGGGGGPAPGGTAPLEEEYRLFLEAPIQNVTLLEQWKREIPKVWAEINPPGLASTQAPIHVQLLSTALPVRVRQYPITLEAKRSLRETIRKFRAAGILRPVHSPWNTPLLPVRKSGTSEYRMVQDLREVNKRVETIHPTVPNPYTLLSLLPPDRIWYSVLDLKDAFFCIPLAPESQLIFAFEWADAEEGESGQLTWTRLPQGFKNSPTLFNEALNRDLQGFRLDHPSVSLLQYVDDLLIAADTQAACLSATRDLLMTLAELGYRVSGKKAQLCQEEVTYLGFKIHKGSRSLSNSRTQAILQIPVPKTKRQVREFLGTIGYCRLWIPGFAELAQPLYAATRPGNDPLVWGEKEEEAFQSLKLALTQPPALALPSLDKPFQLFVEETSGAAKGVLTQALGPWKRPVAYLSKRLDPVAAGWPRCLRAIAAAALLTREASKLTFGQDIEITSSHNLESLLRSPPDKWLTNARITQYQVLLLDPPRVRFKQTAALNPATLLPETDDTLPIHHCLDTLDSLTSTRPDLTDQPLAQAEATLFTDGSSYIRDGKRYAGAAVVTLDSVIWAEPLPIGTSAQKAELIALTKALEWSKDKSVNIYTDSRYAFATLHVHGMIYRERGWLTAGGKAIKNAPEILALLTAVWLPKRVAVMHCKGHQKDDAPTSTGNRRADEVAREVAIRPLSTQATISAGKRTADGSEFEKRTADGSEFESPKKKAKVE

SEQ ID NO: 6704 - protein, 2082 aa, synthetic construct
MPAAKRVKLDGGDKKYSIGLDIGTNSVGWAVITDEYKVPSKKFKVLGNTDRHSIKKNLIGALLFDSGETAEATRLKRTARRRYTRRKNRICYLQEIFSNEMAKVDDSFFHRLEESFLVEEDKKHERHPIFGNIVDEVAYHEKYPTIYHLRKKLVDSTDKADLRLIYLALAHMIKFRGHFLIEGDLNPDNSDVDKLFIQLVQTYNQLFEENPINASGVDAKAILSARLSKSRRLENLIAQLPGEKKNGLFGNLIALSLGLTPNFKSNFDLAEDAKLQLSKDTYDDDLDNLLAQIGDQYADLFLAAKNLSDAILLSDILRVNTEITKAPLSASMIKRYDEHHQDLTLLKALVRQQLPEKYKEIFFDQSKNGYAGYIDGGASQEEFYKFIKPILEKMDGTEELLVKLNREDLLRKQRTFDNGSIPHQIHLGELHAILRRQEDFYPFLKDNREKIEKILTFRIPYYVGPLARGNSRFAWMTRKSEETITPWNFEEVVDKGASAQSFIERMTNFDKNLPNEKVLPKHSLLYEYFTVYNELTKVKYVTEGMRKPAFLSGEQKKAIVDLLFKTNRKVTVKQLKEDYFKKIECFDSVEISGVEDRFNASLGTYHDLLKIIKDKDFLDNEENEDILEDIVLTLTLFEDREMIEERLKTYAHLFDDKVMKQLKRRRYTGWGRLSRKLINGIRDKQSGKTILDFLKSDGFANRNFMQLIHDDSLTFKEDIQKAQVSGQGDSLHEHIANLAGSPAIKKGILQTVKVVDELVKVMGRHKPENIVIEMARENQTTQKGQKNSRERMKRIEEGIKELGSQILKEHPVENTQLQNEKLYLYYLQNGRDMYVDQELDINRLSDYDVDHIVPQSFLKDDSIDNKVLTRSDKARGKSDNVPSEEVVKKMKNYWRQLLNAKLITQRKFDNLTKAERGGLSELDKAGFIKRQLVETRQITKHVAQILDSRMNTKYDENDKLIREVKVITLKSKLVSDFRKDFQFYKVREINNYHHAHDAYLNAVVGTALIKKYPKLESEFVYGDYKVYDVRKMIAKSEQEIGKATAKYFFYSNIMNFFKTEITLANGEIRKRPLIETNGETGEIVWDKGRDFATVRKVLSMPQVNIVKKTEVQTGGFSKESILPKRNSDKLIARKKDWDPKKYGGFDSPTVAYSVLVVAKVEKGKSKKLKSVKELLGITIMERSSFEKNPIDFLEAKGYKEVKKDLIIKLPKYSLFELENGRKRMLASAGELQKGNELALPSKYVNFLYLASHYEKLKGSPEDNEQKQLFVEQHKHYLDEIIEQISEFSKRVILADANLDKVLSAYNKHRDKPIREQAENIIHLFTLTNLGAPAAFKYFDTTIDRKRYTSTKEVLDATLIHQSITGLYETRIDLSQLGGDGGGGGPAPGGVPWILKKPLELTIKLDLEEQQGTLLNNSILSKKGKEELKQLFEKYSALWQSWENQVGHRRIRPHKIATGTVKPTPQKQYHINPKAKPDIQIVINDLLKQGVLIQKESTMNTPVYPVPKPNGRWRMVLDYRAVNKVTPLIAVQNQHSYGILGSLFKGRYKTTIDLSNGFWAHPIVPEDYWITAFTWQGKQYCWTVLPQGFLNSPGLFTGDVVDLLQGIPNVEVYVDDVYISHDSEKEHLEYLDILFNRLKEAGYIISLKKSNIANSIVDFLGFQITNEGRGLTDTFKEKLENITAPTTLKQLQSILGLLNFARNFIPDFTELIAPLYALIPKSTKNYVPWQIEHSTTLETLITKLNGAEYLQGRKGDKTLIMKVNASYTTGYIRYYNEGEKKPISYVSIVFSKTELKFTELEKLLTTVHKGLLKALDLSMGQNIHVYSPIVSMQNIQKTPQTAKKALASRWLSWLSYLEDPRIRFFYDPQMPALKDLPAVDTGKDNKKHPSNFQHIFYTDGSAITSPTKEGHLNAGMGIVYFINKDGNLQKQQEWSISLGNHTAQFAEIAAFEFALKKCLPLGGNILVVTDSNYVAKAYNEELDVWASNGFVNNRKKPLKHISKWKSVADLKRLRPDVVVTHEPGHQKLDSSPHAYGNNLADQLATQASFKVHAGKRTADGSEFEKRTADGSEFESPKKKAKVE

SEQ ID NO: 6705 - protein, 2213 aa, synthetic construct
MPAAKRVKLDGGDKKYSIGLDIGTNSVGWAVITDEYKVPSKKFKVLGNTDRHSIKKNLIGALLFDSGETAEATRLKRTARRRYTRRKNRICYLQEIFSNEMAKVDDSFFHRLEESFLVEEDKKHERHPIFGNIVDEVAYHEKYPTIYHLRKKLVDSTDKADLRLIYLALAHMIKFRGHFLIEGDLNPDNSDVDKLFIQLVQTYNQLFEENPINASGVDAKAILSARLSKSRRLENLIAQLPGEKKNGLFGNLIALSLGLTPNFKSNFDLAEDAKLQLSKDTYDDDLDNLLAQIGDQYADLFLAAKNLSDAILLSDILRVNTEITKAPLSASMIKRYDEHHQDLTLLKALVRQQLPEKYKEIFFDQSKNGYAGYIDGGASQEEFYKFIKPILEKMDGTEELLVKLNREDLLRKQRTFDNGSIPHQIHLGELHAILRRQEDFYPFLKDNREKIEKILTFRIPYYVGPLARGNSRFAWMTRKSEETITPWNFEEVVDKGASAQSFIERMTNFDKNLPNEKVLPKHSLLYEYFTVYNELTKVKYVTEGMRKPAFLSGEQKKAIVDLLFKTNRKVTVKQLKEDYFKKIECFDSVEISGVEDRFNASLGTYHDLLKIIKDKDFLDNEENEDILEDIVLTLTLFEDREMIEERLKTYAHLFDDKVMKQLKRRRYTGWGRLSRKLINGIRDKQSGKTILDFLKSDGFANRNFMQLIHDDSLTFKEDIQKAQVSGQGDSLHEHIANLAGSPAIKKGILQTVKVVDELVKVMGRHKPENIVIEMARENQTTQKGQKNSRERMKRIEEGIKELGSQILKEHPVENTQLQNEKLYLYYLQNGRDMYVDQELDINRLSDYDVDHIVPQSFLKDDSIDNKVLTRSDKARGKSDNVPSEEVVKKMKNYWRQLLNAKLITQRKFDNLTKAERGGLSELDKAGFIKRQLVETRQITKHVAQILDSRMNTKYDENDKLIREVKVITLKSKLVSDFRKDFQFYKVREINNYHHAHDAYLNAVVGTALIKKYPKLESEFVYGDYKVYDVRKMIAKSEQEIGKATAKYFFYSNIMNFFKTEITLANGEIRKRPLIETNGETGEIVWDKGRDFATVRKVLSMPQVNIVKKTEVQTGGFSKESILPKRNSDKLIARKKDWDPKKYGGFDSPTVAYSVLVVAKVEKGKSKKLKSVKELLGITIMERSSFEKNPIDFLEAKGYKEVKKDLIIKLPKYSLFELENGRKRMLASAGELQKGNELALPSKYVNFLYLASHYEKLKGSPEDNEQKQLFVEQHKHYLDEIIEQISEFSKRVILADANLDKVLSAYNKHRDKPIREQAENIIHLFTLTNLGAPAAFKYFDTTIDRKRYTSTKEVLDATLIHQSITGLYETRIDLSQLGGDGGGGGPAPGGTLGDQGSRGSDPLPEPRVTLTVEGIPTEFLVNTGAEHSVLTKPMGKMGSKRTVVAGATGSKVYPWTTKRLLKIGQKQVTHSFLVIPECPAPLLGRDLLTKLKAQIQFSTEGPQVTWEDRPAMCLVLNLEEEYRLHEKPVPPSIDPSWLQLFPMVWAEKAGMGLANQVPPVVVELKSDASPVAVRQYPMSKEAREGIRPHIQRFLDLGILVPCQSPWNTPLLPVKKPGTNDYRPVQDLREVNKRVQDIHPTVPNPYNLLSSLPPSHTWYSVLDLKDAFFCLKLHPNSQPLFAFEWRDPEKGNTGQLTWTRLPQGFKNSPTLFNEALHRDLASFRALNPQVVMLQYVDDLLVAAPTYRDCKEGTRRLLQELSKLGYRVSAKKAQLCREEVTYLGYLLKGGKRWLTPARKATVMKIPTPTTPRQVREFLGTAGFCRLWIPGFASLAAPLYPLTRPKVPFTWTEAHQEAFGRIKEALLSAPALALPDLTKPFALYVDEKEGVARGVLTQTLGPWRRPVAYLSKKLDPVASGWPTCLKAIAAVALLLKDADKLTLGQNVLVIAPHNLESIVRQPPDRWMTNARMTHYQSLLLNERVSFAPPAILNPATLLPVESDDTPIHICSEILAEETGTRPDLRDQPLPGVPAWYTDGSSFIMDGRRQAGAAIVDNKRTVWASNLPEGTSAQKAELIALTQALRLAEGKSINIYTDSRYAFATAHVHGAIYKQRGWLTSAGKDIKNKEEILALLEAIHLPKRVAIIHCPGHQRGTDPVATGNRKADEAAKQAAQSTRILTETTKNAGKRTADGSEFEKRTADGSEFESPKKKAKVE

SEQ ID NO: 6706 - protein, 2091 aa, synthetic construct
MPAAKRVKLDGGDKKYSIGLDIGTNSVGWAVITDEYKVPSKKFKVLGNTDRHSIKKNLIGALLFDSGETAEATRLKRTARRRYTRRKNRICYLQEIFSNEMAKVDDSFFHRLEESFLVEEDKKHERHPIFGNIVDEVAYHEKYPTIYHLRKKLVDSTDKADLRLIYLALAHMIKFRGHFLIEGDLNPDNSDVDKLFIQLVQTYNQLFEENPINASGVDAKAILSARLSKSRRLENLIAQLPGEKKNGLFGNLIALSLGLTPNFKSNFDLAEDAKLQLSKDTYDDDLDNLLAQIGDQYADLFLAAKNLSDAILLSDILRVNTEITKAPLSASMIKRYDEHHQDLTLLKALVRQQLPEKYKEIFFDQSKNGYAGYIDGGASQEEFYKFIKPILEKMDGTEELLVKLNREDLLRKQRTFDNGSIPHQIHLGELHAILRRQEDFYPFLKDNREKIEKILTFRIPYYVGPLARGNSRFAWMTRKSEETITPWNFEEVVDKGASAQSFIERMTNFDKNLPNEKVLPKHSLLYEYFTVYNELTKVKYVTEGMRKPAFLSGEQKKAIVDLLFKTNRKVTVKQLKEDYFKKIECFDSVEISGVEDRFNASLGTYHDLLKIIKDKDFLDNEENEDILEDIVLTLTLFEDREMIEERLKTYAHLFDDKVMKQLKRRRYTGWGRLSRKLINGIRDKQSGKTILDFLKSDGFANRNFMQLIHDDSLTFKEDIQKAQVSGQGDSLHEHIANLAGSPAIKKGILQTVKVVDELVKVMGRHKPENIVIEMARENQTTQKGQKNSRERMKRIEEGIKELGSQILKEHPVENTQLQNEKLYLYYLQNGRDMYVDQELDINRLSDYDVDHIVPQSFLKDDSIDNKVLTRSDKARGKSDNVPSEEVVKKMKNYWRQLLNAKLITQRKFDNLTKAERGGLSELDKAGFIKRQLVETRQITKHVAQILDSRMNTKYDENDKLIREVKVITLKSKLVSDFRKDFQFYKVREINNYHHAHDAYLNAVVGTALIKKYPKLESEFVYGDYKVYDVRKMIAKSEQEIGKATAKYFFYSNIMNFFKTEITLANGEIRKRPLIETNGETGEIVWDKGRDFATVRKVLSMPQVNIVKKTEVQTGGFSKESILPKRNSDKLIARKKDWDPKKYGGFDSPTVAYSVLVVAKVEKGKSKKLKSVKELLGITIMERSSFEKNPIDFLEAKGYKEVKKDLIIKLPKYSLFELENGRKRMLASAGELQKGNELALPSKYVNFLYLASHYEKLKGSPEDNEQKQLFVEQHKHYLDEIIEQISEFSKRVILADANLDKVLSAYNKHRDKPIREQAENIIHLFTLTNLGAPAAFKYFDTTIDRKRYTSTKEVLDATLIHQSITGLYETRIDLSQLGGDGGGGGPAPGGTLNLEDEYRLYETSAEPEVSPGSTWLSDFPQAWAETGGMGLAVRQAPLIIPLKATSTPVSIKQYPMSQEAKLGIKPHIQRLLDQGILVPCQSPWNTPLLPVKKPGTNDYRPVQDLREVNKRVEDIHPTVPNPYNLLSGLPPSHRWYTVLDLKDAFFCLRLHPTSQPLFAFEWRDPGMGISGQLTWTRLPQGFKNSPTLFNEALHRDLADFRIQHPDLILLQYVDDILLAATSELDCQQGTRALLLTLGNLGYRASAKKAQLCQKQVKYLGYLLKEGQRWLTEARKETVMGQPTPKTPRQLREFLGKAGFCRLFIPGFAEMAAPLYPLTKPGTLFNWGPDQQKAYQEIKQALLTAPALGLPDLTKPFELFVDEKQGYAKGVLTQKLGPWRRPVAYLSKKLDPVAAGWPPCLRMVAAIAVLRKDAGKLTMGQPLVILAPHAVEALVKQPPDRWLSNARMTHYQAMLLDTDRVQFGPVVALNPATLLPLPEEGAPHDCLEILAETHGTRPDLTDQPIPDADHTWYTDGSSFLQEGQRKAGAAVTTETEVIWARALPAGTSAQRAELIALTQALKMAEGKRLNVYTDSRYAFATAHIHGEIYRRRGWLTSEGREIKNKSEILALLKALFLPKRLSIIHCLGHQKGDSAEARGNRLADQAAREAAIKTPPDTSTLLAGKRTADGSEFEKRTADGSEFESPKKKAKVE

SEQ ID NO: 6707 - protein, 2091 aa, synthetic construct
MPAAKRVKLDGGDKKYSIGLDIGTNSVGWAVITDEYKVPSKKFKVLGNTDRHSIKKNLIGALLFDSGETAEATRLKRTARRRYTRRKNRICYLQEIFSNEMAKVDDSFFHRLEESFLVEEDKKHERHPIFGNIVDEVAYHEKYPTIYHLRKKLVDSTDKADLRLIYLALAHMIKFRGHFLIEGDLNPDNSDVDKLFIQLVQTYNQLFEENPINASGVDAKAILSARLSKSRRLENLIAQLPGEKKNGLFGNLIALSLGLTPNFKSNFDLAEDAKLQLSKDTYDDDLDNLLAQIGDQYADLFLAAKNLSDAILLSDILRVNTEITKAPLSASMIKRYDEHHQDLTLLKALVRQQLPEKYKEIFFDQSKNGYAGYIDGGASQEEFYKFIKPILEKMDGTEELLVKLNREDLLRKQRTFDNGSIPHQIHLGELHAILRRQEDFYPFLKDNREKIEKILTFRIPYYVGPLARGNSRFAWMTRKSEETITPWNFEEVVDKGASAQSFIERMTNFDKNLPNEKVLPKHSLLYEYFTVYNELTKVKYVTEGMRKPAFLSGEQKKAIVDLLFKTNRKVTVKQLKEDYFKKIECFDSVEISGVEDRFNASLGTYHDLLKIIKDKDFLDNEENEDILEDIVLTLTLFEDREMIEERLKTYAHLFDDKVMKQLKRRRYTGWGRLSRKLINGIRDKQSGKTILDFLKSDGFANRNFMQLIHDDSLTFKEDIQKAQVSGQGDSLHEHIANLAGSPAIKKGILQTVKVVDELVKVMGRHKPENIVIEMARENQTTQKGQKNSRERMKRIEEGIKELGSQILKEHPVENTQLQNEKLYLYYLQNGRDMYVDQELDINRLSDYDVDHIVPQSFLKDDSIDNKVLTRSDKARGKSDNVPSEEVVKKMKNYWRQLLNAKLITQRKFDNLTKAERGGLSELDKAGFIKRQLVETRQITKHVAQILDSRMNTKYDENDKLIREVKVITLKSKLVSDFRKDFQFYKVREINNYHHAHDAYLNAVVGTALIKKYPKLESEFVYGDYKVYDVRKMIAKSEQEIGKATAKYFFYSNIMNFFKTEITLANGEIRKRPLIETNGETGEIVWDKGRDFATVRKVLSMPQVNIVKKTEVQTGGFSKESILPKRNSDKLIARKKDWDPKKYGGFDSPTVAYSVLVVAKVEKGKSKKLKSVKELLGITIMERSSFEKNPIDFLEAKGYKEVKKDLIIKLPKYSLFELENGRKRMLASAGELQKGNELALPSKYVNFLYLASHYEKLKGSPEDNEQKQLFVEQHKHYLDEIIEQISEFSKRVILADANLDKVLSAYNKHRDKPIREQAENIIHLFTLTNLGAPAAFKYFDTTIDRKRYTSTKEVLDATLIHQSITGLYETRIDLSQLGGDGGGGGPAPGGTLGIEDEYRLHETSTEPDVSLGSTWLSDFPQAWAETGGMGLAVRQAPLIIPLKATSTPVSIQQYPMSHEARLGIKPHIQRLLDQGILVPCQSPWNTPLLPVKKPGTNDYRPVQDLREVNKRVEDIHPTVPNPYNLLSGLPPSHQWYTVLDLKDAFFCLRLHPTSQPLFAFEWRDPGMGISGQLTWTRLPQGFKNSPTLFNEALHRDLADFRIQHPDLILLQYVDDILLAATSELDCQQGTRALLQTLGDLGYRASAKKAQICQKQVKYLGYLLREGQRWLTEARKETVMGQPVPKTPRQLREFLGTAGFCRLWIPGFAEMAAPLYPLTKPGTLFSWGPDQQKAYQEIKQALLTAPALGLPDLTKPFELFVDEKQGYAKGVLTQKLGPWRRPVAYLSKKLDPVAAGWPPCLRMVAAIAVLTKDAGKLTMGQPLVILAPHAVEALVKQPPDRWLSNARMTHYQAMLLDTDRVQFGPVVALNPATLLPLPEEGAPHDCLEILAETHGTRPDLTDQPIPDADHTWYTDGSSFLQEGQRKAGAAVTTETEVIWAGALPAGTSAQRAELIALTQALKMAEGKRLNVYTDSRYAFATAHIHGEIYRRRGWLTSEGREIKNKSEILALLKALFLPKRLSIIHCLGHQKGDSAEARGNRLADQAAREAAIKTPPDTSTLLAGKRTADGSEFEKRTADGSEFESPKKKAKVE

SEQ ID NO: 6708 - protein, 2091 aa, synthetic construct
MPAAKRVKLDGGDKKYSIGLDIGTNSVGWAVITDEYKVPSKKFKVLGNTDRHSIKKNLIGALLFDSGETAEATRLKRTARRRYTRRKNRICYLQEIFSNEMAKVDDSFFHRLEESFLVEEDKKHERHPIFGNIVDEVAYHEKYPTIYHLRKKLVDSTDKADLRLIYLALAHMIKFRGHFLIEGDLNPDNSDVDKLFIQLVQTYNQLFEENPINASGVDAKAILSARLSKSRRLENLIAQLPGEKKNGLFGNLIALSLGLTPNFKSNFDLAEDAKLQLSKDTYDDDLDNLLAQIGDQYADLFLAAKNLSDAILLSDILRVNTEITKAPLSASMIKRYDEHHQDLTLLKALVRQQLPEKYKEIFFDQSKNGYAGYIDGGASQEEFYKFIKPILEKMDGTEELLVKLNREDLLRKQRTFDNGSIPHQIHLGELHAILRRQEDFYPFLKDNREKIEKILTFRIPYYVGPLARGNSRFAWMTRKSEETITPWNFEEVVDKGASAQSFIERMTNFDKNLPNEKVLPKHSLLYEYFTVYNELTKVKYVTEGMRKPAFLSGEQKKAIVDLLFKTNRKVTVKQLKEDYFKKIECFDSVEISGVEDRFNASLGTYHDLLKIIKDKDFLDNEENEDILEDIVLTLTLFEDREMIEERLKTYAHLFDDKVMKQLKRRRYTGWGRLSRKLINGIRDKQSGKTILDFLKSDGFANRNFMQLIHDDSLTFKEDIQKAQVSGQGDSLHEHIANLAGSPAIKKGILQTVKVVDELVKVMGRHKPENIVIEMARENQTTQKGQKNSRERMKRIEEGIKELGSQILKEHPVENTQLQNEKLYLYYLQNGRDMYVDQELDINRLSDYDVDHIVPQSFLKDDSIDNKVLTRSDKARGKSDNVPSEEVVKKMKNYWRQLLNAKLITQRKFDNLTKAERGGLSELDKAGFIKRQLVETRQITKHVAQILDSRMNTKYDENDKLIREVKVITLKSKLVSDFRKDFQFYKVREINNYHHAHDAYLNAVVGTALIKKYPKLESEFVYGDYKVYDVRKMIAKSEQEIGKATAKYFFYSNIMNFFKTEITLANGEIRKRPLIETNGETGEIVWDKGRDFATVRKVLSMPQVNIVKKTEVQTGGFSKESILPKRNSDKLIARKKDWDPKKYGGFDSPTVAYSVLVVAKVEKGKSKKLKSVKELLGITIMERSSFEKNPIDFLEAKGYKEVKKDLIIKLPKYSLFELENGRKRMLASAGELQKGNELALPSKYVNFLYLASHYEKLKGSPEDNEQKQLFVEQHKHYLDEIIEQISEFSKRVILADANLDKVLSAYNKHRDKPIREQAENIIHLFTLTNLGAPAAFKYFDTTIDRKRYTSTKEVLDATLIHQSITGLYETRIDLSQLGGDGGGGGPAPGGTLNIEDEHRLHETSKEPDVSLGSTWLSDFPQAWAETGGMGLAVRQAPLIIPLKATSTPVSIKQYPMSQEARLGIKPHIQRLLDQGILVPCQSPWNTPLLPVKKPGTNDYRPVQDLREVNKRVEDIHPTVPNPYNLLSGLPPSHQWYTVLDLKDAFFCLRLHPTSQPLFAFEWRDPEMGISGQLTWTRLPQGFKNSPTLFNEALHRDLADFRIQHPDLILLQYVDDLLLAATSELDCQQGTRALLQTLGNLGYRASAKKAQICQKQVKYLGYLLKEGQRWLTEARKETVMGQPTPKTPRQLREFLGTAGFCRLWIPGFAEMAAPLYPLTKPGTLFNWGPDQQKAYQEIKQALLTAPALGLPDLTKPFELFVDEKQGYAKGVLTQKLGPWRRPVAYLSKKLDPVAAGWPPCLRMVAAIAVLTKDAGKLTMGQPLVILAPHAVEALVKQPPDRWLSNARMTHYQALLLDTDRVQFGPVVALNPATLLPLPEEGLQHNCLDILAEAHGTRPDLTDQPLPDADHTWYTDGSSLLQEGQRKAGAAVTTETEVIWAKALPAGTSAQRAELIALTQALKMAEGKKLNVYTDSRYAFATAHIHGEIYRRRGWLTSEGKEIKNKDEILALLKALFLPKRLSIIHCPGHQKGHSAEARGNRMADQAARKAAITETPDTSTLLAGKRTADGSEFEKRTADGSEFESPKKKAKVE

SEQ ID NO: 6709 - protein, 2091 aa, synthetic construct; identical to SEQ ID NO: 6708

SEQ ID NO: 6710 - protein, 2085 aa, synthetic construct
MPAAKRVKLDGGDKKYSIGLDIGTNSVGWAVITDEYKVPSKKFKVLGNTDRHSIKKNLIGALLFDSGETAEATRLKRTARRRYTRRKNRICYLQEIFSNEMAKVDDSFFHRLEESFLVEEDKKHERHPIFGNIVDEVAYHEKYPTIYHLRKKLVDSTDKADLRLIYLALAHMIKFRGHFLIEGDLNPDNSDVDKLFIQLVQTYNQLFEENPINASGVDAKAILSARLSKSRRLENLIAQLPGEKKNGLFGNLIALSLGLTPNFKSNFDLAEDAKLQLSKDTYDDDLDNLLAQIGDQYADLFLAAKNLSDAILLSDILRVNTEITKAPLSASMIKRYDEHHQDLTLLKALVRQQLPEKYKEIFFDQSKNGYAGYIDGGASQEEFYKFIKPILEKMDGTEELLVKLNREDLLRKQRTFDNGSIPHQIHLGELHAILRRQEDFYPFLKDNREKIEKILTFRIPYYVGPLARGNSRFAWMTRKSEETITPWNFEEVVDKGASAQSFIERMTNFDKNLPNEKVLPKHSLLYEYFTVYNELTKVKYVTEGMRKPAFLSGEQKKAIVDLLFKTNRKVTVKQLKEDYFKKIECFDSVEISGVEDRFNASLGTYHDLLKIIKDKDFLDNEENEDILEDIVLTLTLFEDREMIEERLKTYAHLFDDKVMKQLKRRRYTGWGRLSRKLINGIRDKQSGKTILDFLKSDGFANRNFMQLIHDDSLTFKEDIQKAQVSGQGDSLHEHIANLAGSPAIKKGILQTVKVVDELVKVMGRHKPENIVIEMARENQTTQKGQKNSRERMKRIEEGIKELGSQILKEHPVENTQLQNEKLYLYYLQNGRDMYVDQELDINRLSDYDVDHIVPQSFLKDDSIDNKVLTRSDKARGKSDNVPSEEVVKKMKNYWRQLLNAKLITQRKFDNLTKAERGGLSELDKAGFIKRQLVETRQITKHVAQILDSRMNTKYDENDKLIREVKVITLKSKLVSDFRKDFQFYKVREINNYHHAHDAYLNAVVGTALIKKYPKLESEFVYGDYKVYDVRKMIAKSEQEIGKATAKYFFYSNIMNFFKTEITLANGEIRKRPLIETNGETGEIVWDKGRDFATVRKVLSMPQVNIVKKTEVQTGGFSKESILPKRNSDKLIARKKDWDPKKYGGFDSPTVAYSVLVVAKVEKGKSKKLKSVKELLGITIMERSSFEKNPIDFLEAKGYKEVKKDLIIKLPKYSLFELENGRKRMLASAGELQKGNELALPSKYVNFLYLASHYEKLKGSPEDNEQKQLFVEQHKHYLDEIIEQISEFSKRVILADANLDKVLSAYNKHRDKPIREQAENIIHLFTLTNLGAPAAFKYFDTTIDRKRYTSTKEVLDATLIHQSITGLYETRIDLSQLGGDGGGGGPAPGGTLQLDDEYRLYSPLVKPDQNIQFWLEQFPQAWAETAGMGLAKQVPPQVIQLKASATPVSVRQYPLSKEAQEGIRPHVQRLIQQGILVPVQSPWNTPLLPVRKPGTNDYRPVQDLREVNKRVQDIHPTVPNPYNLLCALPPQRSWYTVLDLKDAFFCLRLHPTSQPLFAFEWRDPGTGRTGQLTWTRLPQGFKNSPTIFDEALHRDLANFRIQHPQVTLLQYVDDLLLAGATKQDCLEGTKALLLELSDLGYRASAKKAQICRREVTYLGYSLRDGQRWLTEARKKTVVQIPAPTTAKQVREFLGTAGFCRLWIPGFATLAAPLYPLTKEKGEFSWAPEHQKAFDAIKKALLSAPALALPDVTKPFTLYVDERKGVARGVLTQTLGPWRRPVAYLSKKLDPVASGWPVCLKAIAAVAILVKDADKLTLGQNITVIAPHALENIVRQPPDRWMTNARMTHYQSLLLTERVTFAPPAALNPATLLPEETDEPVTHDCHQLLIEETGVRKDLTDIPLTGEVLTWFTDGSSYVVEGKRMAGAAVVDGTRTIWASSLPEGTSAQKAELMALTQALRLAEGKSINIYTDSRYAFATAHVHGAIYKQRGLLTSAGREIKNKEEILSLLEALHLPKRLAIIHCPGHQKAKDPISRGNQMADRVAKQAAQGVNLLAGKRTADGSEFEKRTADGSEFESPKKKAKVE

SEQ ID NO: 6711 - protein, 2085 aa, synthetic construct; identical to SEQ ID NO: 6710

SEQ ID NO: 6712 - protein, 2171 aa, synthetic construct
MPAAKRVKLDGGDKKYSIGLDIGTNSVGWAVITDEYKVPSKKFKVLGNTDRHSIKKNLIGALLFDSGETAEATRLKRTARRRYTRRKNRICYLQEIFSNEMAKVDDSFFHRLEESFLVEEDKKHERHPIFGNIVDEVAYHEKYPTIYHLRKKLVDSTDKADLRLIYLALAHMIKFRGHFLIEGDLNPDNSDVDKLFIQLVQTYNQLFEENPINASGVDAKAILSARLSKSRRLENLIAQLPGEKKNGLFGNLIALSLGLTPNFKSNFDLAEDAKLQLSKDTYDDDLDNLLAQIGDQYADLFLAAKNLSDAILLSDILRVNTEITKAPLSASMIKRYDEHHQDLTLLKALVRQQLPEKYKEIFFDQSKNGYAGYIDGGASQEEFYKFIKPILEKMDGTEELLVKLNREDLLRKQRTFDNGSIPHQIHLGELHAILRRQEDFYPFLKDNREKIEKILTFRIPYYVGPLARGNSRFAWMTRKSEETITPWNFEEVVDKGASAQSFIERMTNFDKNLPNEKVLPKHSLLYEYFTVYNELTKVKYVTEGMRKPAFLSGEQKKAIVDLLFKTNRKVTVKQLKEDYFKKIECFDSVEISGVEDRFNASLGTYHDLLKIIKDKDFLDNEENEDILEDIVLTLTLFEDREMIEERLKTYAHLFDDKVMKQLKRRRYTGWGRLSRKLINGIRDKQSGKTILDFLKSDGFANRNFMQLIHDDSLTFKEDIQKAQVSGQGDSLHEHIANLAGSPAIKKGILQTVKVVDELVKVMGRHKPENIVIEMARENQTTQKGQKNSRERMKRIEEGIKELGSQILKEHPVENTQLQNEKLYLYYLQNGRDMYVDQELDINRLSDYDVDHIVPQSFLKDDSIDNKVLTRSDKARGKSDNVPSEEVVKKMKNYWRQLLNAKLITQRKFDNLTKAERGGLSELDKAGFIKRQLVETRQITKHVAQILDSRMNTKYDENDKLIREVKVITLKSKLVSDFRKDFQFYKVREINNYHHAHDAYLNAVVGTALIKKYPKLESEFVYGDYKVYDVRKMIAKSEQEIGKATAKYFFYSNIMNFFKTEITLANGEIRKRPLIETNGETGEIVWDKGRDFATVRKVLSMPQVNIVKKTEVQTGGFSKESILPKRNSDKLIARKKDWDPKKYGGFDSPTVAYSVLVVAKVEKGKSKKLKSVKELLGITIMERSSFEKNPIDFLEAKGYKEVKKDLIIKLPKYSLFELENGRKRMLASAGELQKGNELALPSKYVNFLYLASHYEKLKGSPEDNEQKQLFVEQHKHYLDEIIEQISEFSKRVILADANLDKVLSAYNKHRDKPIREQAENIIHLFTLTNLGAPAAFKYFDTTIDRKRYTSTKEVLDATLIHQSITGLYETRIDLSQLGGDGGGGGPAPGGMDPLQLLQPLEAEIKGTKLKAHWNSGATITCVPEAFLEDERPIQTMLIKTIHGEKQQDVYYLTFKVQGRKVEAEVLASPYDYILLNPSDVPWLMKKPLQLTVLVPLHEYQERLLQQTALPKEQKELLQKLFLKYDALWQHWENQVGHRRIKPHNIATGTLAPRPQKQYPINPKAKPSIQIVIDDLLKQGVLIQQNSTMNTPVYPVPKPDGKWRMVLDYREVNKTIPLIAAQNQHSAGILSSIYRGKYKTTLDLTNGFWAHPITPESYWLTAFTWQGKQYCWTRLPQGFLNSPALFNADVVDLLKEIPNVQAYVDDIYISHDDPQEHLEQLEKIFSILLNAGYVVSLKKSEIAQREVEFLGFNITKEGRGLTDTFKQKLLNITPPKDLKQLQSILGKLNFARNFIPNYSELVKPLYTIVAPANGKFISWTEDNSNQLQHIISVLNQADNLEERNPETRLIIKVNSSPSAGYIRYYNEGSKRPIMYVNYIFSKAEAKFTQTEKLLTTMHKGLIKAMDLAMGQEILVYSPIVSMTKIQRTPLPERKALPVRWITWMTYLEDPRIQFHYDKSLPELQQIPNVTEDVIAKTKHPSEFAMVFYTDGSAIKHPDVNKSHSAGMGIAQVQFIPEYKIVHQWSIPLGDHTAQLAEIAAVEFACKKALKISGPVLIVTDSFYVAESANKELPYWKSNGFLNNKKKPLRHVSKWKSIAECLQLKPDIIIMHEKGHQQPMTTLHTEGNNLADKLATQGSYVVHAGKRTADGSEFEKRTADGSEFESPKKKAKVE

SEQ ID NO: 6713 - protein, 2082 aa, synthetic construct
MPAAKRVKLDGGDKKYSIGLDIGTNSVGWAVITDEYKVPSKKFKVLGNTDRHSIKKNLIGALLFDSGETAEATRLKRTARRRYTRRKNRICYLQEIFSNEMAKVDDSFFHRLEESFLVEEDKKHERHPIFGNIVDEVAYHEKYPTIYHLRKKLVDSTDKADLRLIYLALAHMIKFRGHFLIEGDLNPDNSDVDKLFIQLVQTYNQLFEENPINASGVDAKAILSARLSKSRRLENLIAQLPGEKKNGLFGNLIALSLGLTPNFKSNFDLAEDAKLQLSKDTYDDDLDNLLAQIGDQYADLFLAAKNLSDAILLSDILRVNTEITKAPLSASMIKRYDEHHQDLTLLKALVRQQLPEKYKEIFFDQSKNGYAGYIDGGASQEEFYKFIKPILEKMDGTEELLVKLNREDLLRKQRTFDNGSIPHQIHLGELHAILRRQEDFYPFLKDNREKIEKILTFRIPYYVGPLARGNSRFAWMTRKSEETITPWNFEEVVDKGASAQSFIERMTNFDKNLPNEKVLPKHSLLYEYFTVYNELTKVKYVTEGMRKPAFLSGEQKKAIVDLLFKTNRKVTVKQLKEDYFKKIECFDSVEISGVEDRFNASLGTYHDLLKIIKDKDFLDNEENEDILEDIVLTLTLFEDREMIEERLKTYAHLFDDKVMKQLKRRRYTGWGRLSRKLINGIRDKQSGKTILDFLKSDGFANRNFMQLIHDDSLTFKEDIQKAQVSGQGDSLHEHIANLAGSPAIKKGILQTVKVVDELVKVMGRHKPENIVIEMARENQTTQKGQKNSRERMKRIEEGIKELGSQILKEHPVENTQLQNEKLYLYYLQNGRDMYVDQELDINRLSDYDVDHIVPQSFLKDDSIDNKVLTRSDKARGKSDNVPSEEVVKKMKNYWRQLLNAKLITQRKFDNLTKAERGGLSELDKAGFIKRQLVETRQITKHVAQILDSRMNTKYDENDKLIREVKVITLKSKLVSDFRKDFQFYKVREINNYHHAHDAYLNAVVGTALIKKYPKLESEFVYGDYKVYDVRKMIAKSEQEIGKATAKYFFYSNIMNFFKTEITLANGEIRKRPLIETNGETGEIVWDKGRDFATVRKVLSMPQVNIVKKTEVQTGGFSKESILPKRNSDKLIARKKDWDPKKYGGFDSPTVAYSVLVVAKVEKGKSKKLKSVKELLGITIMERSSFEKNPIDFLEAKGYKEVKKDLIIKLPKYSLFELENGRKRMLASAGELQKGNELALPSKYVNFLYLASHYEKLKGSPEDNEQKQLFVEQHKHYLDEIIEQISEFSKRVILADANLDKVLSAYNKHRDKPIREQAENIIHLFTLTNLGAPAAFKYFDTTIDRKRYTSTKEVLDATLIHQSITGLYETRIDLSQLGGDGGGGGPAPGGIPWLMKKPLQLTTLVPLQEYEERLLKQTMLTGSYKEKLQSLFLKYDALWQHWENQVGHRRIKPHHIATGTVNPRPQKQYPINPKAKASIQTVINDLLKQGVLIQQNSIMNTPVYPVPKPDGKWRMVLDYREVNKTIPLIAAQNQHSAGILSSIFRGKYKTTLDLSNGFWAHSITPESYWLTAFTWLGQQYCWTRLPQGFLNSPALFNADVVDLLKEVPNVQVYVDDIYISHDDPREHLEQLEKVFSLLLNAGYVVSLKKSEIAQHEVEFLGFNITKEGRGLTETFKQKLLNITPPRDLKQLQSILGLLNFARNFIPNFSELVKPLYNIIATAPGKYITWTTDNSQQLQNIISMLNSAENLEERNPEVRLIMKVNTSPSAGYIRFYNEFAKRPIMYLNYVYTKAEVKFTNTEKLLTTIHKGLIKALDLGMGQEILVYSPIVSMTKIQKTPLPERKALPIRWITWMSYLEDPRIQFHYDKTLPELQQVPTVTDDIIAKIKHPSEFSMVFYTDGSAIKHPNVNKSHNAGMGIAQVQFKPEFTVINTWSIPLGDHTAQLAEVAAVEFACKKALKIDGPVLIVTDSFYVAESVNKELPYWQSNGFFNNKKKPLKHVSKWKSIADCIQLKPDIIIIHEKGHQPTASTFHTEGNNLADKLATQGSYVVNAGKRTADGSEFEKRTADGSEFESPKKKAKVE

SEQ ID NO: 6714 - protein, 2171 aa, synthetic construct
MPAAKRVKLDGGDKKYSIGLDIGTNSVGWAVITDEYKVPSKKFKVLGNTDRHSIKKNLIGALLFDSGETAEATRLKRTARRRYTRRKNRICYLQEIFSNEMAKVDDSFFHRLEESFLVEEDKKHERHPIFGNIVDEVAYHEKYPTIYHLRKKLVDSTDKADLRLIYLALAHMIKFRGHFLIEGDLNPDNSDVDKLFIQLVQTYNQLFEENPINASGVDAKAILSARLSKSRRLENLIAQLPGEKKNGLFGNLIALSLGLTPNFKSNFDLAEDAKLQLSKDTYDDDLDNLLAQIGDQYADLFLAAKNLSDAILLSDILRVNTEITKAPLSASMIKRYDEHHQDLTLLKALVRQQLPEKYKEIFFDQSKNGYAGYIDGGASQEEFYKFIKPILEKMDGTEELLVKLNREDLLRKQRTFDNGSIPHQIHLGELHAILRRQEDFYPFLKDNREKIEKILTFRIPYYVGPLARGNSRFAWMTRKSEETITPWNFEEVVDKGASAQSFIERMTNFDKNLPNEKVLPKHSLLYEYFTVYNELTKVKYVTEGMRKPAFLSGEQKKAIVDLLFKTNRKVTVKQLKEDYFKKIECFDSVEISGVEDRFNASLGTYHDLLKIIKDKDFLDNEENEDILEDIVLTLTLFEDREMIEERLKTYAHLFDDKVMKQLKRRRYTGWGRLSRKLINGIRDKQSGKTILDFLKSDGFANRNFMQLIHDDSLTFKEDIQKAQVSGQGDSLHEHIANLAGSPAIKKGILQTVKVVDELVKVMGRHKPENIVIEMARENQTTQKGQKNSRERMKRIEEGIKELGSQILKEHPVENTQLQNEKLYLYYLQNGRDMYVDQELDINRLSDYDVDHIVPQSFLKDDSIDNKVLTRSDKARGKSDNVPSEEVVKKMKNYWRQLLNAKLITQRKFDNLTKAERGGLSELDKAGFIKRQLVETRQITKHVAQILDSRMNTKYDENDKLIREVKVITLKSKLVSDFRKDFQFYKVREINNYHHAHDAYLNAVVGTALIKKYPKLESEFVYGDYKVYDVRKMIAKSEQEIGKATAKYFFYSNIMNFFKTEITLANGEIRKRPLIETNGETGEIVWDKGRDFATVRKVLSMPQVNIVKKTEVQTGGFSKESILPKRNSDKLIARKKDWDPKKYGGFDSPTVAYSVLVVAKVEKGKSKKLKSVKELLGITIMERSSFEKNPIDFLEAKGYKEVKKDLIIKLPKYSLFELENGRKRMLASAGELQKGNELALPSKYVNFLYLASHYEKLKGSPEDNEQKQLFVEQHKHYLDEIIEQISEFSKRVILADANLDKVLSAYNKHRDKPIREQAENIIHLFTLTNLGAPAAFKYFDTTIDRKRYTSTKEVLDATLIHQSITGLYETRIDLSQLGGDGGGGGPAPGGMNPLQLLQPLPAEVKGTKLLAHWNSGATITCIPESFLEDEQPIKQTLIKTIHGEKQQNVYYLTFKVKGRKVEAEVIASPYEYILLSPTDVPWLTQQPLQLTILVPLQEYQDRILNKTALPEEQKQQLKALFTKYDNLWQHWENQVGHRKIRPHNIATGDYPPRPQKQYPINPKAKPSIQIVIDDLLKQGVLTPQNSTMNTPVYPVPKPDGRWRMVLDYREVNKTIPLTAAQNQHSAGILATIVRQKYKTTLDLANGFWAHPITPDSYWLTAFTWQGKQYCWTRLPQGFLNSPALFTADAVDLLKEVPNVQVYVDDIYLSHDNPHEHIQQLEKVFQILLQAGYVVSLKKSEIGQRTVEFLGFNITKEGRGLTDTFKTKLLNVTPPKDLKQLQSILGLLNFARNFIPNFAELVQTLYNLIASSKGKYIEWTEDNTKQLNKVIEALNTASNLEERLPDQRLVIKVNTSPSAGYVRYYNESGKKPIMYLNYVFSKAELKFSMLEKLLTTMHKALIKAMDLAMGQEILVYSPIVSMTKIQKTPLPERKALPIRWITWMTYLEDPRIQFHYDKTLPELKHIPDVYTSSIPPLKHPSQYEGVFCTDGSAIKSPDPTKSNNAGMGIVHAIYNPEYKILNQWSIPLGHHTAQMAEIAAVEFACKKALKVPGPVLVITDSFYVAESANKELPYWKSNGFVNNKKEPLKHISKWKSIAECLSIKPDITIQHEKGHQPINTSIHTEGNALADKLATQGSYVVNAGKRTADGSEFEKRTADGSEFESPKKKAKVE

SEQ ID NO: 6715 - protein, 2089 aa, synthetic construct
MPAAKRVKLDGGDKKYSIGLDIGTNSVGWAVITDEYKVPSKKFKVLGNTDRHSIKKNLIGALLFDSGETAEATRLKRTARRRYTRRKNRICYLQEIFSNEMAKVDDSFFHRLEESFLVEEDKKHERHPIFGNIVDEVAYHEKYPTIYHLRKKLVDSTDKADLRLIYLALAHMIKFRGHFLIEGDLNPDNSDVDKLFIQLVQTYNQLFEENPINASGVDAKAILSARLSKSRRLENLIAQLPGEKKNGLFGNLIALSLGLTPNFKSNFDLAEDAKLQLSKDTYDDDLDNLLAQIGDQYADLFLAAKNLSDAILLSDILRVNTEITKAPLSASMIKRYDEHHQDLTLLKALVRQQLPEKYKEIFFDQSKNGYAGYIDGGASQEEFYKFIKPILEKMDGTEELLVKLNREDLLRKQRTFDNGSIPHQIHLGELHAILRRQEDFYPFLKDNREKIEKILTFRIPYYVGPLARGNSRFAWMTRKSEETITPWNFEEVVDKGASAQSFIERMTNFDKNLPNEKVLPKHSLLYEYFTVYNELTKVKYVTEGMRKPAFLSGEQKKAIVDLLFKTNRKVTVKQLKEDYFKKIECFDSVEISGVEDRFNASLGTYHDLLKIIKDKDFLDNEENEDILEDIVLTLTLFEDREMIEERLKTYAHLFDDKVMKQLKRRRYTGWGRLSRKLINGIRDKQSGKTILDFLKSDGFANRNFMQLIHDDSLTFKEDIQKAQVSGQGDSLHEHIANLAGSPAIKKGILQTVKVVDELVKVMGRHKPENIVIEMARENQTTQKGQKNSRERMKRIEEGIKELGSQILKEHPVENTQLQNEKLYLYYLQNGRDMYVDQELDINRLSDYDVDHIVPQSFLKDDSIDNKVLTRSDKARGKSDNVPSEEVVKKMKNYWRQLLNAKLITQRKFDNLTKAERGGLSELDKAGFIKRQLVETRQITKHVAQILDSRMNTKYDENDKLIREVKVITLKSKLVSDFRKDFQFYKVREINNYHHAHDAYLNAVVGTALIKKYPKLESEFVYGDYKVYDVRKMIAKSEQEIGKATAKYFFYSNIMNFFKTEITLANGEIRKRPLIETNGETGEIVWDKGRDFATVRKVLSMPQVNIVKKTEVQTGGFSKESILPKRNSDKLIARKKDWDPKKYGGFDSPTVAYSVLVVAKVEKGKSKKLKSVKELLGITIMERSSFEKNPIDFLEAKGYKEVKKDLIIKLPKYSLFELENGRKRMLASAGELQKGNELALPSKYVNFLYLASHYEKLKGSPEDNEQKQLFVEQHKHYLDEIIEQISEFSKRVILADANLDKVLSAYNKHRDKPIREQAENIIHLFTLTNLGAPAAFKYFDTTIDRKRYTSTKEVLDATLIHQSITGLYETRIDLSQLGGDGGGGGPAPGGVLNLEEEYRLHEKPVPSSIDPSWLQLFPTVWAERAGMGLANQVPPVVVELRSGASPVAVRQYPMSKEAREGIRPHIQRFLDLGVLVPCQSPWNTPLLPVKKPGTNDYRPVQDLREINKRVQDIHPTVPNPYNLLSSLPPSHTWYSVLDLKDAFFCLKLHPNSQPLFAFEWRDPEKGNTGQLTWTRLPQGFKNSPTLFNEALHRDLAPFRALNPQVVLLQYVDDLLVAAPTYRDCKEGTQKLLQELSKLGYRVSAKKAQLCQKEVTYLGYLLKEGKRWLTPARKATVMKIPPPTTPRQVREFLGTAGFCRLWIPGFASLAAPLYPLTKPSIPFIWTEEHQKAFDRIKEALLSAPALALPDLTKPFTLYVDERAGVARGVLTQTLGPWRRPVAYLSKKLDPVASGWPTCLKAVAAVALLLKDADKLTLGQNVTVIASHSLESIVRQPPDRWMTNARMTHYQSLLLNERVSFAPPAVLNPATLLPVESEATPVHRCSEILAEETGTRRDLKDQPLPGVPAWYTDGSSFIAEGKRRAGAAIVDGKRTVWASSLPEGTSAQKAELVALTQALRLAEGKDINIYTDSRYAFATAHIHGAIYKQRGWLTSAGKDIKNKEEILALLEAIHLPKRVAIIHCPGHQKGNDPVATGNRRADEAAKQAALSTRVLAETTKPAGKRTADGSEFEKRTADGSEFESPKKKAKVE

SEQ ID NO: 6716 - protein, 2091 aa, synthetic construct
MPAAKRVKLDGGDKKYSIGLDIGTNSVGWAVITDEYKVPSKKFKVLGNTDRHSIKKNLIGALLFDSGETAEATRLKRTARRRYTRRKNRICYLQEIFSNEMAKVDDSFFHRLEESFLVEEDKKHERHPIFGNIVDEVAYHEKYPTIYHLRKKLVDSTDKADLRLIYLALAHMIKFRGHFLIEGDLNPDNSDVDKLFIQLVQTYNQLFEENPINASGVDAKAILSARLSKSRRLENLIAQLPGEKKNGLFGNLIALSLGLTPNFKSNFDLAEDAKLQLSKDTYDDDLDNLLAQIGDQYADLFLAAKNLSDAILLSDILRVNTEITKAPLSASMIKRYDEHHQDLTLLKALVRQQLPEKYKEIFFDQSKNGYAGYIDGGASQEEFYKFIKPILEKMDGTEELLVKLNREDLLRKQRTFDNGSIPHQIHLGELHAILRRQEDFYPFLKDNREKIEKILTFRIPYYVGPLARGNSRFAWMTRKSEETITPWNFEEVVDKGASAQSFIERMTNFDKNLPNEKVLPKHSLLYEYFTVYNELTKVKYVTEGMRKPAFLSGEQKKAIVDLLFKTNRKVTVKQLKEDYFKKIECFDSVEISGVEDRFNASLGTYHDLLKIIKDKDFLDNEENEDILEDIVLTLTLFEDREMIEERLKTYAHLFDDKVMKQLKRRRYTGWGRLSRKLINGIRDKQSGKTILDFLKSDGFANRNFMQLIHDDSLTFKEDIQKAQVSGQGDSLHEHIANLAGSPAIKKGILQTVKVVDELVKVMGRHKPENIVIEMARENQTTQKGQKNSRERMKRIEEGIKELGSQILKEHPVENTQLQNEKLYLYYLQNGRDMYVDQELDINRLSDYDVDHIVPQSFLKDDSIDNKVLTRSDKARGKSDNVPSEEVVKKMKNYWRQLLNAKLITQRKFDNLTKAERGGLSELDKAGFIKRQLVETRQITKHVAQILDSRMNTKYDENDKLIREVKVITLKSKLVSDFRKDFQFYKVREINNYHHAHDAYLNAVVGTALIKKYPKLESEFVYGDYKVYDVRKMIAKSEQEIGKATAKYFFYSNIMNFFKTEITLANGEIRKRPLIETNGETGEIVWDKGRDFATVRKVLSMPQVNIVKKTEVQTGGFSKESILPKRNSDKLIARKKDWDPKKYGGFDSPTVAYSVLVVAKVEKGKSKKLKSVKELLGITIMERSSFEKNPIDFLEAKGYKEVKKDLIIKLPKYSLFELENGRKRMLASAGELQKGNELALPSKYVNFLYLASHYEKLKGSPEDNEQKQLFVEQHKHYLDEIIEQISEFSKRVILADANLDKVLSAYNKHRDKPIREQAENIIHLFTLTNLGAPAAFKYFDTTIDRKRYTSTKEVLDATLIHQSITGLYETRIDLSQLGGDGGGGGPAPGGTLNIEDEYRLHETSKEPDVPLGSTWLSDFPQAWAETGGMGLAVRQAPLIIPLKATSTPVSIKQYPMSQEARLGIKPHIQRLLDQGILVPCQSPWNTPLLPVKKPGTNDYRPVQDLREVNKRVEDIHPTVPNPYNLLSGLPPSHQWYTVLDLKDAFFCLRLHPTSQPLFAFEWRDPEMGISGQLTWTRLPQGFKNSPTLFNEALHRDLADFRIQHPDLILLQYVDDLLLAATSEQDCQRGTRALLQTLGNLGYRASAKKAQICQKQVKYLGYLLKEGQRWLTEARKETVMGQPTPKTPRQLREFLGTAGFCRLWIPGFAEMAAPLYPLTKPGTLFNWGPDQQKAYQEIKQALLTAPALGLPDLTKPFELFVDEKQGYAKGVLTQKLGPWRRPVAYLSKKLDPVAAGWPPCLRMVAAIAVLTKDAGKLTMGQPLVILAPHAVEALVKQPPDRWLSNARMTHYQAMLLDTDRVQFGPVVALNPATLLPLPEKEAPHDCLEILAETHGTRPDLTDQPIPDADYTWYTDGSSFLQEGQRRAGAAVTTETEVIWARALPAGTSAQRAELIALTQALKMAEGKKLNVYTDSRYAFATAHVHGEIYRRRGWLTSEGREIKNKNEILALLKALFLPKRLSIIHCPGHQKGNSAEARGNRMADQAAREAAMKAVLETSTLLAGKRTADGSEFEKRTADGSEFESPKKKAKVE

SEQ ID NO: 6717 - protein, 2091 aa, synthetic construct
MPAAKRVKLDGGDKKYSIGLDIGTNSVGWAVITDEYKVPSKKFKVLGNTDRHSIKKNLIGALLFDSGETAEATRLKRTARRRYTRRKNRICYLQEIFSNEMAKVDDSFFHRLEESFLVEEDKKHERHPIFGNIVDEVAYHEKYPTIYHLRKKLVDSTDKADLRLIYLALAHMIKFRGHFLIEGDLNPDNSDVDKLFIQLVQTYNQLFEENPINASGVDAKAILSARLSKSRRLENLIAQLPGEKKNGLFGNLIALSLGLTPNFKSNFDLAEDAKLQLSKDTYDDDLDNLLAQIGDQYADLFLAAKNLSDAILLSDILRVNTEITKAPLSASMIKRYDEHHQDLTLLKALVRQQLPEKYKEIFFDQSKNGYAGYIDGGASQEEFYKFIKPILEKMDGTEELLVKLNREDLLRKQRTFDNGSIPHQIHLGELHAILRRQEDFYPFLKDNREKIEKILTFRIPYYVGPLARGNSRFAWMTRKSEETITPWNFEEVVDKGASAQSFIERMTNFDKNLPNEKVLPKHSLLYEYFTVYNELTKVKYVTEGMRKPAFLSGEQKKAIVDLLFKTNRKVTVKQLKEDYFKKIECFDSVEISGVEDRFNASLGTYHDLLKIIKDKDFLDNEENEDILEDIVLTLTLFEDREMIEERLKTYAHLFDDKVMKQLKRRRYTGWGRLSRKLINGIRDKQSGKTILDFLKSDGFANRNFMQLIHDDSLTFKEDIQKAQVSGQGDSLHEHIANLAGSPAIKKGILQTVKVVDELVKVMGRHKPENIVIEMARENQTTQKGQKNSRERMKRIEEGIKELGSQILKEHPVENTQLQNEKLYLYYLQNGRDMYVDQELDINRLSDYDVDHIVPQSFLKDDSIDNKVLTRSDKARGKSDNVPSEEVVKKMKNYWRQLLNAKLITQRKFDNLTKAERGGLSELDKAGFIKRQLVETRQITKHVAQILDSRMNTKYDENDKLIREVKVITLKSKLVSDFRKDFQFYKVREINNYHHAHDAYLNAVVGTALIKKYPKLESEFVYGDYKVYDVRKMIAKSEQEIGKATAKYFFYSNIMNFFKTEITLANGEIRKRPLIETNGETGEIVWDKGRDFATVRKVLSMPQVNIVKKTEVQTGGFSKESILPKRNSDKLIARKKDWDPKKYGGFDSPTVAYSVLVVAKVEKGKSKKLKSVKELLGITIMERSSFEKNPIDFLEAKGYKEVKKDLIIKLPKYSLFELENGRKRMLASAGELQKGNELALPSKYVNFLYLASHYEKLKGSPEDNEQKQLFVEQHKHYLDEIIEQISEFSKRVILADANLDKVLSAYNKHRDKPIREQAENIIHLFTLTNLGAPAAFKYFDTTIDRKRYTSTKEVLDATLIHQSITGLYETRIDLSQLGGDGGGGGPAPGGTLNIEDEYRLHETSKEPDVPLGSTWLSDFPQAWAETGGMGLAVRQAPLIIPLKATSTPVSIKQYPMSQEARLGIKPHIQRLLDQGILVPCQSPWNTPLLPVKKPGTNDYRPVQDLREVNKRVEDIHPTVPNPYNLLSGLPPSHQWYTVLDLKDAFFCLRLHPTSQPLFAFEWRDPEMGISGQLTWTRLPQGFKNSPTLFNEALHRDLADFRIQHPDLILLQYVDDLLLAATSEQDCQRGTRALLQTLGNLGYRASAKKAQICQKQVKYLGYLLKEGQRWLTEARKETVMGQPTPKTPRQLREFLGKAGFCRLFIPGFAEMAAPLYPLTKPGTLFNWGPDQQKAYQEIKQALLTAPALGLPDLTKPFELFVDEKQGYAKGVLTQKLGPWRRPVAYLSKKLDPVAAGWPPCLRMVAAIAVLTKDAGKLTMGQPLVILAPHAVEALVKQPPDRWLSNARMTHYQAMLLDTDRVQFGPVVALNPATLLPLPEKEAPHDCLEILAETHGTRPDLTDQPIPDADYTWYTDGSSFLQEGQRRAGAAVTTETEVIWARALPAGTSAQRAELIALTQALKMAEGKKLNVYTDSRYAFATAHVHGEIYRRRGWLTSEGREIKNKNEILALLKALFLPKRLSIIHCPGHQKGNSAEARGNRMADQAAREAAMKAVLETSTLLAGKRTADGSEFEKRTADGSEFESPKKKAKVE

SEQ ID NO: 6718 - protein, 2122 aa, synthetic construct
MPAAKRVKLDGGDKKYSIGLDIGTNSVGWAVITDEYKVPSKKFKVLGNTDRHSIKKNLIGALLFDSGETAEATRLKRTARRRYTRRKNRICYLQEIFSNEMAKVDDSFFHRLEESFLVEEDKKHERHPIFGNIVDEVAYHEKYPTIYHLRKKLVDSTDKADLRLIYLALAHMIKFRGHFLIEGDLNPDNSDVDKLFIQLVQTYNQLFEENPINASGVDAKAILSARLSKSRRLENLIAQLPGEKKNGLFGNLIALSLGLTPNFKSNFDLAEDAKLQLSKDTYDDDLDNLLAQIGDQYADLFLAAKNLSDAILLSDILRVNTEITKAPLSASMIKRYDEHHQDLTLLKALVRQQLPEKYKEIFFDQSKNGYAGYIDGGASQEEFYKFIKPILEKMDGTEELLVKLNREDLLRKQRTFDNGSIPHQIHLGELHAILRRQEDFYPFLKDNREKIEKILTFRIPYYVGPLARGNSRFAWMTRKSEETITPWNFEEVVDKGASAQSFIERMTNFDKNLPNEKVLPKHSLLYEYFTVYNELTKVKYVTEGMRKPAFLSGEQKKAIVDLLFKTNRKVTVKQLKEDYFKKIECFDSVEISGVEDRFNASLGTYHDLLKIIKDKDFLDNEENEDILEDIVLTLTLFEDREMIEERLKTYAHLFDDKVMKQLKRRRYTGWGRLSRKLINGIRDKQSGKTILDFLKSDGFANRNFMQLIHDDSLTFKEDIQKAQVSGQGDSLHEHIANLAGSPAIKKGILQTVKVVDELVKVMGRHKPENIVIEMARENQTTQKGQKNSRERMKRIEEGIKELGSQILKEHPVENTQLQNEKLYLYYLQNGRDMYVDQELDINRLSDYDVDHIVPQSFLKDDSIDNKVLTRSDKARGKSDNVPSEEVVKKMKNYWRQLLNAKLITQRKFDNLTKAERGGLSELDKAGFIKRQLVETRQITKHVAQILDSRMNTKYDENDKLIREVKVITLKSKLVSDFRKDFQFYKVREINNYHHAHDAYLNAVVGTALIKKYPKLESEFVYGDYKVYDVRKMIAKSEQEIGKATAKYFFYSNIMNFFKTEITLANGEIRKRPLIETNGETGEIVWDKGRDFATVRKVLSMPQVNIVKKTEVQTGGFSKESILPKRNSDKLIARKKDWDPKKYGGFDSPTVAYSVLVVAKVEKGKSKKLKSVKELLGITIMERSSFEKNPIDFLEAKGYKEVKKDLIIKLPKYSLFELENGRKRMLASAGELQKGNELALPSKYVNFLYLASHYEKLKGSPEDNEQKQLFVEQHKHYLDEIIEQISEFSKRVILADANLDKVLSAYNKHRDKPIREQAENIIHLFTLTNLGAPAAFKYFDTTIDRKRYTSTKEVLDATLIHQSITGLYETRIDLSQLGGDGGPAPGGGGGLLGRDLLTKLKAQIQFSTEGPQVTWEDRPAMCLVLNLEEEYRLHEKPVPPSIDPSWLQLFPMVWAEKAGMGLANQVPPVVVELKSDASPVAVRQYPMSKEAREGIRPHIQRFLDLGILVPCQSPWNTPLLPVKKPGTNDYRPVQDLREVNKRVQDIHPTVPNPYNLLSSLPPSHTWYSVLDLKDAFFCLKLHPNSQPLFAFEWRDPEKGNTGQLTWTRLPQGFKNSPTLFNEALHRDLASFRALNPQVVMLQYVDDLLVAAPTYRDCKEGTRRLLQELSKLGYRVSAKKAQLCREEVTYLGYLLKGGKRWLTPARKATVMKIPTPTTPRQVREFLGTAGFCRLWIPGFASLAAPLYPLTRPKVPFTWTEAHQEAFGRIKEALLSAPALALPDLTKPFALYVDEKEGVARGVLTQTLGPWRRPVAYLSKKLDPVASGWPTCLKAIAAVALLLKDADKLTLGQNVLVIAPHNLESIVRQPPDRWMTNARMTHYQSLLLNERVSFAPPAILNPATLLPVESDDTPIHICSEILAEETGTRPDLRDQPLPGVPAWYTDGSSFIMDGRRQAGAAIVDNKRTVWASNLPEGTSAQKAELIALTQALRLAEGKSINIYTDSRYAFATAHVHGAIYKQRGWLTSAGKDIKNKEEILALLEAIHLPKRVAIIHCPGHQRGTDPVATGNRKADEAAKQAAQSTRILTETTKNAGKRTADGSEFEKRTADGSEFESPKKKAKVE

SEQ ID NO: 6719 - protein, 2122 aa, synthetic construct
MPAAKRVKLDGGDKKYSIGLDIGTNSVGWAVITDEYKVPSKKFKVLGNTDRHSIKKNLIGALLFDSGETAEATRLKRTARRRYTRRKNRICYLQEIFSNEMAKVDDSFFHRLEESFLVEEDKKHERHPIFGNIVDEVAYHEKYPTIYHLRKKLVDSTDKADLRLIYLALAHMIKFRGHFLIEGDLNPDNSDVDKLFIQLVQTYNQLFEENPINASGVDAKAILSARLSKSRRLENLIAQLPGEKKNGLFGNLIALSLGLTPNFKSNFDLAEDAKLQLSKDTYDDDLDNLLAQIGDQYADLFLAAKNLSDAILLSDILRVNTEITKAPLSASMIKRYDEHHQDLTLLKALVRQQLPEKYKEIFFDQSKNGYAGYIDGGASQEEFYKFIKPILEKMDGTEELLVKLNREDLLRKQRTFDNGSIPHQIHLGELHAILRRQEDFYPFLKDNREKIEKILTFRIPYYVGPLARGNSRFAWMTRKSEETITPWNFEEVVDKGASAQSFIERMTNFDKNLPNEKVLPKHSLLYEYFTVYNELTKVKYVTEGMRKPAFLSGEQKKAIVDLLFKTNRKVTVKQLKEDYFKKIECFDSVEISGVEDRFNASLGTYHDLLKIIKDKDFLDNEENEDILEDIVLTLTLFEDREMIEERLKTYAHLFDDKVMKQLKRRRYTGWGRLSRKLINGIRDKQSGKTILDFLKSDGFANRNFMQLIHDDSLTFKEDIQKAQVSGQGDSLHEHIANLAGSPAIKKGILQTVKVVDELVKVMGRHKPENIVIEMARENQTTQKGQKNSRERMKRIEEGIKELGSQILKEHPVENTQLQNEKLYLYYLQNGRDMYVDQELDINRLSDYDVDHIVPQSFLKDDSIDNKVLTRSDKARGKSDNVPSEEVVKKMKNYWRQLLNAKLITQRKFDNLTKAERGGLSELDKAGFIKRQLVETRQITKHVAQILDSRMNTKYDENDKLIREVKVITLKSKLVSDFRKDFQFYKVREINNYHHAHDAYLNAVVGTALIKKYPKLESEFVYGDYKVYDVRKMIAKSEQEIGKATAKYFFYSNIMNFFKTEITLANGEIRKRPLIETNGETGEIVWDKGRDFATVRKVLSMPQVNIVKKTEVQTGGFSKESILPKRNSDKLIARKKDWDPKKYGGFDSPTVAYSVLVVAKVEKGKSKKLKSVKELLGITIMERSSFEKNPIDFLEAKGYKEVKKDLIIKLPKYSLFELENGRKRMLASAGELQKGNELALPSKYVNFLYLASHYEKLKGSPEDNEQKQLFVEQHKHYLDEIIEQISEFSKRVILADANLDKVLSAYNKHRDKPIREQAENIIHLFTLTNLGAPAAFKYFDTTIDRKRYTSTKEVLDATLIHQSITGLYETRIDLSQLGGDGGPAPGGGGGLLGRDLLTKLKAQIQFSTEGPQVTWEDRPAMCLVLNLEEEYRLHEKPVPPSIDPSWLQLFPMVWAEKAGMGLANQVPPVVVELKSDASPVAVRQYPMSKEAREGIRPHIQRFLDLGILVPCQSPWNTPLLPVKKPGTNDYRPVQDLREVNKRVQDIHPTVPNPYNLLSSLPPSHTWYSVLDLKDAFFCLKLHPNSQPLFAFEWRDPEKGNTGQLTWTRLPQGFKNSPTLFNEALHRDLASFRALNPQVVMLQYVDDLLVAAPTYRDCKEGTRRLLQELSKLGYRVSAKKAQLCREEVTYLGYLLKGGKRWLTPARKATVMKIPTPTTPRQVREFLGKAGFCRLFIPGFASLAAPLYPLTRPKVPFTWTEAHQEAFGRIKEALLSAPALALPDLTKPFALYVDEKEGVARGVLTQTLGPWRRPVAYLSKKLDPVASGWPTCLKAIAAVALLLKDADKLTLGQNVLVIAPHNLESIVRQPPDRWMTNARMTHYQSLLLNERVSFAPPAILNPATLLPVESDDTPIHICSEILAEETGTRPDLRDQPLPGVPAWYTDGSSFIMDGRRQAGAAIVDNKRTVWASNLPEGTSAQKAELIALTQALRLAEGKSINIYTDSRYAFATAHVHGAIYKQRGWLTSAGKDIKNKEEILALLEAIHLPKRVAIIHCPGHQRGTDPVATGNRKADEAAKQAAQSTRILTETTKNAGKRTADGSEFEKRTADGSEFESPKKKAKVE

SEQ ID NO: 6720 - protein, 2213 aa, synthetic construct
MPAAKRVKLDGGDKKYSIGLDIGTNSVGWAVITDEYKVPSKKFKVLGNTDRHSIKKNLIGALLFDSGETAEATRLKRTARRRYTRRKNRICYLQEIFSNEMAKVDDSFFHRLEESFLVEEDKKHERHPIFGNIVDEVAYHEKYPTIYHLRKKLVDSTDKADLRLIYLALAHMIKFRGHFLIEGDLNPDNSDVDKLFIQLVQTYNQLFEENPINASGVDAKAILSARLSKSRRLENLIAQLPGEKKNGLFGNLIALSLGLTPNFKSNFDLAEDAKLQLSKDTYDDDLDNLLAQIGDQYADLFLAAKNLSDAILLSDILRVNTEITKAPLSASMIKRYDEHHQDLTLLKALVRQQLPEKYKEIFFDQSKNGYAGYIDGGASQEEFYKFIKPILEKMDGTEELLVKLNREDLLRKQRTFDNGSIPHQIHLGELHAILRRQEDFYPFLKDNREKIEKILTFRIPYYVGPLARGNSRFAWMTRKSEETITPWNFEEVVDKGASAQSFIERMTNFDKNLPNEKVLPKHSLLYEYFTVYNELTKVKYVTEGMRKPAFLSGEQKKAIVDLLFKTNRKVTVKQLKEDYFKKIECFDSVEISGVEDRFNASLGTYHDLLKIIKDKDFLDNEENEDILEDIVLTLTLFEDREMIEERLKTYAHLFDDKVMKQLKRRRYTGWGRLSRKLINGIRDKQSGKTILDFLKSDGFANRNFMQLIHDDSLTFKEDIQKAQVSGQGDSLHEHIANLAGSPAIKKGILQTVKVVDELVKVMGRHKPENIVIEMARENQTTQKGQKNSRERMKRIEEGIKELGSQILKEHPVENTQLQNEKLYLYYLQNGRDMYVDQELDINRLSDYDVDHIVPQSFLKDDSIDNKVLTRSDKARGKSDNVPSEEVVKKMKNYWRQLLNAKLITQRKFDNLTKAERGGLSELDKAGFIKRQLVETRQITKHVAQILDSRMNTKYDENDKLIREVKVITLKSKLVSDFRKDFQFYKVREINNYHHAHDAYLNAVVGTALIKKYPKLESEFVYGDYKVYDVRKMIAKSEQEIGKATAKYFFYSNIMNFFKTEITLANGEIRKRPLIETNGETGEIVWDKGRDFATVRKVLSMPQVNIVKKTEVQTGGFSKESILPKRNSDKLIARKKDWDPKKYGGFDSPTVAYSVLVVAKVEKGKSKKLKSVKELLGITIMERSSFEKNPIDFLEAKGYKEVKKDLIIKLPKYSLFELENGRKRMLASAGELQKGNELALPSKYVNFLYLASHYEKLKGSPEDNEQKQLFVEQHKHYLDEIIEQISEFSKRVILADANLDKVLSAYNKHRDKPIREQAENIIHLFTLTNLGAPAAFKYFDTTIDRKRYTSTKEVLDATLIHQSITGLYETRIDLSQLGGDGGPAPGGGGGTLGDQGSRGSDPLPEPRVTLTVEGIPTEFLVNTGAEHSVLTKPMGKMGSKRTVVAGATGSKVYPWTTKRLLKIGQKQVTHSFLVIPECPAPLLGRDLLTKLKAQIQFSTEGPQVTWEDRPAMCLVLNLEEEYRLHEKPVPPSIDPSWLQLFPMVWAEKAGMGLANQVPPVVVELKSDASPVAVRQYPMSKEAREGIRPHIQRFLDLGILVPCQSPWNTPLLPVKKPGTNDYRPVQDLREVNKRVQDIHPTVPNPYNLLSSLPPSHTWYSVLDLKDAFFCLKLHPNSQPLFAFEWRDPEKGNTGQLTWTRLPQGFKNSPTLFNEALHRDLASFRALNPQVVMLQYVDDLLVAAPTYRDCKEGTRRLLQELSKLGYRVSAKKAQLCREEVTYLGYLLKGGKRWLTPARKATVMKIPTPTTPRQVREFLGTAGFCRLWIPGFASLAAPLYPLTRPKVPFTWTEAHQEAFGRIKEALLSAPALALPDLTKPFALYVDEKEGVARGVLTQTLGPWRRPVAYLSKKLDPVASGWPTCLKAIAAVALLLKDADKLTLGQNVLVIAPHNLESIVRQPPDRWMTNARMTHYQSLLLNERVSFAPPAILNPATLLPVESDDTPIHICSEILAEETGTRPDLRDQPLPGVPAWYTDGSSFIMDGRRQAGAAIVDNKRTVWASNLPEGTSAQKAELIALTQALRLAEGKSINIYTDSRYAFATAHVHGAIYKQRGWLTSAGKDIKNKEEILALLEAIHLPKRVAIIHCPGHQRGTDPVATGNRKADEAAKQAAQSTRILTETTKNAGKRTADGSEFEKRTADGSEFESPKKKAKVE

SEQ ID NO: 6721 - protein, 2091 aa, synthetic construct
MPAAKRVKLDGGDKKYSIGLDIGTNSVGWAVITDEYKVPSKKFKVLGNTDRHSIKKNLIGALLFDSGETAEATRLKRTARRRYTRRKNRICYLQEIFSNEMAKVDDSFFHRLEESFLVEEDKKHERHPIFGNIVDEVAYHEKYPTIYHLRKKLVDSTDKADLRLIYLALAHMIKFRGHFLIEGDLNPDNSDVDKLFIQLVQTYNQLFEENPINASGVDAKAILSARLSKSRRLENLIAQLPGEKKNGLFGNLIALSLGLTPNFKSNFDLAEDAKLQLSKDTYDDDLDNLLAQIGDQYADLFLAAKNLSDAILLSDILRVNTEITKAPLSASMIKRYDEHHQDLTLLKALVRQQLPEKYKEIFFDQSKNGYAGYIDGGASQEEFYKFIKPILEKMDGTEELLVKLNREDLLRKQRTFDNGSIPHQIHLGELHAILRRQEDFYPFLKDNREKIEKILTFRIPYYVGPLARGNSRFAWMTRKSEETITPWNFEEVVDKGASAQSFIERMTNFDKNLPNEKVLPKHSLLYEYFTVYNELTKVKYVTEGMRKPAFLSGEQKKAIVDLLFKTNRKVTVKQLKEDYFKKIECFDSVEISGVEDRFNASLGTYHDLLKIIKDKDFLDNEENEDILEDIVLTLTLFEDREMIEERLKTYAHLFDDKVMKQLKRRRYTGWGRLSRKLINGIRDKQSGKTILDFLKSDGFANRNFMQLIHDDSLTFKEDIQKAQVSGQGDSLHEHIANLAGSPAIKKGILQTVKVVDELVKVMGRHKPENIVIEMARENQTTQKGQKNSRERMKRIEEGIKELGSQILKEHPVENTQLQNEKLYLYYLQNGRDMYVDQELDINRLSDYDVDHIVPQSFLKDDSIDNKVLTRSDKARGKSDNVPSEEVVKKMKNYWRQLLNAKLITQRKFDNLTKAERGGLSELDKAGFIKRQLVETRQITKHVAQILDSRMNTKYDENDKLIREVKVITLKSKLVSDFRKDFQFYKVREINNYHHAHDAYLNAVVGTALIKKYPKLESEFVYGDYKVYDVRKMIAKSEQEIGKATAKYFFYSNIMNFFKTEITLANGEIRKRPLIETNGETGEIVWDKGRDFATVRKVLSMPQVNIVKKTEVQTGGFSKESILPKRNSDKLIARKKDWDPKKYGGFDSPTVAYSVLVVAKVEKGKSKKLKSVKELLGITIMERSSFEKNPIDFLEAKGYKEVKKDLIIKLPKYSLFELENGRKRMLASAGELQKGNELALPSKYVNFLYLASHYEKLKGSPEDNEQKQLFVEQHKHYLDEIIEQISEFSKRVILADANLDKVLSAYNKHRDKPIREQAENIIHLFTLTNLGAPAAFKYFDTTIDRKRYTSTKEVLDATLIHQSITGLYETRIDLSQLGGDGGPAPGGGGGTLGIEDEYRLHETSTEPDVSLGSTWLSDFPQAWAETGGMGLAVRQAPLIIPLKATSTPVSIQQYPMSHEARLGIKPHIQRLLDQGILVPCQSPWNTPLLPVKKPGTNDYRPVQDLREVNKRVEDIHPTVPNPYNLLSGLPPSHQWYTVLDLKDAFFCLRLHPTSQPLFAFEWRDPGMGISGQLTWTRLPQGFKNSPTLFNEALHRDLADFRIQHPDLILLQYVDDILLAATSELDCQQGTRALLQTLGDLGYRASAKKAQICQKQVKYLGYLLREGQRWLTEARKETVMGQPVPKTPRQLREFLGTAGFCRLWIPGFAEMAAPLYPLTKPGTLFSWGPDQQKAYQEIKQALLTAPALGLPDLTKPFELFVDEKQGYAKGVLTQKLGPWRRPVAYLSKKLDPVAAGWPPCLRMVAAIAVLTKDAGKLTMGQPLVILAPHAVEALVKQPPDRWLSNARMTHYQAMLLDTDRVQFGPVVALNPATLLPLPEEGAPHDCLEILAETHGTRPDLTDQPIPDADHTWYTDGSSFLQEGQRKAGAAVTTETEVIWAGALPAGTSAQRAELIALTQALKMAEGKRLNVYTDSRYAFATAHIHGEIYRRRGWLTSEGREIKNKSEILALLKALFLPKRLSIIHCLGHQKGDSAEARGNRLADQAAREAAIKTPPDTSTLLAGKRTADGSEFEKRTADGSEFESPKKKAKVE

SEQ ID NO: 6722 - protein, 2085 aa, synthetic construct
MPAAKRVKLDGGDKKYSIGLDIGTNSVGWAVITDEYKVPSKKFKVLGNTDRHSIKKNLIGALLFDSGETAEATRLKRTARRRYTRRKNRICYLQEIFSNEMAKVDDSFFHRLEESFLVEEDKKHERHPIFGNIVDEVAYHEKYPTIYHLRKKLVDSTDKADLRLIYLALAHMIKFRGHFLIEGDLNPDNSDVDKLFIQLVQTYNQLFEENPINASGVDAKAILSARLSKSRRLENLIAQLPGEKKNGLFGNLIALSLGLTPNFKSNFDLAEDAKLQLSKDTYDDDLDNLLAQIGDQYADLFLAAKNLSDAILLSDILRVNTEITKAPLSASMIKRYDEHHQDLTLLKALVRQQLPEKYKEIFFDQSKNGYAGYIDGGASQEEFYKFIKPILEKMDGTEELLVKLNREDLLRKQRTFDNGSIPHQIHLGELHAILRRQEDFYPFLKDNREKIEKILTFRIPYYVGPLARGNSRFAWMTRKSEETITPWNFEEVVDKGASAQSFIERMTNFDKNLPNEKVLPKHSLLYEYFTVYNELTKVKYVTEGMRKPAFLSGEQKKAIVDLLFKTNRKVTVKQLKEDYFKKIECFDSVEISGVEDRFNASLGTYHDLLKIIKDKDFLDNEENEDILEDIVLTLTLFEDREMIEERLKTYAHLFDDKVMKQLKRRRYTGWGRLSRKLINGIRDKQSGKTILDFLKSDGFANRNFMQLIHDDSLTFKEDIQKAQVSGQGDSLHEHIANLAGSPAIKKGILQTVKVVDELVKVMGRHKPENIVIEMARENQTTQKGQKNSRERMKRIEEGIKELGSQILKEHPVENTQLQNEKLYLYYLQNGRDMYVDQELDINRLSDYDVDHIVPQSFLKDDSIDNKVLTRSDKARGKSDNVPSEEVVKKMKNYWRQLLNAKLITQRKFDNLTKAERGGLSELDKAGFIKRQLVETRQITKHVAQILDSRMNTKYDENDKLIREVKVITLKSKLVSDFRKDFQFYKVREINNYHHAHDAYLNAVVGTALIKKYPKLESEFVYGDYKVYDVRKMIAKSEQEIGKATAKYFFYSNIMNFFKTEITLANGEIRKRPLIETNGETGEIVWDKGRDFATVRKVLSMPQVNIVKKTEVQTGGFSKESILPKRNSDKLIARKKDWDPKKYGGFDSPTVAYSVLVVAKVEKGKSKKLKSVKELLGITIMERSSFEKNPIDFLEAKGYKEVKKDLIIKLPKYSLFELENGRKRMLASAGELQKGNELALPSKYVNFLYLASHYEKLKGSPEDNEQKQLFVEQHKHYLDEIIEQISEFSKRVILADANLDKVLSAYNKHRDKPIREQAENIIHLFTLTNLGAPAAFKYFDTTIDRKRYTSTKEVLDATLIHQSITGLYETRIDLSQLGGDGGPAPGGGGGTLQLDDEYRLYSPLVKPDQNIQFWLEQFPQAWAETAGMGLAKQVPPQVIQLKASATPVSVRQYPLSKEAQEGIRPHVQRLIQQGILVPVQSPWNTPLLPVRKPGTNDYRPVQDLREVNKRVQDIHPTVPNPYNLLCALPPQRSWYTVLDLKDAFFCLRLHPTSQPLFAFEWRDPGTGRTGQLTWTRLPQGFKNSPTIFDEALHRDLANFRIQHPQVTLLQYVDDLLLAGATKQDCLEGTKALLLELSDLGYRASAKKAQICRREVTYLGYSLRDGQRWLTEARKKTVVQIPAPTTAKQVREFLGTAGFCRLWIPGFATLAAPLYPLTKEKGEFSWAPEHQKAFDAIKKALLSAPALALPDVTKPFTLYVDERKGVARGVLTQTLGPWRRPVAYLSKKLDPVASGWPVCLKAIAAVAILVKDADKLTLGQNITVIAPHALENIVRQPPDRWMTNARMTHYQSLLLTERVTFAPPAALNPATLLPEETDEPVTHDCHQLLIEETGVRKDLTDIPLTGEVLTWFTDGSSYVVEGKRMAGAAVVDGTRTIWASSLPEGTSAQKAELMALTQALRLAEGKSINIYTDSRYAFATAHVHGAIYKQRGLLTSAGREIKNKEEILSLLEALHLPKRLAIIHCPGHQKAKDPISRGNQMADRVAKQAAQGVNLLAGKRTADGSEFEKRTADGSEFESPKKKAKVE

SEQ ID NO: 6723 - protein, 2082 aa, synthetic construct
MPAAKRVKLDGGDKKYSIGLDIGTNSVGWAVITDEYKVPSKKFKVLGNTDRHSIKKNLIGALLFDSGETAEATRLKRTARRRYTRRKNRICYLQEIFSNEMAKVDDSFFHRLEESFLVEEDKKHERHPIFGNIVDEVAYHEKYPTIYHLRKKLVDSTDKADLRLIYLALAHMIKFRGHFLIEGDLNPDNSDVDKLFIQLVQTYNQLFEENPINASGVDAKAILSARLSKSRRLENLIAQLPGEKKNGLFGNLIALSLGLTPNFKSNFDLAEDAKLQLSKDTYDDDLDNLLAQIGDQYADLFLAAKNLSDAILLSDILRVNTEITKAPLSASMIKRYDEHHQDLTLLKALVRQQLPEKYKEIFFDQSKNGYAGYIDGGASQEEFYKFIKPILEKMDGTEELLVKLNREDLLRKQRTFDNGSIPHQIHLGELHAILRRQEDFYPFLKDNREKIEKILTFRIPYYVGPLARGNSRFAWMTRKSEETITPWNFEEVVDKGASAQSFIERMTNFDKNLPNEKVLPKHSLLYEYFTVYNELTKVKYVTEGMRKPAFLSGEQKKAIVDLLFKTNRKVTVKQLKEDYFKKIECFDSVEISGVEDRFNASLGTYHDLLKIIKDKDFLDNEENEDILEDIVLTLTLFEDREMIEERLKTYAHLFDDKVMKQLKRRRYTGWGRLSRKLINGIRDKQSGKTILDFLKSDGFANRNFMQLIHDDSLTFKEDIQKAQVSGQGDSLHEHIANLAGSPAIKKGILQTVKVVDELVKVMGRHKPENIVIEMARENQTTQKGQKNSRERMKRIEEGIKELGSQILKEHPVENTQLQNEKLYLYYLQNGRDMYVDQELDINRLSDYDVDHIVPQSFLKDDSIDNKVLTRSDKARGKSDNVPSEEVVKKMKNYWRQLLNAKLITQRKFDNLTKAERGGLSELDKAGFIKRQLVETRQITKHVAQILDSRMNTKYDENDKLIREVKVITLKSKLVSDFRKDFQFYKVREINNYHHAHDAYLNAVVGTALIKKYPKLESEFVYGDYKVYDVRKMIAKSEQEIGKATAKYFFYSNIMNFFKTEITLANGEIRKRPLIETNGETGEIVWDKGRDFATVRKVLSMPQVNIVKKTEVQTGGFSKESILPKRNSDKLIARKKDWDPKKYGGFDSPTVAYSVLVVAKVEKGKSKKLKSVKELLGITIMERSSFEKNPIDFLEAKGYKEVKKDLIIKLPKYSLFELENGRKRMLASAGELQKGNELALPSKYVNFLYLASHYEKLKGSPEDNEQKQLFVEQHKHYLDEIIEQISEFSKRVILADANLDKVLSAYNKHRDKPIREQAENIIHLFTLTNLGAPAAFKYFDTTIDRKRYTSTKEVLDATLIHQSITGLYETRIDLSQLGGDGGPAPGGGGGIPWLMKKPLQLTTLVPLQEYEERLLKQTMLTGSYKEKLQSLFLKYDALWQHWENQVGHRRIKPHHIATGTVNPRPQKQYPINPKAKASIQTVINDLLKQGVLIQQNSIMNTPVYPVPKPDGKWRMVLDYREVNKTIPLIAAQNQHSAGILSSIFRGKYKTTLDLSNGFWAHSITPESYWLTAFTWLGQQYCWTRLPQGFLNSPALFNADVVDLLKEVPNVQVYVDDIYISHDDPREHLEQLEKVFSLLLNAGYVVSLKKSEIAQHEVEFLGFNITKEGRGLTETFKQKLLNITPPRDLKQLQSILGLLNFARNFIPNFSELVKPLYNIIATAPGKYITWTTDNSQQLQNIISMLNSAENLEERNPEVRLIMKVNTSPSAGYIRFYNEFAKRPIMYLNYVYTKAEVKFTNTEKLLTTIHKGLIKALDLGMGQEILVYSPIVSMTKIQKTPLPERKALPIRWITWMSYLEDPRIQFHYDKTLPELQQVPTVTDDIIAKIKHPSEFSMVFYTDGSAIKHPNVNKSHNAGMGIAQVQFKPEFTVINTWSIPLGDHTAQLAEVAAVEFACKKALKIDGPVLIVTDSFYVAESVNKELPYWQSNGFFNNKKKPLKHVSKWKSIADCIQLKPDIIIIHEKGHQPTASTFHTEGNNLADKLATQGSYVVNAGKRTADGSEFEKRTADGSEFESPKKKAKVE

SEQ ID NO: 6724 - protein, 2082 aa, synthetic construct
MPAAKRVKLDGGDKKYSIGLDIGTNSVGWAVITDEYKVPSKKFKVLGNTDRHSIKKNLIGALLFDSGETAEATRLKRTARRRYTRRKNRICYLQEIFSNEMAKVDDSFFHRLEESFLVEEDKKHERHPIFGNIVDEVAYHEKYPTIYHLRKKLVDSTDKADLRLIYLALAHMIKFRGHFLIEGDLNPDNSDVDKLFIQLVQTYNQLFEENPINASGVDAKAILSARLSKSRRLENLIAQLPGEKKNGLFGNLIALSLGLTPNFKSNFDLAEDAKLQLSKDTYDDDLDNLLAQIGDQYADLFLAAKNLSDAILLSDILRVNTEITKAPLSASMIKRYDEHHQDLTLLKALVRQQLPEKYKEIFFDQSKNGYAGYIDGGASQEEFYKFIKPILEKMDGTEELLVKLNREDLLRKQRTFDNGSIPHQIHLGELHAILRRQEDFYPFLKDNREKIEKILTFRIPYYVGPLARGNSRFAWMTRKSEETITPWNFEEVVDKGASAQSFIERMTNFDKNLPNEKVLPKHSLLYEYFTVYNELTKVKYVTEGMRKPAFLSGEQKKAIVDLLFKTNRKVTVKQLKEDYFKKIECFDSVEISGVEDRFNASLGTYHDLLKIIKDKDFLDNEENEDILEDIVLTLTLFEDREMIEERLKTYAHLFDDKVMKQLKRRRYTGWGRLSRKLINGIRDKQSGKTILDFLKSDGFANRNFMQLIHDDSLTFKEDIQKAQVSGQGDSLHEHIANLAGSPAIKKGILQTVKVVDELVKVMGRHKPENIVIEMARENQTTQKGQKNSRERMKRIEEGIKELGSQILKEHPVENTQLQNEKLYLYYLQNGRDMYVDQELDINRLSDYDVDHIVPQSFLKDDSIDNKVLTRSDKARGKSDNVPSEEVVKKMKNYWRQLLNAKLITQRKFDNLTKAERGGLSELDKAGFIKRQLVETRQITKHVAQILDSRMNTKYDENDKLIREVKVITLKSKLVSDFRKDFQFYKVREINNYHHAHDAYLNAVVGTALIKKYPKLESEFVYGDYKVYDVRKMIAKSEQEIGKATAKYFFYSNIMNFFKTEITLANGEIRKRPLIETNGETGEIVWDKGRDFATVRKVLSMPQVNIVKKTEVQTGGFSKESILPKRNSDKLIARKKDWDPKKYGGFDSPTVAYSVLVVAKVEKGKSKKLKSVKELLGITIMERSSFEKNPIDFLEAKGYKEVKKDLIIKLPKYSLFELENGRKRMLASAGELQKGNELALPSKYVNFLYLASHYEKLKGSPEDNEQKQLFVEQHKHYLDEIIEQISEFSKRVILADANLDKVLSAYNKHRDKPIREQAENIIHLFTLTNLGAPAAFKYFDTTIDRKRYTSTKEVLDATLIHQSITGLYETRIDLSQLGGDGGPAPGGGGGIPWLMKKPLQLTTLVPLQEYEERLLKQTMLTGSYKEKLQSLFLKYDALWQHWENQVGHRRIKPHHIATGTVNPRPQKQYPINPKAKASIQTVINDLLKQGVLIQQNSIMNTPVYPVPKPDGKWRMVLDYREVNKTIPLIAAQNQHSAGILSSIFRGKYKTTLDLSNGFWAHSITPESYWLTAFTWLGQQYCWTRLPQGFLNSPALFNADVVDLLKEVPNVQVYVDDIYISHDDPREHLEQLEKVFSLLLNAGYVVSLKKSEIAQHEVEFLGFNITKEGRGLTETFKQKLLNITPPRDLKQLQSILGKLNFARNFIPNFSELVKPLYNIIATAPGKYITWTTDNSQQLQNIISMLNSAENLEERNPEVRLIMKVNTSPSAGYIRFYNEFAKRPIMYLNYVYTKAEVKFTNTEKLLTTIHKGLIKALDLGMGQEILVYSPIVSMTKIQKTPLPERKALPIRWITWMSYLEDPRIQFHYDKTLPELQQVPTVTDDIIAKIKHPSEFSMVFYTDGSAIKHPNVNKSHNAGMGIAQVQFKPEFTVINTWSIPLGDHTAQLAEVAAVEFACKKALKIDGPVLIVTDSFYVAESVNKELPYWQSNGFFNNKKKPLKHVSKWKSIADCIQLKPDIIIIHEKGHQPTASTFHTEGNNLADKLATQGSYVVNAGKRTADGSEFEKRTADGSEFESPKKKAKVE

SEQ ID NO: 6725 - protein, 2091 aa, synthetic construct
MPAAKRVKLDGGDKKYSIGLDIGTNSVGWAVITDEYKVPSKKFKVLGNTDRHSIKKNLIGALLFDSGETAEATRLKRTARRRYTRRKNRICYLQEIFSNEMAKVDDSFFHRLEESFLVEEDKKHERHPIFGNIVDEVAYHEKYPTIYHLRKKLVDSTDKADLRLIYLALAHMIKFRGHFLIEGDLNPDNSDVDKLFIQLVQTYNQLFEENPINASGVDAKAILSARLSKSRRLENLIAQLPGEKKNGLFGNLIALSLGLTPNFKSNFDLAEDAKLQLSKDTYDDDLDNLLAQIGDQYADLFLAAKNLSDAILLSDILRVNTEITKAPLSASMIKRYDEHHQDLTLLKALVRQQLPEKYKEIFFDQSKNGYAGYIDGGASQEEFYKFIKPILEKMDGTEELLVKLNREDLLRKQRTFDNGSIPHQIHLGELHAILRRQEDFYPFLKDNREKIEKILTFRIPYYVGPLARGNSRFAWMTRKSEETITPWNFEEVVDKGASAQSFIERMTNFDKNLPNEKVLPKHSLLYEYFTVYNELTKVKYVTEGMRKPAFLSGEQKKAIVDLLFKTNRKVTVKQLKEDYFKKIECFDSVEISGVEDRFNASLGTYHDLLKIIKDKDFLDNEENEDILEDIVLTLTLFEDREMIEERLKTYAHLFDDKVMKQLKRRRYTGWGRLSRKLINGIRDKQSGKTILDFLKSDGFANRNFMQLIHDDSLTFKEDIQKAQVSGQGDSLHEHIANLAGSPAIKKGILQTVKVVDELVKVMGRHKPENIVIEMARENQTTQKGQKNSRERMKRIEEGIKELGSQILKEHPVENTQLQNEKLYLYYLQNGRDMYVDQELDINRLSDYDVDHIVPQSFLKDDSIDNKVLTRSDKARGKSDNVPSEEVVKKMKNYWRQLLNAKLITQRKFDNLTKAERGGLSELDKAGFIKRQLVETRQITKHVAQILDSRMNTKYDENDKLIREVKVITLKSKLVSDFRKDFQFYKVREINNYHHAHDAYLNAVVGTALIKKYPKLESEFVYGDYKVYDVRKMIAKSEQEIGKATAKYFFYSNIMNFFKTEITLANGEIRKRPLIETNGETGEIVWDKGRDFATVRKVLSMPQVNIVKKTEVQTGGFSKESILPKRNSDKLIARKKDWDPKKYGGFDSPTVAYSVLVVAKVEKGKSKKLKSVKELLGITIMERSSFEKNPIDFLEAKGYKEVKKDLIIKLPKYSLFELENGRKRMLASAGELQKGNELALPSKYVNFLYLASHYEKLKGSPEDNEQKQLFVEQHKHYLDEIIEQISEFSKRVILADANLDKVLSAYNKHRDKPIREQAENIIHLFTLTNLGAPAAFKYFDTTIDRKRYTSTKEVLDATLIHQSITGLYETRIDLSQLGGDGGPAPGGGGGTLNIEDEYRLHETSKEPDVPLGSTWLSDFPQAWAETGGMGLAVRQAPLIIPLKATSTPVSIKQYPMSQEARLGIKPHIQRLLDQGILVPCQSPWNTPLLPVKKPGTNDYRPVQDLREVNKRVEDIHPTVPNPYNLLSGLPPSHQWYTVLDLKDAFFCLRLHPTSQPLFAFEWRDPEMGISGQLTWTRLPQGFKNSPTLFNEALHRDLADFRIQHPDLILLQYVDDLLLAATSEQDCQRGTRALLQTLGNLGYRASAKKAQICQKQVKYLGYLLKEGQRWLTEARKETVMGQPTPKTPRQLREFLGTAGFCRLWIPGFAEMAAPLYPLTKPGTLFNWGPDQQKAYQEIKQALLTAPALGLPDLTKPFELFVDEKQGYAKGVLTQKLGPWRRPVAYLSKKLDPVAAGWPPCLRMVAAIAVLTKDAGKLTMGQPLVILAPHAVEALVKQPPDRWLSNARMTHYQAMLLDTDRVQFGPVVALNPATLLPLPEKEAPHDCLEILAETHGTRPDLTDQPIPDADYTWYTDGSSFLQEGQRRAGAAVTTETEVIWARALPAGTSAQRAELIALTQALKMAEGKKLNVYTDSRYAFATAHVHGEIYRRRGWLTSEGREIKNKNEILALLKALFLPKRLSIIHCPGHQKGNSAEARGNRMADQAAREAAMKAVLETSTLLAGKRTADGSEFEKRTADGSEFESPKKKAKVE

SEQ ID NO: 6726 - protein, 2091 aa, synthetic construct
MPAAKRVKLDGGDKKYSIGLDIGTNSVGWAVITDEYKVPSKKFKVLGNTDRHSIKKNLIGALLFDSGETAEATRLKRTARRRYTRRKNRICYLQEIFSNEMAKVDDSFFHRLEESFLVEEDKKHERHPIFGNIVDEVAYHEKYPTIYHLRKKLVDSTDKADLRLIYLALAHMIKFRGHFLIEGDLNPDNSDVDKLFIQLVQTYNQLFEENPINASGVDAKAILSARLSKSRRLENLIAQLPGEKKNGLFGNLIALSLGLTPNFKSNFDLAEDAKLQLSKDTYDDDLDNLLAQIGDQYADLFLAAKNLSDAILLSDILRVNTEITKAPLSASMIKRYDEHHQDLTLLKALVRQQLPEKYKEIFFDQSKNGYAGYIDGGASQEEFYKFIKPILEKMDGTEELLVKLNREDLLRKQRTFDNGSIPHQIHLGELHAILRRQEDFYPFLKDNREKIEKILTFRIPYYVGPLARGNSRFAWMTRKSEETITPWNFEEVVDKGASAQSFIERMTNFDKNLPNEKVLPKHSLLYEYFTVYNELTKVKYVTEGMRKPAFLSGEQKKAIVDLLFKTNRKVTVKQLKEDYFKKIECFDSVEISGVEDRFNASLGTYHDLLKIIKDKDFLDNEENEDILEDIVLTLTLFEDREMIEERLKTYAHLFDDKVMKQLKRRRYTGWGRLSRKLINGIRDKQSGKTILDFLKSDGFANRNFMQLIHDDSLTFKEDIQKAQVSGQGDSLHEHIANLAGSPAIKKGILQTVKVVDELVKVMGRHKPENIVIEMARENQTTQKGQKNSRERMKRIEEGIKELGSQILKEHPVENTQLQNEKLYLYYLQNGRDMYVDQELDINRLSDYDVDHIVPQSFLKDDSIDNKVLTRSDKARGKSDNVPSEEVVKKMKNYWRQLLNAKLITQRKFDNLTKAERGGLSELDKAGFIKRQLVETRQITKHVAQILDSRMNTKYDENDKLIREVKVITLKSKLVSDFRKDFQFYKVREINNYHHAHDAYLNAVVGTALIKKYPKLESEFVYGDYKVYDVRKMIAKSEQEIGKATAKYFFYSNIMNFFKTEITLANGEIRKRPLIETNGETGEIVWDKGRDFATVRKVLSMPQVNIVKKTEVQTGGFSKESILPKRNSDKLIARKKDWDPKKYGGFDSPTVAYSVLVVAKVEKGKSKKLKSVKELLGITIMERSSFEKNPIDFLEAKGYKEVKKDLIIKLPKYSLFELENGRKRMLASAGELQKGNELALPSKYVNFLYLASHYEKLKGSPEDNEQKQLFVEQHKHYLDEIIEQISEFSKRVILADANLDKVLSAYNKHRDKPIREQAENIIHLFTLTNLGAPAAFKYFDTTIDRKRYTSTKEVLDATLIHQSITGLYETRIDLSQLGGDGGPAPGGGGGTLNIEDEYRLHETSKEPDVPLGSTWLSDFPQAWAETGGMGLAVRQAPLIIPLKATSTPVSIKQYPMSQEARLGIKPHIQRLLDQGILVPCQSPWNTPLLPVKKPGTNDYRPVQDLREVNKRVEDIHPTVPNPYNLLSGLPPSHQWYTVLDLKDAFFCLRLHPTSQPLFAFEWRDPEMGISGQLTWTRLPQGFKNSPTLFNEALHRDLADFRIQHPDLILLQYVDDLLLAATSEQDCQRGTRALLQTLGNLGYRASAKKAQICQKQVKYLGYLLKEGQRWLTEARKETVMGQPTPKTPRQLREFLGKAGFCRLFIPGFAEMAAPLYPLTKPGTLFNWGPDQQKAYQEIKQALLTAPALGLPDLTKPFELFVDEKQGYAKGVLTQKLGPWRRPVAYLSKKLDPVAAGWPPCLRMVAAIAVLTKDAGKLTMGQPLVILAPHAVEALVKQPPDRWLSNARMTHYQAMLLDTDRVQFGPVVALNPATLLPLPEKEAPHDCLEILAETHGTRPDLTDQPIPDADYTWYTDGSSFLQEGQRRAGAAVTTETEVIWARALPAGTSAQRAELIALTQALKMAEGKKLNVYTDSRYAFATAHVHGEIYRRRGWLTSEGREIKNKNEILALLKALFLPKRLSIIHCPGHQKGNSAEARGNRMADQAAREAAMKAVLETSTLLAGKRTADGSEFEKRTADGSEFESPKKKAKVE

SEQ ID NO: 6727 - protein, 2095 aa, synthetic construct
MPAAKRVKLDGGDKKYSIGLDIGTNSVGWAVITDEYKVPSKKFKVLGNTDRHSIKKNLIGALLFDSGETAEATRLKRTARRRYTRRKNRICYLQEIFSNEMAKVDDSFFHRLEESFLVEEDKKHERHPIFGNIVDEVAYHEKYPTIYHLRKKLVDSTDKADLRLIYLALAHMIKFRGHFLIEGDLNPDNSDVDKLFIQLVQTYNQLFEENPINASGVDAKAILSARLSKSRRLENLIAQLPGEKKNGLFGNLIALSLGLTPNFKSNFDLAEDAKLQLSKDTYDDDLDNLLAQIGDQYADLFLAAKNLSDAILLSDILRVNTEITKAPLSASMIKRYDEHHQDLTLLKALVRQQLPEKYKEIFFDQSKNGYAGYIDGGASQEEFYKFIKPILEKMDGTEELLVKLNREDLLRKQRTFDNGSIPHQIHLGELHAILRRQEDFYPFLKDNREKIEKILTFRIPYYVGPLARGNSRFAWMTRKSEETITPWNFEEVVDKGASAQSFIERMTNFDKNLPNEKVLPKHSLLYEYFTVYNELTKVKYVTEGMRKPAFLSGEQKKAIVDLLFKTNRKVTVKQLKEDYFKKIECFDSVEISGVEDRFNASLGTYHDLLKIIKDKDFLDNEENEDILEDIVLTLTLFEDREMIEERLKTYAHLFDDKVMKQLKRRRYTGWGRLSRKLINGIRDKQSGKTILDFLKSDGFANRNFMQLIHDDSLTFKEDIQKAQVSGQGDSLHEHIANLAGSPAIKKGILQTVKVVDELVKVMGRHKPENIVIEMARENQTTQKGQKNSRERMKRIEEGIKELGSQILKEHPVENTQLQNEKLYLYYLQNGRDMYVDQELDINRLSDYDVDHIVPQSFLKDDSIDNKVLTRSDKARGKSDNVPSEEVVKKMKNYWRQLLNAKLITQRKFDNLTKAERGGLSELDKAGFIKRQLVETRQITKHVAQILDSRMNTKYDENDKLIREVKVITLKSKLVSDFRKDFQFYKVREINNYHHAHDAYLNAVVGTALIKKYPKLESEFVYGDYKVYDVRKMIAKSEQEIGKATAKYFFYSNIMNFFKTEITLANGEIRKRPLIETNGETGEIVWDKGRDFATVRKVLSMPQVNIVKKTEVQTGGFSKESILPKRNSDKLIARKKDWDPKKYGGFDSPTVAYSVLVVAKVEKGKSKKLKSVKELLGITIMERSSFEKNPIDFLEAKGYKEVKKDLIIKLPKYSLFELENGRKRMLASAGELQKGNELALPSKYVNFLYLASHYEKLKGSPEDNEQKQLFVEQHKHYLDEIIEQISEFSKRVILADANLDKVLSAYNKHRDKPIREQAENIIHLFTLTNLGAPAAFKYFDTTIDRKRYTSTKEVLDATLIHQSITGLYETRIDLSQLGGDGGGSSEAAAKGGTAPLEEEYRLFLEAPIQNVTLLEQWKREIPKVWAEINPPGLASTQAPIHVQLLSTALPVRVRQYPITLEAKRSLRETIRKFRAAGILRPVHSPWNTPLLPVRKSGTSEYRMVQDLREVNKRVETIHPTVPNPYTLLSLLPPDRIWYSVLDLKDAFFCIPLAPESQLIFAFEWADAEEGESGQLTWTRLPQGFKNSPTLFNEALNRDLQGFRLDHPSVSLLQYVDDLLIAADTQAACLSATRDLLMTLAELGYRVSGKKAQLCQEEVTYLGFKIHKGSRSLSNSRTQAILQIPVPKTKRQVREFLGTIGYCRLWIPGFAELAQPLYAATRPGNDPLVWGEKEEEAFQSLKLALTQPPALALPSLDKPFQLFVEETSGAAKGVLTQALGPWKRPVAYLSKRLDPVAAGWPRCLRAIAAAALLTREASKLTFGQDIEITSSHNLESLLRSPPDKWLTNARITQYQVLLLDPPRVRFKQTAALNPATLLPETDDTLPIHHCLDTLDSLTSTRPDLTDQPLAQAEATLFTDGSSYIRDGKRYAGAAVVTLDSVIWAEPLPIGTSAQKAELIALTKALEWSKDKSVNIYTDSRYAFATLHVHGMIYRERGWLTAGGKAIKNAPEILALLTAVWLPKRVAVMHCKGHQKDDAPTSTGNRRADEVAREVAIRPLSTQATISAGKRTADGSEFEKRTADGSEFESPKKKAKVE

SEQ ID NO: 6728 - protein, 2099 aa, synthetic construct
MPAAKRVKLDGGDKKYSIGLDIGTNSVGWAVITDEYKVPSKKFKVLGNTDRHSIKKNLIGALLFDSGETAEATRLKRTARRRYTRRKNRICYLQEIFSNEMAKVDDSFFHRLEESFLVEEDKKHERHPIFGNIVDEVAYHEKYPTIYHLRKKLVDSTDKADLRLIYLALAHMIKFRGHFLIEGDLNPDNSDVDKLFIQLVQTYNQLFEENPINASGVDAKAILSARLSKSRRLENLIAQLPGEKKNGLFGNLIALSLGLTPNFKSNFDLAEDAKLQLSKDTYDDDLDNLLAQIGDQYADLFLAAKNLSDAILLSDILRVNTEITKAPLSASMIKRYDEHHQDLTLLKALVRQQLPEKYKEIFFDQSKNGYAGYIDGGASQEEFYKFIKPILEKMDGTEELLVKLNREDLLRKQRTFDNGSIPHQIHLGELHAILRRQEDFYPFLKDNREKIEKILTFRIPYYVGPLARGNSRFAWMTRKSEETITPWNFEEVVDKGASAQSFIERMTNFDKNLPNEKVLPKHSLLYEYFTVYNELTKVKYVTEGMRKPAFLSGEQKKAIVDLLFKTNRKVTVKQLKEDYFKKIECFDSVEISGVEDRFNASLGTYHDLLKIIKDKDFLDNEENEDILEDIVLTLTLFEDREMIEERLKTYAHLFDDKVMKQLKRRRYTGWGRLSRKLINGIRDKQSGKTILDFLKSDGFANRNFMQLIHDDSLTFKEDIQKAQVSGQGDSLHEHIANLAGSPAIKKGILQTVKVVDELVKVMGRHKPENIVIEMARENQTTQKGQKNSRERMKRIEEGIKELGSQILKEHPVENTQLQNEKLYLYYLQNGRDMYVDQELDINRLSDYDVDHIVPQSFLKDDSIDNKVLTRSDKARGKSDNVPSEEVVKKMKNYWRQLLNAKLITQRKFDNLTKAERGGLSELDKAGFIKRQLVETRQITKHVAQILDSRMNTKYDENDKLIREVKVITLKSKLVSDFRKDFQFYKVREINNYHHAHDAYLNAVVGTALIKKYPKLESEFVYGDYKVYDVRKMIAKSEQEIGKATAKYFFYSNIMNFFKTEITLANGEIRKRPLIETNGETGEIVWDKGRDFATVRKVLSMPQVNIVKKTEVQTGGFSKESILPKRNSDKLIARKKDWDPKKYGGFDSPTVAYSVLVVAKVEKGKSKKLKSVKELLGITIMERSSFEKNPIDFLEAKGYKEVKKDLIIKLPKYSLFELENGRKRMLASAGELQKGNELALPSKYVNFLYLASHYEKLKGSPEDNEQKQLFVEQHKHYLDEIIEQISEFSKRVILADANLDKVLSAYNKHRDKPIREQAENIIHLFTLTNLGAPAAFKYFDTTIDRKRYTSTKEVLDATLIHQSITGLYETRIDLSQLGGDGGGSSEAAAKGGTVSLQDEHRLFDIPVTTSLPDVWLQDFPQAWAETGGLGRAKCQAPIIIDLKPTAVPVSIKQYPMSLEAHMGIRQHIIKFLELGVLRPCRSPWNTPLLPVKKPGTQDYRPVQDLREINKRTVDIHPTVPNPYNLLSTLKPDYSWYTVLDLKDAFFCLPLAPQSQELFAFEWKDPERGISGQLTWTRLPQGFKNSPTLFNEALHRDLTDFRTQHPEVTLLQYVDDLLLAAPTKKACTQGTRHLLQELGEKGYRASAKKAQICQTKVTYLGYILSEGKRWLTPGRIETVARIPPPRNPREVREFLGTAGFCRLWIPGFAELAAPLYALTKPSTPFTWQTEHQLAFEALKKALLSAPALGLPDTSKPFTLFLDERQGIAKGVLTQKLGPWKRPVAYLSKKLDPVAAGWPPCLRIMAATAMLVKDSAKLTLGQPLTVITPHTLEAIVRQPPDRWITNARLTHYQALLLDTDRVQFGPPVTLNPATLLPVPENQPSPHDCRQVLAETHGTREDLKDQELPDADHTWYTDGSSYLDSGTRRAGAAVVDGHNTIWAQSLPPGTSAQKAELIALTKALELSKGKKANIYTDSRYAFATAHTHGSIYERRGWLTSEGKEIKNKAEIIALLKALFLPQEVAIIHCPGHQKGQDPVAVGNRQADRVARQAAMAEVLTLATEPDNTSHITAGKRTADGSEFEKRTADGSEFESPKKKAKVE

SEQ ID NO: 6729 - protein, 2124 aa, synthetic construct
MPAAKRVKLDGGDKKYSIGLDIGTNSVGWAVITDEYKVPSKKFKVLGNTDRHSIKKNLIGALLFDSGETAEATRLKRTARRRYTRRKNRICYLQEIFSNEMAKVDDSFFHRLEESFLVEEDKKHERHPIFGNIVDEVAYHEKYPTIYHLRKKLVDSTDKADLRLIYLALAHMIKFRGHFLIEGDLNPDNSDVDKLFIQLVQTYNQLFEENPINASGVDAKAILSARLSKSRRLENLIAQLPGEKKNGLFGNLIALSLGLTPNFKSNFDLAEDAKLQLSKDTYDDDLDNLLAQIGDQYADLFLAAKNLSDAILLSDILRVNTEITKAPLSASMIKRYDEHHQDLTLLKALVRQQLPEKYKEIFFDQSKNGYAGYIDGGASQEEFYKFIKPILEKMDGTEELLVKLNREDLLRKQRTFDNGSIPHQIHLGELHAILRRQEDFYPFLKDNREKIEKILTFRIPYYVGPLARGNSRFAWMTRKSEETITPWNFEEVVDKGASAQSFIERMTNFDKNLPNEKVLPKHSLLYEYFTVYNELTKVKYVTEGMRKPAFLSGEQKKAIVDLLFKTNRKVTVKQLKEDYFKKIECFDSVEISGVEDRFNASLGTYHDLLKIIKDKDFLDNEENEDILEDIVLTLTLFEDREMIEERLKTYAHLFDDKVMKQLKRRRYTGWGRLSRKLINGIRDKQSGKTILDFLKSDGFANRNFMQLIHDDSLTFKEDIQKAQVSGQGDSLHEHIANLAGSPAIKKGILQTVKVVDELVKVMGRHKPENIVIEMARENQTTQKGQKNSRERMKRIEEGIKELGSQILKEHPVENTQLQNEKLYLYYLQNGRDMYVDQELDINRLSDYDVDHIVPQSFLKDDSIDNKVLTRSDKARGKSDNVPSEEVVKKMKNYWRQLLNAKLITQRKFDNLTKAERGGLSELDKAGFIKRQLVETRQITKHVAQILDSRMNTKYDENDKLIREVKVITLKSKLVSDFRKDFQFYKVREINNYHHAHDAYLNAVVGTALIKKYPKLESEFVYGDYKVYDVRKMIAKSEQEIGKATAKYFFYSNIMNFFKTEITLANGEIRKRPLIETNGETGEIVWDKGRDFATVRKVLSMPQVNIVKKTEVQTGGFSKESILPKRNSDKLIARKKDWDPKKYGGFDSPTVAYSVLVVAKVEKGKSKKLKSVKELLGITIMERSSFEKNPIDFLEAKGYKEVKKDLIIKLPKYSLFELENGRKRMLASAGELQKGNELALPSKYVNFLYLASHYEKLKGSPEDNEQKQLFVEQHKHYLDEIIEQISEFSKRVILADANLDKVLSAYNKHRDKPIREQAENIIHLFTLTNLGAPAAFKYFDTTIDRKRYTSTKEVLDATLIHQSITGLYETRIDLSQLGGDGGGSSEAAAKGGLLGRDLLTKLKAQIQFSTEGPQVTWEDRPAMCLVLNLEEEYRLHEKPVPPSIDPSWLQLFPMVWAEKAGMGLANQVPPVVVELKSDASPVAVRQYPMSKEAREGIRPHIQRFLDLGILVPCQSPWNTPLLPVKKPGTNDYRPVQDLREVNKRVQDIHPTVPNPYNLLSSLPPSHTWYSVLDLKDAFFCLKLHPNSQPLFAFEWRDPEKGNTGQLTWTRLPQGFKNSPTLFNEALHRDLASFRALNPQVVMLQYVDDLLVAAPTYRDCKEGTRRLLQELSKLGYRVSAKKAQLCREEVTYLGYLLKGGKRWLTPARKATVMKIPTPTTPRQVREFLGTAGFCRLWIPGFASLAAPLYPLTRPKVPFTWTEAHQEAFGRIKEALLSAPALALPDLTKPFALYVDEKEGVARGVLTQTLGPWRRPVAYLSKKLDPVASGWPTCLKAIAAVALLLKDADKLTLGQNVLVIAPHNLESIVRQPPDRWMTNARMTHYQSLLLNERVSFAPPAILNPATLLPVESDDTPIHICSEILAEETGTRPDLRDQPLPGVPAWYTDGSSFIMDGRRQAGAAIVDNKRTVWASNLPEGTSAQKAELIALTQALRLAEGKSINIYTDSRYAFATAHVHGAIYKQRGWLTSAGKDIKNKEEILALLEAIHLPKRVAIIHCPGHQRGTDPVATGNRKADEAAKQAAQSTRILTETTKNAGKRTADGSEFEKRTADGSEFESPKKKAKVE

SEQ ID NO: 6730 - protein, 2093 aa, synthetic construct
MPAAKRVKLDGGDKKYSIGLDIGTNSVGWAVITDEYKVPSKKFKVLGNTDRHSIKKNLIGALLFDSGETAEATRLKRTARRRYTRRKNRICYLQEIFSNEMAKVDDSFFHRLEESFLVEEDKKHERHPIFGNIVDEVAYHEKYPTIYHLRKKLVDSTDKADLRLIYLALAHMIKFRGHFLIEGDLNPDNSDVDKLFIQLVQTYNQLFEENPINASGVDAKAILSARLSKSRRLENLIAQLPGEKKNGLFGNLIALSLGLTPNFKSNFDLAEDAKLQLSKDTYDDDLDNLLAQIGDQYADLFLAAKNLSDAILLSDILRVNTEITKAPLSASMIKRYDEHHQDLTLLKALVRQQLPEKYKEIFFDQSKNGYAGYIDGGASQEEFYKFIKPILEKMDGTEELLVKLNREDLLRKQRTFDNGSIPHQIHLGELHAILRRQEDFYPFLKDNREKIEKILTFRIPYYVGPLARGNSRFAWMTRKSEETITPWNFEEVVDKGASAQSFIERMTNFDKNLPNEKVLPKHSLLYEYFTVYNELTKVKYVTEGMRKPAFLSGEQKKAIVDLLFKTNRKVTVKQLKEDYFKKIECFDSVEISGVEDRFNASLGTYHDLLKIIKDKDFLDNEENEDILEDIVLTLTLFEDREMIEERLKTYAHLFDDKVMKQLKRRRYTGWGRLSRKLINGIRDKQSGKTILDFLKSDGFANRNFMQLIHDDSLTFKEDIQKAQVSGQGDSLHEHIANLAGSPAIKKGILQTVKVVDELVKVMGRHKPENIVIEMARENQTTQKGQKNSRERMKRIEEGIKELGSQILKEHPVENTQLQNEKLYLYYLQNGRDMYVDQELDINRLSDYDVDHIVPQSFLKDDSIDNKVLTRSDKARGKSDNVPSEEVVKKMKNYWRQLLNAKLITQRKFDNLTKAERGGLSELDKAGFIKRQLVETRQITKHVAQILDSRMNTKYDENDKLIREVKVITLKSKLVSDFRKDFQFYKVREINNYHHAHDAYLNAVVGTALIKKYPKLESEFVYGDYKVYDVRKMIAKSEQEIGKATAKYFFYSNIMNFFKTEITLANGEIRKRPLIETNGETGEIVWDKGRDFATVRKVLSMPQVNIVKKTEVQTGGFSKESILPKRNSDKLIARKKDWDPKKYGGFDSPTVAYSVLVVAKVEKGKSKKLKSVKELLGITIMERSSFEKNPIDFLEAKGYKEVKKDLIIKLPKYSLFELENGRKRMLASAGELQKGNELALPSKYVNFLYLASHYEKLKGSPEDNEQKQLFVEQHKHYLDEIIEQISEFSKRVILADANLDKVLSAYNKHRDKPIREQAENIIHLFTLTNLGAPAAFKYFDTTIDRKRYTSTKEVLDATLIHQSITGLYETRIDLSQLGGDGGGSSEAAAKGGTLNLEDEYRLYETSAEPEVSPGSTWLSDFPQAWAETGGMGLAVRQAPLIIPLKATSTPVSIKQYPMSQEAKLGIKPHIQRLLDQGILVPCQSPWNTPLLPVKKPGTNDYRPVQDLREVNKRVEDIHPTVPNPYNLLSGLPPSHRWYTVLDLKDAFFCLRLHPTSQPLFAFEWRDPGMGISGQLTWTRLPQGFKNSPTLFNEALHRDLADFRIQHPDLILLQYVDDILLAATSELDCQQGTRALLLTLGNLGYRASAKKAQLCQKQVKYLGYLLKEGQRWLTEARKETVMGQPTPKTPRQLREFLGTAGFCRLWIPGFAEMAAPLYPLTKPGTLFNWGPDQQKAYQEIKQALLTAPALGLPDLTKPFELFVDEKQGYAKGVLTQKLGPWRRPVAYLSKKLDPVAAGWPPCLRMVAAIAVLRKDAGKLTMGQPLVILAPHAVEALVKQPPDRWLSNARMTHYQAMLLDTDRVQFGPVVALNPATLLPLPEEGAPHDCLEILAETHGTRPDLTDQPIPDADHTWYTDGSSFLQEGQRKAGAAVTTETEVIWARALPAGTSAQRAELIALTQALKMAEGKRLNVYTDSRYAFATAHIHGEIYRRRGWLTSEGREIKNKSEILALLKALFLPKRLSIIHCLGHQKGDSAEARGNRLADQAAREAAIKTPPDTSTLLAGKRTADGSEFEKRTADGSEFESPKKKAKVE

SEQ ID NO: 6731 - protein, 2093 aa, synthetic construct
MPAAKRVKLDGGDKKYSIGLDIGTNSVGWAVITDEYKVPSKKFKVLGNTDRHSIKKNLIGALLFDSGETAEATRLKRTARRRYTRRKNRICYLQEIFSNEMAKVDDSFFHRLEESFLVEEDKKHERHPIFGNIVDEVAYHEKYPTIYHLRKKLVDSTDKADLRLIYLALAHMIKFRGHFLIEGDLNPDNSDVDKLFIQLVQTYNQLFEENPINASGVDAKAILSARLSKSRRLENLIAQLPGEKKNGLFGNLIALSLGLTPNFKSNFDLAEDAKLQLSKDTYDDDLDNLLAQIGDQYADLFLAAKNLSDAILLSDILRVNTEITKAPLSASMIKRYDEHHQDLTLLKALVRQQLPEKYKEIFFDQSKNGYAGYIDGGASQEEFYKFIKPILEKMDGTEELLVKLNREDLLRKQRTFDNGSIPHQIHLGELHAILRRQEDFYPFLKDNREKIEKILTFRIPYYVGPLARGNSRFAWMTRKSEETITPWNFEEVVDKGASAQSFIERMTNFDKNLPNEKVLPKHSLLYEYFTVYNELTKVKYVTEGMRKPAFLSGEQKKAIVDLLFKTNRKVTVKQLKEDYFKKIECFDSVEISGVEDRFNASLGTYHDLLKIIKDKDFLDNEENEDILEDIVLTLTLFEDREMIEERLKTYAHLFDDKVMKQLKRRRYTGWGRLSRKLINGIRDKQSGKTILDFLKSDGFANRNFMQLIHDDSLTFKEDIQKAQVSGQGDSLHEHIANLAGSPAIKKGILQTVKVVDELVKVMGRHKPENIVIEMARENQTTQKGQKNSRERMKRIEEGIKELGSQILKEHPVENTQLQNEKLYLYYLQNGRDMYVDQELDINRLSDYDVDHIVPQSFLKDDSIDNKVLTRSDKARGKSDNVPSEEVVKKMKNYWRQLLNAKLITQRKFDNLTKAERGGLSELDKAGFIKRQLVETRQITKHVAQILDSRMNTKYDENDKLIREVKVITLKSKLVSDFRKDFQFYKVREINNYHHAHDAYLNAVVGTALIKKYPKLESEFVYGDYKVYDVRKMIAKSEQEIGKATAKYFFYSNIMNFFKTEITLANGEIRKRPLIETNGETGEIVWDKGRDFATVRKVLSMPQVNIVKKTEVQTGGFSKESILPKRNSDKLIARKKDWDPKKYGGFDSPTVAYSVLVVAKVEKGKSKKLKSVKELLGITIMERSSFEKNPIDFLEAKGYKEVKKDLIIKLPKYSLFELENGRKRMLASAGELQKGNELALPSKYVNFLYLASHYEKLKGSPEDNEQKQLFVEQHKHYLDEIIEQISEFSKRVILADANLDKVLSAYNKHRDKPIREQAENIIHLFTLTNLGAPAAFKYFDTTIDRKRYTSTKEVLDATLIHQSITGLYETRIDLSQLGGDGGGSSEAAAKGGTLNIEDEYRLHETSKEPDVPLGSTWLSDFPQAWAETGGMGLAVRQAPLIIPLKATSTPVSIKQYPMSQEARLGIKPHIQRLLDQGILVPCQSPWNTPLLPVKKPGTNDYRPVQDLREVNKRVEDIHPTVPNPYNLLSGLPPSHQWYTVLDLKDAFFCLRLHPTSQPLFAFEWRDPEMGISGQLTWTRLPQGFKNSPTLFNEALHRDLADFRIQHPDLILLQYVDDLLLAATSEQDCQRGTRALLQTLGNLGYRASAKKAQICQKQVKYLGYLLKEGQRWLTEARKETVMGQPTPKTPRQLREFLGKAGFCRLFIPGFAEMAAPLYPLTKPGTLFNWGPDQQKAYQEIKQALLTAPALGLPDLTKPFELFVDEKQGYAKGVLTQKLGPWRRPVAYLSKKLDPVAAGWPPCLRMVAAIAVLTKDAGKLTMGQPLVILAPHAVEALVKQPPDRWLSNARMTHYQAMLLDTDRVQFGPVVALNPATLLPLPEKEAPHDCLEILAETHGTRPDLTDQPIPDADYTWYTDGSSFLQEGQRRAGAAVTTETEVIWARALPAGTSAQRAELIALTQALKMAEGKKLNVYTDSRYAFATAHVHGEIYRRRGWLTSEGREIKNKNEILALLKALFLPKRLSIIHCPGHQKGNSAEARGNRMADQAAREAAMKAVLETSTLLAGKRTADGSEFEKRTADGSEFESPKKKAKVE

SEQ ID NO: 6732 - protein, 2095 aa, synthetic construct
MPAAKRVKLDGGDKKYSIGLDIGTNSVGWAVITDEYKVPSKKFKVLGNTDRHSIKKNLIGALLFDSGETAEATRLKRTARRRYTRRKNRICYLQEIFSNEMAKVDDSFFHRLEESFLVEEDKKHERHPIFGNIVDEVAYHEKYPTIYHLRKKLVDSTDKADLRLIYLALAHMIKFRGHFLIEGDLNPDNSDVDKLFIQLVQTYNQLFEENPINASGVDAKAILSARLSKSRRLENLIAQLPGEKKNGLFGNLIALSLGLTPNFKSNFDLAEDAKLQLSKDTYDDDLDNLLAQIGDQYADLFLAAKNLSDAILLSDILRVNTEITKAPLSASMIKRYDEHHQDLTLLKALVRQQLPEKYKEIFFDQSKNGYAGYIDGGASQEEFYKFIKPILEKMDGTEELLVKLNREDLLRKQRTFDNGSIPHQIHLGELHAILRRQEDFYPFLKDNREKIEKILTFRIPYYVGPLARGNSRFAWMTRKSEETITPWNFEEVVDKGASAQSFIERMTNFDKNLPNEKVLPKHSLLYEYFTVYNELTKVKYVTEGMRKPAFLSGEQKKAIVDLLFKTNRKVTVKQLKEDYFKKIECFDSVEISGVEDRFNASLGTYHDLLKIIKDKDFLDNEENEDILEDIVLTLTLFEDREMIEERLKTYAHLFDDKVMKQLKRRRYTGWGRLSRKLINGIRDKQSGKTILDFLKSDGFANRNFMQLIHDDSLTFKEDIQKAQVSGQGDSLHEHIANLAGSPAIKKGILQTVKVVDELVKVMGRHKPENIVIEMARENQTTQKGQKNSRERMKRIEEGIKELGSQILKEHPVENTQLQNEKLYLYYLQNGRDMYVDQELDINRLSDYDVDHIVPQSFLKDDSIDNKVLTRSDKARGKSDNVPSEEVVKKMKNYWRQLLNAKLITQRKFDNLTKAERGGLSELDKAGFIKRQLVETRQITKHVAQILDSRMNTKYDENDKLIREVKVITLKSKLVSDFRKDFQFYKVREINNYHHAHDAYLNAVVGTALIKKYPKLESEFVYGDYKVYDVRKMIAKSEQEIGKATAKYFFYSNIMNFFKTEITLANGEIRKRPLIETNGETGEIVWDKGRDFATVRKVLSMPQVNIVKKTEVQTGGFSKESILPKRNSDKLIARKKDWDPKKYGGFDSPTVAYSVLVVAKVEKGKSKKLKSVKELLGITIMERSSFEKNPIDFLEAKGYKEVKKDLIIKLPKYSLFELENGRKRMLASAGELQKGNELALPSKYVNFLYLASHYEKLKGSPEDNEQKQLFVEQHKHYLDEIIEQISEFSKRVILADANLDKVLSAYNKHRDKPIREQAENIIHLFTLTNLGAPAAFKYFDTTIDRKRYTSTKEVLDATLIHQSITGLYETRIDLSQLGGDGGEAAAKGSSGGTAPLEEEYRLFLEAPIQNVTLLEQWKREIPKVWAEINPPGLASTQAPIHVQLLSTALPVRVRQYPITLEAKRSLRETIRKFRAAGILRPVHSPWNTPLLPVRKSGTSEYRMVQDLREVNKRVETIHPTVPNPYTLLSLLPPDRIWYSVLDLKDAFFCIPLAPESQLIFAFEWADAEEGESGQLTWTRLPQGFKNSPTLFNEALNRDLQGFRLDHPSVSLLQYVDDLLIAADTQAACLSATRDLLMTLAELGYRVSGKKAQLCQEEVTYLGFKIHKGSRSLSNSRTQAILQIPVPKTKRQVREFLGTIGYCRLWIPGFAELAQPLYAATRPGNDPLVWGEKEEEAFQSLKLALTQPPALALPSLDKPFQLFVEETSGAAKGVLTQALGPWKRPVAYLSKRLDPVAAGWPRCLRAIAAAALLTREASKLTFGQDIEITSSHNLESLLRSPPDKWLTNARITQYQVLLLDPPRVRFKQTAALNPATLLPETDDTLPIHHCLDTLDSLTSTRPDLTDQPLAQAEATLFTDGSSYIRDGKRYAGAAVVTLDSVIWAEPLPIGTSAQKAELIALTKALEWSKDKSVNIYTDSRYAFATLHVHGMIYRERGWLTAGGKAIKNAPEILALLTAVWLPKRVAVMHCKGHQKDDAPTSTGNRRADEVAREVAIRPLSTQATISAGKRTADGSEFEKRTADGSEFESPKKKAKVE

SEQ ID NO: 6733 - protein, 2095 aa, synthetic construct
MPAAKRVKLDGGDKKYSIGLDIGTNSVGWAVITDEYKVPSKKFKVLGNTDRHSIKKNLIGALLFDSGETAEATRLKRTARRRYTRRKNRICYLQEIFSNEMAKVDDSFFHRLEESFLVEEDKKHERHPIFGNIVDEVAYHEKYPTIYHLRKKLVDSTDKADLRLIYLALAHMIKFRGHFLIEGDLNPDNSDVDKLFIQLVQTYNQLFEENPINASGVDAKAILSARLSKSRRLENLIAQLPGEKKNGLFGNLIALSLGLTPNFKSNFDLAEDAKLQLSKDTYDDDLDNLLAQIGDQYADLFLAAKNLSDAILLSDILRVNTEITKAPLSASMIKRYDEHHQDLTLLKALVRQQLPEKYKEIFFDQSKNGYAGYIDGGASQEEFYKFIKPILEKMDGTEELLVKLNREDLLRKQRTFDNGSIPHQIHLGELHAILRRQEDFYPFLKDNREKIEKILTFRIPYYVGPLARGNSRFAWMTRKSEETITPWNFEEVVDKGASAQSFIERMTNFDKNLPNEKVLPKHSLLYEYFTVYNELTKVKYVTEGMRKPAFLSGEQKKAIVDLLFKTNRKVTVKQLKEDYFKKIECFDSVEISGVEDRFNASLGTYHDLLKIIKDKDFLDNEENEDILEDIVLTLTLFEDREMIEERLKTYAHLFDDKVMKQLKRRRYTGWGRLSRKLINGIRDKQSGKTILDFLKSDGFANRNFMQLIHDDSLTFKEDIQKAQVSGQGDSLHEHIANLAGSPAIKKGILQTVKVVDELVKVMGRHKPENIVIEMARENQTTQKGQKNSRERMKRIEEGIKELGSQILKEHPVENTQLQNEKLYLYYLQNGRDMYVDQELDINRLSDYDVDHIVPQSFLKDDSIDNKVLTRSDKARGKSDNVPSEEVVKKMKNYWRQLLNAKLITQRKFDNLTKAERGGLSELDKAGFIKRQLVETRQITKHVAQILDSRMNTKYDENDKLIREVKVITLKSKLVSDFRKDFQFYKVREINNYHHAHDAYLNAVVGTALIKKYPKLESEFVYGDYKVYDVRKMIAKSEQEIGKATAKYFFYSNIMNFFKTEITLANGEIRKRPLIETNGETGEIVWDKGRDFATVRKVLSMPQVNIVKKTEVQTGGFSKESILPKRNSDKLIARKKDWDPKKYGGFDSPTVAYSVLVVAKVEKGKSKKLKSVKELLGITIMERSSFEKNPIDFLEAKGYKEVKKDLIIKLPKYSLFELENGRKRMLASAGELQKGNELALPSKYVNFLYLASHYEKLKGSPEDNEQKQLFVEQHKHYLDEIIEQISEFSKRVILADANLDKVLSAYNKHRDKPIREQAENIIHLFTLTNLGAPAAFKYFDTTIDRKRYTSTKEVLDATLIHQSITGLYETRIDLSQLGGDGGEAAAKGSSGGTAPLEEEYRLFLEAPIQNVTLLEQWKREIPKVWAEINPPGLASTQAPIHVQLLSTALPVRVRQYPITLEAKRSLRETIRKFRAAGILRPVHSPWNTPLLPVRKSGTSEYRMVQDLREVNKRVETIHPTVPNPYTLLSLLPPDRIWYSVLDLKDAFFCIPLAPESQLIFAFEWADAEEGESGQLTWTRLPQGFKNSPTLFNEALNRDLQGFRLDHPSVSLLQYVDDLLIAADTQAACLSATRDLLMTLAELGYRVSGKKAQLCQEEVTYLGFKIHKGSRSLSNSRTQAILQIPVPKTKRQVREFLGKIGYCRLFIPGFAELAQPLYAATRPGNDPLVWGEKEEEAFQSLKLALTQPPALALPSLDKPFQLFVEETSGAAKGVLTQALGPWKRPVAYLSKRLDPVAAGWPRCLRAIAAAALLTREASKLTFGQDIEITSSHNLESLLRSPPDKWLTNARITQYQVLLLDPPRVRFKQTAALNPATLLPETDDTLPIHHCLDTLDSLTSTRPDLTDQPLAQAEATLFTDGSSYIRDGKRYAGAAVVTLDSVIWAEPLPIGTSAQKAELIALTKALEWSKDKSVNIYTDSRYAFATLHVHGMIYRERGWLTAGGKAIKNAPEILALLTAVWLPKRVAVMHCKGHQKDDAPTSTGNRRADEVAREVAIRPLSTQATISAGKRTADGSEFEKRTADGSEFESPKKKAKVE

SEQ ID NO: 6734 - protein, 2092 aa, synthetic construct
MPAAKRVKLDGGDKKYSIGLDIGTNSVGWAVITDEYKVPSKKFKVLGNTDRHSIKKNLIGALLFDSGETAEATRLKRTARRRYTRRKNRICYLQEIFSNEMAKVDDSFFHRLEESFLVEEDKKHERHPIFGNIVDEVAYHEKYPTIYHLRKKLVDSTDKADLRLIYLALAHMIKFRGHFLIEGDLNPDNSDVDKLFIQLVQTYNQLFEENPINASGVDAKAILSARLSKSRRLENLIAQLPGEKKNGLFGNLIALSLGLTPNFKSNFDLAEDAKLQLSKDTYDDDLDNLLAQIGDQYADLFLAAKNLSDAILLSDILRVNTEITKAPLSASMIKRYDEHHQDLTLLKALVRQQLPEKYKEIFFDQSKNGYAGYIDGGASQEEFYKFIKPILEKMDGTEELLVKLNREDLLRKQRTFDNGSIPHQIHLGELHAILRRQEDFYPFLKDNREKIEKILTFRIPYYVGPLARGNSRFAWMTRKSEETITPWNFEEVVDKGASAQSFIERMTNFDKNLPNEKVLPKHSLLYEYFTVYNELTKVKYVTEGMRKPAFLSGEQKKAIVDLLFKTNRKVTVKQLKEDYFKKIECFDSVEISGVEDRFNASLGTYHDLLKIIKDKDFLDNEENEDILEDIVLTLTLFEDREMIEERLKTYAHLFDDKVMKQLKRRRYTGWGRLSRKLINGIRDKQSGKTILDFLKSDGFANRNFMQLIHDDSLTFKEDIQKAQVSGQGDSLHEHIANLAGSPAIKKGILQTVKVVDELVKVMGRHKPENIVIEMARENQTTQKGQKNSRERMKRIEEGIKELGSQILKEHPVENTQLQNEKLYLYYLQNGRDMYVDQELDINRLSDYDVDHIVPQSFLKDDSIDNKVLTRSDKARGKSDNVPSEEVVKKMKNYWRQLLNAKLITQRKFDNLTKAERGGLSELDKAGFIKRQLVETRQITKHVAQILDSRMNTKYDENDKLIREVKVITLKSKLVSDFRKDFQFYKVREINNYHHAHDAYLNAVVGTALIKKYPKLESEFVYGDYKVYDVRKMIAKSEQEIGKATAKYFFYSNIMNFFKTEITLANGEIRKRPLIETNGETGEIVWDKGRDFATVRKVLSMPQVNIVKKTEVQTGGFSKESILPKRNSDKLIARKKDWDPKKYGGFDSPTVAYSVLVVAKVEKGKSKKLKSVKELLGITIMERSSFEKNPIDFLEAKGYKEVKKDLIIKLPKYSLFELENGRKRMLASAGELQKGNELALPSKYVNFLYLASHYEKLKGSPEDNEQKQLFVEQHKHYLDEIIEQISEFSKRVILADANLDKVLSAYNKHRDKPIREQAENIIHLFTLTNLGAPAAFKYFDTTIDRKRYTSTKEVLDATLIHQSITGLYETRIDLSQLGGDGGEAAAKGSSGGTLQLEEEYRLFEPESTQKQEMDIWLKNFPQAWAETGGMGTAHCQAPVLIQLKATATPISIRQYPMPHEAYQGIKPHIRRMLDQGILKPCQSPWNTPLLPVKKPGTEDYRPVQDLREVNKRVEDIHPTVPNPYNLLSTLPPSHPWYTVLDLKDAFFCLRLHSESQLLFAFEWRDPEIGLSGQLTWTRLPQGFKNSPTLFNEALHSDLADFRVRYPALVLLQYVDDLLLAAATRTECLEGTKALLETLGNKGYRASAKKAQICLQEVTYLGYSLKDGQRWLTKARKEAILSIPVPKNSRQVREFLGKAGYCRLFIPGFAELAAPLYPLTRPGTLFQWGTEQQLAFEDIKKALLSSPALGLPDITKPFELFIDENSGFAKGVLVQKLGPWKRPVAYLSKKLDTVASGWPPCLRMVAAIAILVKDAGKLTLGQPLTILTSHPVEALVRQPPNKWLSNARMTHYQAMLLDAERVHFGPTVSLNPATLLPLPSGGNHHDCLQILAETHGTRPDLTDQPLPDADLTWYTDGSSFIRNGEREAGAAVTTESEVIWAAPLPPGTSAQRAELIALTQALKMAEGKKLTVYTDSRYAFATTHVHGEIYRRRGWLTSEGKEIKNKNEILALLEALFLPKRLSIIHCPGHQKGDSPQAKGNRLADDTAKKAATETHSSLTVLPAGKRTADGSEFEKRTADGSEFESPKKKAKVE

SEQ ID NO: 6735 - protein, 2091 aa, synthetic construct
MPAAKRVKLDGGDKKYSIGLDIGTNSVGWAVITDEYKVPSKKFKVLGNTDRHSIKKNLIGALLFDSGETAEATRLKRTARRRYTRRKNRICYLQEIFSNEMAKVDDSFFHRLEESFLVEEDKKHERHPIFGNIVDEVAYHEKYPTIYHLRKKLVDSTDKADLRLIYLALAHMIKFRGHFLIEGDLNPDNSDVDKLFIQLVQTYNQLFEENPINASGVDAKAILSARLSKSRRLENLIAQLPGEKKNGLFGNLIALSLGLTPNFKSNFDLAEDAKLQLSKDTYDDDLDNLLAQIGDQYADLFLAAKNLSDAILLSDILRVNTEITKAPLSASMIKRYDEHHQDLTLLKALVRQQLPEKYKEIFFDQSKNGYAGYIDGGASQEEFYKFIKPILEKMDGTEELLVKLNREDLLRKQRTFDNGSIPHQIHLGELHAILRRQEDFYPFLKDNREKIEKILTFRIPYYVGPLARGNSRFAWMTRKSEETITPWNFEEVVDKGASAQSFIERMTNFDKNLPNEKVLPKHSLLYEYFTVYNELTKVKYVTEGMRKPAFLSGEQKKAIVDLLFKTNRKVTVKQLKEDYFKKIECFDSVEISGVEDRFNASLGTYHDLLKIIKDKDFLDNEENEDILEDIVLTLTLFEDREMIEERLKTYAHLFDDKVMKQLKRRRYTGWGRLSRKLINGIRDKQSGKTILDFLKSDGFANRNFMQLIHDDSLTFKEDIQKAQVSGQGDSLHEHIANLAGSPAIKKGILQTVKVVDELVKVMGRHKPENIVIEMARENQTTQKGQKNSRERMKRIEEGIKELGSQILKEHPVENTQLQNEKLYLYYLQNGRDMYVDQELDINRLSDYDVDHIVPQSFLKDDSIDNKVLTRSDKARGKSDNVPSEEVVKKMKNYWRQLLNAKLITQRKFDNLTKAERGGLSELDKAGFIKRQLVETRQITKHVAQILDSRMNTKYDENDKLIREVKVITLKSKLVSDFRKDFQFYKVREINNYHHAHDAYLNAVVGTALIKKYPKLESEFVYGDYKVYDVRKMIAKSEQEIGKATAKYFFYSNIMNFFKTEITLANGEIRKRPLIETNGETGEIVWDKGRDFATVRKVLSMPQVNIVKKTEVQTGGFSKESILPKRNSDKLIARKKDWDPKKYGGFDSPTVAYSVLVVAKVEKGKSKKLKSVKELLGITIMERSSFEKNPIDFLEAKGYKEVKKDLIIKLPKYSLFELENGRKRMLASAGELQKGNELALPSKYVNFLYLASHYEKLKGSPEDNEQKQLFVEQHKHYLDEIIEQISEFSKRVILADANLDKVLSAYNKHRDKPIREQAENIIHLFTLTNLGAPAAFKYFDTTIDRKRYTSTKEVLDATLIHQSITGLYETRIDLSQLGGDGGEAAAKGSSGGVLNLEEEYRLHEKPVPSSIDPSWLQLFPTVWAERAGMGLANQVPPVVVELRSGASPVAVRQYPMSKEAREGIRPHIQKFLDLGVLVPCRSPWNTPLLPVKKPGTNDYRPVQDLREINKRVQDIHPTVPNPYNLLSSLPPSYTWYSVLDLKDAFFCLRLHPNSQPLFAFEWKDPEKGNTGQLTWTRLPQGFKNSPTLFNEALHRDLAPFRALNPQVVLLQYVDDLLVAAPTYEDCKKGTQKLLQELSKLGYRVSAKKAQLCQREVTYLGYLLKEGKRWLTPARKATVMKIPVPTTPRQVREFLGKAGFCRLFIPGFASLAAPLYPLTKPSIPFIWTEEHQQAFDHIKKALLSAPALALPDLTKPFTLYIDERAGVARGVLTQTLGPWRRPVAYLSKKLDPVASGWPTCLKAVAAVALLLKDADKLTLGQNVTVIASHSLESIVRQPPDRWMTNARMTHYQSLLLNERVSFAPPAVLNPATLLPVESEATPVHRCSEILAEETGTRRDLEDQPLPGVPTWYTDGSSFITEGKRRAGAPIVDGKRTVWASSLPEGTSAQKAELVALTQALRLAEGKNINIYTDSRYAFATAHIHGAIYKQRGWLTSAGKDIKNKEEILALLEAIHLPRRVAIIHCPGHQRGSNPVATGNRRADEAAKQAALSTRVLAGTTKPAGKRTADGSEFEKRTADGSEFESPKKKAKVE

SEQ ID NO: 6736 - protein, 2215 aa, synthetic construct
MPAAKRVKLDGGDKKYSIGLDIGTNSVGWAVITDEYKVPSKKFKVLGNTDRHSIKKNLIGALLFDSGETAEATRLKRTARRRYTRRKNRICYLQEIFSNEMAKVDDSFFHRLEESFLVEEDKKHERHPIFGNIVDEVAYHEKYPTIYHLRKKLVDSTDKADLRLIYLALAHMIKFRGHFLIEGDLNPDNSDVDKLFIQLVQTYNQLFEENPINASGVDAKAILSARLSKSRRLENLIAQLPGEKKNGLFGNLIALSLGLTPNFKSNFDLAEDAKLQLSKDTYDDDLDNLLAQIGDQYADLFLAAKNLSDAILLSDILRVNTEITKAPLSASMIKRYDEHHQDLTLLKALVRQQLPEKYKEIFFDQSKNGYAGYIDGGASQEEFYKFIKPILEKMDGTEELLVKLNREDLLRKQRTFDNGSIPHQIHLGELHAILRRQEDFYPFLKDNREKIEKILTFRIPYYVGPLARGNSRFAWMTRKSEETITPWNFEEVVDKGASAQSFIERMTNFDKNLPNEKVLPKHSLLYEYFTVYNELTKVKYVTEGMRKPAFLSGEQKKAIVDLLFKTNRKVTVKQLKEDYFKKIECFDSVEISGVEDRFNASLGTYHDLLKIIKDKDFLDNEENEDILEDIVLTLTLFEDREMIEERLKTYAHLFDDKVMKQLKRRRYTGWGRLSRKLINGIRDKQSGKTILDFLKSDGFANRNFMQLIHDDSLTFKEDIQKAQVSGQGDSLHEHIANLAGSPAIKKGILQTVKVVDELVKVMGRHKPENIVIEMARENQTTQKGQKNSRERMKRIEEGIKELGSQILKEHPVENTQLQNEKLYLYYLQNGRDMYVDQELDINRLSDYDVDHIVPQSFLKDDSIDNKVLTRSDKARGKSDNVPSEEVVKKMKNYWRQLLNAKLITQRKFDNLTKAERGGLSELDKAGFIKRQLVETRQITKHVAQILDSRMNTKYDENDKLIREVKVITLKSKLVSDFRKDFQFYKVREINNYHHAHDAYLNAVVGTALIKKYPKLESEFVYGDYKVYDVRKMIAKSEQEIGKATAKYFFYSNIMNFFKTEITLANGEIRKRPLIETNGETGEIVWDKGRDFATVRKVLSMPQVNIVKKTEVQTGGFSKESILPKRNSDKLIARKKDWDPKKYGGFDSPTVAYSVLVVAKVEKGKSKKLKSVKELLGITIMERSSFEKNPIDFLEAKGYKEVKKDLIIKLPKYSLFELENGRKRMLASAGELQKGNELALPSKYVNFLYLASHYEKLKGSPEDNEQKQLFVEQHKHYLDEIIEQISEFSKRVILADANLDKVLSAYNKHRDKPIREQAENIIHLFTLTNLGAPAAFKYFDTTIDRKRYTSTKEVLDATLIHQSITGLYETRIDLSQLGGDGGEAAAKGSSGGTLGDQGSRGSDPLPEPRVTLTVEGIPTEFLVNTGAEHSVLTKPMGKMGSKRTVVAGATGSKVYPWTTKRLLKIGQKQVTHSFLVIPECPAPLLGRDLLTKLKAQIQFSTEGPQVTWEDRPAMCLVLNLEEEYRLHEKPVPPSIDPSWLQLFPMVWAEKAGMGLANQVPPVVVELKSDASPVAVRQYPMSKEAREGIRPHIQRFLDLGILVPCQSPWNTPLLPVKKPGTNDYRPVQDLREVNKRVQDIHPTVPNPYNLLSSLPPSHTWYSVLDLKDAFFCLKLHPNSQPLFAFEWRDPEKGNTGQLTWTRLPQGFKNSPTLFNEALHRDLASFRALNPQVVMLQYVDDLLVAAPTYRDCKEGTRRLLQELSKLGYRVSAKKAQLCREEVTYLGYLLKGGKRWLTPARKATVMKIPTPTTPRQVREFLGKAGFCRLFIPGFASLAAPLYPLTRPKVPFTWTEAHQEAFGRIKEALLSAPALALPDLTKPFALYVDEKEGVARGVLTQTLGPWRRPVAYLSKKLDPVASGWPTCLKAIAAVALLLKDADKLTLGQNVLVIAPHNLESIVRQPPDRWMTNARMTHYQSLLLNERVSFAPPAILNPATLLPVESDDTPIHICSEILAEETGTRPDLRDQPLPGVPAWYTDGSSFIMDGRRQAGAAIVDNKRTVWASNLPEGTSAQKAELIALTQALRLAEGKSINIYTDSRYAFATAHVHGAIYKQRGWLTSAGKDIKNKEEILALLEAIHLPKRVAIIHCPGHQRGTDPVATGNRKADEAAKQAAQSTRILTETTKNAGKRTADGSEFEKRTADGSEFESPKKKAKVE

SEQ ID NO: 6737 - protein, 2093 aa, synthetic construct
MPAAKRVKLDGGDKKYSIGLDIGTNSVGWAVITDEYKVPSKKFKVLGNTDRHSIKKNLIGALLFDSGETAEATRLKRTARRRYTRRKNRICYLQEIFSNEMAKVDDSFFHRLEESFLVEEDKKHERHPIFGNIVDEVAYHEKYPTIYHLRKKLVDSTDKADLRLIYLALAHMIKFRGHFLIEGDLNPDNSDVDKLFIQLVQTYNQLFEENPINASGVDAKAILSARLSKSRRLENLIAQLPGEKKNGLFGNLIALSLGLTPNFKSNFDLAEDAKLQLSKDTYDDDLDNLLAQIGDQYADLFLAAKNLSDAILLSDILRVNTEITKAPLSASMIKRYDEHHQDLTLLKALVRQQLPEKYKEIFFDQSKNGYAGYIDGGASQEEFYKFIKPILEKMDGTEELLVKLNREDLLRKQRTFDNGSIPHQIHLGELHAILRRQEDFYPFLKDNREKIEKILTFRIPYYVGPLARGNSRFAWMTRKSEETITPWNFEEVVDKGASAQSFIERMTNFDKNLPNEKVLPKHSLLYEYFTVYNELTKVKYVTEGMRKPAFLSGEQKKAIVDLLFKTNRKVTVKQLKEDYFKKIECFDSVEISGVEDRFNASLGTYHDLLKIIKDKDFLDNEENEDILEDIVLTLTLFEDREMIEERLKTYAHLFDDKVMKQLKRRRYTGWGRLSRKLINGIRDKQSGKTILDFLKSDGFANRNFMQLIHDDSLTFKEDIQKAQVSGQGDSLHEHIANLAGSPAIKKGILQTVKVVDELVKVMGRHKPENIVIEMARENQTTQKGQKNSRERMKRIEEGIKELGSQILKEHPVENTQLQNEKLYLYYLQNGRDMYVDQELDINRLSDYDVDHIVPQSFLKDDSIDNKVLTRSDKARGKSDNVPSEEVVKKMKNYWRQLLNAKLITQRKFDNLTKAERGGLSELDKAGFIKRQLVETRQITKHVAQILDSRMNTKYDENDKLIREVKVITLKSKLVSDFRKDFQFYKVREINNYHHAHDAYLNAVVGTALIKKYPKLESEFVYGDYKVYDVRKMIAKSEQEIGKATAKYFFYSNIMNFFKTEITLANGEIRKRPLIETNGETGEIVWDKGRDFATVRKVLSMPQVNIVKKTEVQTGGFSKESILPKRNSDKLIARKKDWDPKKYGGFDSPTVAYSVLVVAKVEKGKSKKLKSVKELLGITIMERSSFEKNPIDFLEAKGYKEVKKDLIIKLPKYSLFELENGRKRMLASAGELQKGNELALPSKYVNFLYLASHYEKLKGSPEDNEQKQLFVEQHKHYLDEIIEQISEFSKRVILADANLDKVLSAYNKHRDKPIREQAENIIHLFTLTNLGAPAAFKYFDTTIDRKRYTSTKEVLDATLIHQSITGLYETRIDLSQLGGDGGEAAAKGSSGGTLNLEDEYRLYETSAEPEVSPGSTWLSDFPQAWAETGGMGLAVRQAPLIIPLKATSTPVSIKQYPMSQEAKLGIKPHIQRLLDQGILVPCQSPWNTPLLPVKKPGTNDYRPVQDLREVNKRVEDIHPTVPNPYNLLSGLPPSHRWYTVLDLKDAFFCLRLHPTSQPLFAFEWRDPGMGISGQLTWTRLPQGFKNSPTLFNEALHRDLADFRIQHPDLILLQYVDDILLAATSELDCQQGTRALLLTLGNLGYRASAKKAQLCQKQVKYLGYLLKEGQRWLTEARKETVMGQPTPKTPRQLREFLGTAGFCRLWIPGFAEMAAPLYPLTKPGTLFNWGPDQQKAYQEIKQALLTAPALGLPDLTKPFELFVDEKQGYAKGVLTQKLGPWRRPVAYLSKKLDPVAAGWPPCLRMVAAIAVLRKDAGKLTMGQPLVILAPHAVEALVKQPPDRWLSNARMTHYQAMLLDTDRVQFGPVVALNPATLLPLPEEGAPHDCLEILAETHGTRPDLTDQPIPDADHTWYTDGSSFLQEGQRKAGAAVTTETEVIWARALPAGTSAQRAELIALTQALKMAEGKRLNVYTDSRYAFATAHIHGEIYRRRGWLTSEGREIKNKSEILALLKALFLPKRLSIIHCLGHQKGDSAEARGNRLADQAAREAAIKTPPDTSTLLAGKRTADGSEFEKRTADGSEFESPKKKAKVE

SEQ ID NO: 6738 - protein, 2093 aa, synthetic construct; identical to SEQ ID NO: 4512

SEQ ID NO: 6739 - protein, 2093 aa, synthetic construct
MPAAKRVKLDGGDKKYSIGLDIGTNSVGWAVITDEYKVPSKKFKVLGNTDRHSIKKNLIGALLFDSGETAEATRLKRTARRRYTRRKNRICYLQEIFSNEMAKVDDSFFHRLEESFLVEEDKKHERHPIFGNIVDEVAYHEKYPTIYHLRKKLVDSTDKADLRLIYLALAHMIKFRGHFLIEGDLNPDNSDVDKLFIQLVQTYNQLFEENPINASGVDAKAILSARLSKSRRLENLIAQLPGEKKNGLFGNLIALSLGLTPNFKSNFDLAEDAKLQLSKDTYDDDLDNLLAQIGDQYADLFLAAKNLSDAILLSDILRVNTEITKAPLSASMIKRYDEHHQDLTLLKALVRQQLPEKYKEIFFDQSKNGYAGYIDGGASQEEFYKFIKPILEKMDGTEELLVKLNREDLLRKQRTFDNGSIPHQIHLGELHAILRRQEDFYPFLKDNREKIEKILTFRIPYYVGPLARGNSRFAWMTRKSEETITPWNFEEVVDKGASAQSFIERMTNFDKNLPNEKVLPKHSLLYEYFTVYNELTKVKYVTEGMRKPAFLSGEQKKAIVDLLFKTNRKVTVKQLKEDYFKKIECFDSVEISGVEDRFNASLGTYHDLLKIIKDKDFLDNEENEDILEDIVLTLTLFEDREMIEERLKTYAHLFDDKVMKQLKRRRYTGWGRLSRKLINGIRDKQSGKTILDFLKSDGFANRNFMQLIHDDSLTFKEDIQKAQVSGQGDSLHEHIANLAGSPAIKKGILQTVKVVDELVKVMGRHKPENIVIEMARENQTTQKGQKNSRERMKRIEEGIKELGSQILKEHPVENTQLQNEKLYLYYLQNGRDMYVDQELDINRLSDYDVDHIVPQSFLKDDSIDNKVLTRSDKARGKSDNVPSEEVVKKMKNYWRQLLNAKLITQRKFDNLTKAERGGLSELDKAGFIKRQLVETRQITKHVAQILDSRMNTKYDENDKLIREVKVITLKSKLVSDFRKDFQFYKVREINNYHHAHDAYLNAVVGTALIKKYPKLESEFVYGDYKVYDVRKMIAKSEQEIGKATAKYFFYSNIMNFFKTEITLANGEIRKRPLIETNGETGEIVWDKGRDFATVRKVLSMPQVNIVKKTEVQTGGFSKESILPKRNSDKLIARKKDWDPKKYGGFDSPTVAYSVLVVAKVEKGKSKKLKSVKELLGITIMERSSFEKNPIDFLEAKGYKEVKKDLIIKLPKYSLFELENGRKRMLASAGELQKGNELALPSKYVNFLYLASHYEKLKGSPEDNEQKQLFVEQHKHYLDEIIEQISEFSKRVILADANLDKVLSAYNKHRDKPIREQAENIIHLFTLTNLGAPAAFKYFDTTIDRKRYTSTKEVLDATLIHQSITGLYETRIDLSQLGGDGGEAAAKGSSGGTLGIEDEYRLHETSTEPDVSLGSTWLSDFPQAWAETGGMGLAVRQAPLIIPLKATSTPVSIQQYPMSHEARLGIKPHIQRLLDQGILVPCQSPWNTPLLPVKKPGTNDYRPVQDLREVNKRVEDIHPTVPNPYNLLSGLPPSHQWYTVLDLKDAFFCLRLHPTSQPLFAFEWRDPGMGISGQLTWTRLPQGFKNSPTLFDEALHRDLADFRIQHPDLILLQYVDDILLAATSELDCQQGTRALLQTLGDLGYRASAKKAQICQKQVKYLGYLLREGQRWLTEARKETVMGQPVPKTPRQLREFLGTAGFCRLWIPGFAEMAAPLYPLTKTGTLFSWGPDQQKAYQEIKQALLTAPALGLPDLTKPFELFVDEKQGYAKGVLTQKLGPWRRPVAYLSKKLDPVAAGWPPCLRMVAAIAVLTKDAGKLTMGQPLVILAPHAVEALVKQPPDRWLSNARMTHYQAMLLDTDRVQFGPVVALNPATLLPLPEEGAPHDCLEILAETHGTRPDLTDQPIPDADHTWYTDGSSFLQEGQRKAGAAVTTETEVIWAGALPAGTSAQRAELIALTQALKMAEGKRLNVYTDSRYAFATAHIHGEIYRRRGLLTSEGREIKNKSEILALLKALFLPKRLSIIHCLGHQKGDSAEARGNRLADQAAREAAIKTPPDTSTLLAGKRTADGSEFEKRTADGSEFESPKKKAKVE

SEQ ID NO: 6740 - protein, 2093 aa, synthetic construct
MPAAKRVKLDGGDKKYSIGLDIGTNSVGWAVITDEYKVPSKKFKVLGNTDRHSIKKNLIGALLFDSGETAEATRLKRTARRRYTRRKNRICYLQEIFSNEMAKVDDSFFHRLEESFLVEEDKKHERHPIFGNIVDEVAYHEKYPTIYHLRKKLVDSTDKADLRLIYLALAHMIKFRGHFLIEGDLNPDNSDVDKLFIQLVQTYNQLFEENPINASGVDAKAILSARLSKSRRLENLIAQLPGEKKNGLFGNLIALSLGLTPNFKSNFDLAEDAKLQLSKDTYDDDLDNLLAQIGDQYADLFLAAKNLSDAILLSDILRVNTEITKAPLSASMIKRYDEHHQDLTLLKALVRQQLPEKYKEIFFDQSKNGYAGYIDGGASQEEFYKFIKPILEKMDGTEELLVKLNREDLLRKQRTFDNGSIPHQIHLGELHAILRRQEDFYPFLKDNREKIEKILTFRIPYYVGPLARGNSRFAWMTRKSEETITPWNFEEVVDKGASAQSFIERMTNFDKNLPNEKVLPKHSLLYEYFTVYNELTKVKYVTEGMRKPAFLSGEQKKAIVDLLFKTNRKVTVKQLKEDYFKKIECFDSVEISGVEDRFNASLGTYHDLLKIIKDKDFLDNEENEDILEDIVLTLTLFEDREMIEERLKTYAHLFDDKVMKQLKRRRYTGWGRLSRKLINGIRDKQSGKTILDFLKSDGFANRNFMQLIHDDSLTFKEDIQKAQVSGQGDSLHEHIANLAGSPAIKKGILQTVKVVDELVKVMGRHKPENIVIEMARENQTTQKGQKNSRERMKRIEEGIKELGSQILKEHPVENTQLQNEKLYLYYLQNGRDMYVDQELDINRLSDYDVDHIVPQSFLKDDSIDNKVLTRSDKARGKSDNVPSEEVVKKMKNYWRQLLNAKLITQRKFDNLTKAERGGLSELDKAGFIKRQLVETRQITKHVAQILDSRMNTKYDENDKLIREVKVITLKSKLVSDFRKDFQFYKVREINNYHHAHDAYLNAVVGTALIKKYPKLESEFVYGDYKVYDVRKMIAKSEQEIGKATAKYFFYSNIMNFFKTEITLANGEIRKRPLIETNGETGEIVWDKGRDFATVRKVLSMPQVNIVKKTEVQTGGFSKESILPKRNSDKLIARKKDWDPKKYGGFDSPTVAYSVLVVAKVEKGKSKKLKSVKELLGITIMERSSFEKNPIDFLEAKGYKEVKKDLIIKLPKYSLFELENGRKRMLASAGELQKGNELALPSKYVNFLYLASHYEKLKGSPEDNEQKQLFVEQHKHYLDEIIEQISEFSKRVILADANLDKVLSAYNKHRDKPIREQAENIIHLFTLTNLGAPAAFKYFDTTIDRKRYTSTKEVLDATLIHQSITGLYETRIDLSQLGGDGGEAAAKGSSGGTLNIEDEYRLHEISTEPDVSPGSTWLSDFPQAWAETGGMGLAVRQAPLIIPLKATSTPVSIKQYPMSQEAKLGIKPHIQRLLDQGILVPCQSPWNTPLLPVKKPGTNDYRPVQGLREVNKRVEDIHPTVPNPYNLLSGLPTSHRWYTVLDLKDAFFCLRLHPTSQPLFASEWRDPGMGISGQLTWTRLPQGFKNSPTLFNEALHRGLADFRIQHPDLILLQYVDDLLLAATSELDCQQGTRALLKTLGNLGYRASAKKAQICQKQVKYLGYLLREGQRWLTEARKETVMGQPTPKTPRQLREFLGTAGFCRLWIPRFAEMAAPLYPLTKPGTLFNWGPDQQKAYHEIKQALLTAPALGLPDLTKPFELFVDEKQGYAKGVLTQKLGPWRRPVAYLSKKLDPVAAGWPPCLRMVAAIAVLTKDAGKLTMGQPLVILAPHAVEALVKQPPDRWLSNARMTHYQAMLLDTDRVQFGPVVALNPATLLPLPEEGAPHDCLEILAETHGTEPDLTDQPIPDADHTWYTDGSSFLQEGQRKAGAAVTTETEVIWARALPAGTSAQRAELIALTQALKMAEGKRLNVYTDSRYAFATAHIHGEIYKRRGWLTSEGREIKNKSEILALLKALFLPKRLSIIHCLGHQKGDSAEARGNRLADQAAREAAIKTPPDTSTLLAGKRTADGSEFEKRTADGSEFESPKKKAKVE

SEQ ID NO: 6741 - protein, 2087 aa, synthetic construct
MPAAKRVKLDGGDKKYSIGLDIGTNSVGWAVITDEYKVPSKKFKVLGNTDRHSIKKNLIGALLFDSGETAEATRLKRTARRRYTRRKNRICYLQEIFSNEMAKVDDSFFHRLEESFLVEEDKKHERHPIFGNIVDEVAYHEKYPTIYHLRKKLVDSTDKADLRLIYLALAHMIKFRGHFLIEGDLNPDNSDVDKLFIQLVQTYNQLFEENPINASGVDAKAILSARLSKSRRLENLIAQLPGEKKNGLFGNLIALSLGLTPNFKSNFDLAEDAKLQLSKDTYDDDLDNLLAQIGDQYADLFLAAKNLSDAILLSDILRVNTEITKAPLSASMIKRYDEHHQDLTLLKALVRQQLPEKYKEIFFDQSKNGYAGYIDGGASQEEFYKFIKPILEKMDGTEELLVKLNREDLLRKQRTFDNGSIPHQIHLGELHAILRRQEDFYPFLKDNREKIEKILTFRIPYYVGPLARGNSRFAWMTRKSEETITPWNFEEVVDKGASAQSFIERMTNFDKNLPNEKVLPKHSLLYEYFTVYNELTKVKYVTEGMRKPAFLSGEQKKAIVDLLFKTNRKVTVKQLKEDYFKKIECFDSVEISGVEDRFNASLGTYHDLLKIIKDKDFLDNEENEDILEDIVLTLTLFEDREMIEERLKTYAHLFDDKVMKQLKRRRYTGWGRLSRKLINGIRDKQSGKTILDFLKSDGFANRNFMQLIHDDSLTFKEDIQKAQVSGQGDSLHEHIANLAGSPAIKKGILQTVKVVDELVKVMGRHKPENIVIEMARENQTTQKGQKNSRERMKRIEEGIKELGSQILKEHPVENTQLQNEKLYLYYLQNGRDMYVDQELDINRLSDYDVDHIVPQSFLKDDSIDNKVLTRSDKARGKSDNVPSEEVVKKMKNYWRQLLNAKLITQRKFDNLTKAERGGLSELDKAGFIKRQLVETRQITKHVAQILDSRMNTKYDENDKLIREVKVITLKSKLVSDFRKDFQFYKVREINNYHHAHDAYLNAVVGTALIKKYPKLESEFVYGDYKVYDVRKMIAKSEQEIGKATAKYFFYSNIMNFFKTEITLANGEIRKRPLIETNGETGEIVWDKGRDFATVRKVLSMPQVNIVKKTEVQTGGFSKESILPKRNSDKLIARKKDWDPKKYGGFDSPTVAYSVLVVAKVEKGKSKKLKSVKELLGITIMERSSFEKNPIDFLEAKGYKEVKKDLIIKLPKYSLFELENGRKRMLASAGELQKGNELALPSKYVNFLYLASHYEKLKGSPEDNEQKQLFVEQHKHYLDEIIEQISEFSKRVILADANLDKVLSAYNKHRDKPIREQAENIIHLFTLTNLGAPAAFKYFDTTIDRKRYTSTKEVLDATLIHQSITGLYETRIDLSQLGGDGGEAAAKGSSGGTLQLDDEYRLYSPLVKPDQNIQFWLEQFPQAWAETAGMGLAKQVPPQVIQLKASATPVSVRQYPLSKEAQEGIRPHVQRLIQQGILVPVQSPWNTPLLPVRKPGTNDYRPVQDLREVNKRVQDIHPTVPNPYNLLCALPPQRSWYTVLDLKDAFFCLRLHPTSQPLFAFEWRDPGTGRTGQLTWTRLPQGFKNSPTIFDEALHRDLANFRIQHPQVTLLQYVDDLLLAGATKQDCLEGTKALLLELSDLGYRASAKKAQICRREVTYLGYSLRDGQRWLTEARKKTVVQIPAPTTAKQVREFLGTAGFCRLWIPGFATLAAPLYPLTKEKGEFSWAPEHQKAFDAIKKALLSAPALALPDVTKPFTLYVDERKGVARGVLTQTLGPWRRPVAYLSKKLDPVASGWPVCLKAIAAVAILVKDADKLTLGQNITVIAPHALENIVRQPPDRWMTNARMTHYQSLLLTERVTFAPPAALNPATLLPEETDEPVTHDCHQLLIEETGVRKDLTDIPLTGEVLTWFTDGSSYVVEGKRMAGAAVVDGTRTIWASSLPEGTSAQKAELMALTQALRLAEGKSINIYTDSRYAFATAHVHGAIYKQRGLLTSAGREIKNKEEILSLLEALHLPKRLAIIHCPGHQKAKDPISRGNQMADRVAKQAAQGVNLLAGKRTADGSEFEKRTADGSEFESPKKKAKVE

SEQ ID NO: 6742 - protein, 2014 aa, synthetic construct
MPAAKRVKLDGGDKKYSIGLDIGTNSVGWAVITDEYKVPSKKFKVLGNTDRHSIKKNLIGALLFDSGETAEATRLKRTARRRYTRRKNRICYLQEIFSNEMAKVDDSFFHRLEESFLVEEDKKHERHPIFGNIVDEVAYHEKYPTIYHLRKKLVDSTDKADLRLIYLALAHMIKFRGHFLIEGDLNPDNSDVDKLFIQLVQTYNQLFEENPINASGVDAKAILSARLSKSRRLENLIAQLPGEKKNGLFGNLIALSLGLTPNFKSNFDLAEDAKLQLSKDTYDDDLDNLLAQIGDQYADLFLAAKNLSDAILLSDILRVNTEITKAPLSASMIKRYDEHHQDLTLLKALVRQQLPEKYKEIFFDQSKNGYAGYIDGGASQEEFYKFIKPILEKMDGTEELLVKLNREDLLRKQRTFDNGSIPHQIHLGELHAILRRQEDFYPFLKDNREKIEKILTFRIPYYVGPLARGNSRFAWMTRKSEETITPWNFEEVVDKGASAQSFIERMTNFDKNLPNEKVLPKHSLLYEYFTVYNELTKVKYVTEGMRKPAFLSGEQKKAIVDLLFKTNRKVTVKQLKEDYFKKIECFDSVEISGVEDRFNASLGTYHDLLKIIKDKDFLDNEENEDILEDIVLTLTLFEDREMIEERLKTYAHLFDDKVMKQLKRRRYTGWGRLSRKLINGIRDKQSGKTILDFLKSDGFANRNFMQLIHDDSLTFKEDIQKAQVSGQGDSLHEHIANLAGSPAIKKGILQTVKVVDELVKVMGRHKPENIVIEMARENQTTQKGQKNSRERMKRIEEGIKELGSQILKEHPVENTQLQNEKLYLYYLQNGRDMYVDQELDINRLSDYDVDHIVPQSFLKDDSIDNKVLTRSDKARGKSDNVPSEEVVKKMKNYWRQLLNAKLITQRKFDNLTKAERGGLSELDKAGFIKRQLVETRQITKHVAQILDSRMNTKYDENDKLIREVKVITLKSKLVSDFRKDFQFYKVREINNYHHAHDAYLNAVVGTALIKKYPKLESEFVYGDYKVYDVRKMIAKSEQEIGKATAKYFFYSNIMNFFKTEITLANGEIRKRPLIETNGETGEIVWDKGRDFATVRKVLSMPQVNIVKKTEVQTGGFSKESILPKRNSDKLIARKKDWDPKKYGGFDSPTVAYSVLVVAKVEKGKSKKLKSVKELLGITIMERSSFEKNPIDFLEAKGYKEVKKDLIIKLPKYSLFELENGRKRMLASAGELQKGNELALPSKYVNFLYLASHYEKLKGSPEDNEQKQLFVEQHKHYLDEIIEQISEFSKRVILADANLDKVLSAYNKHRDKPIREQAENIIHLFTLTNLGAPAAFKYFDTTIDRKRYTSTKEVLDATLIHQSITGLYETRIDLSQLGGDGGEAAAKGSSGGPRSRAIDIPVPHADKISWKITDPVWVDQWPLTYEKTLAAIALVQEQLAAGHIEPTNSPWNTPIFIIKKKSGSWRLLQDLRAVNKVMVPMGALQPGLPSPVAPPLNYHKIVIDLKDCFFTIPLHPEDRPYFAFSVPQINFQSPMPRYQWKVLPQGMANSPTLCQKFVAAAIAPVRSQWPEAYILHYMDDILLACDSAEAAKACYAHIISCLTSYGLKIAPDKVQVSEPFSYLGFELHHQQVFTPRVCLKTDHLKTLNDFQKLLGDIQWLRPYLKLPTSALVPLNNILKPDPNPLSVRALTPEAKQSLALINKAIQNQSVQQISYNLPLVLLLLPTPHTPTAVFWQPNGTDPTKNGSPLLWLHLPASPSKVLLTYPSLLAMLIIKGRYTGRQLFGRDPHSIIIPYTQDQLTWLLQTSDEWAIALSSFTGDIDNHYPSDPVIQFAKLHQFIFPKITKCAPIPQATLVFTDGSSNGIAAYVIDNQPISIKSPYLSAQLVELYAILQVFTVLAHQPFNLYTDSAYIAQSVPLLETVPFIKSSTNATPLFSKLQQLILNRQHPFFIGHLRAHLNLPGPLAEGNALADAATQIFPIISDAGKRTADGSEFEKRTADGSEFESPKKKAKVE

SEQ ID NO: 6743 - protein, 2072 aa, synthetic construct
MPAAKRVKLDGGDKKYSIGLDIGTNSVGWAVITDEYKVPSKKFKVLGNTDRHSIKKNLIGALLFDSGETAEATRLKRTARRRYTRRKNRICYLQEIFSNEMAKVDDSFFHRLEESFLVEEDKKHERHPIFGNIVDEVAYHEKYPTIYHLRKKLVDSTDKADLRLIYLALAHMIKFRGHFLIEGDLNPDNSDVDKLFIQLVQTYNQLFEENPINASGVDAKAILSARLSKSRRLENLIAQLPGEKKNGLFGNLIALSLGLTPNFKSNFDLAEDAKLQLSKDTYDDDLDNLLAQIGDQYADLFLAAKNLSDAILLSDILRVNTEITKAPLSASMIKRYDEHHQDLTLLKALVRQQLPEKYKEIFFDQSKNGYAGYIDGGASQEEFYKFIKPILEKMDGTEELLVKLNREDLLRKQRTFDNGSIPHQIHLGELHAILRRQEDFYPFLKDNREKIEKILTFRIPYYVGPLARGNSRFAWMTRKSEETITPWNFEEVVDKGASAQSFIERMTNFDKNLPNEKVLPKHSLLYEYFTVYNELTKVKYVTEGMRKPAFLSGEQKKAIVDLLFKTNRKVTVKQLKEDYFKKIECFDSVEISGVEDRFNASLGTYHDLLKIIKDKDFLDNEENEDILEDIVLTLTLFEDREMIEERLKTYAHLFDDKVMKQLKRRRYTGWGRLSRKLINGIRDKQSGKTILDFLKSDGFANRNFMQLIHDDSLTFKEDIQKAQVSGQGDSLHEHIANLAGSPAIKKGILQTVKVVDELVKVMGRHKPENIVIEMARENQTTQKGQKNSRERMKRIEEGIKELGSQILKEHPVENTQLQNEKLYLYYLQNGRDMYVDQELDINRLSDYDVDHIVPQSFLKDDSIDNKVLTRSDKARGKSDNVPSEEVVKKMKNYWRQLLNAKLITQRKFDNLTKAERGGLSELDKAGFIKRQLVETRQITKHVAQILDSRMNTKYDENDKLIREVKVITLKSKLVSDFRKDFQFYKVREINNYHHAHDAYLNAVVGTALIKKYPKLESEFVYGDYKVYDVRKMIAKSEQEIGKATAKYFFYSNIMNFFKTEITLANGEIRKRPLIETNGETGEIVWDKGRDFATVRKVLSMPQVNIVKKTEVQTGGFSKESILPKRNSDKLIARKKDWDPKKYGGFDSPTVAYSVLVVAKVEKGKSKKLKSVKELLGITIMERSSFEKNPIDFLEAKGYKEVKKDLIIKLPKYSLFELENGRKRMLASAGELQKGNELALPSKYVNFLYLASHYEKLKGSPEDNEQKQLFVEQHKHYLDEIIEQISEFSKRVILADANLDKVLSAYNKHRDKPIREQAENIIHLFTLTNLGAPAAFKYFDTTIDRKRYTSTKEVLDATLIHQSITGLYETRIDLSQLGGDGGEAAAKGSSGGSCQTKNTLNIDEYLLQFPDQLWASLPTDIGRMLVPPITIKIKDNASLPSIRQYPLPKDKTEGLRPLISSLENQGILIKCHSPCNTPIFPIKKAGRDEYRMIHDLRAINNIVAPLTAVVASPTTVLSNLAPSLHWFTVIDLSNAFFSVPIHKDSQYLFAFTFEGHQYTWTVLPQGFIHSPTLFSQALYQSLHKIKFKISSEICIYMDDVLIASKDRDTNLKDTAVMLQHLASEGHKVSKKKLQLCQQEVVYLGQLLTPEGRKILPDRKVTVSQFQQPTTIRQIRAFLGLVGYCRHWIPEFSIHSKFLEKQLKKDTAEPFQLDDQQVEAFNKLKHAITTAPVLVVPDPAKPFQLYTSHSEHASIAVLTQKHAGRTRPIAFLSSKFDAIESGLPPCLKACASIHRSLTQADSFILGAPLIIYTTHAICTLLQRDRSQLVTASRFSKWEADLLRPELTFVACSAVSPAHLYMQSCENNIPPHDCVLLTHTISRPRPDLSDLPIPDPDMTLFSDGSYTTGRGGAAVVMHRPVTDDFIIIHQQPGGASAQTAELLALAAACHLATDKTVNIYTDSRYAYGVVHDFGHLWMHRGFVTSAGTPIKNHKEIEYLLKQIMKPKQVSVIKIEAHTKGVSMEVRGNAAADEAAKNAVFLVQRAGKRTADGSEFEKRTADGSEFESPKKKAKVE

SEQ ID NO: 6744 - protein, 2093 aa, synthetic construct
MPAAKRVKLDGGDKKYSIGLDIGTNSVGWAVITDEYKVPSKKFKVLGNTDRHSIKKNLIGALLFDSGETAEATRLKRTARRRYTRRKNRICYLQEIFSNEMAKVDDSFFHRLEESFLVEEDKKHERHPIFGNIVDEVAYHEKYPTIYHLRKKLVDSTDKADLRLIYLALAHMIKFRGHFLIEGDLNPDNSDVDKLFIQLVQTYNQLFEENPINASGVDAKAILSARLSKSRRLENLIAQLPGEKKNGLFGNLIALSLGLTPNFKSNFDLAEDAKLQLSKDTYDDDLDNLLAQIGDQYADLFLAAKNLSDAILLSDILRVNTEITKAPLSASMIKRYDEHHQDLTLLKALVRQQLPEKYKEIFFDQSKNGYAGYIDGGASQEEFYKFIKPILEKMDGTEELLVKLNREDLLRKQRTFDNGSIPHQIHLGELHAILRRQEDFYPFLKDNREKIEKILTFRIPYYVGPLARGNSRFAWMTRKSEETITPWNFEEVVDKGASAQSFIERMTNFDKNLPNEKVLPKHSLLYEYFTVYNELTKVKYVTEGMRKPAFLSGEQKKAIVDLLFKTNRKVTVKQLKEDYFKKIECFDSVEISGVEDRFNASLGTYHDLLKIIKDKDFLDNEENEDILEDIVLTLTLFEDREMIEERLKTYAHLFDDKVMKQLKRRRYTGWGRLSRKLINGIRDKQSGKTILDFLKSDGFANRNFMQLIHDDSLTFKEDIQKAQVSGQGDSLHEHIANLAGSPAIKKGILQTVKVVDELVKVMGRHKPENIVIEMARENQTTQKGQKNSRERMKRIEEGIKELGSQILKEHPVENTQLQNEKLYLYYLQNGRDMYVDQELDINRLSDYDVDHIVPQSFLKDDSIDNKVLTRSDKARGKSDNVPSEEVVKKMKNYWRQLLNAKLITQRKFDNLTKAERGGLSELDKAGFIKRQLVETRQITKHVAQILDSRMNTKYDENDKLIREVKVITLKSKLVSDFRKDFQFYKVREINNYHHAHDAYLNAVVGTALIKKYPKLESEFVYGDYKVYDVRKMIAKSEQEIGKATAKYFFYSNIMNFFKTEITLANGEIRKRPLIETNGETGEIVWDKGRDFATVRKVLSMPQVNIVKKTEVQTGGFSKESILPKRNSDKLIARKKDWDPKKYGGFDSPTVAYSVLVVAKVEKGKSKKLKSVKELLGITIMERSSFEKNPIDFLEAKGYKEVKKDLIIKLPKYSLFELENGRKRMLASAGELQKGNELALPSKYVNFLYLASHYEKLKGSPEDNEQKQLFVEQHKHYLDEIIEQISEFSKRVILADANLDKVLSAYNKHRDKPIREQAENIIHLFTLTNLGAPAAFKYFDTTIDRKRYTSTKEVLDATLIHQSITGLYETRIDLSQLGGDGGEAAAKGSSGGTLNIEDEYRLHETSKEPDVPLGSTWLSDFPQAWAETGGMGLAVRQAPLIIPLKATSTPVSIKQYPMSQEARLGIKPHIQRLLDQGILVPCQSPWNTPLLPVKKPGTNDYRPVQDLREVNKRVEDIHPTVPNPYNLLSGLPPSHQWYTVLDLKDAFFCLRLHPTSQPLFAFEWRDPEMGISGQLTWTRLPQGFKNSPTLFNEALHRDLADFRIQHPDLILLQYVDDLLLAATSEQDCQRGTRALLQTLGNLGYRASAKKAQICQKQVKYLGYLLKEGQRWLTEARKETVMGQPTPKTPRQLREFLGTAGFCRLWIPGFAEMAAPLYPLTKPGTLFNWGPDQQKAYQEIKQALLTAPALGLPDLTKPFELFVDEKQGYAKGVLTQKLGPWRRPVAYLSKKLDPVAAGWPPCLRMVAAIAVLTKDAGKLTMGQPLVILAPHAVEALVKQPPDRWLSNARMTHYQAMLLDTDRVQFGPVVALNPATLLPLPEKEAPHDCLEILAETHGTRPDLTDQPIPDADYTWYTDGSSFLQEGQRRAGAAVTTETEVIWARALPAGTSAQRAELIALTQALKMAEGKKLNVYTDSRYAFATAHVHGEIYRRRGWLTSEGREIKNKNEILALLKALFLPKRLSIIHCPGHQKGNSAEARGNRMADQAAREAAMKAVLETSTLLAGKRTADGSEFEKRTADGSEFESPKKKAKVE

SEQ ID NO: 6745 - protein, 2093 aa, synthetic construct
MPAAKRVKLDGGDKKYSIGLDIGTNSVGWAVITDEYKVPSKKFKVLGNTDRHSIKKNLIGALLFDSGETAEATRLKRTARRRYTRRKNRICYLQEIFSNEMAKVDDSFFHRLEESFLVEEDKKHERHPIFGNIVDEVAYHEKYPTIYHLRKKLVDSTDKADLRLIYLALAHMIKFRGHFLIEGDLNPDNSDVDKLFIQLVQTYNQLFEENPINASGVDAKAILSARLSKSRRLENLIAQLPGEKKNGLFGNLIALSLGLTPNFKSNFDLAEDAKLQLSKDTYDDDLDNLLAQIGDQYADLFLAAKNLSDAILLSDILRVNTEITKAPLSASMIKRYDEHHQDLTLLKALVRQQLPEKYKEIFFDQSKNGYAGYIDGGASQEEFYKFIKPILEKMDGTEELLVKLNREDLLRKQRTFDNGSIPHQIHLGELHAILRRQEDFYPFLKDNREKIEKILTFRIPYYVGPLARGNSRFAWMTRKSEETITPWNFEEVVDKGASAQSFIERMTNFDKNLPNEKVLPKHSLLYEYFTVYNELTKVKYVTEGMRKPAFLSGEQKKAIVDLLFKTNRKVTVKQLKEDYFKKIECFDSVEISGVEDRFNASLGTYHDLLKIIKDKDFLDNEENEDILEDIVLTLTLFEDREMIEERLKTYAHLFDDKVMKQLKRRRYTGWGRLSRKLINGIRDKQSGKTILDFLKSDGFANRNFMQLIHDDSLTFKEDIQKAQVSGQGDSLHEHIANLAGSPAIKKGILQTVKVVDELVKVMGRHKPENIVIEMARENQTTQKGQKNSRERMKRIEEGIKELGSQILKEHPVENTQLQNEKLYLYYLQNGRDMYVDQELDINRLSDYDVDHIVPQSFLKDDSIDNKVLTRSDKARGKSDNVPSEEVVKKMKNYWRQLLNAKLITQRKFDNLTKAERGGLSELDKAGFIKRQLVETRQITKHVAQILDSRMNTKYDENDKLIREVKVITLKSKLVSDFRKDFQFYKVREINNYHHAHDAYLNAVVGTALIKKYPKLESEFVYGDYKVYDVRKMIAKSEQEIGKATAKYFFYSNIMNFFKTEITLANGEIRKRPLIETNGETGEIVWDKGRDFATVRKVLSMPQVNIVKKTEVQTGGFSKESILPKRNSDKLIARKKDWDPKKYGGFDSPTVAYSVLVVAKVEKGKSKKLKSVKELLGITIMERSSFEKNPIDFLEAKGYKEVKKDLIIKLPKYSLFELENGRKRMLASAGELQKGNELALPSKYVNFLYLASHYEKLKGSPEDNEQKQLFVEQHKHYLDEIIEQISEFSKRVILADANLDKVLSAYNKHRDKPIREQAENIIHLFTLTNLGAPAAFKYFDTTIDRKRYTSTKEVLDATLIHQSITGLYETRIDLSQLGGDGGGSSPAPGGTAPLEEEYRLFLEAPIQNVTLLEQWKREIPKVWAEINPPGLASTQAPIHVQLLSTALPVRVRQYPITLEAKRSLRETIRKFRAAGILRPVHSPWNTPLLPVRKSGTSEYRMVQDLREVNKRVETIHPTVPNPYTLLSLLPPDRIWYSVLDLKDAFFCIPLAPESQLIFAFEWADAEEGESGQLTWTRLPQGFKNSPTLFNEALNRDLQGFRLDHPSVSLLQYVDDLLIAADTQAACLSATRDLLMTLAELGYRVSGKKAQLCQEEVTYLGFKIHKGSRSLSNSRTQAILQIPVPKTKRQVREFLGTIGYCRLWIPGFAELAQPLYAATRPGNDPLVWGEKEEEAFQSLKLALTQPPALALPSLDKPFQLFVEETSGAAKGVLTQALGPWKRPVAYLSKRLDPVAAGWPRCLRAIAAAALLTREASKLTFGQDIEITSSHNLESLLRSPPDKWLTNARITQYQVLLLDPPRVRFKQTAALNPATLLPETDDTLPIHHCLDTLDSLTSTRPDLTDQPLAQAEATLFTDGSSYIRDGKRYAGAAVVTLDSVIWAEPLPIGTSAQKAELIALTKALEWSKDKSVNIYTDSRYAFATLHVHGMIYRERGWLTAGGKAIKNAPEILALLTAVWLPKRVAVMHCKGHQKDDAPTSTGNRRADEVAREVAIRPLSTQATISAGKRTADGSEFEKRTADGSEFESPKKKAKVE

SEQ ID NO: 6746 - protein, 2097 aa, synthetic construct
MPAAKRVKLDGGDKKYSIGLDIGTNSVGWAVITDEYKVPSKKFKVLGNTDRHSIKKNLIGALLFDSGETAEATRLKRTARRRYTRRKNRICYLQEIFSNEMAKVDDSFFHRLEESFLVEEDKKHERHPIFGNIVDEVAYHEKYPTIYHLRKKLVDSTDKADLRLIYLALAHMIKFRGHFLIEGDLNPDNSDVDKLFIQLVQTYNQLFEENPINASGVDAKAILSARLSKSRRLENLIAQLPGEKKNGLFGNLIALSLGLTPNFKSNFDLAEDAKLQLSKDTYDDDLDNLLAQIGDQYADLFLAAKNLSDAILLSDILRVNTEITKAPLSASMIKRYDEHHQDLTLLKALVRQQLPEKYKEIFFDQSKNGYAGYIDGGASQEEFYKFIKPILEKMDGTEELLVKLNREDLLRKQRTFDNGSIPHQIHLGELHAILRRQEDFYPFLKDNREKIEKILTFRIPYYVGPLARGNSRFAWMTRKSEETITPWNFEEVVDKGASAQSFIERMTNFDKNLPNEKVLPKHSLLYEYFTVYNELTKVKYVTEGMRKPAFLSGEQKKAIVDLLFKTNRKVTVKQLKEDYFKKIECFDSVEISGVEDRFNASLGTYHDLLKIIKDKDFLDNEENEDILEDIVLTLTLFEDREMIEERLKTYAHLFDDKVMKQLKRRRYTGWGRLSRKLINGIRDKQSGKTILDFLKSDGFANRNFMQLIHDDSLTFKEDIQKAQVSGQGDSLHEHIANLAGSPAIKKGILQTVKVVDELVKVMGRHKPENIVIEMARENQTTQKGQKNSRERMKRIEEGIKELGSQILKEHPVENTQLQNEKLYLYYLQNGRDMYVDQELDINRLSDYDVDHIVPQSFLKDDSIDNKVLTRSDKARGKSDNVPSEEVVKKMKNYWRQLLNAKLITQRKFDNLTKAERGGLSELDKAGFIKRQLVETRQITKHVAQILDSRMNTKYDENDKLIREVKVITLKSKLVSDFRKDFQFYKVREINNYHHAHDAYLNAVVGTALIKKYPKLESEFVYGDYKVYDVRKMIAKSEQEIGKATAKYFFYSNIMNFFKTEITLANGEIRKRPLIETNGETGEIVWDKGRDFATVRKVLSMPQVNIVKKTEVQTGGFSKESILPKRNSDKLIARKKDWDPKKYGGFDSPTVAYSVLVVAKVEKGKSKKLKSVKELLGITIMERSSFEKNPIDFLEAKGYKEVKKDLIIKLPKYSLFELENGRKRMLASAGELQKGNELALPSKYVNFLYLASHYEKLKGSPEDNEQKQLFVEQHKHYLDEIIEQISEFSKRVILADANLDKVLSAYNKHRDKPIREQAENIIHLFTLTNLGAPAAFKYFDTTIDRKRYTSTKEVLDATLIHQSITGLYETRIDLSQLGGDGGGSSPAPGGTVSLQDEHRLFDIPVTTSLPDVWLQDFPQAWAETGGLGRAKCQAPIIIDLKPTAVPVSIKQYPMSLEAHMGIRQHIIKFLELGVLRPCRSPWNTPLLPVKKPGTQDYRPVQDLREINKRTVDIHPTVPNPYNLLSTLKPDYSWYTVLDLKDAFFCLPLAPQSQELFAFEWKDPERGISGQLTWTRLPQGFKNSPTLFNEALHRDLTDFRTQHPEVTLLQYVDDLLLAAPTKKACTQGTRHLLQELGEKGYRASAKKAQICQTKVTYLGYILSEGKRWLTPGRIETVARIPPPRNPREVREFLGKAGFCRLFIPGFAELAAPLYALTKPSTPFTWQTEHQLAFEALKKALLSAPALGLPDTSKPFTLFLDERQGIAKGVLTQKLGPWKRPVAYLSKKLDPVAAGWPPCLRIMAATAMLVKDSAKLTLGQPLTVITPHTLEAIVRQPPDRWITNARLTHYQALLLDTDRVQFGPPVTLNPATLLPVPENQPSPHDCRQVLAETHGTREDLKDQELPDADHTWYTDGSSYLDSGTRRAGAAVVDGHNTIWAQSLPPGTSAQKAELIALTKALELSKGKKANIYTDSRYAFATAHTHGSIYERRGWLTSEGKEIKNKAEIIALLKALFLPQEVAIIHCPGHQKGQDPVAVGNRQADRVARQAAMAEVLTLATEPDNTSHITAGKRTADGSEFEKRTADGSEFESPKKKAKVE

SEQ ID NO: 6747 - protein, 2082 aa, synthetic construct
MPAAKRVKLDGGDKKYSIGLDIGTNSVGWAVITDEYKVPSKKFKVLGNTDRHSIKKNLIGALLFDSGETAEATRLKRTARRRYTRRKNRICYLQEIFSNEMAKVDDSFFHRLEESFLVEEDKKHERHPIFGNIVDEVAYHEKYPTIYHLRKKLVDSTDKADLRLIYLALAHMIKFRGHFLIEGDLNPDNSDVDKLFIQLVQTYNQLFEENPINASGVDAKAILSARLSKSRRLENLIAQLPGEKKNGLFGNLIALSLGLTPNFKSNFDLAEDAKLQLSKDTYDDDLDNLLAQIGDQYADLFLAAKNLSDAILLSDILRVNTEITKAPLSASMIKRYDEHHQDLTLLKALVRQQLPEKYKEIFFDQSKNGYAGYIDGGASQEEFYKFIKPILEKMDGTEELLVKLNREDLLRKQRTFDNGSIPHQIHLGELHAILRRQEDFYPFLKDNREKIEKILTFRIPYYVGPLARGNSRFAWMTRKSEETITPWNFEEVVDKGASAQSFIERMTNFDKNLPNEKVLPKHSLLYEYFTVYNELTKVKYVTEGMRKPAFLSGEQKKAIVDLLFKTNRKVTVKQLKEDYFKKIECFDSVEISGVEDRFNASLGTYHDLLKIIKDKDFLDNEENEDILEDIVLTLTLFEDREMIEERLKTYAHLFDDKVMKQLKRRRYTGWGRLSRKLINGIRDKQSGKTILDFLKSDGFANRNFMQLIHDDSLTFKEDIQKAQVSGQGDSLHEHIANLAGSPAIKKGILQTVKVVDELVKVMGRHKPENIVIEMARENQTTQKGQKNSRERMKRIEEGIKELGSQILKEHPVENTQLQNEKLYLYYLQNGRDMYVDQELDINRLSDYDVDHIVPQSFLKDDSIDNKVLTRSDKARGKSDNVPSEEVVKKMKNYWRQLLNAKLITQRKFDNLTKAERGGLSELDKAGFIKRQLVETRQITKHVAQILDSRMNTKYDENDKLIREVKVITLKSKLVSDFRKDFQFYKVREINNYHHAHDAYLNAVVGTALIKKYPKLESEFVYGDYKVYDVRKMIAKSEQEIGKATAKYFFYSNIMNFFKTEITLANGEIRKRPLIETNGETGEIVWDKGRDFATVRKVLSMPQVNIVKKTEVQTGGFSKESILPKRNSDKLIARKKDWDPKKYGGFDSPTVAYSVLVVAKVEKGKSKKLKSVKELLGITIMERSSFEKNPIDFLEAKGYKEVKKDLIIKLPKYSLFELENGRKRMLASAGELQKGNELALPSKYVNFLYLASHYEKLKGSPEDNEQKQLFVEQHKHYLDEIIEQISEFSKRVILADANLDKVLSAYNKHRDKPIREQAENIIHLFTLTNLGAPAAFKYFDTTIDRKRYTSTKEVLDATLIHQSITGLYETRIDLSQLGGDGGGSSPAPGGVPWILKKPLELTIKLDLEEQQGTLLNNSILSKKGKEELKQLFEKYSALWQSWENQVGHRRIRPHKIATGTVKPTPQKQYHINPKAKPDIQIVINDLLKQGVLIQKESTMNTPVYPVPKPNGRWRMVLDYRAVNKVTPLIAVQNQHSYGILGSLFKGRYKTTIDLSNGFWAHPIVPEDYWITAFTWQGKQYCWTVLPQGFLNSPGLFTGDVVDLLQGIPNVEVYVDDVYISHDSEKEHLEYLDILFNRLKEAGYIISLKKSNIANSIVDFLGFQITNEGRGLTDTFKEKLENITAPTTLKQLQSILGLLNFARNFIPDFTELIAPLYALIPKSTKNYVPWQIEHSTTLETLITKLNGAEYLQGRKGDKTLIMKVNASYTTGYIRYYNEGEKKPISYVSIVFSKTELKFTELEKLLTTVHKGLLKALDLSMGQNIHVYSPIVSMQNIQKTPQTAKKALASRWLSWLSYLEDPRIRFFYDPQMPALKDLPAVDTGKDNKKHPSNFQHIFYTDGSAITSPTKEGHLNAGMGIVYFINKDGNLQKQQEWSISLGNHTAQFAEIAAFEFALKKCLPLGGNILVVTDSNYVAKAYNEELDVWASNGFVNNRKKPLKHISKWKSVADLKRLRPDVVVTHEPGHQKLDSSPHAYGNNLADQLATQASFKVHAGKRTADGSEFEKRTADGSEFESPKKKAKVE

SEQ ID NO: 6748 - protein, 2090 aa, synthetic construct
MPAAKRVKLDGGDKKYSIGLDIGTNSVGWAVITDEYKVPSKKFKVLGNTDRHSIKKNLIGALLFDSGETAEATRLKRTARRRYTRRKNRICYLQEIFSNEMAKVDDSFFHRLEESFLVEEDKKHERHPIFGNIVDEVAYHEKYPTIYHLRKKLVDSTDKADLRLIYLALAHMIKFRGHFLIEGDLNPDNSDVDKLFIQLVQTYNQLFEENPINASGVDAKAILSARLSKSRRLENLIAQLPGEKKNGLFGNLIALSLGLTPNFKSNFDLAEDAKLQLSKDTYDDDLDNLLAQIGDQYADLFLAAKNLSDAILLSDILRVNTEITKAPLSASMIKRYDEHHQDLTLLKALVRQQLPEKYKEIFFDQSKNGYAGYIDGGASQEEFYKFIKPILEKMDGTEELLVKLNREDLLRKQRTFDNGSIPHQIHLGELHAILRRQEDFYPFLKDNREKIEKILTFRIPYYVGPLARGNSRFAWMTRKSEETITPWNFEEVVDKGASAQSFIERMTNFDKNLPNEKVLPKHSLLYEYFTVYNELTKVKYVTEGMRKPAFLSGEQKKAIVDLLFKTNRKVTVKQLKEDYFKKIECFDSVEISGVEDRFNASLGTYHDLLKIIKDKDFLDNEENEDILEDIVLTLTLFEDREMIEERLKTYAHLFDDKVMKQLKRRRYTGWGRLSRKLINGIRDKQSGKTILDFLKSDGFANRNFMQLIHDDSLTFKEDIQKAQVSGQGDSLHEHIANLAGSPAIKKGILQTVKVVDELVKVMGRHKPENIVIEMARENQTTQKGQKNSRERMKRIEEGIKELGSQILKEHPVENTQLQNEKLYLYYLQNGRDMYVDQELDINRLSDYDVDHIVPQSFLKDDSIDNKVLTRSDKARGKSDNVPSEEVVKKMKNYWRQLLNAKLITQRKFDNLTKAERGGLSELDKAGFIKRQLVETRQITKHVAQILDSRMNTKYDENDKLIREVKVITLKSKLVSDFRKDFQFYKVREINNYHHAHDAYLNAVVGTALIKKYPKLESEFVYGDYKVYDVRKMIAKSEQEIGKATAKYFFYSNIMNFFKTEITLANGEIRKRPLIETNGETGEIVWDKGRDFATVRKVLSMPQVNIVKKTEVQTGGFSKESILPKRNSDKLIARKKDWDPKKYGGFDSPTVAYSVLVVAKVEKGKSKKLKSVKELLGITIMERSSFEKNPIDFLEAKGYKEVKKDLIIKLPKYSLFELENGRKRMLASAGELQKGNELALPSKYVNFLYLASHYEKLKGSPEDNEQKQLFVEQHKHYLDEIIEQISEFSKRVILADANLDKVLSAYNKHRDKPIREQAENIIHLFTLTNLGAPAAFKYFDTTIDRKRYTSTKEVLDATLIHQSITGLYETRIDLSQLGGDGGGSSPAPGGTLQLEEEYRLFEPESTQKQEMDIWLKNFPQAWAETGGMGTAHCQAPVLIQLKATATPISIRQYPMPHEAYQGIKPHIRRMLDQGILKPCQSPWNTPLLPVKKPGTEDYRPVQDLREVNKRVEDIHPTVPNPYNLLSTLPPSHPWYTVLDLKDAFFCLRLHSESQLLFAFEWRDPEIGLSGQLTWTRLPQGFKNSPTLFNEALHSDLADFRVRYPALVLLQYVDDLLLAAATRTECLEGTKALLETLGNKGYRASAKKAQICLQEVTYLGYSLKDGQRWLTKARKEAILSIPVPKNSRQVREFLGTAGYCRLWIPGFAELAAPLYPLTRPGTLFQWGTEQQLAFEDIKKALLSSPALGLPDITKPFELFIDENSGFAKGVLVQKLGPWKRPVAYLSKKLDTVASGWPPCLRMVAAIAILVKDAGKLTLGQPLTILTSHPVEALVRQPPNKWLSNARMTHYQAMLLDAERVHFGPTVSLNPATLLPLPSGGNHHDCLQILAETHGTRPDLTDQPLPDADLTWYTDGSSFIRNGEREAGAAVTTESEVIWAAPLPPGTSAQRAELIALTQALKMAEGKKLTVYTDSRYAFATTHVHGEIYRRRGWLTSEGKEIKNKNEILALLEALFLPKRLSIIHCPGHQKGDSPQAKGNRLADDTAKKAATETHSSLTVLPAGKRTADGSEFEKRTADGSEFESPKKKAKVE

SEQ ID NO: 6749 - protein, 2213 aa, synthetic construct
MPAAKRVKLDGGDKKYSIGLDIGTNSVGWAVITDEYKVPSKKFKVLGNTDRHSIKKNLIGALLFDSGETAEATRLKRTARRRYTRRKNRICYLQEIFSNEMAKVDDSFFHRLEESFLVEEDKKHERHPIFGNIVDEVAYHEKYPTIYHLRKKLVDSTDKADLRLIYLALAHMIKFRGHFLIEGDLNPDNSDVDKLFIQLVQTYNQLFEENPINASGVDAKAILSARLSKSRRLENLIAQLPGEKKNGLFGNLIALSLGLTPNFKSNFDLAEDAKLQLSKDTYDDDLDNLLAQIGDQYADLFLAAKNLSDAILLSDILRVNTEITKAPLSASMIKRYDEHHQDLTLLKALVRQQLPEKYKEIFFDQSKNGYAGYIDGGASQEEFYKFIKPILEKMDGTEELLVKLNREDLLRKQRTFDNGSIPHQIHLGELHAILRRQEDFYPFLKDNREKIEKILTFRIPYYVGPLARGNSRFAWMTRKSEETITPWNFEEVVDKGASAQSFIERMTNFDKNLPNEKVLPKHSLLYEYFTVYNELTKVKYVTEGMRKPAFLSGEQKKAIVDLLFKTNRKVTVKQLKEDYFKKIECFDSVEISGVEDRFNASLGTYHDLLKIIKDKDFLDNEENEDILEDIVLTLTLFEDREMIEERLKTYAHLFDDKVMKQLKRRRYTGWGRLSRKLINGIRDKQSGKTILDFLKSDGFANRNFMQLIHDDSLTFKEDIQKAQVSGQGDSLHEHIANLAGSPAIKKGILQTVKVVDELVKVMGRHKPENIVIEMARENQTTQKGQKNSRERMKRIEEGIKELGSQILKEHPVENTQLQNEKLYLYYLQNGRDMYVDQELDINRLSDYDVDHIVPQSFLKDDSIDNKVLTRSDKARGKSDNVPSEEVVKKMKNYWRQLLNAKLITQRKFDNLTKAERGGLSELDKAGFIKRQLVETRQITKHVAQILDSRMNTKYDENDKLIREVKVITLKSKLVSDFRKDFQFYKVREINNYHHAHDAYLNAVVGTALIKKYPKLESEFVYGDYKVYDVRKMIAKSEQEIGKATAKYFFYSNIMNFFKTEITLANGEIRKRPLIETNGETGEIVWDKGRDFATVRKVLSMPQVNIVKKTEVQTGGFSKESILPKRNSDKLIARKKDWDPKKYGGFDSPTVAYSVLVVAKVEKGKSKKLKSVKELLGITIMERSSFEKNPIDFLEAKGYKEVKKDLIIKLPKYSLFELENGRKRMLASAGELQKGNELALPSKYVNFLYLASHYEKLKGSPEDNEQKQLFVEQHKHYLDEIIEQISEFSKRVILADANLDKVLSAYNKHRDKPIREQAENIIHLFTLTNLGAPAAFKYFDTTIDRKRYTSTKEVLDATLIHQSITGLYETRIDLSQLGGDGGGSSPAPGGTLGDQGSRGSDPLPEPRVTLTVEGIPTEFLVNTGAEHSVLTKPMGKMGSKRTVVAGATGSKVYPWTTKRLLKIGQKQVTHSFLVIPECPAPLLGRDLLTKLKAQIQFSTEGPQVTWEDRPAMCLVLNLEEEYRLHEKPVPPSIDPSWLQLFPMVWAEKAGMGLANQVPPVVVELKSDASPVAVRQYPMSKEAREGIRPHIQRFLDLGILVPCQSPWNTPLLPVKKPGTNDYRPVQDLREVNKRVQDIHPTVPNPYNLLSSLPPSHTWYSVLDLKDAFFCLKLHPNSQPLFAFEWRDPEKGNTGQLTWTRLPQGFKNSPTLFNEALHRDLASFRALNPQVVMLQYVDDLLVAAPTYRDCKEGTRRLLQELSKLGYRVSAKKAQLCREEVTYLGYLLKGGKRWLTPARKATVMKIPTPTTPRQVREFLGTAGFCRLWIPGFASLAAPLYPLTRPKVPFTWTEAHQEAFGRIKEALLSAPALALPDLTKPFALYVDEKEGVARGVLTQTLGPWRRPVAYLSKKLDPVASGWPTCLKAIAAVALLLKDADKLTLGQNVLVIAPHNLESIVRQPPDRWMTNARMTHYQSLLLNERVSFAPPAILNPATLLPVESDDTPIHICSEILAEETGTRPDLRDQPLPGVPAWYTDGSSFIMDGRRQAGAAIVDNKRTVWASNLPEGTSAQKAELIALTQALRLAEGKSINIYTDSRYAFATAHVHGAIYKQRGWLTSAGKDIKNKEEILALLEAIHLPKRVAIIHCPGHQRGTDPVATGNRKADEAAKQAAQSTRILTETTKNAGKRTADGSEFEKRTADGSEFESPKKKAKVE

SEQ ID NO: 6750 - protein, 2091 aa, synthetic construct
MPAAKRVKLDGGDKKYSIGLDIGTNSVGWAVITDEYKVPSKKFKVLGNTDRHSIKKNLIGALLFDSGETAEATRLKRTARRRYTRRKNRICYLQEIFSNEMAKVDDSFFHRLEESFLVEEDKKHERHPIFGNIVDEVAYHEKYPTIYHLRKKLVDSTDKADLRLIYLALAHMIKFRGHFLIEGDLNPDNSDVDKLFIQLVQTYNQLFEENPINASGVDAKAILSARLSKSRRLENLIAQLPGEKKNGLFGNLIALSLGLTPNFKSNFDLAEDAKLQLSKDTYDDDLDNLLAQIGDQYADLFLAAKNLSDAILLSDILRVNTEITKAPLSASMIKRYDEHHQDLTLLKALVRQQLPEKYKEIFFDQSKNGYAGYIDGGASQEEFYKFIKPILEKMDGTEELLVKLNREDLLRKQRTFDNGSIPHQIHLGELHAILRRQEDFYPFLKDNREKIEKILTFRIPYYVGPLARGNSRFAWMTRKSEETITPWNFEEVVDKGASAQSFIERMTNFDKNLPNEKVLPKHSLLYEYFTVYNELTKVKYVTEGMRKPAFLSGEQKKAIVDLLFKTNRKVTVKQLKEDYFKKIECFDSVEISGVEDRFNASLGTYHDLLKIIKDKDFLDNEENEDILEDIVLTLTLFEDREMIEERLKTYAHLFDDKVMKQLKRRRYTGWGRLSRKLINGIRDKQSGKTILDFLKSDGFANRNFMQLIHDDSLTFKEDIQKAQVSGQGDSLHEHIANLAGSPAIKKGILQTVKVVDELVKVMGRHKPENIVIEMARENQTTQKGQKNSRERMKRIEEGIKELGSQILKEHPVENTQLQNEKLYLYYLQNGRDMYVDQELDINRLSDYDVDHIVPQSFLKDDSIDNKVLTRSDKARGKSDNVPSEEVVKKMKNYWRQLLNAKLITQRKFDNLTKAERGGLSELDKAGFIKRQLVETRQITKHVAQILDSRMNTKYDENDKLIREVKVITLKSKLVSDFRKDFQFYKVREINNYHHAHDAYLNAVVGTALIKKYPKLESEFVYGDYKVYDVRKMIAKSEQEIGKATAKYFFYSNIMNFFKTEITLANGEIRKRPLIETNGETGEIVWDKGRDFATVRKVLSMPQVNIVKKTEVQTGGFSKESILPKRNSDKLIARKKDWDPKKYGGFDSPTVAYSVLVVAKVEKGKSKKLKSVKELLGITIMERSSFEKNPIDFLEAKGYKEVKKDLIIKLPKYSLFELENGRKRMLASAGELQKGNELALPSKYVNFLYLASHYEKLKGSPEDNEQKQLFVEQHKHYLDEIIEQISEFSKRVILADANLDKVLSAYNKHRDKPIREQAENIIHLFTLTNLGAPAAFKYFDTTIDRKRYTSTKEVLDATLIHQSITGLYETRIDLSQLGGDGGGSSPAPGGTLGIEDEYRLHETSTEPDVSLGSTWLSDFPQAWAETGGMGLAVRQAPLIIPLKATSTPVSIQQYPMSHEARLGIKPHIQRLLDQGILVPCQSPWNTPLLPVKKPGTNDYRPVQDLREVNKRVEDIHPTVPNPYNLLSGLPPSHQWYTVLDLKDAFFCLRLHPTSQPLFAFEWRDPGMGISGQLTWTRLPQGFKNSPTLFNEALHRDLADFRIQHPDLILLQYVDDILLAATSELDCQQGTRALLQTLGDLGYRASAKKAQICQKQVKYLGYLLREGQRWLTEARKETVMGQPVPKTPRQLREFLGTAGFCRLWIPGFAEMAAPLYPLTKPGTLFSWGPDQQKAYQEIKQALLTAPALGLPDLTKPFELFVDEKQGYAKGVLTQKLGPWRRPVAYLSKKLDPVAAGWPPCLRMVAAIAVLTKDAGKLTMGQPLVILAPHAVEALVKQPPDRWLSNARMTHYQAMLLDTDRVQFGPVVALNPATLLPLPEEGAPHDCLEILAETHGTRPDLTDQPIPDADHTWYTDGSSFLQEGQRKAGAAVTTETEVIWAGALPAGTSAQRAELIALTQALKMAEGKRLNVYTDSRYAFATAHIHGEIYRRRGWLTSEGREIKNKSEILALLKALFLPKRLSIIHCLGHQKGDSAEARGNRLADQAAREAAIKTPPDTSTLLAGKRTADGSEFEKRTADGSEFESPKKKAKVE

SEQ ID NO: 6751 - protein, 2111 aa, synthetic construct
MPAAKRVKLDGGDKKYSIGLDIGTNSVGWAVITDEYKVPSKKFKVLGNTDRHSIKKNLIGALLFDSGETAEATRLKRTARRRYTRRKNRICYLQEIFSNEMAKVDDSFFHRLEESFLVEEDKKHERHPIFGNIVDEVAYHEKYPTIYHLRKKLVDSTDKADLRLIYLALAHMIKFRGHFLIEGDLNPDNSDVDKLFIQLVQTYNQLFEENPINASGVDAKAILSARLSKSRRLENLIAQLPGEKKNGLFGNLIALSLGLTPNFKSNFDLAEDAKLQLSKDTYDDDLDNLLAQIGDQYADLFLAAKNLSDAILLSDILRVNTEITKAPLSASMIKRYDEHHQDLTLLKALVRQQLPEKYKEIFFDQSKNGYAGYIDGGASQEEFYKFIKPILEKMDGTEELLVKLNREDLLRKQRTFDNGSIPHQIHLGELHAILRRQEDFYPFLKDNREKIEKILTFRIPYYVGPLARGNSRFAWMTRKSEETITPWNFEEVVDKGASAQSFIERMTNFDKNLPNEKVLPKHSLLYEYFTVYNELTKVKYVTEGMRKPAFLSGEQKKAIVDLLFKTNRKVTVKQLKEDYFKKIECFDSVEISGVEDRFNASLGTYHDLLKIIKDKDFLDNEENEDILEDIVLTLTLFEDREMIEERLKTYAHLFDDKVMKQLKRRRYTGWGRLSRKLINGIRDKQSGKTILDFLKSDGFANRNFMQLIHDDSLTFKEDIQKAQVSGQGDSLHEHIANLAGSPAIKKGILQTVKVVDELVKVMGRHKPENIVIEMARENQTTQKGQKNSRERMKRIEEGIKELGSQILKEHPVENTQLQNEKLYLYYLQNGRDMYVDQELDINRLSDYDVDHIVPQSFLKDDSIDNKVLTRSDKARGKSDNVPSEEVVKKMKNYWRQLLNAKLITQRKFDNLTKAERGGLSELDKAGFIKRQLVETRQITKHVAQILDSRMNTKYDENDKLIREVKVITLKSKLVSDFRKDFQFYKVREINNYHHAHDAYLNAVVGTALIKKYPKLESEFVYGDYKVYDVRKMIAKSEQEIGKATAKYFFYSNIMNFFKTEITLANGEIRKRPLIETNGETGEIVWDKGRDFATVRKVLSMPQVNIVKKTEVQTGGFSKESILPKRNSDKLIARKKDWDPKKYGGFDSPTVAYSVLVVAKVEKGKSKKLKSVKELLGITIMERSSFEKNPIDFLEAKGYKEVKKDLIIKLPKYSLFELENGRKRMLASAGELQKGNELALPSKYVNFLYLASHYEKLKGSPEDNEQKQLFVEQHKHYLDEIIEQISEFSKRVILADANLDKVLSAYNKHRDKPIREQAENIIHLFTLTNLGAPAAFKYFDTTIDRKRYTSTKEVLDATLIHQSITGLYETRIDLSQLGGDGGGSSPAPGGTLNIEDEYRLHETSKEPDVSLGSTWLSDFPQAWAETGGMGLAVRQAPLIIPLKATSTPVSIKQYPMSQEARLGIKPHIQRLLDQGILVPCQSPWNTPLLPVKKPGTNDYRPVQDLREVNKRVEDIHPTVPNPYNLLSGLPPSHQWYTVLDLKDAFFCLRLHPTSQPLFAFEWRDPEMGISGQLTWTRLPQGFKNSPTLFNEALHRDLADFRIQHPDLILLQYVDDLLLAATSELDCQQGTRALLQTLGNLGYRASAKKAQICQKQVKYLGYLLKEGQRWLTEARKETVMGQPTPKTPRQLREFLGKAGFCRLFIPGFAEMAAPLYPLTKPGTLFNWGPDQQKAYQEIKQALLTAPALGLPDLTKPFELFVDEKQGYAKGVLTQKLGPWRRPVAYLSKKLDPVAAGWPPCLRMVAAIAVLTKDAGKLTMGQPLVILAPHAVEALVKQPPDRWLSNARMTHYQALLLDTDRVQFGPVVALNPATLLPLPEEGLQHNCLDILAEAHGTRPDLTDQPLPDADHTWYTDGSSLLQEGQRKAGAAVTTETEVIWAKALPAGTSAQRAELIALTQALKMAEGKKLNVYTDSRYAFATAHIHGEIYRRRGWLTSEGKEIKNKDEILALLKALFLPKRLSIIHCPGHQKGHSAEARGNRMADQAARKAAITETPDTSTLLIENSSPSGGSKRTADGSEFEAGKRTADGSEFEKRTADGSEFESPKKKAKVE

SEQ ID NO: 6752 - protein, 2111 aa, synthetic construct; identical to SEQ ID NO: 6751

SEQ ID NO: 6753 - protein, 2082 aa, synthetic construct
MPAAKRVKLDGGDKKYSIGLDIGTNSVGWAVITDEYKVPSKKFKVLGNTDRHSIKKNLIGALLFDSGETAEATRLKRTARRRYTRRKNRICYLQEIFSNEMAKVDDSFFHRLEESFLVEEDKKHERHPIFGNIVDEVAYHEKYPTIYHLRKKLVDSTDKADLRLIYLALAHMIKFRGHFLIEGDLNPDNSDVDKLFIQLVQTYNQLFEENPINASGVDAKAILSARLSKSRRLENLIAQLPGEKKNGLFGNLIALSLGLTPNFKSNFDLAEDAKLQLSKDTYDDDLDNLLAQIGDQYADLFLAAKNLSDAILLSDILRVNTEITKAPLSASMIKRYDEHHQDLTLLKALVRQQLPEKYKEIFFDQSKNGYAGYIDGGASQEEFYKFIKPILEKMDGTEELLVKLNREDLLRKQRTFDNGSIPHQIHLGELHAILRRQEDFYPFLKDNREKIEKILTFRIPYYVGPLARGNSRFAWMTRKSEETITPWNFEEVVDKGASAQSFIERMTNFDKNLPNEKVLPKHSLLYEYFTVYNELTKVKYVTEGMRKPAFLSGEQKKAIVDLLFKTNRKVTVKQLKEDYFKKIECFDSVEISGVEDRFNASLGTYHDLLKIIKDKDFLDNEENEDILEDIVLTLTLFEDREMIEERLKTYAHLFDDKVMKQLKRRRYTGWGRLSRKLINGIRDKQSGKTILDFLKSDGFANRNFMQLIHDDSLTFKEDIQKAQVSGQGDSLHEHIANLAGSPAIKKGILQTVKVVDELVKVMGRHKPENIVIEMARENQTTQKGQKNSRERMKRIEEGIKELGSQILKEHPVENTQLQNEKLYLYYLQNGRDMYVDQELDINRLSDYDVDHIVPQSFLKDDSIDNKVLTRSDKARGKSDNVPSEEVVKKMKNYWRQLLNAKLITQRKFDNLTKAERGGLSELDKAGFIKRQLVETRQITKHVAQILDSRMNTKYDENDKLIREVKVITLKSKLVSDFRKDFQFYKVREINNYHHAHDAYLNAVVGTALIKKYPKLESEFVYGDYKVYDVRKMIAKSEQEIGKATAKYFFYSNIMNFFKTEITLANGEIRKRPLIETNGETGEIVWDKGRDFATVRKVLSMPQVNIVKKTEVQTGGFSKESILPKRNSDKLIARKKDWDPKKYGGFDSPTVAYSVLVVAKVEKGKSKKLKSVKELLGITIMERSSFEKNPIDFLEAKGYKEVKKDLIIKLPKYSLFELENGRKRMLASAGELQKGNELALPSKYVNFLYLASHYEKLKGSPEDNEQKQLFVEQHKHYLDEIIEQISEFSKRVILADANLDKVLSAYNKHRDKPIREQAENIIHLFTLTNLGAPAAFKYFDTTIDRKRYTSTKEVLDATLIHQSITGLYETRIDLSQLGGDGGGSSPAPGGIPWLMKKPLQLTTLVPLQEYEERLLKQTMLTGSYKEKLQSLFLKYDALWQHWENQVGHRRIKPHHIATGTVNPRPQKQYPINPKAKASIQTVINDLLKQGVLIQQNSIMNTPVYPVPKPDGKWRMVLDYREVNKTIPLIAAQNQHSAGILSSIFRGKYKTTLDLSNGFWAHSITPESYWLTAFTWLGQQYCWTRLPQGFLNSPALFNADVVDLLKEVPNVQVYVDDIYISHDDPREHLEQLEKVFSLLLNAGYVVSLKKSEIAQHEVEFLGFNITKEGRGLTETFKQKLLNITPPRDLKQLQSILGLLNFARNFIPNFSELVKPLYNIIATAPGKYITWTTDNSQQLQNIISMLNSAENLEERNPEVRLIMKVNTSPSAGYIRFYNEFAKRPIMYLNYVYTKAEVKFTNTEKLLTTIHKGLIKALDLGMGQEILVYSPIVSMTKIQKTPLPERKALPIRWITWMSYLEDPRIQFHYDKTLPELQQVPTVTDDIIAKIKHPSEFSMVFYTDGSAIKHPNVNKSHNAGMGIAQVQFKPEFTVINTWSIPLGDHTAQLAEVAAVEFACKKALKIDGPVLIVTDSFYVAESVNKELPYWQSNGFFNNKKKPLKHVSKWKSIADCIQLKPDIIIIHEKGHQPTASTFHTEGNNLADKLATQGSYVVNAGKRTADGSEFEKRTADGSEFESPKKKAKVE

SEQ ID NO: 6754 - protein, 2091 aa, synthetic construct
MPAAKRVKLDGGDKKYSIGLDIGTNSVGWAVITDEYKVPSKKFKVLGNTDRHSIKKNLIGALLFDSGETAEATRLKRTARRRYTRRKNRICYLQEIFSNEMAKVDDSFFHRLEESFLVEEDKKHERHPIFGNIVDEVAYHEKYPTIYHLRKKLVDSTDKADLRLIYLALAHMIKFRGHFLIEGDLNPDNSDVDKLFIQLVQTYNQLFEENPINASGVDAKAILSARLSKSRRLENLIAQLPGEKKNGLFGNLIALSLGLTPNFKSNFDLAEDAKLQLSKDTYDDDLDNLLAQIGDQYADLFLAAKNLSDAILLSDILRVNTEITKAPLSASMIKRYDEHHQDLTLLKALVRQQLPEKYKEIFFDQSKNGYAGYIDGGASQEEFYKFIKPILEKMDGTEELLVKLNREDLLRKQRTFDNGSIPHQIHLGELHAILRRQEDFYPFLKDNREKIEKILTFRIPYYVGPLARGNSRFAWMTRKSEETITPWNFEEVVDKGASAQSFIERMTNFDKNLPNEKVLPKHSLLYEYFTVYNELTKVKYVTEGMRKPAFLSGEQKKAIVDLLFKTNRKVTVKQLKEDYFKKIECFDSVEISGVEDRFNASLGTYHDLLKIIKDKDFLDNEENEDILEDIVLTLTLFEDREMIEERLKTYAHLFDDKVMKQLKRRRYTGWGRLSRKLINGIRDKQSGKTILDFLKSDGFANRNFMQLIHDDSLTFKEDIQKAQVSGQGDSLHEHIANLAGSPAIKKGILQTVKVVDELVKVMGRHKPENIVIEMARENQTTQKGQKNSRERMKRIEEGIKELGSQILKEHPVENTQLQNEKLYLYYLQNGRDMYVDQELDINRLSDYDVDHIVPQSFLKDDSIDNKVLTRSDKARGKSDNVPSEEVVKKMKNYWRQLLNAKLITQRKFDNLTKAERGGLSELDKAGFIKRQLVETRQITKHVAQILDSRMNTKYDENDKLIREVKVITLKSKLVSDFRKDFQFYKVREINNYHHAHDAYLNAVVGTALIKKYPKLESEFVYGDYKVYDVRKMIAKSEQEIGKATAKYFFYSNIMNFFKTEITLANGEIRKRPLIETNGETGEIVWDKGRDFATVRKVLSMPQVNIVKKTEVQTGGFSKESILPKRNSDKLIARKKDWDPKKYGGFDSPTVAYSVLVVAKVEKGKSKKLKSVKELLGITIMERSSFEKNPIDFLEAKGYKEVKKDLIIKLPKYSLFELENGRKRMLASAGELQKGNELALPSKYVNFLYLASHYEKLKGSPEDNEQKQLFVEQHKHYLDEIIEQISEFSKRVILADANLDKVLSAYNKHRDKPIREQAENIIHLFTLTNLGAPAAFKYFDTTIDRKRYTSTKEVLDATLIHQSITGLYETRIDLSQLGGDGGGSSPAPGGTLNIEDEYRLHETSKEPDVPLGSTWLSDFPQAWAETGGMGLAVRQAPLIIPLKATSTPVSIKQYPMSQEARLGIKPHIQRLLDQGILVPCQSPWNTPLLPVKKPGTNDYRPVQDLREVNKRVEDIHPTVPNPYNLLSGLPPSHQWYTVLDLKDAFFCLRLHPTSQPLFAFEWRDPEMGISGQLTWTRLPQGFKNSPTLFNEALHRDLADFRIQHPDLILLQYVDDLLLAATSEQDCQRGTRALLQTLGNLGYRASAKKAQICQKQVKYLGYLLKEGQRWLTEARKETVMGQPTPKTPRQLREFLGTAGFCRLWIPGFAEMAAPLYPLTKPGTLFNWGPDQQKAYQEIKQALLTAPALGLPDLTKPFELFVDEKQGYAKGVLTQKLGPWRRPVAYLSKKLDPVAAGWPPCLRMVAAIAVLTKDAGKLTMGQPLVILAPHAVEALVKQPPDRWLSNARMTHYQAMLLDTDRVQFGPVVALNPATLLPLPEKEAPHDCLEILAETHGTRPDLTDQPIPDADYTWYTDGSSFLQEGQRRAGAAVTTETEVIWARALPAGTSAQRAELIALTQALKMAEGKKLNVYTDSRYAFATAHVHGEIYRRRGWLTSEGREIKNKNEILALLKALFLPKRLSIIHCPGHQKGNSAEARGNRMADQAAREAAMKAVLETSTLLAGKRTADGSEFEKRTADGSEFESPKKKAKVE

SEQ ID NO: 6755 - protein, 2093 aa, synthetic construct
MPAAKRVKLDGGDKKYSIGLDIGTNSVGWAVITDEYKVPSKKFKVLGNTDRHSIKKNLIGALLFDSGETAEATRLKRTARRRYTRRKNRICYLQEIFSNEMAKVDDSFFHRLEESFLVEEDKKHERHPIFGNIVDEVAYHEKYPTIYHLRKKLVDSTDKADLRLIYLALAHMIKFRGHFLIEGDLNPDNSDVDKLFIQLVQTYNQLFEENPINASGVDAKAILSARLSKSRRLENLIAQLPGEKKNGLFGNLIALSLGLTPNFKSNFDLAEDAKLQLSKDTYDDDLDNLLAQIGDQYADLFLAAKNLSDAILLSDILRVNTEITKAPLSASMIKRYDEHHQDLTLLKALVRQQLPEKYKEIFFDQSKNGYAGYIDGGASQEEFYKFIKPILEKMDGTEELLVKLNREDLLRKQRTFDNGSIPHQIHLGELHAILRRQEDFYPFLKDNREKIEKILTFRIPYYVGPLARGNSRFAWMTRKSEETITPWNFEEVVDKGASAQSFIERMTNFDKNLPNEKVLPKHSLLYEYFTVYNELTKVKYVTEGMRKPAFLSGEQKKAIVDLLFKTNRKVTVKQLKEDYFKKIECFDSVEISGVEDRFNASLGTYHDLLKIIKDKDFLDNEENEDILEDIVLTLTLFEDREMIEERLKTYAHLFDDKVMKQLKRRRYTGWGRLSRKLINGIRDKQSGKTILDFLKSDGFANRNFMQLIHDDSLTFKEDIQKAQVSGQGDSLHEHIANLAGSPAIKKGILQTVKVVDELVKVMGRHKPENIVIEMARENQTTQKGQKNSRERMKRIEEGIKELGSQILKEHPVENTQLQNEKLYLYYLQNGRDMYVDQELDINRLSDYDVDHIVPQSFLKDDSIDNKVLTRSDKARGKSDNVPSEEVVKKMKNYWRQLLNAKLITQRKFDNLTKAERGGLSELDKAGFIKRQLVETRQITKHVAQILDSRMNTKYDENDKLIREVKVITLKSKLVSDFRKDFQFYKVREINNYHHAHDAYLNAVVGTALIKKYPKLESEFVYGDYKVYDVRKMIAKSEQEIGKATAKYFFYSNIMNFFKTEITLANGEIRKRPLIETNGETGEIVWDKGRDFATVRKVLSMPQVNIVKKTEVQTGGFSKESILPKRNSDKLIARKKDWDPKKYGGFDSPTVAYSVLVVAKVEKGKSKKLKSVKELLGITIMERSSFEKNPIDFLEAKGYKEVKKDLIIKLPKYSLFELENGRKRMLASAGELQKGNELALPSKYVNFLYLASHYEKLKGSPEDNEQKQLFVEQHKHYLDEIIEQISEFSKRVILADANLDKVLSAYNKHRDKPIREQAENIIHLFTLTNLGAPAAFKYFDTTIDRKRYTSTKEVLDATLIHQSITGLYETRIDLSQLGGDGGPAPGSSGGTAPLEEEYRLFLEAPIQNVTLLEQWKREIPKVWAEINPPGLASTQAPIHVQLLSTALPVRVRQYPITLEAKRSLRETIRKFRAAGILRPVHSPWNTPLLPVRKSGTSEYRMVQDLREVNKRVETIHPTVPNPYTLLSLLPPDRIWYSVLDLKDAFFCIPLAPESQLIFAFEWADAEEGESGQLTWTRLPQGFKNSPTLFNEALNRDLQGFRLDHPSVSLLQYVDDLLIAADTQAACLSATRDLLMTLAELGYRVSGKKAQLCQEEVTYLGFKIHKGSRSLSNSRTQAILQIPVPKTKRQVREFLGTIGYCRLWIPGFAELAQPLYAATRPGNDPLVWGEKEEEAFQSLKLALTQPPALALPSLDKPFQLFVEETSGAAKGVLTQALGPWKRPVAYLSKRLDPVAAGWPRCLRAIAAAALLTREASKLTFGQDIEITSSHNLESLLRSPPDKWLTNARITQYQVLLLDPPRVRFKQTAALNPATLLPETDDTLPIHHCLDTLDSLTSTRPDLTDQPLAQAEATLFTDGSSYIRDGKRYAGAAVVTLDSVIWAEPLPIGTSAQKAELIALTKALEWSKDKSVNIYTDSRYAFATLHVHGMIYRERGWLTAGGKAIKNAPEILALLTAVWLPKRVAVMHCKGHQKDDAPTSTGNRRADEVAREVAIRPLSTQATISAGKRTADGSEFEKRTADGSEFESPKKKAKVE

SEQ ID NO: 6756 - protein, 2093 aa, synthetic construct
MPAAKRVKLDGGDKKYSIGLDIGTNSVGWAVITDEYKVPSKKFKVLGNTDRHSIKKNLIGALLFDSGETAEATRLKRTARRRYTRRKNRICYLQEIFSNEMAKVDDSFFHRLEESFLVEEDKKHERHPIFGNIVDEVAYHEKYPTIYHLRKKLVDSTDKADLRLIYLALAHMIKFRGHFLIEGDLNPDNSDVDKLFIQLVQTYNQLFEENPINASGVDAKAILSARLSKSRRLENLIAQLPGEKKNGLFGNLIALSLGLTPNFKSNFDLAEDAKLQLSKDTYDDDLDNLLAQIGDQYADLFLAAKNLSDAILLSDILRVNTEITKAPLSASMIKRYDEHHQDLTLLKALVRQQLPEKYKEIFFDQSKNGYAGYIDGGASQEEFYKFIKPILEKMDGTEELLVKLNREDLLRKQRTFDNGSIPHQIHLGELHAILRRQEDFYPFLKDNREKIEKILTFRIPYYVGPLARGNSRFAWMTRKSEETITPWNFEEVVDKGASAQSFIERMTNFDKNLPNEKVLPKHSLLYEYFTVYNELTKVKYVTEGMRKPAFLSGEQKKAIVDLLFKTNRKVTVKQLKEDYFKKIECFDSVEISGVEDRFNASLGTYHDLLKIIKDKDFLDNEENEDILEDIVLTLTLFEDREMIEERLKTYAHLFDDKVMKQLKRRRYTGWGRLSRKLINGIRDKQSGKTILDFLKSDGFANRNFMQLIHDDSLTFKEDIQKAQVSGQGDSLHEHIANLAGSPAIKKGILQTVKVVDELVKVMGRHKPENIVIEMARENQTTQKGQKNSRERMKRIEEGIKELGSQILKEHPVENTQLQNEKLYLYYLQNGRDMYVDQELDINRLSDYDVDHIVPQSFLKDDSIDNKVLTRSDKARGKSDNVPSEEVVKKMKNYWRQLLNAKLITQRKFDNLTKAERGGLSELDKAGFIKRQLVETRQITKHVAQILDSRMNTKYDENDKLIREVKVITLKSKLVSDFRKDFQFYKVREINNYHHAHDAYLNAVVGTALIKKYPKLESEFVYGDYKVYDVRKMIAKSEQEIGKATAKYFFYSNIMNFFKTEITLANGEIRKRPLIETNGETGEIVWDKGRDFATVRKVLSMPQVNIVKKTEVQTGGFSKESILPKRNSDKLIARKKDWDPKKYGGFDSPTVAYSVLVVAKVEKGKSKKLKSVKELLGITIMERSSFEKNPIDFLEAKGYKEVKKDLIIKLPKYSLFELENGRKRMLASAGELQKGNELALPSKYVNFLYLASHYEKLKGSPEDNEQKQLFVEQHKHYLDEIIEQISEFSKRVILADANLDKVLSAYNKHRDKPIREQAENIIHLFTLTNLGAPAAFKYFDTTIDRKRYTSTKEVLDATLIHQSITGLYETRIDLSQLGGDGGPAPGSSGGTAPLEEEYRLFLEAPIQNVTLLEQWKREIPKVWAEINPPGLASTQAPIHVQLLSTALPVRVRQYPITLEAKRSLRETIRKFRAAGILRPVHSPWNTPLLPVRKSGTSEYRMVQDLREVNKRVETIHPTVPNPYTLLSLLPPDRIWYSVLDLKDAFFCIPLAPESQLIFAFEWADAEEGESGQLTWTRLPQGFKNSPTLFNEALNRDLQGFRLDHPSVSLLQYVDDLLIAADTQAACLSATRDLLMTLAELGYRVSGKKAQLCQEEVTYLGFKIHKGSRSLSNSRTQAILQIPVPKTKRQVREFLGKIGYCRLFIPGFAELAQPLYAATRPGNDPLVWGEKEEEAFQSLKLALTQPPALALPSLDKPFQLFVEETSGAAKGVLTQALGPWKRPVAYLSKRLDPVAAGWPRCLRAIAAAALLTREASKLTFGQDIEITSSHNLESLLRSPPDKWLTNARITQYQVLLLDPPRVRFKQTAALNPATLLPETDDTLPIHHCLDTLDSLTSTRPDLTDQPLAQAEATLFTDGSSYIRDGKRYAGAAVVTLDSVIWAEPLPIGTSAQKAELIALTKALEWSKDKSVNIYTDSRYAFATLHVHGMIYRERGWLTAGGKAIKNAPEILALLTAVWLPKRVAVMHCKGHQKDDAPTSTGNRRADEVAREVAIRPLSTQATISAGKRTADGSEFEKRTADGSEFESPKKKAKVE

SEQ ID NO: 6757 - protein, 2090 aa, synthetic construct
MPAAKRVKLDGGDKKYSIGLDIGTNSVGWAVITDEYKVPSKKFKVLGNTDRHSIKKNLIGALLFDSGETAEATRLKRTARRRYTRRKNRICYLQEIFSNEMAKVDDSFFHRLEESFLVEEDKKHERHPIFGNIVDEVAYHEKYPTIYHLRKKLVDSTDKADLRLIYLALAHMIKFRGHFLIEGDLNPDNSDVDKLFIQLVQTYNQLFEENPINASGVDAKAILSARLSKSRRLENLIAQLPGEKKNGLFGNLIALSLGLTPNFKSNFDLAEDAKLQLSKDTYDDDLDNLLAQIGDQYADLFLAAKNLSDAILLSDILRVNTEITKAPLSASMIKRYDEHHQDLTLLKALVRQQLPEKYKEIFFDQSKNGYAGYIDGGASQEEFYKFIKPILEKMDGTEELLVKLNREDLLRKQRTFDNGSIPHQIHLGELHAILRRQEDFYPFLKDNREKIEKILTFRIPYYVGPLARGNSRFAWMTRKSEETITPWNFEEVVDKGASAQSFIERMTNFDKNLPNEKVLPKHSLLYEYFTVYNELTKVKYVTEGMRKPAFLSGEQKKAIVDLLFKTNRKVTVKQLKEDYFKKIECFDSVEISGVEDRFNASLGTYHDLLKIIKDKDFLDNEENEDILEDIVLTLTLFEDREMIEERLKTYAHLFDDKVMKQLKRRRYTGWGRLSRKLINGIRDKQSGKTILDFLKSDGFANRNFMQLIHDDSLTFKEDIQKAQVSGQGDSLHEHIANLAGSPAIKKGILQTVKVVDELVKVMGRHKPENIVIEMARENQTTQKGQKNSRERMKRIEEGIKELGSQILKEHPVENTQLQNEKLYLYYLQNGRDMYVDQELDINRLSDYDVDHIVPQSFLKDDSIDNKVLTRSDKARGKSDNVPSEEVVKKMKNYWRQLLNAKLITQRKFDNLTKAERGGLSELDKAGFIKRQLVETRQITKHVAQILDSRMNTKYDENDKLIREVKVITLKSKLVSDFRKDFQFYKVREINNYHHAHDAYLNAVVGTALIKKYPKLESEFVYGDYKVYDVRKMIAKSEQEIGKATAKYFFYSNIMNFFKTEITLANGEIRKRPLIETNGETGEIVWDKGRDFATVRKVLSMPQVNIVKKTEVQTGGFSKESILPKRNSDKLIARKKDWDPKKYGGFDSPTVAYSVLVVAKVEKGKSKKLKSVKELLGITIMERSSFEKNPIDFLEAKGYKEVKKDLIIKLPKYSLFELENGRKRMLASAGELQKGNELALPSKYVNFLYLASHYEKLKGSPEDNEQKQLFVEQHKHYLDEIIEQISEFSKRVILADANLDKVLSAYNKHRDKPIREQAENIIHLFTLTNLGAPAAFKYFDTTIDRKRYTSTKEVLDATLIHQSITGLYETRIDLSQLGGDGGPAPGSSGGTLQLEEEYRLFEPESTQKQEMDIWLKNFPQAWAETGGMGTAHCQAPVLIQLKATATPISIRQYPMPHEAYQGIKPHIRRMLDQGILKPCQSPWNTPLLPVKKPGTEDYRPVQDLREVNKRVEDIHPTVPNPYNLLSTLPPSHPWYTVLDLKDAFFCLRLHSESQLLFAFEWRDPEIGLSGQLTWTRLPQGFKNSPTLFNEALHSDLADFRVRYPALVLLQYVDDLLLAAATRTECLEGTKALLETLGNKGYRASAKKAQICLQEVTYLGYSLKDGQRWLTKARKEAILSIPVPKNSRQVREFLGTAGYCRLWIPGFAELAAPLYPLTRPGTLFQWGTEQQLAFEDIKKALLSSPALGLPDITKPFELFIDENSGFAKGVLVQKLGPWKRPVAYLSKKLDTVASGWPPCLRMVAAIAILVKDAGKLTLGQPLTILTSHPVEALVRQPPNKWLSNARMTHYQAMLLDAERVHFGPTVSLNPATLLPLPSGGNHHDCLQILAETHGTRPDLTDQPLPDADLTWYTDGSSFIRNGEREAGAAVTTESEVIWAAPLPPGTSAQRAELIALTQALKMAEGKKLTVYTDSRYAFATTHVHGEIYRRRGWLTSEGKEIKNKNEILALLEALFLPKRLSIIHCPGHQKGDSPQAKGNRLADDTAKKAATETHSSLTVLPAGKRTADGSEFEKRTADGSEFESPKKKAKVE

SEQ ID NO: 6758 - protein, 2213 aa, synthetic construct
MPAAKRVKLDGGDKKYSIGLDIGTNSVGWAVITDEYKVPSKKFKVLGNTDRHSIKKNLIGALLFDSGETAEATRLKRTARRRYTRRKNRICYLQEIFSNEMAKVDDSFFHRLEESFLVEEDKKHERHPIFGNIVDEVAYHEKYPTIYHLRKKLVDSTDKADLRLIYLALAHMIKFRGHFLIEGDLNPDNSDVDKLFIQLVQTYNQLFEENPINASGVDAKAILSARLSKSRRLENLIAQLPGEKKNGLFGNLIALSLGLTPNFKSNFDLAEDAKLQLSKDTYDDDLDNLLAQIGDQYADLFLAAKNLSDAILLSDILRVNTEITKAPLSASMIKRYDEHHQDLTLLKALVRQQLPEKYKEIFFDQSKNGYAGYIDGGASQEEFYKFIKPILEKMDGTEELLVKLNREDLLRKQRTFDNGSIPHQIHLGELHAILRRQEDFYPFLKDNREKIEKILTFRIPYYVGPLARGNSRFAWMTRKSEETITPWNFEEVVDKGASAQSFIERMTNFDKNLPNEKVLPKHSLLYEYFTVYNELTKVKYVTEGMRKPAFLSGEQKKAIVDLLFKTNRKVTVKQLKEDYFKKIECFDSVEISGVEDRFNASLGTYHDLLKIIKDKDFLDNEENEDILEDIVLTLTLFEDREMIEERLKTYAHLFDDKVMKQLKRRRYTGWGRLSRKLINGIRDKQSGKTILDFLKSDGFANRNFMQLIHDDSLTFKEDIQKAQVSGQGDSLHEHIANLAGSPAIKKGILQTVKVVDELVKVMGRHKPENIVIEMARENQTTQKGQKNSRERMKRIEEGIKELGSQILKEHPVENTQLQNEKLYLYYLQNGRDMYVDQELDINRLSDYDVDHIVPQSFLKDDSIDNKVLTRSDKARGKSDNVPSEEVVKKMKNYWRQLLNAKLITQRKFDNLTKAERGGLSELDKAGFIKRQLVETRQITKHVAQILDSRMNTKYDENDKLIREVKVITLKSKLVSDFRKDFQFYKVREINNYHHAHDAYLNAVVGTALIKKYPKLESEFVYGDYKVYDVRKMIAKSEQEIGKATAKYFFYSNIMNFFKTEITLANGEIRKRPLIETNGETGEIVWDKGRDFATVRKVLSMPQVNIVKKTEVQTGGFSKESILPKRNSDKLIARKKDWDPKKYGGFDSPTVAYSVLVVAKVEKGKSKKLKSVKELLGITIMERSSFEKNPIDFLEAKGYKEVKKDLIIKLPKYSLFELENGRKRMLASAGELQKGNELALPSKYVNFLYLASHYEKLKGSPEDNEQKQLFVEQHKHYLDEIIEQISEFSKRVILADANLDKVLSAYNKHRDKPIREQAENIIHLFTLTNLGAPAAFKYFDTTIDRKRYTSTKEVLDATLIHQSITGLYETRIDLSQLGGDGGPAPGSSGGTLGDQGSRGSDPLPEPRVTLTVEGIPTEFLVNTGAEHSVLTKPMGKMGSKRTVVAGATGSKVYPWTTKRLLKIGQKQVTHSFLVIPECPAPLLGRDLLTKLKAQIQFSTEGPQVTWEDRPAMCLVLNLEEEYRLHEKPVPPSIDPSWLQLFPMVWAEKAGMGLANQVPPVVVELKSDASPVAVRQYPMSKEAREGIRPHIQRFLDLGILVPCQSPWNTPLLPVKKPGTNDYRPVQDLREVNKRVQDIHPTVPNPYNLLSSLPPSHTWYSVLDLKDAFFCLKLHPNSQPLFAFEWRDPEKGNTGQLTWTRLPQGFKNSPTLFNEALHRDLASFRALNPQVVMLQYVDDLLVAAPTYRDCKEGTRRLLQELSKLGYRVSAKKAQLCREEVTYLGYLLKGGKRWLTPARKATVMKIPTPTTPRQVREFLGTAGFCRLWIPGFASLAAPLYPLTRPKVPFTWTEAHQEAFGRIKEALLSAPALALPDLTKPFALYVDEKEGVARGVLTQTLGPWRRPVAYLSKKLDPVASGWPTCLKAIAAVALLLKDADKLTLGQNVLVIAPHNLESIVRQPPDRWMTNARMTHYQSLLLNERVSFAPPAILNPATLLPVESDDTPIHICSEILAEETGTRPDLRDQPLPGVPAWYTDGSSFIMDGRRQAGAAIVDNKRTVWASNLPEGTSAQKAELIALTQALRLAEGKSINIYTDSRYAFATAHVHGAIYKQRGWLTSAGKDIKNKEEILALLEAIHLPKRVAIIHCPGHQRGTDPVATGNRKADEAAKQAAQSTRILTETTKNAGKRTADGSEFEKRTADGSEFESPKKKAKVE

SEQ ID NO: 6759 - protein, 2091 aa, synthetic construct
MPAAKRVKLDGGDKKYSIGLDIGTNSVGWAVITDEYKVPSKKFKVLGNTDRHSIKKNLIGALLFDSGETAEATRLKRTARRRYTRRKNRICYLQEIFSNEMAKVDDSFFHRLEESFLVEEDKKHERHPIFGNIVDEVAYHEKYPTIYHLRKKLVDSTDKADLRLIYLALAHMIKFRGHFLIEGDLNPDNSDVDKLFIQLVQTYNQLFEENPINASGVDAKAILSARLSKSRRLENLIAQLPGEKKNGLFGNLIALSLGLTPNFKSNFDLAEDAKLQLSKDTYDDDLDNLLAQIGDQYADLFLAAKNLSDAILLSDILRVNTEITKAPLSASMIKRYDEHHQDLTLLKALVRQQLPEKYKEIFFDQSKNGYAGYIDGGASQEEFYKFIKPILEKMDGTEELLVKLNREDLLRKQRTFDNGSIPHQIHLGELHAILRRQEDFYPFLKDNREKIEKILTFRIPYYVGPLARGNSRFAWMTRKSEETITPWNFEEVVDKGASAQSFIERMTNFDKNLPNEKVLPKHSLLYEYFTVYNELTKVKYVTEGMRKPAFLSGEQKKAIVDLLFKTNRKVTVKQLKEDYFKKIECFDSVEISGVEDRFNASLGTYHDLLKIIKDKDFLDNEENEDILEDIVLTLTLFEDREMIEERLKTYAHLFDDKVMKQLKRRRYTGWGRLSRKLINGIRDKQSGKTILDFLKSDGFANRNFMQLIHDDSLTFKEDIQKAQVSGQGDSLHEHIANLAGSPAIKKGILQTVKVVDELVKVMGRHKPENIVIEMARENQTTQKGQKNSRERMKRIEEGIKELGSQILKEHPVENTQLQNEKLYLYYLQNGRDMYVDQELDINRLSDYDVDHIVPQSFLKDDSIDNKVLTRSDKARGKSDNVPSEEVVKKMKNYWRQLLNAKLITQRKFDNLTKAERGGLSELDKAGFIKRQLVETRQITKHVAQILDSRMNTKYDENDKLIREVKVITLKSKLVSDFRKDFQFYKVREINNYHHAHDAYLNAVVGTALIKKYPKLESEFVYGDYKVYDVRKMIAKSEQEIGKATAKYFFYSNIMNFFKTEITLANGEIRKRPLIETNGETGEIVWDKGRDFATVRKVLSMPQVNIVKKTEVQTGGFSKESILPKRNSDKLIARKKDWDPKKYGGFDSPTVAYSVLVVAKVEKGKSKKLKSVKELLGITIMERSSFEKNPIDFLEAKGYKEVKKDLIIKLPKYSLFELENGRKRMLASAGELQKGNELALPSKYVNFLYLASHYEKLKGSPEDNEQKQLFVEQHKHYLDEIIEQISEFSKRVILADANLDKVLSAYNKHRDKPIREQAENIIHLFTLTNLGAPAAFKYFDTTIDRKRYTSTKEVLDATLIHQSITGLYETRIDLSQLGGDGGPAPGSSGGTLNLEDEYRLYETSAEPEVSPGSTWLSDFPQAWAETGGMGLAVRQAPLIIPLKATSTPVSIKQYPMSQEAKLGIKPHIQRLLDQGILVPCQSPWNTPLLPVKKPGTNDYRPVQDLREVNKRVEDIHPTVPNPYNLLSGLPPSHRWYTVLDLKDAFFCLRLHPTSQPLFAFEWRDPGMGISGQLTWTRLPQGFKNSPTLFNEALHRDLADFRIQHPDLILLQYVDDILLAATSELDCQQGTRALLLTLGNLGYRASAKKAQLCQKQVKYLGYLLKEGQRWLTEARKETVMGQPTPKTPRQLREFLGTAGFCRLWIPGFAEMAAPLYPLTKPGTLFNWGPDQQKAYQEIKQALLTAPALGLPDLTKPFELFVDEKQGYAKGVLTQKLGPWRRPVAYLSKKLDPVAAGWPPCLRMVAAIAVLRKDAGKLTMGQPLVILAPHAVEALVKQPPDRWLSNARMTHYQAMLLDTDRVQFGPVVALNPATLLPLPEEGAPHDCLEILAETHGTRPDLTDQPIPDADHTWYTDGSSFLQEGQRKAGAAVTTETEVIWARALPAGTSAQRAELIALTQALKMAEGKRLNVYTDSRYAFATAHIHGEIYRRRGWLTSEGREIKNKSEILALLKALFLPKRLSIIHCLGHQKGDSAEARGNRLADQAAREAAIKTPPDTSTLLAGKRTADGSEFEKRTADGSEFESPKKKAKVE

SEQ ID NO: 6760 - protein, 2091 aa, synthetic construct; identical to SEQ ID NO: 4513

SEQ ID NO: 6761 - protein, 2091 aa, synthetic construct; identical to SEQ ID NO: 4513

SEQ ID NO: 6762 - protein, 2082 aa, synthetic construct
MPAAKRVKLDGGDKKYSIGLDIGTNSVGWAVITDEYKVPSKKFKVLGNTDRHSIKKNLIGALLFDSGETAEATRLKRTARRRYTRRKNRICYLQEIFSNEMAKVDDSFFHRLEESFLVEEDKKHERHPIFGNIVDEVAYHEKYPTIYHLRKKLVDSTDKADLRLIYLALAHMIKFRGHFLIEGDLNPDNSDVDKLFIQLVQTYNQLFEENPINASGVDAKAILSARLSKSRRLENLIAQLPGEKKNGLFGNLIALSLGLTPNFKSNFDLAEDAKLQLSKDTYDDDLDNLLAQIGDQYADLFLAAKNLSDAILLSDILRVNTEITKAPLSASMIKRYDEHHQDLTLLKALVRQQLPEKYKEIFFDQSKNGYAGYIDGGASQEEFYKFIKPILEKMDGTEELLVKLNREDLLRKQRTFDNGSIPHQIHLGELHAILRRQEDFYPFLKDNREKIEKILTFRIPYYVGPLARGNSRFAWMTRKSEETITPWNFEEVVDKGASAQSFIERMTNFDKNLPNEKVLPKHSLLYEYFTVYNELTKVKYVTEGMRKPAFLSGEQKKAIVDLLFKTNRKVTVKQLKEDYFKKIECFDSVEISGVEDRFNASLGTYHDLLKIIKDKDFLDNEENEDILEDIVLTLTLFEDREMIEERLKTYAHLFDDKVMKQLKRRRYTGWGRLSRKLINGIRDKQSGKTILDFLKSDGFANRNFMQLIHDDSLTFKEDIQKAQVSGQGDSLHEHIANLAGSPAIKKGILQTVKVVDELVKVMGRHKPENIVIEMARENQTTQKGQKNSRERMKRIEEGIKELGSQILKEHPVENTQLQNEKLYLYYLQNGRDMYVDQELDINRLSDYDVDHIVPQSFLKDDSIDNKVLTRSDKARGKSDNVPSEEVVKKMKNYWRQLLNAKLITQRKFDNLTKAERGGLSELDKAGFIKRQLVETRQITKHVAQILDSRMNTKYDENDKLIREVKVITLKSKLVSDFRKDFQFYKVREINNYHHAHDAYLNAVVGTALIKKYPKLESEFVYGDYKVYDVRKMIAKSEQEIGKATAKYFFYSNIMNFFKTEITLANGEIRKRPLIETNGETGEIVWDKGRDFATVRKVLSMPQVNIVKKTEVQTGGFSKESILPKRNSDKLIARKKDWDPKKYGGFDSPTVAYSVLVVAKVEKGKSKKLKSVKELLGITIMERSSFEKNPIDFLEAKGYKEVKKDLIIKLPKYSLFELENGRKRMLASAGELQKGNELALPSKYVNFLYLASHYEKLKGSPEDNEQKQLFVEQHKHYLDEIIEQISEFSKRVILADANLDKVLSAYNKHRDKPIREQAENIIHLFTLTNLGAPAAFKYFDTTIDRKRYTSTKEVLDATLIHQSITGLYETRIDLSQLGGDGGPAPGSSGGIPWLMKKPLQLTTLVPLQEYEERLLKQTMLTGSYKEKLQSLFLKYDALWQHWENQVGHRRIKPHHIATGTVNPRPQKQYPINPKAKASIQTVINDLLKQGVLIQQNSIMNTPVYPVPKPDGKWRMVLDYREVNKTIPLIAAQNQHSAGILSSIFRGKYKTTLDLSNGFWAHSITPESYWLTAFTWLGQQYCWTRLPQGFLNSPALFNADVVDLLKEVPNVQVYVDDIYISHDDPREHLEQLEKVFSLLLNAGYVVSLKKSEIAQHEVEFLGFNITKEGRGLTETFKQKLLNITPPRDLKQLQSILGKLNFARNFIPNFSELVKPLYNIIATAPGKYITWTTDNSQQLQNIISMLNSAENLEERNPEVRLIMKVNTSPSAGYIRFYNEFAKRPIMYLNYVYTKAEVKFTNTEKLLTTIHKGLIKALDLGMGQEILVYSPIVSMTKIQKTPLPERKALPIRWITWMSYLEDPRIQFHYDKTLPELQQVPTVTDDIIAKIKHPSEFSMVFYTDGSAIKHPNVNKSHNAGMGIAQVQFKPEFTVINTWSIPLGDHTAQLAEVAAVEFACKKALKIDGPVLIVTDSFYVAESVNKELPYWQSNGFFNNKKKPLKHVSKWKSIADCIQLKPDIIIIHEKGHQPTASTFHTEGNNLADKLATQGSYVVNAGKRTADGSEFEKRTADGSEFESPKKKAKVE

SEQ ID NO: 6763 - protein, 2012 aa, synthetic construct
MPAAKRVKLDGGDKKYSIGLDIGTNSVGWAVITDEYKVPSKKFKVLGNTDRHSIKKNLIGALLFDSGETAEATRLKRTARRRYTRRKNRICYLQEIFSNEMAKVDDSFFHRLEESFLVEEDKKHERHPIFGNIVDEVAYHEKYPTIYHLRKKLVDSTDKADLRLIYLALAHMIKFRGHFLIEGDLNPDNSDVDKLFIQLVQTYNQLFEENPINASGVDAKAILSARLSKSRRLENLIAQLPGEKKNGLFGNLIALSLGLTPNFKSNFDLAEDAKLQLSKDTYDDDLDNLLAQIGDQYADLFLAAKNLSDAILLSDILRVNTEITKAPLSASMIKRYDEHHQDLTLLKALVRQQLPEKYKEIFFDQSKNGYAGYIDGGASQEEFYKFIKPILEKMDGTEELLVKLNREDLLRKQRTFDNGSIPHQIHLGELHAILRRQEDFYPFLKDNREKIEKILTFRIPYYVGPLARGNSRFAWMTRKSEETITPWNFEEVVDKGASAQSFIERMTNFDKNLPNEKVLPKHSLLYEYFTVYNELTKVKYVTEGMRKPAFLSGEQKKAIVDLLFKTNRKVTVKQLKEDYFKKIECFDSVEISGVEDRFNASLGTYHDLLKIIKDKDFLDNEENEDILEDIVLTLTLFEDREMIEERLKTYAHLFDDKVMKQLKRRRYTGWGRLSRKLINGIRDKQSGKTILDFLKSDGFANRNFMQLIHDDSLTFKEDIQKAQVSGQGDSLHEHIANLAGSPAIKKGILQTVKVVDELVKVMGRHKPENIVIEMARENQTTQKGQKNSRERMKRIEEGIKELGSQILKEHPVENTQLQNEKLYLYYLQNGRDMYVDQELDINRLSDYDVDHIVPQSFLKDDSIDNKVLTRSDKARGKSDNVPSEEVVKKMKNYWRQLLNAKLITQRKFDNLTKAERGGLSELDKAGFIKRQLVETRQITKHVAQILDSRMNTKYDENDKLIREVKVITLKSKLVSDFRKDFQFYKVREINNYHHAHDAYLNAVVGTALIKKYPKLESEFVYGDYKVYDVRKMIAKSEQEIGKATAKYFFYSNIMNFFKTEITLANGEIRKRPLIETNGETGEIVWDKGRDFATVRKVLSMPQVNIVKKTEVQTGGFSKESILPKRNSDKLIARKKDWDPKKYGGFDSPTVAYSVLVVAKVEKGKSKKLKSVKELLGITIMERSSFEKNPIDFLEAKGYKEVKKDLIIKLPKYSLFELENGRKRMLASAGELQKGNELALPSKYVNFLYLASHYEKLKGSPEDNEQKQLFVEQHKHYLDEIIEQISEFSKRVILADANLDKVLSAYNKHRDKPIREQAENIIHLFTLTNLGAPAAFKYFDTTIDRKRYTSTKEVLDATLIHQSITGLYETRIDLSQLGGDGGPAPGSSGGPRSRAIDIPVPHADKISWKITDPVWVDQWPLTYEKTLAAIALVQEQLAAGHIEPTNSPWNTPIFIIKKKSGSWRLLQDLRAVNKVMVPMGALQPGLPSPVAIPLNYHKIVIDLKDCFFTIPLHPEDRPYFAFSVPQINFQSPMPRYQWKVLPQGMANSPTLCQKFVAAAIAPVRSQWPEAYILHYMDDILLACDSAEAAKACYAHIISCLTSYGLKIAPDKVQVSEPFSYLGFELHHQQVFTPRVCLKTDHLKTLNDFQKLLGDIQWLRPYLKLPTSALVPLNNILKPDPNPLSVRALTPEAKQSLALINKAIQNQSVQQISYNLPLVLLLLPTPHTPTAVFWQPNGTDPTKNGSPLLWLHLPASPSKVLLTYPSLLAMLIIKGRYTGRQLFGRDPHSIIIPYTQDQLTWLLQTSDEWAIALSSFTGDIDNHYPSDPVIQFAKLHQFIFPKITKCAPIPQATLVFTDGSSNGIAAYVIDNQPISIKSPYLSAQLVELYAILQVFTVLAHQPFNLYTDSAYIAQSVPLLETVPFIKSSTNATPLFSKLQQLILNRQHPFFIGHLRAHLNLPGPLAEGNALADAATQIFPIISDAGKRTADGSEFEKRTADGSEFESPKKKAKVE

SEQ ID NO: 6764 - protein, 2091 aa, synthetic construct
MPAAKRVKLDGGDKKYSIGLDIGTNSVGWAVITDEYKVPSKKFKVLGNTDRHSIKKNLIGALLFDSGETAEATRLKRTARRRYTRRKNRICYLQEIFSNEMAKVDDSFFHRLEESFLVEEDKKHERHPIFGNIVDEVAYHEKYPTIYHLRKKLVDSTDKADLRLIYLALAHMIKFRGHFLIEGDLNPDNSDVDKLFIQLVQTYNQLFEENPINASGVDAKAILSARLSKSRRLENLIAQLPGEKKNGLFGNLIALSLGLTPNFKSNFDLAEDAKLQLSKDTYDDDLDNLLAQIGDQYADLFLAAKNLSDAILLSDILRVNTEITKAPLSASMIKRYDEHHQDLTLLKALVRQQLPEKYKEIFFDQSKNGYAGYIDGGASQEEFYKFIKPILEKMDGTEELLVKLNREDLLRKQRTFDNGSIPHQIHLGELHAILRRQEDFYPFLKDNREKIEKILTFRIPYYVGPLARGNSRFAWMTRKSEETITPWNFEEVVDKGASAQSFIERMTNFDKNLPNEKVLPKHSLLYEYFTVYNELTKVKYVTEGMRKPAFLSGEQKKAIVDLLFKTNRKVTVKQLKEDYFKKIECFDSVEISGVEDRFNASLGTYHDLLKIIKDKDFLDNEENEDILEDIVLTLTLFEDREMIEERLKTYAHLFDDKVMKQLKRRRYTGWGRLSRKLINGIRDKQSGKTILDFLKSDGFANRNFMQLIHDDSLTFKEDIQKAQVSGQGDSLHEHIANLAGSPAIKKGILQTVKVVDELVKVMGRHKPENIVIEMARENQTTQKGQKNSRERMKRIEEGIKELGSQILKEHPVENTQLQNEKLYLYYLQNGRDMYVDQELDINRLSDYDVDHIVPQSFLKDDSIDNKVLTRSDKARGKSDNVPSEEVVKKMKNYWRQLLNAKLITQRKFDNLTKAERGGLSELDKAGFIKRQLVETRQITKHVAQILDSRMNTKYDENDKLIREVKVITLKSKLVSDFRKDFQFYKVREINNYHHAHDAYLNAVVGTALIKKYPKLESEFVYGDYKVYDVRKMIAKSEQEIGKATAKYFFYSNIMNFFKTEITLANGEIRKRPLIETNGETGEIVWDKGRDFATVRKVLSMPQVNIVKKTEVQTGGFSKESILPKRNSDKLIARKKDWDPKKYGGFDSPTVAYSVLVVAKVEKGKSKKLKSVKELLGITIMERSSFEKNPIDFLEAKGYKEVKKDLIIKLPKYSLFELENGRKRMLASAGELQKGNELALPSKYVNFLYLASHYEKLKGSPEDNEQKQLFVEQHKHYLDEIIEQISEFSKRVILADANLDKVLSAYNKHRDKPIREQAENIIHLFTLTNLGAPAAFKYFDTTIDRKRYTSTKEVLDATLIHQSITGLYETRIDLSQLGGDGGPAPGSSGGTLNIEDEYRLHETSKEPDVPLGSTWLSDFPQAWAETGGMGLAVRQAPLIIPLKATSTPVSIKQYPMSQEARLGIKPHIQRLLDQGILVPCQSPWNTPLLPVKKPGTNDYRPVQDLREVNKRVEDIHPTVPNPYNLLSGLPPSHQWYTVLDLKDAFFCLRLHPTSQPLFAFEWRDPEMGISGQLTWTRLPQGFKNSPTLFNEALHRDLADFRIQHPDLILLQYVDDLLLAATSEQDCQRGTRALLQTLGNLGYRASAKKAQICQKQVKYLGYLLKEGQRWLTEARKETVMGQPTPKTPRQLREFLGKAGFCRLFIPGFAEMAAPLYPLTKPGTLFNWGPDQQKAYQEIKQALLTAPALGLPDLTKPFELFVDEKQGYAKGVLTQKLGPWRRPVAYLSKKLDPVAAGWPPCLRMVAAIAVLTKDAGKLTMGQPLVILAPHAVEALVKQPPDRWLSNARMTHYQAMLLDTDRVQFGPVVALNPATLLPLPEKEAPHDCLEILAETHGTRPDLTDQPIPDADYTWYTDGSSFLQEGQRRAGAAVTTETEVIWARALPAGTSAQRAELIALTQALKMAEGKKLNVYTDSRYAFATAHVHGEIYRRRGWLTSEGREIKNKNEILALLKALFLPKRLSIIHCPGHQKGNSAEARGNRMADQAAREAAMKAVLETSTLLAGKRTADGSEFEKRTADGSEFESPKKKAKVE

SEQ ID NO: 6765 - protein, 2095 aa, synthetic construct
MPAAKRVKLDGGDKKYSIGLDIGTNSVGWAVITDEYKVPSKKFKVLGNTDRHSIKKNLIGALLFDSGETAEATRLKRTARRRYTRRKNRICYLQEIFSNEMAKVDDSFFHRLEESFLVEEDKKHERHPIFGNIVDEVAYHEKYPTIYHLRKKLVDSTDKADLRLIYLALAHMIKFRGHFLIEGDLNPDNSDVDKLFIQLVQTYNQLFEENPINASGVDAKAILSARLSKSRRLENLIAQLPGEKKNGLFGNLIALSLGLTPNFKSNFDLAEDAKLQLSKDTYDDDLDNLLAQIGDQYADLFLAAKNLSDAILLSDILRVNTEITKAPLSASMIKRYDEHHQDLTLLKALVRQQLPEKYKEIFFDQSKNGYAGYIDGGASQEEFYKFIKPILEKMDGTEELLVKLNREDLLRKQRTFDNGSIPHQIHLGELHAILRRQEDFYPFLKDNREKIEKILTFRIPYYVGPLARGNSRFAWMTRKSEETITPWNFEEVVDKGASAQSFIERMTNFDKNLPNEKVLPKHSLLYEYFTVYNELTKVKYVTEGMRKPAFLSGEQKKAIVDLLFKTNRKVTVKQLKEDYFKKIECFDSVEISGVEDRFNASLGTYHDLLKIIKDKDFLDNEENEDILEDIVLTLTLFEDREMIEERLKTYAHLFDDKVMKQLKRRRYTGWGRLSRKLINGIRDKQSGKTILDFLKSDGFANRNFMQLIHDDSLTFKEDIQKAQVSGQGDSLHEHIANLAGSPAIKKGILQTVKVVDELVKVMGRHKPENIVIEMARENQTTQKGQKNSRERMKRIEEGIKELGSQILKEHPVENTQLQNEKLYLYYLQNGRDMYVDQELDINRLSDYDVDHIVPQSFLKDDSIDNKVLTRSDKARGKSDNVPSEEVVKKMKNYWRQLLNAKLITQRKFDNLTKAERGGLSELDKAGFIKRQLVETRQITKHVAQILDSRMNTKYDENDKLIREVKVITLKSKLVSDFRKDFQFYKVREINNYHHAHDAYLNAVVGTALIKKYPKLESEFVYGDYKVYDVRKMIAKSEQEIGKATAKYFFYSNIMNFFKTEITLANGEIRKRPLIETNGETGEIVWDKGRDFATVRKVLSMPQVNIVKKTEVQTGGFSKESILPKRNSDKLIARKKDWDPKKYGGFDSPTVAYSVLVVAKVEKGKSKKLKSVKELLGITIMERSSFEKNPIDFLEAKGYKEVKKDLIIKLPKYSLFELENGRKRMLASAGELQKGNELALPSKYVNFLYLASHYEKLKGSPEDNEQKQLFVEQHKHYLDEIIEQISEFSKRVILADANLDKVLSAYNKHRDKPIREQAENIIHLFTLTNLGAPAAFKYFDTTIDRKRYTSTKEVLDATLIHQSITGLYETRIDLSQLGGDGGEAAAKPAPGGTAPLEEEYRLFLEAPIQNVTLLEQWKREIPKVWAEINPPGLASTQAPIHVQLLSTALPVRVRQYPITLEAKRSLRETIRKFRAAGILRPVHSPWNTPLLPVRKSGTSEYRMVQDLREVNKRVETIHPTVPNPYTLLSLLPPDRIWYSVLDLKDAFFCIPLAPESQLIFAFEWADAEEGESGQLTWTRLPQGFKNSPTLFNEALNRDLQGFRLDHPSVSLLQYVDDLLIAADTQAACLSATRDLLMTLAELGYRVSGKKAQLCQEEVTYLGFKIHKGSRSLSNSRTQAILQIPVPKTKRQVREFLGKIGYCRLFIPGFAELAQPLYAATRPGNDPLVWGEKEEEAFQSLKLALTQPPALALPSLDKPFQLFVEETSGAAKGVLTQALGPWKRPVAYLSKRLDPVAAGWPRCLRAIAAAALLTREASKLTFGQDIEITSSHNLESLLRSPPDKWLTNARITQYQVLLLDPPRVRFKQTAALNPATLLPETDDTLPIHHCLDTLDSLTSTRPDLTDQPLAQAEATLFTDGSSYIRDGKRYAGAAVVTLDSVIWAEPLPIGTSAQKAELIALTKALEWSKDKSVNIYTDSRYAFATLHVHGMIYRERGWLTAGGKAIKNAPEILALLTAVWLPKRVAVMHCKGHQKDDAPTSTGNRRADEVAREVAIRPLSTQATISAGKRTADGSEFEKRTADGSEFESPKKKAKVE

SEQ ID NO: 6766 - protein, 2084 aa, synthetic construct
MPAAKRVKLDGGDKKYSIGLDIGTNSVGWAVITDEYKVPSKKFKVLGNTDRHSIKKNLIGALLFDSGETAEATRLKRTARRRYTRRKNRICYLQEIFSNEMAKVDDSFFHRLEESFLVEEDKKHERHPIFGNIVDEVAYHEKYPTIYHLRKKLVDSTDKADLRLIYLALAHMIKFRGHFLIEGDLNPDNSDVDKLFIQLVQTYNQLFEENPINASGVDAKAILSARLSKSRRLENLIAQLPGEKKNGLFGNLIALSLGLTPNFKSNFDLAEDAKLQLSKDTYDDDLDNLLAQIGDQYADLFLAAKNLSDAILLSDILRVNTEITKAPLSASMIKRYDEHHQDLTLLKALVRQQLPEKYKEIFFDQSKNGYAGYIDGGASQEEFYKFIKPILEKMDGTEELLVKLNREDLLRKQRTFDNGSIPHQIHLGELHAILRRQEDFYPFLKDNREKIEKILTFRIPYYVGPLARGNSRFAWMTRKSEETITPWNFEEVVDKGASAQSFIERMTNFDKNLPNEKVLPKHSLLYEYFTVYNELTKVKYVTEGMRKPAFLSGEQKKAIVDLLFKTNRKVTVKQLKEDYFKKIECFDSVEISGVEDRFNASLGTYHDLLKIIKDKDFLDNEENEDILEDIVLTLTLFEDREMIEERLKTYAHLFDDKVMKQLKRRRYTGWGRLSRKLINGIRDKQSGKTILDFLKSDGFANRNFMQLIHDDSLTFKEDIQKAQVSGQGDSLHEHIANLAGSPAIKKGILQTVKVVDELVKVMGRHKPENIVIEMARENQTTQKGQKNSRERMKRIEEGIKELGSQILKEHPVENTQLQNEKLYLYYLQNGRDMYVDQELDINRLSDYDVDHIVPQSFLKDDSIDNKVLTRSDKARGKSDNVPSEEVVKKMKNYWRQLLNAKLITQRKFDNLTKAERGGLSELDKAGFIKRQLVETRQITKHVAQILDSRMNTKYDENDKLIREVKVITLKSKLVSDFRKDFQFYKVREINNYHHAHDAYLNAVVGTALIKKYPKLESEFVYGDYKVYDVRKMIAKSEQEIGKATAKYFFYSNIMNFFKTEITLANGEIRKRPLIETNGETGEIVWDKGRDFATVRKVLSMPQVNIVKKTEVQTGGFSKESILPKRNSDKLIARKKDWDPKKYGGFDSPTVAYSVLVVAKVEKGKSKKLKSVKELLGITIMERSSFEKNPIDFLEAKGYKEVKKDLIIKLPKYSLFELENGRKRMLASAGELQKGNELALPSKYVNFLYLASHYEKLKGSPEDNEQKQLFVEQHKHYLDEIIEQISEFSKRVILADANLDKVLSAYNKHRDKPIREQAENIIHLFTLTNLGAPAAFKYFDTTIDRKRYTSTKEVLDATLIHQSITGLYETRIDLSQLGGDGGEAAAKPAPGGVPWILKKPLELTIKLDLEEQQGTLLNNSILSKKGKEELKQLFEKYSALWQSWENQVGHRRIRPHKIATGTVKPTPQKQYHINPKAKPDIQIVINDLLKQGVLIQKESTMNTPVYPVPKPNGRWRMVLDYRAVNKVTPLIAVQNQHSYGILGSLFKGRYKTTIDLSNGFWAHPIVPEDYWITAFTWQGKQYCWTVLPQGFLNSPGLFNGDVVDLLQGIPNVEVYVDDVYISHDSEKEHLEYLDILFNRLKEAGYIISLKKSNIANSIVDFLGFQITNEGRGLTDTFKEKLENITAPTTLKQLQSILGLLNFARNFIPDFTELIAPLYALIPKSPKNYVPWQIEHSTTLETLITKLNGAEYLQGRKGDKTLIMKVNASYTTGYIRYYNEGEKKPISYVSIVFSKTELKFTELEKLLTTVHKGLLKALDLSMGQNIHVYSPIVSMQNIQKTPQTAKKALASRWLSWLSYLEDPRIRFFYDPQMPALKDLPAVDTGKDNKKHPSNFQHIFYTDGSAITSPTKEGHLNAGMGIVYFINKDGNLQKQQEWSISLGNHTAQFAEIAAFEFALKKCLPLGGNILVVTDSNYVAKAYNEELDVWASNGFVNNRKKPLKHISKWKSVADLKRLRPDVVVTHEPGHQKLDSSPHAYGNNLADQLATQASFKVHAGKRTADGSEFEKRTADGSEFESPKKKAKVE

SEQ ID NO: 6767 - protein, 2084 aa, synthetic construct
MPAAKRVKLDGGDKKYSIGLDIGTNSVGWAVITDEYKVPSKKFKVLGNTDRHSIKKNLIGALLFDSGETAEATRLKRTARRRYTRRKNRICYLQEIFSNEMAKVDDSFFHRLEESFLVEEDKKHERHPIFGNIVDEVAYHEKYPTIYHLRKKLVDSTDKADLRLIYLALAHMIKFRGHFLIEGDLNPDNSDVDKLFIQLVQTYNQLFEENPINASGVDAKAILSARLSKSRRLENLIAQLPGEKKNGLFGNLIALSLGLTPNFKSNFDLAEDAKLQLSKDTYDDDLDNLLAQIGDQYADLFLAAKNLSDAILLSDILRVNTEITKAPLSASMIKRYDEHHQDLTLLKALVRQQLPEKYKEIFFDQSKNGYAGYIDGGASQEEFYKFIKPILEKMDGTEELLVKLNREDLLRKQRTFDNGSIPHQIHLGELHAILRRQEDFYPFLKDNREKIEKILTFRIPYYVGPLARGNSRFAWMTRKSEETITPWNFEEVVDKGASAQSFIERMTNFDKNLPNEKVLPKHSLLYEYFTVYNELTKVKYVTEGMRKPAFLSGEQKKAIVDLLFKTNRKVTVKQLKEDYFKKIECFDSVEISGVEDRFNASLGTYHDLLKIIKDKDFLDNEENEDILEDIVLTLTLFEDREMIEERLKTYAHLFDDKVMKQLKRRRYTGWGRLSRKLINGIRDKQSGKTILDFLKSDGFANRNFMQLIHDDSLTFKEDIQKAQVSGQGDSLHEHIANLAGSPAIKKGILQTVKVVDELVKVMGRHKPENIVIEMARENQTTQKGQKNSRERMKRIEEGIKELGSQILKEHPVENTQLQNEKLYLYYLQNGRDMYVDQELDINRLSDYDVDHIVPQSFLKDDSIDNKVLTRSDKARGKSDNVPSEEVVKKMKNYWRQLLNAKLITQRKFDNLTKAERGGLSELDKAGFIKRQLVETRQITKHVAQILDSRMNTKYDENDKLIREVKVITLKSKLVSDFRKDFQFYKVREINNYHHAHDAYLNAVVGTALIKKYPKLESEFVYGDYKVYDVRKMIAKSEQEIGKATAKYFFYSNIMNFFKTEITLANGEIRKRPLIETNGETGEIVWDKGRDFATVRKVLSMPQVNIVKKTEVQTGGFSKESILPKRNSDKLIARKKDWDPKKYGGFDSPTVAYSVLVVAKVEKGKSKKLKSVKELLGITIMERSSFEKNPIDFLEAKGYKEVKKDLIIKLPKYSLFELENGRKRMLASAGELQKGNELALPSKYVNFLYLASHYEKLKGSPEDNEQKQLFVEQHKHYLDEIIEQISEFSKRVILADANLDKVLSAYNKHRDKPIREQAENIIHLFTLTNLGAPAAFKYFDTTIDRKRYTSTKEVLDATLIHQSITGLYETRIDLSQLGGDGGEAAAKPAPGGVPWLTQQPLQLTILVPLQEYQEKILSKTALPEDQKQQLKTLFVKYDNLWQHWENQVGHRKIRPHNIATGDYPPRPQKQYPINPKAKPSIQIVIDDLLKQGVLTPQNSTMNTPVYPVPKPDGRWRMVLDYREVNKTIPLTAAQNQHSAGILATIVRQKYKTTLDLANGFWAHPITPESYWLTAFTWQGKQYCWTRLPQGFLNSPALFNADVVDLLKEIPNVQVYVDDIYLSHDDPKEHVQQLEKVFQILLQAGYVVSLKKSEIGQKTVEFLGFNITKEGRGLTDTFKTKLLNITPPKDLKQLQSILGKLNFARNFIPNFAELVQPLYNLIAPAKGKYIEWSEENTKQLNMVIEALNTASNLEERLPEQRLVIKVNTSPSAGYVRYYNETGKKPIMYLNYVFSKAELKFSMLEKLLTTMHKALIKAMDLAMGQEILVYSPIVSMTKIQKTPLPERKALPIRWITWMTYLEDPRIQFHYDKTLPELKHIPDVYTSSQSPVKHPSQYEGVFYTDGSAIKSPDPTKSNNAGMGIVHATYKPEYQVLNQWSIPLGNHTAQMAEIAAVEFACKKALKIPGPVLVITDSFYVAESANKELPYWKSNGFVNNKKKPLKHISKWKSIAECLSMKPDITIQHEKGISLQIPVFILKGNALADKLATQGSYVVNAGKRTADGSEFEKRTADGSEFESPKKKAKVE

SEQ ID NO: 6768 - protein, 2173 aa, synthetic construct
MPAAKRVKLDGGDKKYSIGLDIGTNSVGWAVITDEYKVPSKKFKVLGNTDRHSIKKNLIGALLFDSGETAEATRLKRTARRRYTRRKNRICYLQEIFSNEMAKVDDSFFHRLEESFLVEEDKKHERHPIFGNIVDEVAYHEKYPTIYHLRKKLVDSTDKADLRLIYLALAHMIKFRGHFLIEGDLNPDNSDVDKLFIQLVQTYNQLFEENPINASGVDAKAILSARLSKSRRLENLIAQLPGEKKNGLFGNLIALSLGLTPNFKSNFDLAEDAKLQLSKDTYDDDLDNLLAQIGDQYADLFLAAKNLSDAILLSDILRVNTEITKAPLSASMIKRYDEHHQDLTLLKALVRQQLPEKYKEIFFDQSKNGYAGYIDGGASQEEFYKFIKPILEKMDGTEELLVKLNREDLLRKQRTFDNGSIPHQIHLGELHAILRRQEDFYPFLKDNREKIEKILTFRIPYYVGPLARGNSRFAWMTRKSEETITPWNFEEVVDKGASAQSFIERMTNFDKNLPNEKVLPKHSLLYEYFTVYNELTKVKYVTEGMRKPAFLSGEQKKAIVDLLFKTNRKVTVKQLKEDYFKKIECFDSVEISGVEDRFNASLGTYHDLLKIIKDKDFLDNEENEDILEDIVLTLTLFEDREMIEERLKTYAHLFDDKVMKQLKRRRYTGWGRLSRKLINGIRDKQSGKTILDFLKSDGFANRNFMQLIHDDSLTFKEDIQKAQVSGQGDSLHEHIANLAGSPAIKKGILQTVKVVDELVKVMGRHKPENIVIEMARENQTTQKGQKNSRERMKRIEEGIKELGSQILKEHPVENTQLQNEKLYLYYLQNGRDMYVDQELDINRLSDYDVDHIVPQSFLKDDSIDNKVLTRSDKARGKSDNVPSEEVVKKMKNYWRQLLNAKLITQRKFDNLTKAERGGLSELDKAGFIKRQLVETRQITKHVAQILDSRMNTKYDENDKLIREVKVITLKSKLVSDFRKDFQFYKVREINNYHHAHDAYLNAVVGTALIKKYPKLESEFVYGDYKVYDVRKMIAKSEQEIGKATAKYFFYSNIMNFFKTEITLANGEIRKRPLIETNGETGEIVWDKGRDFATVRKVLSMPQVNIVKKTEVQTGGFSKESILPKRNSDKLIARKKDWDPKKYGGFDSPTVAYSVLVVAKVEKGKSKKLKSVKELLGITIMERSSFEKNPIDFLEAKGYKEVKKDLIIKLPKYSLFELENGRKRMLASAGELQKGNELALPSKYVNFLYLASHYEKLKGSPEDNEQKQLFVEQHKHYLDEIIEQISEFSKRVILADANLDKVLSAYNKHRDKPIREQAENIIHLFTLTNLGAPAAFKYFDTTIDRKRYTSTKEVLDATLIHQSITGLYETRIDLSQLGGDGGEAAAKPAPGGMNPLQLLQPLPAEIKGTKLLAHWNSGATITCIPESFLEDEQPIKKTLIKTIHGEKQQNVYYVTFKVKGRKVEAEVIASPYEYILLSPTDVPWLTQQPLQLTILVPLQEYQEKILSKTALPEDQKQQLKTLFVKYDNLWQHWENQVGHRKIRPHNIATGDYPPRPQKQYPINPKAKPSIQIVIDDLLKQGVLTPQNSTMNTPVYPVPKPDGRWRMVLDYREVNKTIPLTAAQNQHSAGILATIVRQKYKTTLDLANGFWAHPITPESYWLTAFTWQGKQYCWTRLPQGFLNSPALFNADVVDLLKEIPNVQVYVDDIYLSHDDPKEHVQQLEKVFQILLQAGYVVSLKKSEIGQKTVEFLGFNITKEGRGLTDTFKTKLLNITPPKDLKQLQSILGKLNFARNFIPNFAELVQPLYNLIAPAKGKYIEWSEENTKQLNMVIEALNTASNLEERLPEQRLVIKVNTSPSAGYVRYYNETGKKPIMYLNYVFSKAELKFSMLEKLLTTMHKALIKAMDLAMGQEILVYSPIVSMTKIQKTPLPERKALPIRWITWMTYLEDPRIQFHYDKTLPELKHIPDVYTSSQSPVKHPSQYEGVFYTDGSAIKSPDPTKSNNAGMGIVHATYKPEYQVLNQWSIPLGNHTAQMAEIAAVEFACKKALKIPGPVLVITDSFYVAESANKELPYWKSNGFVNNKKKPLKHISKWKSIAECLSMKPDITIQHEKGISLQIPVFILKGNALADKLATQGSYVVNAGKRTADGSEFEKRTADGSEFESPKKKAKVE

SEQ ID NO: 6769 - protein, 2091 aa, synthetic construct
MPAAKRVKLDGGDKKYSIGLDIGTNSVGWAVITDEYKVPSKKFKVLGNTDRHSIKKNLIGALLFDSGETAEATRLKRTARRRYTRRKNRICYLQEIFSNEMAKVDDSFFHRLEESFLVEEDKKHERHPIFGNIVDEVAYHEKYPTIYHLRKKLVDSTDKADLRLIYLALAHMIKFRGHFLIEGDLNPDNSDVDKLFIQLVQTYNQLFEENPINASGVDAKAILSARLSKSRRLENLIAQLPGEKKNGLFGNLIALSLGLTPNFKSNFDLAEDAKLQLSKDTYDDDLDNLLAQIGDQYADLFLAAKNLSDAILLSDILRVNTEITKAPLSASMIKRYDEHHQDLTLLKALVRQQLPEKYKEIFFDQSKNGYAGYIDGGASQEEFYKFIKPILEKMDGTEELLVKLNREDLLRKQRTFDNGSIPHQIHLGELHAILRRQEDFYPFLKDNREKIEKILTFRIPYYVGPLARGNSRFAWMTRKSEETITPWNFEEVVDKGASAQSFIERMTNFDKNLPNEKVLPKHSLLYEYFTVYNELTKVKYVTEGMRKPAFLSGEQKKAIVDLLFKTNRKVTVKQLKEDYFKKIECFDSVEISGVEDRFNASLGTYHDLLKIIKDKDFLDNEENEDILEDIVLTLTLFEDREMIEERLKTYAHLFDDKVMKQLKRRRYTGWGRLSRKLINGIRDKQSGKTILDFLKSDGFANRNFMQLIHDDSLTFKEDIQKAQVSGQGDSLHEHIANLAGSPAIKKGILQTVKVVDELVKVMGRHKPENIVIEMARENQTTQKGQKNSRERMKRIEEGIKELGSQILKEHPVENTQLQNEKLYLYYLQNGRDMYVDQELDINRLSDYDVDHIVPQSFLKDDSIDNKVLTRSDKARGKSDNVPSEEVVKKMKNYWRQLLNAKLITQRKFDNLTKAERGGLSELDKAGFIKRQLVETRQITKHVAQILDSRMNTKYDENDKLIREVKVITLKSKLVSDFRKDFQFYKVREINNYHHAHDAYLNAVVGTALIKKYPKLESEFVYGDYKVYDVRKMIAKSEQEIGKATAKYFFYSNIMNFFKTEITLANGEIRKRPLIETNGETGEIVWDKGRDFATVRKVLSMPQVNIVKKTEVQTGGFSKESILPKRNSDKLIARKKDWDPKKYGGFDSPTVAYSVLVVAKVEKGKSKKLKSVKELLGITIMERSSFEKNPIDFLEAKGYKEVKKDLIIKLPKYSLFELENGRKRMLASAGELQKGNELALPSKYVNFLYLASHYEKLKGSPEDNEQKQLFVEQHKHYLDEIIEQISEFSKRVILADANLDKVLSAYNKHRDKPIREQAENIIHLFTLTNLGAPAAFKYFDTTIDRKRYTSTKEVLDATLIHQSITGLYETRIDLSQLGGDGGEAAAKPAPGGVLNLEEEYRLHEKPVPSSIDPSWLQLFPTVWAERAGMGLANQVPPVVVELRSGASPVAVRQYPMSKEAREGIRPHIQKFLDLGVLVPCRSPWNTPLLPVKKPGTNDYRPVQDLREINKRVQDIHPTVPNPYNLLSSLPPSYTWYSVLDLKDAFFCLRLHPNSQPLFAFEWKDPEKGNTGQLTWTRLPQGFKNSPTLFNEALHRDLAPFRALNPQVVLLQYVDDLLVAAPTYEDCKKGTQKLLQELSKLGYRVSAKKAQLCQREVTYLGYLLKEGKRWLTPARKATVMKIPVPTTPRQVREFLGKAGFCRLFIPGFASLAAPLYPLTKPSIPFIWTEEHQQAFDHIKKALLSAPALALPDLTKPFTLYIDERAGVARGVLTQTLGPWRRPVAYLSKKLDPVASGWPTCLKAVAAVALLLKDADKLTLGQNVTVIASHSLESIVRQPPDRWMTNARMTHYQSLLLNERVSFAPPAVLNPATLLPVESEATPVHRCSEILAEETGTRRDLEDQPLPGVPTWYTDGSSFITEGKRRAGAPIVDGKRTVWASSLPEGTSAQKAELVALTQALRLAEGKNINIYTDSRYAFATAHIHGAIYKQRGWLTSAGKDIKNKEEILALLEAIHLPRRVAIIHCPGHQRGSNPVATGNRRADEAAKQAALSTRVLAGTTKPAGKRTADGSEFEKRTADGSEFESPKKKAKVE

SEQ ID NO: 6770 - protein, 2124 aa, synthetic construct
MPAAKRVKLDGGDKKYSIGLDIGTNSVGWAVITDEYKVPSKKFKVLGNTDRHSIKKNLIGALLFDSGETAEATRLKRTARRRYTRRKNRICYLQEIFSNEMAKVDDSFFHRLEESFLVEEDKKHERHPIFGNIVDEVAYHEKYPTIYHLRKKLVDSTDKADLRLIYLALAHMIKFRGHFLIEGDLNPDNSDVDKLFIQLVQTYNQLFEENPINASGVDAKAILSARLSKSRRLENLIAQLPGEKKNGLFGNLIALSLGLTPNFKSNFDLAEDAKLQLSKDTYDDDLDNLLAQIGDQYADLFLAAKNLSDAILLSDILRVNTEITKAPLSASMIKRYDEHHQDLTLLKALVRQQLPEKYKEIFFDQSKNGYAGYIDGGASQEEFYKFIKPILEKMDGTEELLVKLNREDLLRKQRTFDNGSIPHQIHLGELHAILRRQEDFYPFLKDNREKIEKILTFRIPYYVGPLARGNSRFAWMTRKSEETITPWNFEEVVDKGASAQSFIERMTNFDKNLPNEKVLPKHSLLYEYFTVYNELTKVKYVTEGMRKPAFLSGEQKKAIVDLLFKTNRKVTVKQLKEDYFKKIECFDSVEISGVEDRFNASLGTYHDLLKIIKDKDFLDNEENEDILEDIVLTLTLFEDREMIEERLKTYAHLFDDKVMKQLKRRRYTGWGRLSRKLINGIRDKQSGKTILDFLKSDGFANRNFMQLIHDDSLTFKEDIQKAQVSGQGDSLHEHIANLAGSPAIKKGILQTVKVVDELVKVMGRHKPENIVIEMARENQTTQKGQKNSRERMKRIEEGIKELGSQILKEHPVENTQLQNEKLYLYYLQNGRDMYVDQELDINRLSDYDVDHIVPQSFLKDDSIDNKVLTRSDKARGKSDNVPSEEVVKKMKNYWRQLLNAKLITQRKFDNLTKAERGGLSELDKAGFIKRQLVETRQITKHVAQILDSRMNTKYDENDKLIREVKVITLKSKLVSDFRKDFQFYKVREINNYHHAHDAYLNAVVGTALIKKYPKLESEFVYGDYKVYDVRKMIAKSEQEIGKATAKYFFYSNIMNFFKTEITLANGEIRKRPLIETNGETGEIVWDKGRDFATVRKVLSMPQVNIVKKTEVQTGGFSKESILPKRNSDKLIARKKDWDPKKYGGFDSPTVAYSVLVVAKVEKGKSKKLKSVKELLGITIMERSSFEKNPIDFLEAKGYKEVKKDLIIKLPKYSLFELENGRKRMLASAGELQKGNELALPSKYVNFLYLASHYEKLKGSPEDNEQKQLFVEQHKHYLDEIIEQISEFSKRVILADANLDKVLSAYNKHRDKPIREQAENIIHLFTLTNLGAPAAFKYFDTTIDRKRYTSTKEVLDATLIHQSITGLYETRIDLSQLGGDGGEAAAKPAPGGLLGRDLLTKLKAQIQFSTEGPQVTWEDRPAMCLVLNLEEEYRLHEKPVPPSIDPSWLQLFPMVWAEKAGMGLANQVPPVVVELKSDASPVAVRQYPMSKEAREGIRPHIQRFLDLGILVPCQSPWNTPLLPVKKPGTNDYRPVQDLREVNKRVQDIHPTVPNPYNLLSSLPPSHTWYSVLDLKDAFFCLKLHPNSQPLFAFEWRDPEKGNTGQLTWTRLPQGFKNSPTLFNEALHRDLASFRALNPQVVMLQYVDDLLVAAPTYRDCKEGTRRLLQELSKLGYRVSAKKAQLCREEVTYLGYLLKGGKRWLTPARKATVMKIPTPTTPRQVREFLGTAGFCRLWIPGFASLAAPLYPLTRPKVPFTWTEAHQEAFGRIKEALLSAPALALPDLTKPFALYVDEKEGVARGVLTQTLGPWRRPVAYLSKKLDPVASGWPTCLKAIAAVALLLKDADKLTLGQNVLVIAPHNLESIVRQPPDRWMTNARMTHYQSLLLNERVSFAPPAILNPATLLPVESDDTPIHICSEILAEETGTRPDLRDQPLPGVPAWYTDGSSFIMDGRRQAGAAIVDNKRTVWASNLPEGTSAQKAELIALTQALRLAEGKSINIYTDSRYAFATAHVHGAIYKQRGWLTSAGKDIKNKEEILALLEAIHLPKRVAIIHCPGHQRGTDPVATGNRKADEAAKQAAQSTRILTETTKNAGKRTADGSEFEKRTADGSEFESPKKKAKVE

SEQ ID NO: 6771 - protein, 2124 aa, synthetic construct
MPAAKRVKLDGGDKKYSIGLDIGTNSVGWAVITDEYKVPSKKFKVLGNTDRHSIKKNLIGALLFDSGETAEATRLKRTARRRYTRRKNRICYLQEIFSNEMAKVDDSFFHRLEESFLVEEDKKHERHPIFGNIVDEVAYHEKYPTIYHLRKKLVDSTDKADLRLIYLALAHMIKFRGHFLIEGDLNPDNSDVDKLFIQLVQTYNQLFEENPINASGVDAKAILSARLSKSRRLENLIAQLPGEKKNGLFGNLIALSLGLTPNFKSNFDLAEDAKLQLSKDTYDDDLDNLLAQIGDQYADLFLAAKNLSDAILLSDILRVNTEITKAPLSASMIKRYDEHHQDLTLLKALVRQQLPEKYKEIFFDQSKNGYAGYIDGGASQEEFYKFIKPILEKMDGTEELLVKLNREDLLRKQRTFDNGSIPHQIHLGELHAILRRQEDFYPFLKDNREKIEKILTFRIPYYVGPLARGNSRFAWMTRKSEETITPWNFEEVVDKGASAQSFIERMTNFDKNLPNEKVLPKHSLLYEYFTVYNELTKVKYVTEGMRKPAFLSGEQKKAIVDLLFKTNRKVTVKQLKEDYFKKIECFDSVEISGVEDRFNASLGTYHDLLKIIKDKDFLDNEENEDILEDIVLTLTLFEDREMIEERLKTYAHLFDDKVMKQLKRRRYTGWGRLSRKLINGIRDKQSGKTILDFLKSDGFANRNFMQLIHDDSLTFKEDIQKAQVSGQGDSLHEHIANLAGSPAIKKGILQTVKVVDELVKVMGRHKPENIVIEMARENQTTQKGQKNSRERMKRIEEGIKELGSQILKEHPVENTQLQNEKLYLYYLQNGRDMYVDQELDINRLSDYDVDHIVPQSFLKDDSIDNKVLTRSDKARGKSDNVPSEEVVKKMKNYWRQLLNAKLITQRKFDNLTKAERGGLSELDKAGFIKRQLVETRQITKHVAQILDSRMNTKYDENDKLIREVKVITLKSKLVSDFRKDFQFYKVREINNYHHAHDAYLNAVVGTALIKKYPKLESEFVYGDYKVYDVRKMIAKSEQEIGKATAKYFFYSNIMNFFKTEITLANGEIRKRPLIETNGETGEIVWDKGRDFATVRKVLSMPQVNIVKKTEVQTGGFSKESILPKRNSDKLIARKKDWDPKKYGGFDSPTVAYSVLVVAKVEKGKSKKLKSVKELLGITIMERSSFEKNPIDFLEAKGYKEVKKDLIIKLPKYSLFELENGRKRMLASAGELQKGNELALPSKYVNFLYLASHYEKLKGSPEDNEQKQLFVEQHKHYLDEIIEQISEFSKRVILADANLDKVLSAYNKHRDKPIREQAENIIHLFTLTNLGAPAAFKYFDTTIDRKRYTSTKEVLDATLIHQSITGLYETRIDLSQLGGDGGEAAAKPAPGGLLGRDLLTKLKAQIQFSTEGPQVTWEDRPAMCLVLNLEEEYRLHEKPVPPSIDPSWLQLFPMVWAEKAGMGLANQVPPVVVELKSDASPVAVRQYPMSKEAREGIRPHIQRFLDLGILVPCQSPWNTPLLPVKKPGTNDYRPVQDLREVNKRVQDIHPTVPNPYNLLSSLPPSHTWYSVLDLKDAFFCLKLHPNSQPLFAFEWRDPEKGNTGQLTWTRLPQGFKNSPTLFNEALHRDLASFRALNPQVVMLQYVDDLLVAAPTYRDCKEGTRRLLQELSKLGYRVSAKKAQLCREEVTYLGYLLKGGKRWLTPARKATVMKIPTPTTPRQVREFLGKAGFCRLFIPGFASLAAPLYPLTRPKVPFTWTEAHQEAFGRIKEALLSAPALALPDLTKPFALYVDEKEGVARGVLTQTLGPWRRPVAYLSKKLDPVASGWPTCLKAIAAVALLLKDADKLTLGQNVLVIAPHNLESIVRQPPDRWMTNARMTHYQSLLLNERVSFAPPAILNPATLLPVESDDTPIHICSEILAEETGTRPDLRDQPLPGVPAWYTDGSSFIMDGRRQAGAAIVDNKRTVWASNLPEGTSAQKAELIALTQALRLAEGKSINIYTDSRYAFATAHVHGAIYKQRGWLTSAGKDIKNKEEILALLEAIHLPKRVAIIHCPGHQRGTDPVATGNRKADEAAKQAAQSTRILTETTKNAGKRTADGSEFEKRTADGSEFESPKKKAKVE

SEQ ID NO: 6772 - protein, 2215 aa, synthetic construct
MPAAKRVKLDGGDKKYSIGLDIGTNSVGWAVITDEYKVPSKKFKVLGNTDRHSIKKNLIGALLFDSGETAEATRLKRTARRRYTRRKNRICYLQEIFSNEMAKVDDSFFHRLEESFLVEEDKKHERHPIFGNIVDEVAYHEKYPTIYHLRKKLVDSTDKADLRLIYLALAHMIKFRGHFLIEGDLNPDNSDVDKLFIQLVQTYNQLFEENPINASGVDAKAILSARLSKSRRLENLIAQLPGEKKNGLFGNLIALSLGLTPNFKSNFDLAEDAKLQLSKDTYDDDLDNLLAQIGDQYADLFLAAKNLSDAILLSDILRVNTEITKAPLSASMIKRYDEHHQDLTLLKALVRQQLPEKYKEIFFDQSKNGYAGYIDGGASQEEFYKFIKPILEKMDGTEELLVKLNREDLLRKQRTFDNGSIPHQIHLGELHAILRRQEDFYPFLKDNREKIEKILTFRIPYYVGPLARGNSRFAWMTRKSEETITPWNFEEVVDKGASAQSFIERMTNFDKNLPNEKVLPKHSLLYEYFTVYNELTKVKYVTEGMRKPAFLSGEQKKAIVDLLFKTNRKVTVKQLKEDYFKKIECFDSVEISGVEDRFNASLGTYHDLLKIIKDKDFLDNEENEDILEDIVLTLTLFEDREMIEERLKTYAHLFDDKVMKQLKRRRYTGWGRLSRKLINGIRDKQSGKTILDFLKSDGFANRNFMQLIHDDSLTFKEDIQKAQVSGQGDSLHEHIANLAGSPAIKKGILQTVKVVDELVKVMGRHKPENIVIEMARENQTTQKGQKNSRERMKRIEEGIKELGSQILKEHPVENTQLQNEKLYLYYLQNGRDMYVDQELDINRLSDYDVDHIVPQSFLKDDSIDNKVLTRSDKARGKSDNVPSEEVVKKMKNYWRQLLNAKLITQRKFDNLTKAERGGLSELDKAGFIKRQLVETRQITKHVAQILDSRMNTKYDENDKLIREVKVITLKSKLVSDFRKDFQFYKVREINNYHHAHDAYLNAVVGTALIKKYPKLESEFVYGDYKVYDVRKMIAKSEQEIGKATAKYFFYSNIMNFFKTEITLANGEIRKRPLIETNGETGEIVWDKGRDFATVRKVLSMPQVNIVKKTEVQTGGFSKESILPKRNSDKLIARKKDWDPKKYGGFDSPTVAYSVLVVAKVEKGKSKKLKSVKELLGITIMERSSFEKNPIDFLEAKGYKEVKKDLIIKLPKYSLFELENGRKRMLASAGELQKGNELALPSKYVNFLYLASHYEKLKGSPEDNEQKQLFVEQHKHYLDEIIEQISEFSKRVILADANLDKVLSAYNKHRDKPIREQAENIIHLFTLTNLGAPAAFKYFDTTIDRKRYTSTKEVLDATLIHQSITGLYETRIDLSQLGGDGGEAAAKPAPGGTLGDQGSRGSDPLPEPRVTLTVEGIPTEFLVNTGAEHSVLTKPMGKMGSKRTVVAGATGSKVYPWTTKRLLKIGQKQVTHSFLVIPECPAPLLGRDLLTKLKAQIQFSTEGPQVTWEDRPAMCLVLNLEEEYRLHEKPVPPSIDPSWLQLFPMVWAEKAGMGLANQVPPVVVELKSDASPVAVRQYPMSKEAREGIRPHIQRFLDLGILVPCQSPWNTPLLPVKKPGTNDYRPVQDLREVNKRVQDIHPTVPNPYNLLSSLPPSHTWYSVLDLKDAFFCLKLHPNSQPLFAFEWRDPEKGNTGQLTWTRLPQGFKNSPTLFNEALHRDLASFRALNPQVVMLQYVDDLLVAAPTYRDCKEGTRRLLQELSKLGYRVSAKKAQLCREEVTYLGYLLKGGKRWLTPARKATVMKIPTPTTPRQVREFLGTAGFCRLWIPGFASLAAPLYPLTRPKVPFTWTEAHQEAFGRIKEALLSAPALALPDLTKPFALYVDEKEGVARGVLTQTLGPWRRPVAYLSKKLDPVASGWPTCLKAIAAVALLLKDADKLTLGQNVLVIAPHNLESIVRQPPDRWMTNARMTHYQSLLLNERVSFAPPAILNPATLLPVESDDTPIHICSEILAEETGTRPDLRDQPLPGVPAWYTDGSSFIMDGRRQAGAAIVDNKRTVWASNLPEGTSAQKAELIALTQALRLAEGKSINIYTDSRYAFATAHVHGAIYKQRGWLTSAGKDIKNKEEILALLEAIHLPKRVAIIHCPGHQRGTDPVATGNRKADEAAKQAAQSTRILTETTKNAGKRTADGSEFEKRTADGSEFESPKKKAKVE

SEQ ID NO: 6773 - protein, 2093 aa, synthetic construct
MPAAKRVKLDGGDKKYSIGLDIGTNSVGWAVITDEYKVPSKKFKVLGNTDRHSIKKNLIGALLFDSGETAEATRLKRTARRRYTRRKNRICYLQEIFSNEMAKVDDSFFHRLEESFLVEEDKKHERHPIFGNIVDEVAYHEKYPTIYHLRKKLVDSTDKADLRLIYLALAHMIKFRGHFLIEGDLNPDNSDVDKLFIQLVQTYNQLFEENPINASGVDAKAILSARLSKSRRLENLIAQLPGEKKNGLFGNLIALSLGLTPNFKSNFDLAEDAKLQLSKDTYDDDLDNLLAQIGDQYADLFLAAKNLSDAILLSDILRVNTEITKAPLSASMIKRYDEHHQDLTLLKALVRQQLPEKYKEIFFDQSKNGYAGYIDGGASQEEFYKFIKPILEKMDGTEELLVKLNREDLLRKQRTFDNGSIPHQIHLGELHAILRRQEDFYPFLKDNREKIEKILTFRIPYYVGPLARGNSRFAWMTRKSEETITPWNFEEVVDKGASAQSFIERMTNFDKNLPNEKVLPKHSLLYEYFTVYNELTKVKYVTEGMRKPAFLSGEQKKAIVDLLFKTNRKVTVKQLKEDYFKKIECFDSVEISGVEDRFNASLGTYHDLLKIIKDKDFLDNEENEDILEDIVLTLTLFEDREMIEERLKTYAHLFDDKVMKQLKRRRYTGWGRLSRKLINGIRDKQSGKTILDFLKSDGFANRNFMQLIHDDSLTFKEDIQKAQVSGQGDSLHEHIANLAGSPAIKKGILQTVKVVDELVKVMGRHKPENIVIEMARENQTTQKGQKNSRERMKRIEEGIKELGSQILKEHPVENTQLQNEKLYLYYLQNGRDMYVDQELDINRLSDYDVDHIVPQSFLKDDSIDNKVLTRSDKARGKSDNVPSEEVVKKMKNYWRQLLNAKLITQRKFDNLTKAERGGLSELDKAGFIKRQLVETRQITKHVAQILDSRMNTKYDENDKLIREVKVITLKSKLVSDFRKDFQFYKVREINNYHHAHDAYLNAVVGTALIKKYPKLESEFVYGDYKVYDVRKMIAKSEQEIGKATAKYFFYSNIMNFFKTEITLANGEIRKRPLIETNGETGEIVWDKGRDFATVRKVLSMPQVNIVKKTEVQTGGFSKESILPKRNSDKLIARKKDWDPKKYGGFDSPTVAYSVLVVAKVEKGKSKKLKSVKELLGITIMERSSFEKNPIDFLEAKGYKEVKKDLIIKLPKYSLFELENGRKRMLASAGELQKGNELALPSKYVNFLYLASHYEKLKGSPEDNEQKQLFVEQHKHYLDEIIEQISEFSKRVILADANLDKVLSAYNKHRDKPIREQAENIIHLFTLTNLGAPAAFKYFDTTIDRKRYTSTKEVLDATLIHQSITGLYETRIDLSQLGGDGGEAAAKPAPGGTLNLEDEYRLYETSAEPEVSPGSTWLSDFPQAWAETGGMGLAVRQAPLIIPLKATSTPVSIKQYPMSQEAKLGIKPHIQRLLDQGILVPCQSPWNTPLLPVKKPGTNDYRPVQDLREVNKRVEDIHPTVPNPYNLLSGLPPSHRWYTVLDLKDAFFCLRLHPTSQPLFAFEWRDPGMGISGQLTWTRLPQGFKNSPTLFNEALHRDLADFRIQHPDLILLQYVDDILLAATSELDCQQGTRALLLTLGNLGYRASAKKAQLCQKQVKYLGYLLKEGQRWLTEARKETVMGQPTPKTPRQLREFLGKAGFCRLFIPGFAEMAAPLYPLTKPGTLFNWGPDQQKAYQEIKQALLTAPALGLPDLTKPFELFVDEKQGYAKGVLTQKLGPWRRPVAYLSKKLDPVAAGWPPCLRMVAAIAVLRKDAGKLTMGQPLVILAPHAVEALVKQPPDRWLSNARMTHYQAMLLDTDRVQFGPVVALNPATLLPLPEEGAPHDCLEILAETHGTRPDLTDQPIPDADHTWYTDGSSFLQEGQRKAGAAVTTETEVIWARALPAGTSAQRAELIALTQALKMAEGKRLNVYTDSRYAFATAHIHGEIYRRRGWLTSEGREIKNKSEILALLKALFLPKRLSIIHCLGHQKGDSAEARGNRLADQAAREAAIKTPPDTSTLLAGKRTADGSEFEKRTADGSEFESPKKKAKVE

SEQ ID NO: 6774 - protein, 2093 aa, synthetic construct
MPAAKRVKLDGGDKKYSIGLDIGTNSVGWAVITDEYKVPSKKFKVLGNTDRHSIKKNLIGALLFDSGETAEATRLKRTARRRYTRRKNRICYLQEIFSNEMAKVDDSFFHRLEESFLVEEDKKHERHPIFGNIVDEVAYHEKYPTIYHLRKKLVDSTDKADLRLIYLALAHMIKFRGHFLIEGDLNPDNSDVDKLFIQLVQTYNQLFEENPINASGVDAKAILSARLSKSRRLENLIAQLPGEKKNGLFGNLIALSLGLTPNFKSNFDLAEDAKLQLSKDTYDDDLDNLLAQIGDQYADLFLAAKNLSDAILLSDILRVNTEITKAPLSASMIKRYDEHHQDLTLLKALVRQQLPEKYKEIFFDQSKNGYAGYIDGGASQEEFYKFIKPILEKMDGTEELLVKLNREDLLRKQRTFDNGSIPHQIHLGELHAILRRQEDFYPFLKDNREKIEKILTFRIPYYVGPLARGNSRFAWMTRKSEETITPWNFEEVVDKGASAQSFIERMTNFDKNLPNEKVLPKHSLLYEYFTVYNELTKVKYVTEGMRKPAFLSGEQKKAIVDLLFKTNRKVTVKQLKEDYFKKIECFDSVEISGVEDRFNASLGTYHDLLKIIKDKDFLDNEENEDILEDIVLTLTLFEDREMIEERLKTYAHLFDDKVMKQLKRRRYTGWGRLSRKLINGIRDKQSGKTILDFLKSDGFANRNFMQLIHDDSLTFKEDIQKAQVSGQGDSLHEHIANLAGSPAIKKGILQTVKVVDELVKVMGRHKPENIVIEMARENQTTQKGQKNSRERMKRIEEGIKELGSQILKEHPVENTQLQNEKLYLYYLQNGRDMYVDQELDINRLSDYDVDHIVPQSFLKDDSIDNKVLTRSDKARGKSDNVPSEEVVKKMKNYWRQLLNAKLITQRKFDNLTKAERGGLSELDKAGFIKRQLVETRQITKHVAQILDSRMNTKYDENDKLIREVKVITLKSKLVSDFRKDFQFYKVREINNYHHAHDAYLNAVVGTALIKKYPKLESEFVYGDYKVYDVRKMIAKSEQEIGKATAKYFFYSNIMNFFKTEITLANGEIRKRPLIETNGETGEIVWDKGRDFATVRKVLSMPQVNIVKKTEVQTGGFSKESILPKRNSDKLIARKKDWDPKKYGGFDSPTVAYSVLVVAKVEKGKSKKLKSVKELLGITIMERSSFEKNPIDFLEAKGYKEVKKDLIIKLPKYSLFELENGRKRMLASAGELQKGNELALPSKYVNFLYLASHYEKLKGSPEDNEQKQLFVEQHKHYLDEIIEQISEFSKRVILADANLDKVLSAYNKHRDKPIREQAENIIHLFTLTNLGAPAAFKYFDTTIDRKRYTSTKEVLDATLIHQSITGLYETRIDLSQLGGDGGEAAAKPAPGGTLGIEDEYRLHETSTEPDVSLGSTWLSDFPQAWAETGGMGLAVRQAPLIIPLKATSTPVSIQQYPMSHEARLGIKPHIQRLLDQGILVPCQSPWNTPLLPVKKPGTNDYRPVQDLREVNKRVEDIHPTVPNPYNLLSGLPPSHQWYTVLDLKDAFFCLRLHPTSQPLFAFEWRDPGMGISGQLTWTRLPQGFKNSPTLFNEALHRDLADFRIQHPDLILLQYVDDILLAATSELDCQQGTRALLQTLGDLGYRASAKKAQICQKQVKYLGYLLREGQRWLTEARKETVMGQPVPKTPRQLREFLGTAGFCRLWIPGFAEMAAPLYPLTKPGTLFSWGPDQQKAYQEIKQALLTAPALGLPDLTKPFELFVDEKQGYAKGVLTQKLGPWRRPVAYLSKKLDPVAAGWPPCLRMVAAIAVLTKDAGKLTMGQPLVILAPHAVEALVKQPPDRWLSNARMTHYQAMLLDTDRVQFGPVVALNPATLLPLPEEGAPHDCLEILAETHGTRPDLTDQPIPDADHTWYTDGSSFLQEGQRKAGAAVTTETEVIWAGALPAGTSAQRAELIALTQALKMAEGKRLNVYTDSRYAFATAHIHGEIYRRRGWLTSEGREIKNKSEILALLKALFLPKRLSIIHCLGHQKGDSAEARGNRLADQAAREAAIKTPPDTSTLLAGKRTADGSEFEKRTADGSEFESPKKKAKVE

SEQ ID NO: 6775 - protein, 2093 aa, synthetic construct
MPAAKRVKLDGGDKKYSIGLDIGTNSVGWAVITDEYKVPSKKFKVLGNTDRHSIKKNLIGALLFDSGETAEATRLKRTARRRYTRRKNRICYLQEIFSNEMAKVDDSFFHRLEESFLVEEDKKHERHPIFGNIVDEVAYHEKYPTIYHLRKKLVDSTDKADLRLIYLALAHMIKFRGHFLIEGDLNPDNSDVDKLFIQLVQTYNQLFEENPINASGVDAKAILSARLSKSRRLENLIAQLPGEKKNGLFGNLIALSLGLTPNFKSNFDLAEDAKLQLSKDTYDDDLDNLLAQIGDQYADLFLAAKNLSDAILLSDILRVNTEITKAPLSASMIKRYDEHHQDLTLLKALVRQQLPEKYKEIFFDQSKNGYAGYIDGGASQEEFYKFIKPILEKMDGTEELLVKLNREDLLRKQRTFDNGSIPHQIHLGELHAILRRQEDFYPFLKDNREKIEKILTFRIPYYVGPLARGNSRFAWMTRKSEETITPWNFEEVVDKGASAQSFIERMTNFDKNLPNEKVLPKHSLLYEYFTVYNELTKVKYVTEGMRKPAFLSGEQKKAIVDLLFKTNRKVTVKQLKEDYFKKIECFDSVEISGVEDRFNASLGTYHDLLKIIKDKDFLDNEENEDILEDIVLTLTLFEDREMIEERLKTYAHLFDDKVMKQLKRRRYTGWGRLSRKLINGIRDKQSGKTILDFLKSDGFANRNFMQLIHDDSLTFKEDIQKAQVSGQGDSLHEHIANLAGSPAIKKGILQTVKVVDELVKVMGRHKPENIVIEMARENQTTQKGQKNSRERMKRIEEGIKELGSQILKEHPVENTQLQNEKLYLYYLQNGRDMYVDQELDINRLSDYDVDHIVPQSFLKDDSIDNKVLTRSDKARGKSDNVPSEEVVKKMKNYWRQLLNAKLITQRKFDNLTKAERGGLSELDKAGFIKRQLVETRQITKHVAQILDSRMNTKYDENDKLIREVKVITLKSKLVSDFRKDFQFYKVREINNYHHAHDAYLNAVVGTALIKKYPKLESEFVYGDYKVYDVRKMIAKSEQEIGKATAKYFFYSNIMNFFKTEITLANGEIRKRPLIETNGETGEIVWDKGRDFATVRKVLSMPQVNIVKKTEVQTGGFSKESILPKRNSDKLIARKKDWDPKKYGGFDSPTVAYSVLVVAKVEKGKSKKLKSVKELLGITIMERSSFEKNPIDFLEAKGYKEVKKDLIIKLPKYSLFELENGRKRMLASAGELQKGNELALPSKYVNFLYLASHYEKLKGSPEDNEQKQLFVEQHKHYLDEIIEQISEFSKRVILADANLDKVLSAYNKHRDKPIREQAENIIHLFTLTNLGAPAAFKYFDTTIDRKRYTSTKEVLDATLIHQSITGLYETRIDLSQLGGDGGEAAAKPAPGGTLNIEDEYRLHETSKEPDVSLGSTWLSDFPQAWAETGGMGLAVRQAPLIIPLKATSTPVSIKQYPMSQEARLGIKPHIQRLLDQGILVPCQSPWNTPLLPVKKPGTNDYRPVQDLREVNKRVEDIHPTVPNPYNLLSGLPPSHQWYTVLDLKDAFFCLRLHPTSQPLFAFEWRDPEMGISGQLTWTRLPQGFKNSPTLFNEALHRDLAGFRIQHPDLILLQYVDDLLLAATSELDCQQGTRALLQTLGDLGYRASAKKAQICQKQVKYLGYLLKEGQRWLTEARKETVMGQPIPKTPRQLREFLGTAGFCRLWIPGFAEMAAPLYPLTKPGTLFNWGPDQQKAFQEIKQALLTAPALGLPDLTKPFELFVDEKQGYAKGVLTQKLGPWRRPVAYLSKKLDPVAAGWPPCLRMVAAIAVLTKDAGKLTMGQPLVILAPHAVEALVKQPPDRWLSNARMTHYQALLLDTDRVQFGPVVALNPATLLPLPEEGLQHDCLDILAEAHGTRSDLMDQPLPDADHTWYTDGSSFLQEGQRKAGAAVTTETEVIWARALPAGTSAQRAELIALTQALKMAEGKKLNVYTDSRYAFATAHIHGEIYRRRGWLTSEGKEIKNKDEILALLKALFLPKRLSIIHCPGHQKGNSAEARGNRMADQAAREVATRETPETSTLLAGKRTADGSEFEKRTADGSEFESPKKKAKVE

SEQ ID NO: 6776 - protein, 2093 aa, synthetic construct
MPAAKRVKLDGGDKKYSIGLDIGTNSVGWAVITDEYKVPSKKFKVLGNTDRHSIKKNLIGALLFDSGETAEATRLKRTARRRYTRRKNRICYLQEIFSNEMAKVDDSFFHRLEESFLVEEDKKHERHPIFGNIVDEVAYHEKYPTIYHLRKKLVDSTDKADLRLIYLALAHMIKFRGHFLIEGDLNPDNSDVDKLFIQLVQTYNQLFEENPINASGVDAKAILSARLSKSRRLENLIAQLPGEKKNGLFGNLIALSLGLTPNFKSNFDLAEDAKLQLSKDTYDDDLDNLLAQIGDQYADLFLAAKNLSDAILLSDILRVNTEITKAPLSASMIKRYDEHHQDLTLLKALVRQQLPEKYKEIFFDQSKNGYAGYIDGGASQEEFYKFIKPILEKMDGTEELLVKLNREDLLRKQRTFDNGSIPHQIHLGELHAILRRQEDFYPFLKDNREKIEKILTFRIPYYVGPLARGNSRFAWMTRKSEETITPWNFEEVVDKGASAQSFIERMTNFDKNLPNEKVLPKHSLLYEYFTVYNELTKVKYVTEGMRKPAFLSGEQKKAIVDLLFKTNRKVTVKQLKEDYFKKIECFDSVEISGVEDRFNASLGTYHDLLKIIKDKDFLDNEENEDILEDIVLTLTLFEDREMIEERLKTYAHLFDDKVMKQLKRRRYTGWGRLSRKLINGIRDKQSGKTILDFLKSDGFANRNFMQLIHDDSLTFKEDIQKAQVSGQGDSLHEHIANLAGSPAIKKGILQTVKVVDELVKVMGRHKPENIVIEMARENQTTQKGQKNSRERMKRIEEGIKELGSQILKEHPVENTQLQNEKLYLYYLQNGRDMYVDQELDINRLSDYDVDHIVPQSFLKDDSIDNKVLTRSDKARGKSDNVPSEEVVKKMKNYWRQLLNAKLITQRKFDNLTKAERGGLSELDKAGFIKRQLVETRQITKHVAQILDSRMNTKYDENDKLIREVKVITLKSKLVSDFRKDFQFYKVREINNYHHAHDAYLNAVVGTALIKKYPKLESEFVYGDYKVYDVRKMIAKSEQEIGKATAKYFFYSNIMNFFKTEITLANGEIRKRPLIETNGETGEIVWDKGRDFATVRKVLSMPQVNIVKKTEVQTGGFSKESILPKRNSDKLIARKKDWDPKKYGGFDSPTVAYSVLVVAKVEKGKSKKLKSVKELLGITIMERSSFEKNPIDFLEAKGYKEVKKDLIIKLPKYSLFELENGRKRMLASAGELQKGNELALPSKYVNFLYLASHYEKLKGSPEDNEQKQLFVEQHKHYLDEIIEQISEFSKRVILADANLDKVLSAYNKHRDKPIREQAENIIHLFTLTNLGAPAAFKYFDTTIDRKRYTSTKEVLDATLIHQSITGLYETRIDLSQLGGDGGEAAAKPAPGGTLNIEDEYRLHETSKGPDVPLGSTWLSDFPQAWAETGGMGLAVRQAPLIIPLKATSTPVSIKQYPMSQEARLGIKPHIQRLLDQGILVPCQSPWNTPLLPVKKPGTNDYRPVQDLREVNKRVEDIHPTVPNPYNLLSGLPPSHQWYTVLDLKDAFFCLRLHPTSQSLFAFEWRDPEMGISGQLTWTRLPQGFKNSPTLFNEALHRDLADFRIQHPDLILLQYVDDLLLAATSELDCQQGTRALLQTLGDLGYRASAKKAQICQKQVKYLGYLLKEGQRWLTEARKETVMGQPTPKTPRQLREFLGTAGFCRLWIPGFAEMAAPLYPLTKPGTLFEWGPDQQKAYQEIKQALLTAPALGLPDLTKPFELFVDEKQGYAKGVLTQKLGPWRRPVAYLSKKLDPVAAGWPPCLRMVAAIAVLTKDAGKLTMGQPLVILAPHAVEALVKQPPDRWLSNARMTHYQALLLDTDRVQFGPIVALNPATLLPLPEEGLQHDCLDILAEAHGTRPDLTDQPLPDADHTWYTDGSSFLQEGQRKAGAAVTTETEVVWAKALPAGTSAQRAELIALTQALKMAEGKKLNVYTDSRYAFATAHIHGEIYRRRGWLTSEGKEIKNKDEILALLKALFLPKRLSIIHCPGHQKGNRAEARGNRMADQAAREVATRETPETSTLLAGKRTADGSEFEKRTADGSEFESPKKKAKVE

SEQ ID NO: 6777 - protein, 2113 aa, synthetic construct
MPAAKRVKLDGGDKKYSIGLDIGTNSVGWAVITDEYKVPSKKFKVLGNTDRHSIKKNLIGALLFDSGETAEATRLKRTARRRYTRRKNRICYLQEIFSNEMAKVDDSFFHRLEESFLVEEDKKHERHPIFGNIVDEVAYHEKYPTIYHLRKKLVDSTDKADLRLIYLALAHMIKFRGHFLIEGDLNPDNSDVDKLFIQLVQTYNQLFEENPINASGVDAKAILSARLSKSRRLENLIAQLPGEKKNGLFGNLIALSLGLTPNFKSNFDLAEDAKLQLSKDTYDDDLDNLLAQIGDQYADLFLAAKNLSDAILLSDILRVNTEITKAPLSASMIKRYDEHHQDLTLLKALVRQQLPEKYKEIFFDQSKNGYAGYIDGGASQEEFYKFIKPILEKMDGTEELLVKLNREDLLRKQRTFDNGSIPHQIHLGELHAILRRQEDFYPFLKDNREKIEKILTFRIPYYVGPLARGNSRFAWMTRKSEETITPWNFEEVVDKGASAQSFIERMTNFDKNLPNEKVLPKHSLLYEYFTVYNELTKVKYVTEGMRKPAFLSGEQKKAIVDLLFKTNRKVTVKQLKEDYFKKIECFDSVEISGVEDRFNASLGTYHDLLKIIKDKDFLDNEENEDILEDIVLTLTLFEDREMIEERLKTYAHLFDDKVMKQLKRRRYTGWGRLSRKLINGIRDKQSGKTILDFLKSDGFANRNFMQLIHDDSLTFKEDIQKAQVSGQGDSLHEHIANLAGSPAIKKGILQTVKVVDELVKVMGRHKPENIVIEMARENQTTQKGQKNSRERMKRIEEGIKELGSQILKEHPVENTQLQNEKLYLYYLQNGRDMYVDQELDINRLSDYDVDHIVPQSFLKDDSIDNKVLTRSDKARGKSDNVPSEEVVKKMKNYWRQLLNAKLITQRKFDNLTKAERGGLSELDKAGFIKRQLVETRQITKHVAQILDSRMNTKYDENDKLIREVKVITLKSKLVSDFRKDFQFYKVREINNYHHAHDAYLNAVVGTALIKKYPKLESEFVYGDYKVYDVRKMIAKSEQEIGKATAKYFFYSNIMNFFKTEITLANGEIRKRPLIETNGETGEIVWDKGRDFATVRKVLSMPQVNIVKKTEVQTGGFSKESILPKRNSDKLIARKKDWDPKKYGGFDSPTVAYSVLVVAKVEKGKSKKLKSVKELLGITIMERSSFEKNPIDFLEAKGYKEVKKDLIIKLPKYSLFELENGRKRMLASAGELQKGNELALPSKYVNFLYLASHYEKLKGSPEDNEQKQLFVEQHKHYLDEIIEQISEFSKRVILADANLDKVLSAYNKHRDKPIREQAENIIHLFTLTNLGAPAAFKYFDTTIDRKRYTSTKEVLDATLIHQSITGLYETRIDLSQLGGDGGEAAAKPAPGGTLNIEDEYRLHETSKEPDVSLGSTWLSDFPQAWAETGGMGLAVRQAPLIIPLKATSTPVSIKQYPMSQEARLGIKPHIQRLLDQGILVPCQSPWNTPLLPVKKPGTNDYRPVQDLREVNKRVEDIHPTVPNPYNLLSGLPPSHQWYTVLDLKDAFFCLRLHPTSQPLFAFEWRDPEMGISGQLTWTRLPQGFKNSPTLFNEALHRDLADFRIQHPDLILLQYVDDLLLAATSELDCQQGTRALLQTLGNLGYRASAKKAQICQKQVKYLGYLLKEGQRWLTEARKETVMGQPTPKTPRQLREFLGKAGFCRLFIPGFAEMAAPLYPLTKPGTLFNWGPDQQKAYQEIKQALLTAPALGLPDLTKPFELFVDEKQGYAKGVLTQKLGPWRRPVAYLSKKLDPVAAGWPPCLRMVAAIAVLTKDAGKLTMGQPLVILAPHAVEALVKQPPDRWLSNARMTHYQALLLDTDRVQFGPVVALNPATLLPLPEEGLQHNCLDILAEAHGTRPDLTDQPLPDADHTWYTDGSSLLQEGQRKAGAAVTTETEVIWAKALPAGTSAQRAELIALTQALKMAEGKKLNVYTDSRYAFATAHIHGEIYRRRGWLTSEGKEIKNKDEILALLKALFLPKRLSIIHCPGHQKGHSAEARGNRMADQAARKAAITETPDTSTLLIENSSPSGGSKRTADGSEFEAGKRTADGSEFEKRTADGSEFESPKKKAKVE

SEQ ID NO: 6778 - protein, 2113 aa, synthetic construct; identical to SEQ ID NO: 6777

SEQ ID NO: 6779 - protein, 2021 aa, synthetic construct
MPAAKRVKLDGGDKKYSIGLDIGTNSVGWAVITDEYKVPSKKFKVLGNTDRHSIKKNLIGALLFDSGETAEATRLKRTARRRYTRRKNRICYLQEIFSNEMAKVDDSFFHRLEESFLVEEDKKHERHPIFGNIVDEVAYHEKYPTIYHLRKKLVDSTDKADLRLIYLALAHMIKFRGHFLIEGDLNPDNSDVDKLFIQLVQTYNQLFEENPINASGVDAKAILSARLSKSRRLENLIAQLPGEKKNGLFGNLIALSLGLTPNFKSNFDLAEDAKLQLSKDTYDDDLDNLLAQIGDQYADLFLAAKNLSDAILLSDILRVNTEITKAPLSASMIKRYDEHHQDLTLLKALVRQQLPEKYKEIFFDQSKNGYAGYIDGGASQEEFYKFIKPILEKMDGTEELLVKLNREDLLRKQRTFDNGSIPHQIHLGELHAILRRQEDFYPFLKDNREKIEKILTFRIPYYVGPLARGNSRFAWMTRKSEETITPWNFEEVVDKGASAQSFIERMTNFDKNLPNEKVLPKHSLLYEYFTVYNELTKVKYVTEGMRKPAFLSGEQKKAIVDLLFKTNRKVTVKQLKEDYFKKIECFDSVEISGVEDRFNASLGTYHDLLKIIKDKDFLDNEENEDILEDIVLTLTLFEDREMIEERLKTYAHLFDDKVMKQLKRRRYTGWGRLSRKLINGIRDKQSGKTILDFLKSDGFANRNFMQLIHDDSLTFKEDIQKAQVSGQGDSLHEHIANLAGSPAIKKGILQTVKVVDELVKVMGRHKPENIVIEMARENQTTQKGQKNSRERMKRIEEGIKELGSQILKEHPVENTQLQNEKLYLYYLQNGRDMYVDQELDINRLSDYDVDHIVPQSFLKDDSIDNKVLTRSDKARGKSDNVPSEEVVKKMKNYWRQLLNAKLITQRKFDNLTKAERGGLSELDKAGFIKRQLVETRQITKHVAQILDSRMNTKYDENDKLIREVKVITLKSKLVSDFRKDFQFYKVREINNYHHAHDAYLNAVVGTALIKKYPKLESEFVYGDYKVYDVRKMIAKSEQEIGKATAKYFFYSNIMNFFKTEITLANGEIRKRPLIETNGETGEIVWDKGRDFATVRKVLSMPQVNIVKKTEVQTGGFSKESILPKRNSDKLIARKKDWDPKKYGGFDSPTVAYSVLVVAKVEKGKSKKLKSVKELLGITIMERSSFEKNPIDFLEAKGYKEVKKDLIIKLPKYSLFELENGRKRMLASAGELQKGNELALPSKYVNFLYLASHYEKLKGSPEDNEQKQLFVEQHKHYLDEIIEQISEFSKRVILADANLDKVLSAYNKHRDKPIREQAENIIHLFTLTNLGAPAAFKYFDTTIDRKRYTSTKEVLDATLIHQSITGLYETRIDLSQLGGDGGEAAAKPAPGGGRDIMKDIKVRLMTDSPDDSQDLMIGAIESNLFADQISWKSDQPVWLNQWPLKQEKLQALQQLVTEQLQLGHLEESNSPWNTPVFVIKKKSGKWRLLQDLRAVNATMHDMGALQPGLPSPVAVPKGWEIIIIDLQDCFFNIKLHPEDCKRFAFSVPSPNFKRPYQRFQWKVLPQGMKNSPTLCQKFVDKAILTVRDKYQDSYIVHYMDDILLAHPSRSIVDEILTSMIQALNKHGLVVSTEKIQKYDNLKYLGTHIQGDSVSYQKLQIRTDKLRTLNDFQKLLGNINWIRPFLKLTTGELKPLFEILNGDSNPISTRKLTPEACKALQLMNERLSTARVKRLDLSQPWSLCILKTEYTPTACLWQDGVVEWIHLPHISPKVITPYDIFCTQLIIKGRHRSKELFSKDPDYIVVPYTKVQFDLLLQEKEDWPISLLGFLGEVHFHLPKDPLLTFTLQTAIIFPHMTSTTPLEKGIVIFTDGSANGRSVTYIQGREPIIKENTQNTAQQAEIVAVITAFEEVSQPFNLYTDSKYVTGLFPEIETATLSPRTKIYTELKHLQRLIHKRQEKFYIGHIRGHTGLPGPLAQGNAYADSLTRILTAGKRTADGSEFEKRTADGSEFESPKKKAKVE

SEQ ID NO: 6780 - protein, 2084 aa, synthetic construct
MPAAKRVKLDGGDKKYSIGLDIGTNSVGWAVITDEYKVPSKKFKVLGNTDRHSIKKNLIGALLFDSGETAEATRLKRTARRRYTRRKNRICYLQEIFSNEMAKVDDSFFHRLEESFLVEEDKKHERHPIFGNIVDEVAYHEKYPTIYHLRKKLVDSTDKADLRLIYLALAHMIKFRGHFLIEGDLNPDNSDVDKLFIQLVQTYNQLFEENPINASGVDAKAILSARLSKSRRLENLIAQLPGEKKNGLFGNLIALSLGLTPNFKSNFDLAEDAKLQLSKDTYDDDLDNLLAQIGDQYADLFLAAKNLSDAILLSDILRVNTEITKAPLSASMIKRYDEHHQDLTLLKALVRQQLPEKYKEIFFDQSKNGYAGYIDGGASQEEFYKFIKPILEKMDGTEELLVKLNREDLLRKQRTFDNGSIPHQIHLGELHAILRRQEDFYPFLKDNREKIEKILTFRIPYYVGPLARGNSRFAWMTRKSEETITPWNFEEVVDKGASAQSFIERMTNFDKNLPNEKVLPKHSLLYEYFTVYNELTKVKYVTEGMRKPAFLSGEQKKAIVDLLFKTNRKVTVKQLKEDYFKKIECFDSVEISGVEDRFNASLGTYHDLLKIIKDKDFLDNEENEDILEDIVLTLTLFEDREMIEERLKTYAHLFDDKVMKQLKRRRYTGWGRLSRKLINGIRDKQSGKTILDFLKSDGFANRNFMQLIHDDSLTFKEDIQKAQVSGQGDSLHEHIANLAGSPAIKKGILQTVKVVDELVKVMGRHKPENIVIEMARENQTTQKGQKNSRERMKRIEEGIKELGSQILKEHPVENTQLQNEKLYLYYLQNGRDMYVDQELDINRLSDYDVDHIVPQSFLKDDSIDNKVLTRSDKARGKSDNVPSEEVVKKMKNYWRQLLNAKLITQRKFDNLTKAERGGLSELDKAGFIKRQLVETRQITKHVAQILDSRMNTKYDENDKLIREVKVITLKSKLVSDFRKDFQFYKVREINNYHHAHDAYLNAVVGTALIKKYPKLESEFVYGDYKVYDVRKMIAKSEQEIGKATAKYFFYSNIMNFFKTEITLANGEIRKRPLIETNGETGEIVWDKGRDFATVRKVLSMPQVNIVKKTEVQTGGFSKESILPKRNSDKLIARKKDWDPKKYGGFDSPTVAYSVLVVAKVEKGKSKKLKSVKELLGITIMERSSFEKNPIDFLEAKGYKEVKKDLIIKLPKYSLFELENGRKRMLASAGELQKGNELALPSKYVNFLYLASHYEKLKGSPEDNEQKQLFVEQHKHYLDEIIEQISEFSKRVILADANLDKVLSAYNKHRDKPIREQAENIIHLFTLTNLGAPAAFKYFDTTIDRKRYTSTKEVLDATLIHQSITGLYETRIDLSQLGGDGGEAAAKPAPGGIPWLMKKPLQLTTLVPLQEYEERLLKQTMLTGSYKEKLQSLFLKYDALWQHWENQVGHRRIKPHHIATGTVNPRPQKQYPINPKAKASIQTVINDLLKQGVLIQQNSIMNTPVYPVPKPDGKWRMVLDYREVNKTIPLIAAQNQHSAGILSSIFRGKYKTTLDLSNGFWAHSITPESYWLTAFTWLGQQYCWTRLPQGFLNSPALFNADVVDLLKEVPNVQVYVDDIYISHDDPREHLEQLEKVFSLLLNAGYVVSLKKSEIAQHEVEFLGFNITKEGRGLTETFKQKLLNITPPRDLKQLQSILGKLNFARNFIPNFSELVKPLYNIIATAPGKYITWTTDNSQQLQNIISMLNSAENLEERNPEVRLIMKVNTSPSAGYIRFYNEFAKRPIMYLNYVYTKAEVKFTNTEKLLTTIHKGLIKALDLGMGQEILVYSPIVSMTKIQKTPLPERKALPIRWITWMSYLEDPRIQFHYDKTLPELQQVPTVTDDIIAKIKHPSEFSMVFYTDGSAIKHPNVNKSHNAGMGIAQVQFKPEFTVINTWSIPLGDHTAQLAEVAAVEFACKKALKIDGPVLIVTDSFYVAESVNKELPYWQSNGFFNNKKKPLKHVSKWKSIADCIQLKPDIIIIHEKGHQPTASTFHTEGNNLADKLATQGSYVVNAGKRTADGSEFEKRTADGSEFESPKKKAKVE

SEQ ID NO: 6781 - protein, 2173 aa, synthetic construct
MPAAKRVKLDGGDKKYSIGLDIGTNSVGWAVITDEYKVPSKKFKVLGNTDRHSIKKNLIGALLFDSGETAEATRLKRTARRRYTRRKNRICYLQEIFSNEMAKVDDSFFHRLEESFLVEEDKKHERHPIFGNIVDEVAYHEKYPTIYHLRKKLVDSTDKADLRLIYLALAHMIKFRGHFLIEGDLNPDNSDVDKLFIQLVQTYNQLFEENPINASGVDAKAILSARLSKSRRLENLIAQLPGEKKNGLFGNLIALSLGLTPNFKSNFDLAEDAKLQLSKDTYDDDLDNLLAQIGDQYADLFLAAKNLSDAILLSDILRVNTEITKAPLSASMIKRYDEHHQDLTLLKALVRQQLPEKYKEIFFDQSKNGYAGYIDGGASQEEFYKFIKPILEKMDGTEELLVKLNREDLLRKQRTFDNGSIPHQIHLGELHAILRRQEDFYPFLKDNREKIEKILTFRIPYYVGPLARGNSRFAWMTRKSEETITPWNFEEVVDKGASAQSFIERMTNFDKNLPNEKVLPKHSLLYEYFTVYNELTKVKYVTEGMRKPAFLSGEQKKAIVDLLFKTNRKVTVKQLKEDYFKKIECFDSVEISGVEDRFNASLGTYHDLLKIIKDKDFLDNEENEDILEDIVLTLTLFEDREMIEERLKTYAHLFDDKVMKQLKRRRYTGWGRLSRKLINGIRDKQSGKTILDFLKSDGFANRNFMQLIHDDSLTFKEDIQKAQVSGQGDSLHEHIANLAGSPAIKKGILQTVKVVDELVKVMGRHKPENIVIEMARENQTTQKGQKNSRERMKRIEEGIKELGSQILKEHPVENTQLQNEKLYLYYLQNGRDMYVDQELDINRLSDYDVDHIVPQSFLKDDSIDNKVLTRSDKARGKSDNVPSEEVVKKMKNYWRQLLNAKLITQRKFDNLTKAERGGLSELDKAGFIKRQLVETRQITKHVAQILDSRMNTKYDENDKLIREVKVITLKSKLVSDFRKDFQFYKVREINNYHHAHDAYLNAVVGTALIKKYPKLESEFVYGDYKVYDVRKMIAKSEQEIGKATAKYFFYSNIMNFFKTEITLANGEIRKRPLIETNGETGEIVWDKGRDFATVRKVLSMPQVNIVKKTEVQTGGFSKESILPKRNSDKLIARKKDWDPKKYGGFDSPTVAYSVLVVAKVEKGKSKKLKSVKELLGITIMERSSFEKNPIDFLEAKGYKEVKKDLIIKLPKYSLFELENGRKRMLASAGELQKGNELALPSKYVNFLYLASHYEKLKGSPEDNEQKQLFVEQHKHYLDEIIEQISEFSKRVILADANLDKVLSAYNKHRDKPIREQAENIIHLFTLTNLGAPAAFKYFDTTIDRKRYTSTKEVLDATLIHQSITGLYETRIDLSQLGGDGGEAAAKPAPGGMDPLQLLQPLEAEIKGTKLKAHWNSGATITCVPQAFLEEEVPIKNIWIKTIHGEKEQPVYYLTFKIQGRKVEAEVISSPYDYILVSPSDIPWLMKKPLQLTTLVPLQEYEERLLKQTMLTGSYKEKLQSLFLKYDALWQHWENQVGHRRIKPHHIATGTVNPRPQKQYPINPKAKASIQTVINDLLKQGVLIQQNSIMNTPVYPVPKPDGKWRMVLDYREVNKTIPLIAAQNQHSAGILSSIFRGKYKTTLDLSNGFWAHSITPESYWLTAFTWLGQQYCWTRLPQGFLNSPALFNADVVDLLKEVPNVQVYVDDIYISHDDPREHLEQLEKVFSLLLNAGYVVSLKKSEIAQHEVEFLGFNITKEGRGLTETFKQKLLNITPPRDLKQLQSILGKLNFARNFIPNFSELVKPLYNIIATAPGKYITWTTDNSQQLQNIISMLNSAENLEERNPEVRLIMKVNTSPSAGYIRFYNEFAKRPIMYLNYVYTKAEVKFTNTEKLLTTIHKGLIKALDLGMGQEILVYSPIVSMTKIQKTPLPERKALPIRWITWMSYLEDPRIQFHYDKTLPELQQVPTVTDDIIAKIKHPSEFSMVFYTDGSAIKHPNVNKSHNAGMGIAQVQFKPEFTVINTWSIPLGDHTAQLAEVAAVEFACKKALKIDGPVLIVTDSFYVAESVNKELPYWQSNGFFNNKKKPLKHVSKWKSIADCIQLKPDIIIIHEKGHQPTASTFHTEGNNLADKLATQGSYVVNAGKRTADGSEFEKRTADGSEFESPKKKAKVE

SEQ ID NO: 6782 - protein, 2091 aa, synthetic construct
MPAAKRVKLDGGDKKYSIGLDIGTNSVGWAVITDEYKVPSKKFKVLGNTDRHSIKKNLIGALLFDSGETAEATRLKRTARRRYTRRKNRICYLQEIFSNEMAKVDDSFFHRLEESFLVEEDKKHERHPIFGNIVDEVAYHEKYPTIYHLRKKLVDSTDKADLRLIYLALAHMIKFRGHFLIEGDLNPDNSDVDKLFIQLVQTYNQLFEENPINASGVDAKAILSARLSKSRRLENLIAQLPGEKKNGLFGNLIALSLGLTPNFKSNFDLAEDAKLQLSKDTYDDDLDNLLAQIGDQYADLFLAAKNLSDAILLSDILRVNTEITKAPLSASMIKRYDEHHQDLTLLKALVRQQLPEKYKEIFFDQSKNGYAGYIDGGASQEEFYKFIKPILEKMDGTEELLVKLNREDLLRKQRTFDNGSIPHQIHLGELHAILRRQEDFYPFLKDNREKIEKILTFRIPYYVGPLARGNSRFAWMTRKSEETITPWNFEEVVDKGASAQSFIERMTNFDKNLPNEKVLPKHSLLYEYFTVYNELTKVKYVTEGMRKPAFLSGEQKKAIVDLLFKTNRKVTVKQLKEDYFKKIECFDSVEISGVEDRFNASLGTYHDLLKIIKDKDFLDNEENEDILEDIVLTLTLFEDREMIEERLKTYAHLFDDKVMKQLKRRRYTGWGRLSRKLINGIRDKQSGKTILDFLKSDGFANRNFMQLIHDDSLTFKEDIQKAQVSGQGDSLHEHIANLAGSPAIKKGILQTVKVVDELVKVMGRHKPENIVIEMARENQTTQKGQKNSRERMKRIEEGIKELGSQILKEHPVENTQLQNEKLYLYYLQNGRDMYVDQELDINRLSDYDVDHIVPQSFLKDDSIDNKVLTRSDKARGKSDNVPSEEVVKKMKNYWRQLLNAKLITQRKFDNLTKAERGGLSELDKAGFIKRQLVETRQITKHVAQILDSRMNTKYDENDKLIREVKVITLKSKLVSDFRKDFQFYKVREINNYHHAHDAYLNAVVGTALIKKYPKLESEFVYGDYKVYDVRKMIAKSEQEIGKATAKYFFYSNIMNFFKTEITLANGEIRKRPLIETNGETGEIVWDKGRDFATVRKVLSMPQVNIVKKTEVQTGGFSKESILPKRNSDKLIARKKDWDPKKYGGFDSPTVAYSVLVVAKVEKGKSKKLKSVKELLGITIMERSSFEKNPIDFLEAKGYKEVKKDLIIKLPKYSLFELENGRKRMLASAGELQKGNELALPSKYVNFLYLASHYEKLKGSPEDNEQKQLFVEQHKHYLDEIIEQISEFSKRVILADANLDKVLSAYNKHRDKPIREQAENIIHLFTLTNLGAPAAFKYFDTTIDRKRYTSTKEVLDATLIHQSITGLYETRIDLSQLGGDGGEAAAKPAPGGVLNLEEEYRLHEKPVPSSIDPSWLQLFPTVWAERAGMGLANQVPPVVVELRSGASPVAVRQYPMSKEAREGIRPHIQRFLDLGVLVPCQSPWNTPLLPVKKPGTNDYRPVQDLREINKRVQDIHPTVPNPYNLLSSLPPSHTWYSVLDLKDAFFCLKLHPNSQPLFAFEWRDPEKGNTGQLTWTRLPQGFKNSPTLFNEALHRDLAPFRALNPQVVLLQYVDDLLVAAPTYRDCKEGTQKLLQELSKLGYRVSAKKAQLCQKEVTYLGYLLKEGKRWLTPARKATVMKIPPPTTPRQVREFLGTAGFCRLWIPGFASLAAPLYPLTKPSIPFIWTEEHQKAFDRIKEALLSAPALALPDLTKPFTLYVDERAGVARGVLTQTLGPWRRPVAYLSKKLDPVASGWPTCLKAVAAVALLLKDADKLTLGQNVTVIASHSLESIVRQPPDRWMTNARMTHYQSLLLNERVSFAPPAVLNPATLLPVESEATPVHRCSEILAEETGTRRDLKDQPLPGVPAWYTDGSSFIAEGKRRAGAAIVDGKRTVWASSLPEGTSAQKAELVALTQALRLAEGKDINIYTDSRYAFATAHIHGAIYKQRGWLTSAGKDIKNKEEILALLEAIHLPKRVAIIHCPGHQKGNDPVATGNRRADEAAKQAALSTRVLAETTKPAGKRTADGSEFEKRTADGSEFESPKKKAKVE

SEQ ID NO: 6783 - protein, 2091 aa, synthetic construct; identical to SEQ ID NO: 4515

SEQ ID NO: 6784 - protein, 2095 aa, synthetic construct
MPAAKRVKLDGGDKKYSIGLDIGTNSVGWAVITDEYKVPSKKFKVLGNTDRHSIKKNLIGALLFDSGETAEATRLKRTARRRYTRRKNRICYLQEIFSNEMAKVDDSFFHRLEESFLVEEDKKHERHPIFGNIVDEVAYHEKYPTIYHLRKKLVDSTDKADLRLIYLALAHMIKFRGHFLIEGDLNPDNSDVDKLFIQLVQTYNQLFEENPINASGVDAKAILSARLSKSRRLENLIAQLPGEKKNGLFGNLIALSLGLTPNFKSNFDLAEDAKLQLSKDTYDDDLDNLLAQIGDQYADLFLAAKNLSDAILLSDILRVNTEITKAPLSASMIKRYDEHHQDLTLLKALVRQQLPEKYKEIFFDQSKNGYAGYIDGGASQEEFYKFIKPILEKMDGTEELLVKLNREDLLRKQRTFDNGSIPHQIHLGELHAILRRQEDFYPFLKDNREKIEKILTFRIPYYVGPLARGNSRFAWMTRKSEETITPWNFEEVVDKGASAQSFIERMTNFDKNLPNEKVLPKHSLLYEYFTVYNELTKVKYVTEGMRKPAFLSGEQKKAIVDLLFKTNRKVTVKQLKEDYFKKIECFDSVEISGVEDRFNASLGTYHDLLKIIKDKDFLDNEENEDILEDIVLTLTLFEDREMIEERLKTYAHLFDDKVMKQLKRRRYTGWGRLSRKLINGIRDKQSGKTILDFLKSDGFANRNFMQLIHDDSLTFKEDIQKAQVSGQGDSLHEHIANLAGSPAIKKGILQTVKVVDELVKVMGRHKPENIVIEMARENQTTQKGQKNSRERMKRIEEGIKELGSQILKEHPVENTQLQNEKLYLYYLQNGRDMYVDQELDINRLSDYDVDHIVPQSFLKDDSIDNKVLTRSDKARGKSDNVPSEEVVKKMKNYWRQLLNAKLITQRKFDNLTKAERGGLSELDKAGFIKRQLVETRQITKHVAQILDSRMNTKYDENDKLIREVKVITLKSKLVSDFRKDFQFYKVREINNYHHAHDAYLNAVVGTALIKKYPKLESEFVYGDYKVYDVRKMIAKSEQEIGKATAKYFFYSNIMNFFKTEITLANGEIRKRPLIETNGETGEIVWDKGRDFATVRKVLSMPQVNIVKKTEVQTGGFSKESILPKRNSDKLIARKKDWDPKKYGGFDSPTVAYSVLVVAKVEKGKSKKLKSVKELLGITIMERSSFEKNPIDFLEAKGYKEVKKDLIIKLPKYSLFELENGRKRMLASAGELQKGNELALPSKYVNFLYLASHYEKLKGSPEDNEQKQLFVEQHKHYLDEIIEQISEFSKRVILADANLDKVLSAYNKHRDKPIREQAENIIHLFTLTNLGAPAAFKYFDTTIDRKRYTSTKEVLDATLIHQSITGLYETRIDLSQLGGDGGPAPEAAAKGGTAPLEEEYRLFLEAPIQNVTLLEQWKREIPKVWAEINPPGLASTQAPIHVQLLSTALPVRVRQYPITLEAKRSLRETIRKFRAAGILRPVHSPWNTPLLPVRKSGTSEYRMVQDLREVNKRVETIHPTVPNPYTLLSLLPPDRIWYSVLDLKDAFFCIPLAPESQLIFAFEWADAEEGESGQLTWTRLPQGFKNSPTLFNEALNRDLQGFRLDHPSVSLLQYVDDLLIAADTQAACLSATRDLLMTLAELGYRVSGKKAQLCQEEVTYLGFKIHKGSRSLSNSRTQAILQIPVPKTKRQVREFLGTIGYCRLWIPGFAELAQPLYAATRPGNDPLVWGEKEEEAFQSLKLALTQPPALALPSLDKPFQLFVEETSGAAKGVLTQALGPWKRPVAYLSKRLDPVAAGWPRCLRAIAAAALLTREASKLTFGQDIEITSSHNLESLLRSPPDKWLTNARITQYQVLLLDPPRVRFKQTAALNPATLLPETDDTLPIHHCLDTLDSLTSTRPDLTDQPLAQAEATLFTDGSSYIRDGKRYAGAAVVTLDSVIWAEPLPIGTSAQKAELIALTKALEWSKDKSVNIYTDSRYAFATLHVHGMIYRERGWLTAGGKAIKNAPEILALLTAVWLPKRVAVMHCKGHQKDDAPTSTGNRRADEVAREVAIRPLSTQATISAGKRTADGSEFEKRTADGSEFESPKKKAKVE

SEQ ID NO: 6785 - protein, 2092 aa, synthetic construct
MPAAKRVKLDGGDKKYSIGLDIGTNSVGWAVITDEYKVPSKKFKVLGNTDRHSIKKNLIGALLFDSGETAEATRLKRTARRRYTRRKNRICYLQEIFSNEMAKVDDSFFHRLEESFLVEEDKKHERHPIFGNIVDEVAYHEKYPTIYHLRKKLVDSTDKADLRLIYLALAHMIKFRGHFLIEGDLNPDNSDVDKLFIQLVQTYNQLFEENPINASGVDAKAILSARLSKSRRLENLIAQLPGEKKNGLFGNLIALSLGLTPNFKSNFDLAEDAKLQLSKDTYDDDLDNLLAQIGDQYADLFLAAKNLSDAILLSDILRVNTEITKAPLSASMIKRYDEHHQDLTLLKALVRQQLPEKYKEIFFDQSKNGYAGYIDGGASQEEFYKFIKPILEKMDGTEELLVKLNREDLLRKQRTFDNGSIPHQIHLGELHAILRRQEDFYPFLKDNREKIEKILTFRIPYYVGPLARGNSRFAWMTRKSEETITPWNFEEVVDKGASAQSFIERMTNFDKNLPNEKVLPKHSLLYEYFTVYNELTKVKYVTEGMRKPAFLSGEQKKAIVDLLFKTNRKVTVKQLKEDYFKKIECFDSVEISGVEDRFNASLGTYHDLLKIIKDKDFLDNEENEDILEDIVLTLTLFEDREMIEERLKTYAHLFDDKVMKQLKRRRYTGWGRLSRKLINGIRDKQSGKTILDFLKSDGFANRNFMQLIHDDSLTFKEDIQKAQVSGQGDSLHEHIANLAGSPAIKKGILQTVKVVDELVKVMGRHKPENIVIEMARENQTTQKGQKNSRERMKRIEEGIKELGSQILKEHPVENTQLQNEKLYLYYLQNGRDMYVDQELDINRLSDYDVDHIVPQSFLKDDSIDNKVLTRSDKARGKSDNVPSEEVVKKMKNYWRQLLNAKLITQRKFDNLTKAERGGLSELDKAGFIKRQLVETRQITKHVAQILDSRMNTKYDENDKLIREVKVITLKSKLVSDFRKDFQFYKVREINNYHHAHDAYLNAVVGTALIKKYPKLESEFVYGDYKVYDVRKMIAKSEQEIGKATAKYFFYSNIMNFFKTEITLANGEIRKRPLIETNGETGEIVWDKGRDFATVRKVLSMPQVNIVKKTEVQTGGFSKESILPKRNSDKLIARKKDWDPKKYGGFDSPTVAYSVLVVAKVEKGKSKKLKSVKELLGITIMERSSFEKNPIDFLEAKGYKEVKKDLIIKLPKYSLFELENGRKRMLASAGELQKGNELALPSKYVNFLYLASHYEKLKGSPEDNEQKQLFVEQHKHYLDEIIEQISEFSKRVILADANLDKVLSAYNKHRDKPIREQAENIIHLFTLTNLGAPAAFKYFDTTIDRKRYTSTKEVLDATLIHQSITGLYETRIDLSQLGGDGGPAPEAAAKGGTLQLEEEYRLFEPESTQKQEMDIWLKNFPQAWAETGGMGTAHCQAPVLIQLKATATPISIRQYPMPHEAYQGIKPHIRRMLDQGILKPCQSPWNTPLLPVKKPGTEDYRPVQDLREVNKRVEDIHPTVPNPYNLLSTLPPSHPWYTVLDLKDAFFCLRLHSESQLLFAFEWRDPEIGLSGQLTWTRLPQGFKNSPTLFNEALHSDLADFRVRYPALVLLQYVDDLLLAAATRTECLEGTKALLETLGNKGYRASAKKAQICLQEVTYLGYSLKDGQRWLTKARKEAILSIPVPKNSRQVREFLGTAGYCRLWIPGFAELAAPLYPLTRPGTLFQWGTEQQLAFEDIKKALLSSPALGLPDITKPFELFIDENSGFAKGVLVQKLGPWKRPVAYLSKKLDTVASGWPPCLRMVAAIAILVKDAGKLTLGQPLTILTSHPVEALVRQPPNKWLSNARMTHYQAMLLDAERVHFGPTVSLNPATLLPLPSGGNHHDCLQILAETHGTRPDLTDQPLPDADLTWYTDGSSFIRNGEREAGAAVTTESEVIWAAPLPPGTSAQRAELIALTQALKMAEGKKLTVYTDSRYAFATTHVHGEIYRRRGWLTSEGKEIKNKNEILALLEALFLPKRLSIIHCPGHQKGDSPQAKGNRLADDTAKKAATETHSSLTVLPAGKRTADGSEFEKRTADGSEFESPKKKAKVE

SEQ ID NO: 6786 - protein, 2124 aa, synthetic construct
MPAAKRVKLDGGDKKYSIGLDIGTNSVGWAVITDEYKVPSKKFKVLGNTDRHSIKKNLIGALLFDSGETAEATRLKRTARRRYTRRKNRICYLQEIFSNEMAKVDDSFFHRLEESFLVEEDKKHERHPIFGNIVDEVAYHEKYPTIYHLRKKLVDSTDKADLRLIYLALAHMIKFRGHFLIEGDLNPDNSDVDKLFIQLVQTYNQLFEENPINASGVDAKAILSARLSKSRRLENLIAQLPGEKKNGLFGNLIALSLGLTPNFKSNFDLAEDAKLQLSKDTYDDDLDNLLAQIGDQYADLFLAAKNLSDAILLSDILRVNTEITKAPLSASMIKRYDEHHQDLTLLKALVRQQLPEKYKEIFFDQSKNGYAGYIDGGASQEEFYKFIKPILEKMDGTEELLVKLNREDLLRKQRTFDNGSIPHQIHLGELHAILRRQEDFYPFLKDNREKIEKILTFRIPYYVGPLARGNSRFAWMTRKSEETITPWNFEEVVDKGASAQSFIERMTNFDKNLPNEKVLPKHSLLYEYFTVYNELTKVKYVTEGMRKPAFLSGEQKKAIVDLLFKTNRKVTVKQLKEDYFKKIECFDSVEISGVEDRFNASLGTYHDLLKIIKDKDFLDNEENEDILEDIVLTLTLFEDREMIEERLKTYAHLFDDKVMKQLKRRRYTGWGRLSRKLINGIRDKQSGKTILDFLKSDGFANRNFMQLIHDDSLTFKEDIQKAQVSGQGDSLHEHIANLAGSPAIKKGILQTVKVVDELVKVMGRHKPENIVIEMARENQTTQKGQKNSRERMKRIEEGIKELGSQILKEHPVENTQLQNEKLYLYYLQNGRDMYVDQELDINRLSDYDVDHIVPQSFLKDDSIDNKVLTRSDKARGKSDNVPSEEVVKKMKNYWRQLLNAKLITQRKFDNLTKAERGGLSELDKAGFIKRQLVETRQITKHVAQILDSRMNTKYDENDKLIREVKVITLKSKLVSDFRKDFQFYKVREINNYHHAHDAYLNAVVGTALIKKYPKLESEFVYGDYKVYDVRKMIAKSEQEIGKATAKYFFYSNIMNFFKTEITLANGEIRKRPLIETNGETGEIVWDKGRDFATVRKVLSMPQVNIVKKTEVQTGGFSKESILPKRNSDKLIARKKDWDPKKYGGFDSPTVAYSVLVVAKVEKGKSKKLKSVKELLGITIMERSSFEKNPIDFLEAKGYKEVKKDLIIKLPKYSLFELENGRKRMLASAGELQKGNELALPSKYVNFLYLASHYEKLKGSPEDNEQKQLFVEQHKHYLDEIIEQISEFSKRVILADANLDKVLSAYNKHRDKPIREQAENIIHLFTLTNLGAPAAFKYFDTTIDRKRYTSTKEVLDATLIHQSITGLYETRIDLSQLGGDGGPAPEAAAKGGLLGRDLLTKLKAQIQFSTEGPQVTWEDRPAMCLVLNLEEEYRLHEKPVPPSIDPSWLQLFPMVWAEKAGMGLANQVPPVVVELKSDASPVAVRQYPMSKEAREGIRPHIQRFLDLGILVPCQSPWNTPLLPVKKPGTNDYRPVQDLREVNKRVQDIHPTVPNPYNLLSSLPPSHTWYSVLDLKDAFFCLKLHPNSQPLFAFEWRDPEKGNTGQLTWTRLPQGFKNSPTLFNEALHRDLASFRALNPQVVMLQYVDDLLVAAPTYRDCKEGTRRLLQELSKLGYRVSAKKAQLCREEVTYLGYLLKGGKRWLTPARKATVMKIPTPTTPRQVREFLGTAGFCRLWIPGFASLAAPLYPLTRPKVPFTWTEAHQEAFGRIKEALLSAPALALPDLTKPFALYVDEKEGVARGVLTQTLGPWRRPVAYLSKKLDPVASGWPTCLKAIAAVALLLKDADKLTLGQNVLVIAPHNLESIVRQPPDRWMTNARMTHYQSLLLNERVSFAPPAILNPATLLPVESDDTPIHICSEILAEETGTRPDLRDQPLPGVPAWYTDGSSFIMDGRRQAGAAIVDNKRTVWASNLPEGTSAQKAELIALTQALRLAEGKSINIYTDSRYAFATAHVHGAIYKQRGWLTSAGKDIKNKEEILALLEAIHLPKRVAIIHCPGHQRGTDPVATGNRKADEAAKQAAQSTRILTETTKNAGKRTADGSEFEKRTADGSEFESPKKKAKVE

SEQ ID NO: 6787 - protein, 2215 aa, synthetic construct
MPAAKRVKLDGGDKKYSIGLDIGTNSVGWAVITDEYKVPSKKFKVLGNTDRHSIKKNLIGALLFDSGETAEATRLKRTARRRYTRRKNRICYLQEIFSNEMAKVDDSFFHRLEESFLVEEDKKHERHPIFGNIVDEVAYHEKYPTIYHLRKKLVDSTDKADLRLIYLALAHMIKFRGHFLIEGDLNPDNSDVDKLFIQLVQTYNQLFEENPINASGVDAKAILSARLSKSRRLENLIAQLPGEKKNGLFGNLIALSLGLTPNFKSNFDLAEDAKLQLSKDTYDDDLDNLLAQIGDQYADLFLAAKNLSDAILLSDILRVNTEITKAPLSASMIKRYDEHHQDLTLLKALVRQQLPEKYKEIFFDQSKNGYAGYIDGGASQEEFYKFIKPILEKMDGTEELLVKLNREDLLRKQRTFDNGSIPHQIHLGELHAILRRQEDFYPFLKDNREKIEKILTFRIPYYVGPLARGNSRFAWMTRKSEETITPWNFEEVVDKGASAQSFIERMTNFDKNLPNEKVLPKHSLLYEYFTVYNELTKVKYVTEGMRKPAFLSGEQKKAIVDLLFKTNRKVTVKQLKEDYFKKIECFDSVEISGVEDRFNASLGTYHDLLKIIKDKDFLDNEENEDILEDIVLTLTLFEDREMIEERLKTYAHLFDDKVMKQLKRRRYTGWGRLSRKLINGIRDKQSGKTILDFLKSDGFANRNFMQLIHDDSLTFKEDIQKAQVSGQGDSLHEHIANLAGSPAIKKGILQTVKVVDELVKVMGRHKPENIVIEMARENQTTQKGQKNSRERMKRIEEGIKELGSQILKEHPVENTQLQNEKLYLYYLQNGRDMYVDQELDINRLSDYDVDHIVPQSFLKDDSIDNKVLTRSDKARGKSDNVPSEEVVKKMKNYWRQLLNAKLITQRKFDNLTKAERGGLSELDKAGFIKRQLVETRQITKHVAQILDSRMNTKYDENDKLIREVKVITLKSKLVSDFRKDFQFYKVREINNYHHAHDAYLNAVVGTALIKKYPKLESEFVYGDYKVYDVRKMIAKSEQEIGKATAKYFFYSNIMNFFKTEITLANGEIRKRPLIETNGETGEIVWDKGRDFATVRKVLSMPQVNIVKKTEVQTGGFSKESILPKRNSDKLIARKKDWDPKKYGGFDSPTVAYSVLVVAKVEKGKSKKLKSVKELLGITIMERSSFEKNPIDFLEAKGYKEVKKDLIIKLPKYSLFELENGRKRMLASAGELQKGNELALPSKYVNFLYLASHYEKLKGSPEDNEQKQLFVEQHKHYLDEIIEQISEFSKRVILADANLDKVLSAYNKHRDKPIREQAENIIHLFTLTNLGAPAAFKYFDTTIDRKRYTSTKEVLDATLIHQSITGLYETRIDLSQLGGDGGPAPEAAAKGGTLGDQGSRGSDPLPEPRVTLTVEGIPTEFLVNTGAEHSVLTKPMGKMGSKRTVVAGATGSKVYPWTTKRLLKIGQKQVTHSFLVIPECPAPLLGRDLLTKLKAQIQFSTEGPQVTWEDRPAMCLVLNLEEEYRLHEKPVPPSIDPSWLQLFPMVWAEKAGMGLANQVPPVVVELKSDASPVAVRQYPMSKEAREGIRPHIQRFLDLGILVPCQSPWNTPLLPVKKPGTNDYRPVQDLREVNKRVQDIHPTVPNPYNLLSSLPPSHTWYSVLDLKDAFFCLKLHPNSQPLFAFEWRDPEKGNTGQLTWTRLPQGFKNSPTLFNEALHRDLASFRALNPQVVMLQYVDDLLVAAPTYRDCKEGTRRLLQELSKLGYRVSAKKAQLCREEVTYLGYLLKGGKRWLTPARKATVMKIPTPTTPRQVREFLGKAGFCRLFIPGFASLAAPLYPLTRPKVPFTWTEAHQEAFGRIKEALLSAPALALPDLTKPFALYVDEKEGVARGVLTQTLGPWRRPVAYLSKKLDPVASGWPTCLKAIAAVALLLKDADKLTLGQNVLVIAPHNLESIVRQPPDRWMTNARMTHYQSLLLNERVSFAPPAILNPATLLPVESDDTPIHICSEILAEETGTRPDLRDQPLPGVPAWYTDGSSFIMDGRRQAGAAIVDNKRTVWASNLPEGTSAQKAELIALTQALRLAEGKSINIYTDSRYAFATAHVHGAIYKQRGWLTSAGKDIKNKEEILALLEAIHLPKRVAIIHCPGHQRGTDPVATGNRKADEAAKQAAQSTRILTETTKNAGKRTADGSEFEKRTADGSEFESPKKKAKVE

SEQ ID NO: 6788 - protein, 2093 aa, synthetic construct; identical to SEQ ID NO: 4516

SEQ ID NO: 6789 - protein, 2093 aa, synthetic construct
MPAAKRVKLDGGDKKYSIGLDIGTNSVGWAVITDEYKVPSKKFKVLGNTDRHSIKKNLIGALLFDSGETAEATRLKRTARRRYTRRKNRICYLQEIFSNEMAKVDDSFFHRLEESFLVEEDKKHERHPIFGNIVDEVAYHEKYPTIYHLRKKLVDSTDKADLRLIYLALAHMIKFRGHFLIEGDLNPDNSDVDKLFIQLVQTYNQLFEENPINASGVDAKAILSARLSKSRRLENLIAQLPGEKKNGLFGNLIALSLGLTPNFKSNFDLAEDAKLQLSKDTYDDDLDNLLAQIGDQYADLFLAAKNLSDAILLSDILRVNTEITKAPLSASMIKRYDEHHQDLTLLKALVRQQLPEKYKEIFFDQSKNGYAGYIDGGASQEEFYKFIKPILEKMDGTEELLVKLNREDLLRKQRTFDNGSIPHQIHLGELHAILRRQEDFYPFLKDNREKIEKILTFRIPYYVGPLARGNSRFAWMTRKSEETITPWNFEEVVDKGASAQSFIERMTNFDKNLPNEKVLPKHSLLYEYFTVYNELTKVKYVTEGMRKPAFLSGEQKKAIVDLLFKTNRKVTVKQLKEDYFKKIECFDSVEISGVEDRFNASLGTYHDLLKIIKDKDFLDNEENEDILEDIVLTLTLFEDREMIEERLKTYAHLFDDKVMKQLKRRRYTGWGRLSRKLINGIRDKQSGKTILDFLKSDGFANRNFMQLIHDDSLTFKEDIQKAQVSGQGDSLHEHIANLAGSPAIKKGILQTVKVVDELVKVMGRHKPENIVIEMARENQTTQKGQKNSRERMKRIEEGIKELGSQILKEHPVENTQLQNEKLYLYYLQNGRDMYVDQELDINRLSDYDVDHIVPQSFLKDDSIDNKVLTRSDKARGKSDNVPSEEVVKKMKNYWRQLLNAKLITQRKFDNLTKAERGGLSELDKAGFIKRQLVETRQITKHVAQILDSRMNTKYDENDKLIREVKVITLKSKLVSDFRKDFQFYKVREINNYHHAHDAYLNAVVGTALIKKYPKLESEFVYGDYKVYDVRKMIAKSEQEIGKATAKYFFYSNIMNFFKTEITLANGEIRKRPLIETNGETGEIVWDKGRDFATVRKVLSMPQVNIVKKTEVQTGGFSKESILPKRNSDKLIARKKDWDPKKYGGFDSPTVAYSVLVVAKVEKGKSKKLKSVKELLGITIMERSSFEKNPIDFLEAKGYKEVKKDLIIKLPKYSLFELENGRKRMLASAGELQKGNELALPSKYVNFLYLASHYEKLKGSPEDNEQKQLFVEQHKHYLDEIIEQISEFSKRVILADANLDKVLSAYNKHRDKPIREQAENIIHLFTLTNLGAPAAFKYFDTTIDRKRYTSTKEVLDATLIHQSITGLYETRIDLSQLGGDGGPAPEAAAKGGTLNIEDEYRLHETSKEPDVSLGSTWLSDFPQAWAETGGMGLAVRQAPLIIPLKATSTPVSIKQYPMSQEARLGIKPHIQRLLDQGILVPCQSPWNTPLLPVKKPGTNDYRPVQDLREVNKRVEDIHPTVPNPYNLLSGLPPSHQWYTVLDLKDAFFCLRLHPTSQPLFAFEWRDPEMGISGQLTWTRLPQGFKNSPTLFNEALHRDLAGFRIQHPDLILLQYVDDLLLAATSELDCQQGTRALLQTLGDLGYRASAKKAQICQKQVKYLGYLLKEGQRWLTEARKETVMGQPIPKTPRQLREFLGTAGFCRLWIPGFAEMAAPLYPLTKPGTLFNWGPDQQKAFQEIKQALLTAPALGLPDLTKPFELFVDEKQGYAKGVLTQKLGPWRRPVAYLSKKLDPVAAGWPPCLRMVAAIAVLTKDAGKLTMGQPLVILAPHAVEALVKQPPDRWLSNARMTHYQALLLDTDRVQFGPVVALNPATLLPLPEEGLQHDCLDILAEAHGTRSDLMDQPLPDADHTWYTDGSSFLQEGQRKAGAAVTTETEVIWARALPAGTSAQRAELIALTQALKMAEGKKLNVYTDSRYAFATAHIHGEIYRRRGWLTSEGKEIKNKDEILALLKALFLPKRLSIIHCPGHQKGNSAEARGNRMADQAAREVATRETPETSTLLAGKRTADGSEFEKRTADGSEFESPKKKAKVE

SEQ ID NO: 6790 - protein, 2113 aa, synthetic construct
MPAAKRVKLDGGDKKYSIGLDIGTNSVGWAVITDEYKVPSKKFKVLGNTDRHSIKKNLIGALLFDSGETAEATRLKRTARRRYTRRKNRICYLQEIFSNEMAKVDDSFFHRLEESFLVEEDKKHERHPIFGNIVDEVAYHEKYPTIYHLRKKLVDSTDKADLRLIYLALAHMIKFRGHFLIEGDLNPDNSDVDKLFIQLVQTYNQLFEENPINASGVDAKAILSARLSKSRRLENLIAQLPGEKKNGLFGNLIALSLGLTPNFKSNFDLAEDAKLQLSKDTYDDDLDNLLAQIGDQYADLFLAAKNLSDAILLSDILRVNTEITKAPLSASMIKRYDEHHQDLTLLKALVRQQLPEKYKEIFFDQSKNGYAGYIDGGASQEEFYKFIKPILEKMDGTEELLVKLNREDLLRKQRTFDNGSIPHQIHLGELHAILRRQEDFYPFLKDNREKIEKILTFRIPYYVGPLARGNSRFAWMTRKSEETITPWNFEEVVDKGASAQSFIERMTNFDKNLPNEKVLPKHSLLYEYFTVYNELTKVKYVTEGMRKPAFLSGEQKKAIVDLLFKTNRKVTVKQLKEDYFKKIECFDSVEISGVEDRFNASLGTYHDLLKIIKDKDFLDNEENEDILEDIVLTLTLFEDREMIEERLKTYAHLFDDKVMKQLKRRRYTGWGRLSRKLINGIRDKQSGKTILDFLKSDGFANRNFMQLIHDDSLTFKEDIQKAQVSGQGDSLHEHIANLAGSPAIKKGILQTVKVVDELVKVMGRHKPENIVIEMARENQTTQKGQKNSRERMKRIEEGIKELGSQILKEHPVENTQLQNEKLYLYYLQNGRDMYVDQELDINRLSDYDVDHIVPQSFLKDDSIDNKVLTRSDKARGKSDNVPSEEVVKKMKNYWRQLLNAKLITQRKFDNLTKAERGGLSELDKAGFIKRQLVETRQITKHVAQILDSRMNTKYDENDKLIREVKVITLKSKLVSDFRKDFQFYKVREINNYHHAHDAYLNAVVGTALIKKYPKLESEFVYGDYKVYDVRKMIAKSEQEIGKATAKYFFYSNIMNFFKTEITLANGEIRKRPLIETNGETGEIVWDKGRDFATVRKVLSMPQVNIVKKTEVQTGGFSKESILPKRNSDKLIARKKDWDPKKYGGFDSPTVAYSVLVVAKVEKGKSKKLKSVKELLGITIMERSSFEKNPIDFLEAKGYKEVKKDLIIKLPKYSLFELENGRKRMLASAGELQKGNELALPSKYVNFLYLASHYEKLKGSPEDNEQKQLFVEQHKHYLDEIIEQISEFSKRVILADANLDKVLSAYNKHRDKPIREQAENIIHLFTLTNLGAPAAFKYFDTTIDRKRYTSTKEVLDATLIHQSITGLYETRIDLSQLGGDGGPAPEAAAKGGVQEISDSRPMLHIYLNGRRFLGLLDTGADKTCIAGRDWPANWPIHQTESSLQGLGMACGVARSSQPLRWQHEDKSGIIHPFVIPTLPFTLWGRDIMKDIKVRLMTDSPDDSQDLMIGAIESNLFADQISWKSDQPVWLNQWPLKQEKLQALQQLVTEQLQLGHLEESNSPWNTPVFVIKKKSGKWRLLQDLRAVNATMHDMGALQPGLPSPVAVPKGWEIIIIDLQDCFFNIKLHPEDCKRFAFSVPSPNFKRPYQRFQWKVLPQGMKNSPTLCQKFVDKAILTVRDKYQDSYIVHYMDDILLAHPSRSIVDEILTSMIQALNKHGLVVSTEKIQKYDNLKYLGTHIQGDSVSYQKLQIRTDKLRTLNDFQKLLGNINWIRPFLKLTTGELKPLFEILNPDSNPISTRKLTPEACKALQLMNERLSTARVKRLDLSQPWSLCILKTEYTPTACLWQDGVVEWIHLPHISPKVITPYDIFCTQLIIKGRHRSKELFSKDPDYIVVPYTKVQFDLLLQEKEDWPISLLGFLGEVHFHLPKDPLLTFTLQTAIIFPHMTSTTPLEKGIVIFTDGSANGRSVTYIQGREPIIKENTQNTAQQAEIVAVITAFEEVSQPFNLYTDSKYVTGLFPEIETATLSPRTKIYTELKHLQRLIHKRQEKFYIGHIRGHTGLPGPLAQGNAYADSLTRILTAAGKRTADGSEFEKRTADGSEFESPKKKAKVE

SEQ ID NO: 6791 - protein, 2085 aa, synthetic construct
MPAAKRVKLDGGDKKYSIGLDIGTNSVGWAVITDEYKVPSKKFKVLGNTDRHSIKKNLIGALLFDSGETAEATRLKRTARRRYTRRKNRICYLQEIFSNEMAKVDDSFFHRLEESFLVEEDKKHERHPIFGNIVDEVAYHEKYPTIYHLRKKLVDSTDKADLRLIYLALAHMIKFRGHFLIEGDLNPDNSDVDKLFIQLVQTYNQLFEENPINASGVDAKAILSARLSKSRRLENLIAQLPGEKKNGLFGNLIALSLGLTPNFKSNFDLAEDAKLQLSKDTYDDDLDNLLAQIGDQYADLFLAAKNLSDAILLSDILRVNTEITKAPLSASMIKRYDEHHQDLTLLKALVRQQLPEKYKEIFFDQSKNGYAGYIDGGASQEEFYKFIKPILEKMDGTEELLVKLNREDLLRKQRTFDNGSIPHQIHLGELHAILRRQEDFYPFLKDNREKIEKILTFRIPYYVGPLARGNSRFAWMTRKSEETITPWNFEEVVDKGASAQSFIERMTNFDKNLPNEKVLPKHSLLYEYFTVYNELTKVKYVTEGMRKPAFLSGEQKKAIVDLLFKTNRKVTVKQLKEDYFKKIECFDSVEISGVEDRFNASLGTYHDLLKIIKDKDFLDNEENEDILEDIVLTLTLFEDREMIEERLKTYAHLFDDKVMKQLKRRRYTGWGRLSRKLINGIRDKQSGKTILDFLKSDGFANRNFMQLIHDDSLTFKEDIQKAQVSGQGDSLHEHIANLAGSPAIKKGILQTVKVVDELVKVMGRHKPENIVIEMARENQTTQKGQKNSRERMKRIEEGIKELGSQILKEHPVENTQLQNEKLYLYYLQNGRDMYVDQELDINRLSDYDVDHIVPQSFLKDDSIDNKVLTRSDKARGKSDNVPSEEVVKKMKNYWRQLLNAKLITQRKFDNLTKAERGGLSELDKAGFIKRQLVETRQITKHVAQILDSRMNTKYDENDKLIREVKVITLKSKLVSDFRKDFQFYKVREINNYHHAHDAYLNAVVGTALIKKYPKLESEFVYGDYKVYDVRKMIAKSEQEIGKATAKYFFYSNIMNFFKTEITLANGEIRKRPLIETNGETGEIVWDKGRDFATVRKVLSMPQVNIVKKTEVQTGGFSKESILPKRNSDKLIARKKDWDPKKYGGFDSPTVAYSVLVVAKVEKGKSKKLKSVKELLGITIMERSSFEKNPIDFLEAKGYKEVKKDLIIKLPKYSLFELENGRKRMLASAGELQKGNELALPSKYVNFLYLASHYEKLKGSPEDNEQKQLFVEQHKHYLDEIIEQISEFSKRVILADANLDKVLSAYNKHRDKPIREQAENIIHLFTLTNLGAPAAFKYFDTTIDRKRYTSTKEVLDATLIHQSITGLYETRIDLSQLGGDGGPAPEAAAKGGLDDEYRLYSPLVKPDQNIQFWLEQFPQAWAETAGMGLAKQVPPQVIQLKASATPVSVRQYPLSKEAQEGIRPHVQRLIQQGILVPVQSPWNTPLLPVRKPGTNDYRPVQDLREVNKRVQDIHPTVPNPYNLLCALPPQRSWYTVLDLKDAFFCLRLHPTSQPLFAFEWRDPGTGRTGQLTWTRLPQGFKNSPTIFNEALHRDLANFRIQHPQVTLLQYVDDLLLAGATKQDCLEGTKALLLELSDLGYRASAKKAQICRREVTYLGYSLRDGQRWLTEARKKTVVQIPAPTTAKQVREFLGKAGFCRLFIPGFATLAAPLYPLTKPKGEFSWAPEHQKAFDAIKKALLSAPALALPDVTKPFTLYVDERKGVARGVLTQTLGPWRRPVAYLSKKLDPVASGWPVCLKAIAAVAILVKDADKLTLGQNITVIAPHALENIVRQPPDRWMTNARMTHYQSLLLTERVTFAPPAALNPATLLPEETDEPVTHDCHQLLIEETGVRKDLTDIPLTGEVLTWFTDGSSYVVEGKRMAGAAVVDGTRTIWASSLPEGTSAQKAELMALTQALRLAEGKSINIYTDSRYAFATAHVHGAIYKQRGWLTSAGREIKNKEEILSLLEALHLPKRLAIIHCPGHQKAKDPISRGNQMADRVAKQAAQGVNLLPAGKRTADGSEFEKRTADGSEFESPKKKAKVE

SEQ ID NO: 6792 - protein, 2087 aa, synthetic construct
MPAAKRVKLDGGDKKYSIGLDIGTNSVGWAVITDEYKVPSKKFKVLGNTDRHSIKKNLIGALLFDSGETAEATRLKRTARRRYTRRKNRICYLQEIFSNEMAKVDDSFFHRLEESFLVEEDKKHERHPIFGNIVDEVAYHEKYPTIYHLRKKLVDSTDKADLRLIYLALAHMIKFRGHFLIEGDLNPDNSDVDKLFIQLVQTYNQLFEENPINASGVDAKAILSARLSKSRRLENLIAQLPGEKKNGLFGNLIALSLGLTPNFKSNFDLAEDAKLQLSKDTYDDDLDNLLAQIGDQYADLFLAAKNLSDAILLSDILRVNTEITKAPLSASMIKRYDEHHQDLTLLKALVRQQLPEKYKEIFFDQSKNGYAGYIDGGASQEEFYKFIKPILEKMDGTEELLVKLNREDLLRKQRTFDNGSIPHQIHLGELHAILRRQEDFYPFLKDNREKIEKILTFRIPYYVGPLARGNSRFAWMTRKSEETITPWNFEEVVDKGASAQSFIERMTNFDKNLPNEKVLPKHSLLYEYFTVYNELTKVKYVTEGMRKPAFLSGEQKKAIVDLLFKTNRKVTVKQLKEDYFKKIECFDSVEISGVEDRFNASLGTYHDLLKIIKDKDFLDNEENEDILEDIVLTLTLFEDREMIEERLKTYAHLFDDKVMKQLKRRRYTGWGRLSRKLINGIRDKQSGKTILDFLKSDGFANRNFMQLIHDDSLTFKEDIQKAQVSGQGDSLHEHIANLAGSPAIKKGILQTVKVVDELVKVMGRHKPENIVIEMARENQTTQKGQKNSRERMKRIEEGIKELGSQILKEHPVENTQLQNEKLYLYYLQNGRDMYVDQELDINRLSDYDVDHIVPQSFLKDDSIDNKVLTRSDKARGKSDNVPSEEVVKKMKNYWRQLLNAKLITQRKFDNLTKAERGGLSELDKAGFIKRQLVETRQITKHVAQILDSRMNTKYDENDKLIREVKVITLKSKLVSDFRKDFQFYKVREINNYHHAHDAYLNAVVGTALIKKYPKLESEFVYGDYKVYDVRKMIAKSEQEIGKATAKYFFYSNIMNFFKTEITLANGEIRKRPLIETNGETGEIVWDKGRDFATVRKVLSMPQVNIVKKTEVQTGGFSKESILPKRNSDKLIARKKDWDPKKYGGFDSPTVAYSVLVVAKVEKGKSKKLKSVKELLGITIMERSSFEKNPIDFLEAKGYKEVKKDLIIKLPKYSLFELENGRKRMLASAGELQKGNELALPSKYVNFLYLASHYEKLKGSPEDNEQKQLFVEQHKHYLDEIIEQISEFSKRVILADANLDKVLSAYNKHRDKPIREQAENIIHLFTLTNLGAPAAFKYFDTTIDRKRYTSTKEVLDATLIHQSITGLYETRIDLSQLGGDGGPAPEAAAKGGTLQLDDEYRLYSPLVKPDQNIQFWLEQFPQAWAETAGMGLAKQVPPQVIQLKASATPVSVRQYPLSKEAQEGIRPHVQRLIQQGILVPVQSPWNTPLLPVRKPGTNDYRPVQDLREVNKRVQDIHPTVPNPYNLLCALPPQRSWYTVLDLKDAFFCLRLHPTSQPLFAFEWRDPGTGRTGQLTWTRLPQGFKNSPTIFDEALHRDLANFRIQHPQVTLLQYVDDLLLAGATKQDCLEGTKALLLELSDLGYRASAKKAQICRREVTYLGYSLRDGQRWLTEARKKTVVQIPAPTTAKQVREFLGTAGFCRLWIPGFATLAAPLYPLTKEKGEFSWAPEHQKAFDAIKKALLSAPALALPDVTKPFTLYVDERKGVARGVLTQTLGPWRRPVAYLSKKLDPVASGWPVCLKAIAAVAILVKDADKLTLGQNITVIAPHALENIVRQPPDRWMTNARMTHYQSLLLTERVTFAPPAALNPATLLPEETDEPVTHDCHQLLIEETGVRKDLTDIPLTGEVLTWFTDGSSYVVEGKRMAGAAVVDGTRTIWASSLPEGTSAQKAELMALTQALRLAEGKSINIYTDSRYAFATAHVHGAIYKQRGLLTSAGREIKNKEEILSLLEALHLPKRLAIIHCPGHQKAKDPISRGNQMADRVAKQAAQGVNLLAGKRTADGSEFEKRTADGSEFESPKKKAKVE

SEQ ID NO: 6793 - protein, 2085 aa, synthetic construct; identical to SEQ ID NO: 6791

SEQ ID NO: 6794 - protein, 2087 aa, synthetic construct; identical to SEQ ID NO: 6792

SEQ ID NO: 6795 - protein, 2091 aa, synthetic construct
MPAAKRVKLDGGDKKYSIGLDIGTNSVGWAVITDEYKVPSKKFKVLGNTDRHSIKKNLIGALLFDSGETAEATRLKRTARRRYTRRKNRICYLQEIFSNEMAKVDDSFFHRLEESFLVEEDKKHERHPIFGNIVDEVAYHEKYPTIYHLRKKLVDSTDKADLRLIYLALAHMIKFRGHFLIEGDLNPDNSDVDKLFIQLVQTYNQLFEENPINASGVDAKAILSARLSKSRRLENLIAQLPGEKKNGLFGNLIALSLGLTPNFKSNFDLAEDAKLQLSKDTYDDDLDNLLAQIGDQYADLFLAAKNLSDAILLSDILRVNTEITKAPLSASMIKRYDEHHQDLTLLKALVRQQLPEKYKEIFFDQSKNGYAGYIDGGASQEEFYKFIKPILEKMDGTEELLVKLNREDLLRKQRTFDNGSIPHQIHLGELHAILRRQEDFYPFLKDNREKIEKILTFRIPYYVGPLARGNSRFAWMTRKSEETITPWNFEEVVDKGASAQSFIERMTNFDKNLPNEKVLPKHSLLYEYFTVYNELTKVKYVTEGMRKPAFLSGEQKKAIVDLLFKTNRKVTVKQLKEDYFKKIECFDSVEISGVEDRFNASLGTYHDLLKIIKDKDFLDNEENEDILEDIVLTLTLFEDREMIEERLKTYAHLFDDKVMKQLKRRRYTGWGRLSRKLINGIRDKQSGKTILDFLKSDGFANRNFMQLIHDDSLTFKEDIQKAQVSGQGDSLHEHIANLAGSPAIKKGILQTVKVVDELVKVMGRHKPENIVIEMARENQTTQKGQKNSRERMKRIEEGIKELGSQILKEHPVENTQLQNEKLYLYYLQNGRDMYVDQELDINRLSDYDVDHIVPQSFLKDDSIDNKVLTRSDKARGKSDNVPSEEVVKKMKNYWRQLLNAKLITQRKFDNLTKAERGGLSELDKAGFIKRQLVETRQITKHVAQILDSRMNTKYDENDKLIREVKVITLKSKLVSDFRKDFQFYKVREINNYHHAHDAYLNAVVGTALIKKYPKLESEFVYGDYKVYDVRKMIAKSEQEIGKATAKYFFYSNIMNFFKTEITLANGEIRKRPLIETNGETGEIVWDKGRDFATVRKVLSMPQVNIVKKTEVQTGGFSKESILPKRNSDKLIARKKDWDPKKYGGFDSPTVAYSVLVVAKVEKGKSKKLKSVKELLGITIMERSSFEKNPIDFLEAKGYKEVKKDLIIKLPKYSLFELENGRKRMLASAGELQKGNELALPSKYVNFLYLASHYEKLKGSPEDNEQKQLFVEQHKHYLDEIIEQISEFSKRVILADANLDKVLSAYNKHRDKPIREQAENIIHLFTLTNLGAPAAFKYFDTTIDRKRYTSTKEVLDATLIHQSITGLYETRIDLSQLGGDGGPAPEAAAKGGVLNLEEEYRLHEKPVPSSIDPSWLQLFPTVWAERAGMGLANQVPPVVVELRSGASPVAVRQYPMSKEAREGIRPHIQRFLDLGVLVPCQSPWNTPLLPVKKPGTNDYRPVQDLREINKRVQDIHPTVPNPYNLLSSLPPSHTWYSVLDLKDAFFCLKLHPNSQPLFAFEWRDPEKGNTGQLTWTRLPQGFKNSPTLFDEALHRDLAPFRALNPQVVLLQYVDDLLVAAPTYRDCKEGTQKLLQELSKLGYRVSAKKAQLCQKEVTYLGYLLKEGKRWLTPARKATVMKIPPPTTPRQVREFLGTAGFCRLWIPGFASLAAPLYPLTKESIPFIWTEEHQKAFDRIKEALLSAPALALPDLTKPFTLYVDERAGVARGVLTQTLGPWRRPVAYLSKKLDPVASGWPTCLKAVAAVALLLKDADKLTLGQNVTVIASHSLESIVRQPPDRWMTNARMTHYQSLLLNERVSFAPPAVLNPATLLPVESEATPVHRCSEILAEETGTRRDLKDQPLPGVPAWYTDGSSFIAEGKRRAGAAIVDGKRTVWASSLPEGTSAQKAELVALTQALRLAEGKDINIYTDSRYAFATAHIHGAIYKQRGLLTSAGKDIKNKEEILALLEAIHLPKRVAIIHCPGHQKGNDPVATGNRRADEAAKQAALSTRVLAETTKPAGKRTADGSEFEKRTADGSEFESPKKKAKVE

SEQ ID NO: 6796 - protein, 2093 aa, synthetic construct
MPAAKRVKLDGGDKKYSIGLDIGTNSVGWAVITDEYKVPSKKFKVLGNTDRHSIKKNLIGALLFDSGETAEATRLKRTARRRYTRRKNRICYLQEIFSNEMAKVDDSFFHRLEESFLVEEDKKHERHPIFGNIVDEVAYHEKYPTIYHLRKKLVDSTDKADLRLIYLALAHMIKFRGHFLIEGDLNPDNSDVDKLFIQLVQTYNQLFEENPINASGVDAKAILSARLSKSRRLENLIAQLPGEKKNGLFGNLIALSLGLTPNFKSNFDLAEDAKLQLSKDTYDDDLDNLLAQIGDQYADLFLAAKNLSDAILLSDILRVNTEITKAPLSASMIKRYDEHHQDLTLLKALVRQQLPEKYKEIFFDQSKNGYAGYIDGGASQEEFYKFIKPILEKMDGTEELLVKLNREDLLRKQRTFDNGSIPHQIHLGELHAILRRQEDFYPFLKDNREKIEKILTFRIPYYVGPLARGNSRFAWMTRKSEETITPWNFEEVVDKGASAQSFIERMTNFDKNLPNEKVLPKHSLLYEYFTVYNELTKVKYVTEGMRKPAFLSGEQKKAIVDLLFKTNRKVTVKQLKEDYFKKIECFDSVEISGVEDRFNASLGTYHDLLKIIKDKDFLDNEENEDILEDIVLTLTLFEDREMIEERLKTYAHLFDDKVMKQLKRRRYTGWGRLSRKLINGIRDKQSGKTILDFLKSDGFANRNFMQLIHDDSLTFKEDIQKAQVSGQGDSLHEHIANLAGSPAIKKGILQTVKVVDELVKVMGRHKPENIVIEMARENQTTQKGQKNSRERMKRIEEGIKELGSQILKEHPVENTQLQNEKLYLYYLQNGRDMYVDQELDINRLSDYDVDHIVPQSFLKDDSIDNKVLTRSDKARGKSDNVPSEEVVKKMKNYWRQLLNAKLITQRKFDNLTKAERGGLSELDKAGFIKRQLVETRQITKHVAQILDSRMNTKYDENDKLIREVKVITLKSKLVSDFRKDFQFYKVREINNYHHAHDAYLNAVVGTALIKKYPKLESEFVYGDYKVYDVRKMIAKSEQEIGKATAKYFFYSNIMNFFKTEITLANGEIRKRPLIETNGETGEIVWDKGRDFATVRKVLSMPQVNIVKKTEVQTGGFSKESILPKRNSDKLIARKKDWDPKKYGGFDSPTVAYSVLVVAKVEKGKSKKLKSVKELLGITIMERSSFEKNPIDFLEAKGYKEVKKDLIIKLPKYSLFELENGRKRMLASAGELQKGNELALPSKYVNFLYLASHYEKLKGSPEDNEQKQLFVEQHKHYLDEIIEQISEFSKRVILADANLDKVLSAYNKHRDKPIREQAENIIHLFTLTNLGAPAAFKYFDTTIDRKRYTSTKEVLDATLIHQSITGLYETRIDLSQLGGDGGPAPEAAAKGGTLNIEDEYRLHETSKEPDVPLGSTWLSDFPQAWAETGGMGLAVRQAPLIIPLKATSTPVSIKQYPMSQEARLGIKPHIQRLLDQGILVPCQSPWNTPLLPVKKPGTNDYRPVQDLREVNKRVEDIHPTVPNPYNLLSGLPPSHQWYTVLDLKDAFFCLRLHPTSQPLFAFEWRDPEMGISGQLTWTRLPQGFKNSPTLFNEALHRDLADFRIQHPDLILLQYVDDLLLAATSEQDCQRGTRALLQTLGNLGYRASAKKAQICQKQVKYLGYLLKEGQRWLTEARKETVMGQPTPKTPRQLREFLGTAGFCRLWIPGFAEMAAPLYPLTKPGTLFNWGPDQQKAYQEIKQALLTAPALGLPDLTKPFELFVDEKQGYAKGVLTQKLGPWRRPVAYLSKKLDPVAAGWPPCLRMVAAIAVLTKDAGKLTMGQPLVILAPHAVEALVKQPPDRWLSNARMTHYQAMLLDTDRVQFGPVVALNPATLLPLPEKEAPHDCLEILAETHGTRPDLTDQPIPDADYTWYTDGSSFLQEGQRRAGAAVTTETEVIWARALPAGTSAQRAELIALTQALKMAEGKKLNVYTDSRYAFATAHVHGEIYRRRGWLTSEGREIKNKNEILALLKALFLPKRLSIIHCPGHQKGNSAEARGNRMADQAAREAAMKAVLETSTLLAGKRTADGSEFEKRTADGSEFESPKKKAKVE

SEQ ID NO: 6797 - protein, 2093 aa, synthetic construct
MPAAKRVKLDGGDKKYSIGLDIGTNSVGWAVITDEYKVPSKKFKVLGNTDRHSIKKNLIGALLFDSGETAEATRLKRTARRRYTRRKNRICYLQEIFSNEMAKVDDSFFHRLEESFLVEEDKKHERHPIFGNIVDEVAYHEKYPTIYHLRKKLVDSTDKADLRLIYLALAHMIKFRGHFLIEGDLNPDNSDVDKLFIQLVQTYNQLFEENPINASGVDAKAILSARLSKSRRLENLIAQLPGEKKNGLFGNLIALSLGLTPNFKSNFDLAEDAKLQLSKDTYDDDLDNLLAQIGDQYADLFLAAKNLSDAILLSDILRVNTEITKAPLSASMIKRYDEHHQDLTLLKALVRQQLPEKYKEIFFDQSKNGYAGYIDGGASQEEFYKFIKPILEKMDGTEELLVKLNREDLLRKQRTFDNGSIPHQIHLGELHAILRRQEDFYPFLKDNREKIEKILTFRIPYYVGPLARGNSRFAWMTRKSEETITPWNFEEVVDKGASAQSFIERMTNFDKNLPNEKVLPKHSLLYEYFTVYNELTKVKYVTEGMRKPAFLSGEQKKAIVDLLFKTNRKVTVKQLKEDYFKKIECFDSVEISGVEDRFNASLGTYHDLLKIIKDKDFLDNEENEDILEDIVLTLTLFEDREMIEERLKTYAHLFDDKVMKQLKRRRYTGWGRLSRKLINGIRDKQSGKTILDFLKSDGFANRNFMQLIHDDSLTFKEDIQKAQVSGQGDSLHEHIANLAGSPAIKKGILQTVKVVDELVKVMGRHKPENIVIEMARENQTTQKGQKNSRERMKRIEEGIKELGSQILKEHPVENTQLQNEKLYLYYLQNGRDMYVDQELDINRLSDYDVDHIVPQSFLKDDSIDNKVLTRSDKARGKSDNVPSEEVVKKMKNYWRQLLNAKLITQRKFDNLTKAERGGLSELDKAGFIKRQLVETRQITKHVAQILDSRMNTKYDENDKLIREVKVITLKSKLVSDFRKDFQFYKVREINNYHHAHDAYLNAVVGTALIKKYPKLESEFVYGDYKVYDVRKMIAKSEQEIGKATAKYFFYSNIMNFFKTEITLANGEIRKRPLIETNGETGEIVWDKGRDFATVRKVLSMPQVNIVKKTEVQTGGFSKESILPKRNSDKLIARKKDWDPKKYGGFDSPTVAYSVLVVAKVEKGKSKKLKSVKELLGITIMERSSFEKNPIDFLEAKGYKEVKKDLIIKLPKYSLFELENGRKRMLASAGELQKGNELALPSKYVNFLYLASHYEKLKGSPEDNEQKQLFVEQHKHYLDEIIEQISEFSKRVILADANLDKVLSAYNKHRDKPIREQAENIIHLFTLTNLGAPAAFKYFDTTIDRKRYTSTKEVLDATLIHQSITGLYETRIDLSQLGGDGGPAPEAAAKGGTLNIEDEYRLHETSKEPDVPLGSTWLSDFPQAWAETGGMGLAVRQAPLIIPLKATSTPVSIKQYPMSQEARLGIKPHIQRLLDQGILVPCQSPWNTPLLPVKKPGTNDYRPVQDLREVNKRVEDIHPTVPNPYNLLSGLPPSHQWYTVLDLKDAFFCLRLHPTSQPLFAFEWRDPEMGISGQLTWTRLPQGFKNSPTLFNEALHRDLADFRIQHPDLILLQYVDDLLLAATSEQDCQRGTRALLQTLGNLGYRASAKKAQICQKQVKYLGYLLKEGQRWLTEARKETVMGQPTPKTPRQLREFLGKAGFCRLFIPGFAEMAAPLYPLTKPGTLFNWGPDQQKAYQEIKQALLTAPALGLPDLTKPFELFVDEKQGYAKGVLTQKLGPWRRPVAYLSKKLDPVAAGWPPCLRMVAAIAVLTKDAGKLTMGQPLVILAPHAVEALVKQPPDRWLSNARMTHYQAMLLDTDRVQFGPVVALNPATLLPLPEKEAPHDCLEILAETHGTRPDLTDQPIPDADYTWYTDGSSFLQEGQRRAGAAVTTETEVIWARALPAGTSAQRAELIALTQALKMAEGKKLNVYTDSRYAFATAHVHGEIYRRRGWLTSEGREIKNKNEILALLKALFLPKRLSIIHCPGHQKGNSAEARGNRMADQAAREAAMKAVLETSTLLAGKRTADGSEFEKRTADGSEFESPKKKAKVE

SEQ ID NO: 6798 - protein, 2096 aa, synthetic construct
MPAAKRVKLDGGDKKYSIGLDIGTNSVGWAVITDEYKVPSKKFKVLGNTDRHSIKKNLIGALLFDSGETAEATRLKRTARRRYTRRKNRICYLQEIFSNEMAKVDDSFFHRLEESFLVEEDKKHERHPIFGNIVDEVAYHEKYPTIYHLRKKLVDSTDKADLRLIYLALAHMIKFRGHFLIEGDLNPDNSDVDKLFIQLVQTYNQLFEENPINASGVDAKAILSARLSKSRRLENLIAQLPGEKKNGLFGNLIALSLGLTPNFKSNFDLAEDAKLQLSKDTYDDDLDNLLAQIGDQYADLFLAAKNLSDAILLSDILRVNTEITKAPLSASMIKRYDEHHQDLTLLKALVRQQLPEKYKEIFFDQSKNGYAGYIDGGASQEEFYKFIKPILEKMDGTEELLVKLNREDLLRKQRTFDNGSIPHQIHLGELHAILRRQEDFYPFLKDNREKIEKILTFRIPYYVGPLARGNSRFAWMTRKSEETITPWNFEEVVDKGASAQSFIERMTNFDKNLPNEKVLPKHSLLYEYFTVYNELTKVKYVTEGMRKPAFLSGEQKKAIVDLLFKTNRKVTVKQLKEDYFKKIECFDSVEISGVEDRFNASLGTYHDLLKIIKDKDFLDNEENEDILEDIVLTLTLFEDREMIEERLKTYAHLFDDKVMKQLKRRRYTGWGRLSRKLINGIRDKQSGKTILDFLKSDGFANRNFMQLIHDDSLTFKEDIQKAQVSGQGDSLHEHIANLAGSPAIKKGILQTVKVVDELVKVMGRHKPENIVIEMARENQTTQKGQKNSRERMKRIEEGIKELGSQILKEHPVENTQLQNEKLYLYYLQNGRDMYVDQELDINRLSDYDVDHIVPQSFLKDDSIDNKVLTRSDKARGKSDNVPSEEVVKKMKNYWRQLLNAKLITQRKFDNLTKAERGGLSELDKAGFIKRQLVETRQITKHVAQILDSRMNTKYDENDKLIREVKVITLKSKLVSDFRKDFQFYKVREINNYHHAHDAYLNAVVGTALIKKYPKLESEFVYGDYKVYDVRKMIAKSEQEIGKATAKYFFYSNIMNFFKTEITLANGEIRKRPLIETNGETGEIVWDKGRDFATVRKVLSMPQVNIVKKTEVQTGGFSKESILPKRNSDKLIARKKDWDPKKYGGFDSPTVAYSVLVVAKVEKGKSKKLKSVKELLGITIMERSSFEKNPIDFLEAKGYKEVKKDLIIKLPKYSLFELENGRKRMLASAGELQKGNELALPSKYVNFLYLASHYEKLKGSPEDNEQKQLFVEQHKHYLDEIIEQISEFSKRVILADANLDKVLSAYNKHRDKPIREQAENIIHLFTLTNLGAPAAFKYFDTTIDRKRYTSTKEVLDATLIHQSITGLYETRIDLSQLGGDGGGGSGGGGSSGGTAPLEEEYRLFLEAPIQNVTLLEQWKREIPKVWAEINPPGLASTQAPIHVQLLSTALPVRVRQYPITLEAKRSLRETIRKFRAAGILRPVHSPWNTPLLPVRKSGTSEYRMVQDLREVNKRVETIHPTVPNPYTLLSLLPPDRIWYSVLDLKDAFFCIPLAPESQLIFAFEWADAEEGESGQLTWTRLPQGFKNSPTLFNEALNRDLQGFRLDHPSVSLLQYVDDLLIAADTQAACLSATRDLLMTLAELGYRVSGKKAQLCQEEVTYLGFKIHKGSRSLSNSRTQAILQIPVPKTKRQVREFLGKIGYCRLFIPGFAELAQPLYAATRPGNDPLVWGEKEEEAFQSLKLALTQPPALALPSLDKPFQLFVEETSGAAKGVLTQALGPWKRPVAYLSKRLDPVAAGWPRCLRAIAAAALLTREASKLTFGQDIEITSSHNLESLLRSPPDKWLTNARITQYQVLLLDPPRVRFKQTAALNPATLLPETDDTLPIHHCLDTLDSLTSTRPDLTDQPLAQAEATLFTDGSSYIRDGKRYAGAAVVTLDSVIWAEPLPIGTSAQKAELIALTKALEWSKDKSVNIYTDSRYAFATLHVHGMIYRERGWLTAGGKAIKNAPEILALLTAVWLPKRVAVMHCKGHQKDDAPTSTGNRRADEVAREVAIRPLSTQATISAGKRTADGSEFEKRTADGSEFESPKKKAKVE

SEQ ID NO: 6799 - protein, 2100 aa, synthetic construct
MPAAKRVKLDGGDKKYSIGLDIGTNSVGWAVITDEYKVPSKKFKVLGNTDRHSIKKNLIGALLFDSGETAEATRLKRTARRRYTRRKNRICYLQEIFSNEMAKVDDSFFHRLEESFLVEEDKKHERHPIFGNIVDEVAYHEKYPTIYHLRKKLVDSTDKADLRLIYLALAHMIKFRGHFLIEGDLNPDNSDVDKLFIQLVQTYNQLFEENPINASGVDAKAILSARLSKSRRLENLIAQLPGEKKNGLFGNLIALSLGLTPNFKSNFDLAEDAKLQLSKDTYDDDLDNLLAQIGDQYADLFLAAKNLSDAILLSDILRVNTEITKAPLSASMIKRYDEHHQDLTLLKALVRQQLPEKYKEIFFDQSKNGYAGYIDGGASQEEFYKFIKPILEKMDGTEELLVKLNREDLLRKQRTFDNGSIPHQIHLGELHAILRRQEDFYPFLKDNREKIEKILTFRIPYYVGPLARGNSRFAWMTRKSEETITPWNFEEVVDKGASAQSFIERMTNFDKNLPNEKVLPKHSLLYEYFTVYNELTKVKYVTEGMRKPAFLSGEQKKAIVDLLFKTNRKVTVKQLKEDYFKKIECFDSVEISGVEDRFNASLGTYHDLLKIIKDKDFLDNEENEDILEDIVLTLTLFEDREMIEERLKTYAHLFDDKVMKQLKRRRYTGWGRLSRKLINGIRDKQSGKTILDFLKSDGFANRNFMQLIHDDSLTFKEDIQKAQVSGQGDSLHEHIANLAGSPAIKKGILQTVKVVDELVKVMGRHKPENIVIEMARENQTTQKGQKNSRERMKRIEEGIKELGSQILKEHPVENTQLQNEKLYLYYLQNGRDMYVDQELDINRLSDYDVDHIVPQSFLKDDSIDNKVLTRSDKARGKSDNVPSEEVVKKMKNYWRQLLNAKLITQRKFDNLTKAERGGLSELDKAGFIKRQLVETRQITKHVAQILDSRMNTKYDENDKLIREVKVITLKSKLVSDFRKDFQFYKVREINNYHHAHDAYLNAVVGTALIKKYPKLESEFVYGDYKVYDVRKMIAKSEQEIGKATAKYFFYSNIMNFFKTEITLANGEIRKRPLIETNGETGEIVWDKGRDFATVRKVLSMPQVNIVKKTEVQTGGFSKESILPKRNSDKLIARKKDWDPKKYGGFDSPTVAYSVLVVAKVEKGKSKKLKSVKELLGITIMERSSFEKNPIDFLEAKGYKEVKKDLIIKLPKYSLFELENGRKRMLASAGELQKGNELALPSKYVNFLYLASHYEKLKGSPEDNEQKQLFVEQHKHYLDEIIEQISEFSKRVILADANLDKVLSAYNKHRDKPIREQAENIIHLFTLTNLGAPAAFKYFDTTIDRKRYTSTKEVLDATLIHQSITGLYETRIDLSQLGGDGGGGSGGGGSSGGTVSLQDEHRLFDIPVTTSLPDVWLQDFPQAWAETGGLGRAKCQAPIIIDLKPTAVPVSIKQYPMSLEAHMGIRQHIIKFLELGVLRPCRSPWNTPLLPVKKPGTQDYRPVQDLREINKRTVDIHPTVPNPYNLLSTLKPDYSWYTVLDLKDAFFCLPLAPQSQELFAFEWKDPERGISGQLTWTRLPQGFKNSPTLFDEALHRDLTDFRTQHPEVTLLQYVDDLLLAAPTKKACTQGTRHLLQELGEKGYRASAKKAQICQTKVTYLGYILSEGKRWLTPGRIETVARIPPPRNPREVREFLGTAGFCRLWIPGFAELAAPLYALTKESTPFTWQTEHQLAFEALKKALLSAPALGLPDTSKPFTLFLDERQGIAKGVLTQKLGPWKRPVAYLSKKLDPVAAGWPPCLRIMAATAMLVKDSAKLTLGQPLTVITPHTLEAIVRQPPDRWITNARLTHYQALLLDTDRVQFGPPVTLNPATLLPVPENQPSPHDCRQVLAETHGTREDLKDQELPDADHTWYTDGSSYLDSGTRRAGAAVVDGHNTIWAQSLPPGTSAQKAELIALTKALELSKGKKANIYTDSRYAFATAHTHGSIYERRGLLTSEGKEIKNKAEIIALLKALFLPQEVAIIHCPGHQKGQDPVAVGNRQADRVARQAAMAEVLTLATEPDNTSHITAGKRTADGSEFEKRTADGSEFESPKKKAKVE

SEQ ID NO: 6800 - protein, 1999 aa, synthetic construct
MPAAKRVKLDGGDKKYSIGLDIGTNSVGWAVITDEYKVPSKKFKVLGNTDRHSIKKNLIGALLFDSGETAEATRLKRTARRRYTRRKNRICYLQEIFSNEMAKVDDSFFHRLEESFLVEEDKKHERHPIFGNIVDEVAYHEKYPTIYHLRKKLVDSTDKADLRLIYLALAHMIKFRGHFLIEGDLNPDNSDVDKLFIQLVQTYNQLFEENPINASGVDAKAILSARLSKSRRLENLIAQLPGEKKNGLFGNLIALSLGLTPNFKSNFDLAEDAKLQLSKDTYDDDLDNLLAQIGDQYADLFLAAKNLSDAILLSDILRVNTEITKAPLSASMIKRYDEHHQDLTLLKALVRQQLPEKYKEIFFDQSKNGYAGYIDGGASQEEFYKFIKPILEKMDGTEELLVKLNREDLLRKQRTFDNGSIPHQIHLGELHAILRRQEDFYPFLKDNREKIEKILTFRIPYYVGPLARGNSRFAWMTRKSEETITPWNFEEVVDKGASAQSFIERMTNFDKNLPNEKVLPKHSLLYEYFTVYNELTKVKYVTEGMRKPAFLSGEQKKAIVDLLFKTNRKVTVKQLKEDYFKKIECFDSVEISGVEDRFNASLGTYHDLLKIIKDKDFLDNEENEDILEDIVLTLTLFEDREMIEERLKTYAHLFDDKVMKQLKRRRYTGWGRLSRKLINGIRDKQSGKTILDFLKSDGFANRNFMQLIHDDSLTFKEDIQKAQVSGQGDSLHEHIANLAGSPAIKKGILQTVKVVDELVKVMGRHKPENIVIEMARENQTTQKGQKNSRERMKRIEEGIKELGSQILKEHPVENTQLQNEKLYLYYLQNGRDMYVDQELDINRLSDYDVDHIVPQSFLKDDSIDNKVLTRSDKARGKSDNVPSEEVVKKMKNYWRQLLNAKLITQRKFDNLTKAERGGLSELDKAGFIKRQLVETRQITKHVAQILDSRMNTKYDENDKLIREVKVITLKSKLVSDFRKDFQFYKVREINNYHHAHDAYLNAVVGTALIKKYPKLESEFVYGDYKVYDVRKMIAKSEQEIGKATAKYFFYSNIMNFFKTEITLANGEIRKRPLIETNGETGEIVWDKGRDFATVRKVLSMPQVNIVKKTEVQTGGFSKESILPKRNSDKLIARKKDWDPKKYGGFDSPTVAYSVLVVAKVEKGKSKKLKSVKELLGITIMERSSFEKNPIDFLEAKGYKEVKKDLIIKLPKYSLFELENGRKRMLASAGELQKGNELALPSKYVNFLYLASHYEKLKGSPEDNEQKQLFVEQHKHYLDEIIEQISEFSKRVILADANLDKVLSAYNKHRDKPIREQAENIIHLFTLTNLGAPAAFKYFDTTIDRKRYTSTKEVLDATLIHQSITGLYETRIDLSQLGGDGGGGSGGGGSSGGGVLDTPPSHIGLEHLPPPPEVPQFPLNLERLQALQDLVHRSLEAGYISPWDGPGNNPVFPVRKPNGAWRFVHDLRATNALTKPIPALSPGPPDLTAPPTHPPHIICLDLKDAFFQIPVEDRFRFYLSFTLPSPGGLQPHRRFAWRVLPQGFINSPALFQRALQEPLRQVSAAFSQSLLVSYMDDILYASPTEEQRSQCYQALAARLRDLGFQVASEKTSQTPSPVPFLGQMVHEQIVTYQSLPTLQISSPISLHQLQAVLGDLQWVSRGTPTTRRPLQLLYSSLKRHHDPRAIIQLSPEQLQGIAELRQALSHNARSRYNEQEPLLAYVHLTRAGSTLVLFQKGAQFPLAYFQTPLTDNQASPWGLLLLLGCQYLQTQALSSYAKPILKYYHNLPKTSLDNWIQSSEDPRVQELLQLWPQISSQGIQPPGPWKTLITRAEVFLTPQFSPDPIPAALCLFSDGATGRGAYCLWKDHLLDFQAVPAPESAQKGELAGLLAGLAAAPPEPVNIWVDSKYLYSLLRTWVLGAWLQPDPVPSYALLYKSLLRHPAIVVGHVRSHSSASHPIASLNNYVDQLAGKRTADGSEFEKRTADGSEFESPKKKAKVE

SEQ ID NO: 6801 - protein, 2085 aa, synthetic construct
MPAAKRVKLDGGDKKYSIGLDIGTNSVGWAVITDEYKVPSKKFKVLGNTDRHSIKKNLIGALLFDSGETAEATRLKRTARRRYTRRKNRICYLQEIFSNEMAKVDDSFFHRLEESFLVEEDKKHERHPIFGNIVDEVAYHEKYPTIYHLRKKLVDSTDKADLRLIYLALAHMIKFRGHFLIEGDLNPDNSDVDKLFIQLVQTYNQLFEENPINASGVDAKAILSARLSKSRRLENLIAQLPGEKKNGLFGNLIALSLGLTPNFKSNFDLAEDAKLQLSKDTYDDDLDNLLAQIGDQYADLFLAAKNLSDAILLSDILRVNTEITKAPLSASMIKRYDEHHQDLTLLKALVRQQLPEKYKEIFFDQSKNGYAGYIDGGASQEEFYKFIKPILEKMDGTEELLVKLNREDLLRKQRTFDNGSIPHQIHLGELHAILRRQEDFYPFLKDNREKIEKILTFRIPYYVGPLARGNSRFAWMTRKSEETITPWNFEEVVDKGASAQSFIERMTNFDKNLPNEKVLPKHSLLYEYFTVYNELTKVKYVTEGMRKPAFLSGEQKKAIVDLLFKTNRKVTVKQLKEDYFKKIECFDSVEISGVEDRFNASLGTYHDLLKIIKDKDFLDNEENEDILEDIVLTLTLFEDREMIEERLKTYAHLFDDKVMKQLKRRRYTGWGRLSRKLINGIRDKQSGKTILDFLKSDGFANRNFMQLIHDDSLTFKEDIQKAQVSGQGDSLHEHIANLAGSPAIKKGILQTVKVVDELVKVMGRHKPENIVIEMARENQTTQKGQKNSRERMKRIEEGIKELGSQILKEHPVENTQLQNEKLYLYYLQNGRDMYVDQELDINRLSDYDVDHIVPQSFLKDDSIDNKVLTRSDKARGKSDNVPSEEVVKKMKNYWRQLLNAKLITQRKFDNLTKAERGGLSELDKAGFIKRQLVETRQITKHVAQILDSRMNTKYDENDKLIREVKVITLKSKLVSDFRKDFQFYKVREINNYHHAHDAYLNAVVGTALIKKYPKLESEFVYGDYKVYDVRKMIAKSEQEIGKATAKYFFYSNIMNFFKTEITLANGEIRKRPLIETNGETGEIVWDKGRDFATVRKVLSMPQVNIVKKTEVQTGGFSKESILPKRNSDKLIARKKDWDPKKYGGFDSPTVAYSVLVVAKVEKGKSKKLKSVKELLGITIMERSSFEKNPIDFLEAKGYKEVKKDLIIKLPKYSLFELENGRKRMLASAGELQKGNELALPSKYVNFLYLASHYEKLKGSPEDNEQKQLFVEQHKHYLDEIIEQISEFSKRVILADANLDKVLSAYNKHRDKPIREQAENIIHLFTLTNLGAPAAFKYFDTTIDRKRYTSTKEVLDATLIHQSITGLYETRIDLSQLGGDGGGGSGGGGSSGGVPWILKKPLELTIKLDLEEQQGTLLNNSILSKKGKEELKQLFEKYSALWQSWENQVGHRRIRPHKIATGTVKPTPQKQYHINPKAKPDIQIVINDLLKQGVLIQKESTMNTPVYPVPKPNGRWRMVLDYRAVNKVTPLIAVQNQHSYGILGSLFKGRYKTTIDLSNGFWAHPIVPEDYWITAFTWQGKQYCWTVLPQGFLNSPGLFTGDVVDLLQGIPNVEVYVDDVYISHDSEKEHLEYLDILFNRLKEAGYIISLKKSNIANSIVDFLGFQITNEGRGLTDTFKEKLENITAPTTLKQLQSILGLLNFARNFIPDFTELIAPLYALIPKSTKNYVPWQIEHSTTLETLITKLNGAEYLQGRKGDKTLIMKVNASYTTGYIRYYNEGEKKPISYVSIVFSKTELKFTELEKLLTTVHKGLLKALDLSMGQNIHVYSPIVSMQNIQKTPQTAKKALASRWLSWLSYLEDPRIRFFYDPQMPALKDLPAVDTGKDNKKHPSNFQHIFYTDGSAITSPTKEGHLNAGMGIVYFINKDGNLQKQQEWSISLGNHTAQFAEIAAFEFALKKCLPLGGNILVVTDSNYVAKAYNEELDVWASNGFVNNRKKPLKHISKWKSVADLKRLRPDVVVTHEPGHQKLDSSPHAYGNNLADQLATQASFKVHAGKRTADGSEFEKRTADGSEFESPKKKAKVE

SEQ ID NO: 6802 - protein, 2093 aa, synthetic construct
MPAAKRVKLDGGDKKYSIGLDIGTNSVGWAVITDEYKVPSKKFKVLGNTDRHSIKKNLIGALLFDSGETAEATRLKRTARRRYTRRKNRICYLQEIFSNEMAKVDDSFFHRLEESFLVEEDKKHERHPIFGNIVDEVAYHEKYPTIYHLRKKLVDSTDKADLRLIYLALAHMIKFRGHFLIEGDLNPDNSDVDKLFIQLVQTYNQLFEENPINASGVDAKAILSARLSKSRRLENLIAQLPGEKKNGLFGNLIALSLGLTPNFKSNFDLAEDAKLQLSKDTYDDDLDNLLAQIGDQYADLFLAAKNLSDAILLSDILRVNTEITKAPLSASMIKRYDEHHQDLTLLKALVRQQLPEKYKEIFFDQSKNGYAGYIDGGASQEEFYKFIKPILEKMDGTEELLVKLNREDLLRKQRTFDNGSIPHQIHLGELHAILRRQEDFYPFLKDNREKIEKILTFRIPYYVGPLARGNSRFAWMTRKSEETITPWNFEEVVDKGASAQSFIERMTNFDKNLPNEKVLPKHSLLYEYFTVYNELTKVKYVTEGMRKPAFLSGEQKKAIVDLLFKTNRKVTVKQLKEDYFKKIECFDSVEISGVEDRFNASLGTYHDLLKIIKDKDFLDNEENEDILEDIVLTLTLFEDREMIEERLKTYAHLFDDKVMKQLKRRRYTGWGRLSRKLINGIRDKQSGKTILDFLKSDGFANRNFMQLIHDDSLTFKEDIQKAQVSGQGDSLHEHIANLAGSPAIKKGILQTVKVVDELVKVMGRHKPENIVIEMARENQTTQKGQKNSRERMKRIEEGIKELGSQILKEHPVENTQLQNEKLYLYYLQNGRDMYVDQELDINRLSDYDVDHIVPQSFLKDDSIDNKVLTRSDKARGKSDNVPSEEVVKKMKNYWRQLLNAKLITQRKFDNLTKAERGGLSELDKAGFIKRQLVETRQITKHVAQILDSRMNTKYDENDKLIREVKVITLKSKLVSDFRKDFQFYKVREINNYHHAHDAYLNAVVGTALIKKYPKLESEFVYGDYKVYDVRKMIAKSEQEIGKATAKYFFYSNIMNFFKTEITLANGEIRKRPLIETNGETGEIVWDKGRDFATVRKVLSMPQVNIVKKTEVQTGGFSKESILPKRNSDKLIARKKDWDPKKYGGFDSPTVAYSVLVVAKVEKGKSKKLKSVKELLGITIMERSSFEKNPIDFLEAKGYKEVKKDLIIKLPKYSLFELENGRKRMLASAGELQKGNELALPSKYVNFLYLASHYEKLKGSPEDNEQKQLFVEQHKHYLDEIIEQISEFSKRVILADANLDKVLSAYNKHRDKPIREQAENIIHLFTLTNLGAPAAFKYFDTTIDRKRYTSTKEVLDATLIHQSITGLYETRIDLSQLGGDGGGGSGGGGSSGGTLQLEEEYRLFEPESTQKQEMDIWLKNFPQAWAETGGMGTAHCQAPVLIQLKATATPISIRQYPMPHEAYQGIKPHIRRMLDQGILKPCQSPWNTPLLPVKKPGTEDYRPVQDLREVNKRVEDIHPTVPNPYNLLSTLPPSHPWYTVLDLKDAFFCLRLHSESQLLFAFEWRDPEIGLSGQLTWTRLPQGFKNSPTLFNEALHSDLADFRVRYPALVLLQYVDDLLLAAATRTECLEGTKALLETLGNKGYRASAKKAQICLQEVTYLGYSLKDGQRWLTKARKEAILSIPVPKNSRQVREFLGTAGYCRLWIPGFAELAAPLYPLTRPGTLFQWGTEQQLAFEDIKKALLSSPALGLPDITKPFELFIDENSGFAKGVLVQKLGPWKRPVAYLSKKLDTVASGWPPCLRMVAAIAILVKDAGKLTLGQPLTILTSHPVEALVRQPPNKWLSNARMTHYQAMLLDAERVHFGPTVSLNPATLLPLPSGGNHHDCLQILAETHGTRPDLTDQPLPDADLTWYTDGSSFIRNGEREAGAAVTTESEVIWAAPLPPGTSAQRAELIALTQALKMAEGKKLTVYTDSRYAFATTHVHGEIYRRRGWLTSEGKEIKNKNEILALLEALFLPKRLSIIHCPGHQKGDSPQAKGNRLADDTAKKAATETHSSLTVLPAGKRTADGSEFEKRTADGSEFESPKKKAKVE

SEQ ID NO: 6803 - protein, 2125 aa, synthetic construct
MPAAKRVKLDGGDKKYSIGLDIGTNSVGWAVITDEYKVPSKKFKVLGNTDRHSIKKNLIGALLFDSGETAEATRLKRTARRRYTRRKNRICYLQEIFSNEMAKVDDSFFHRLEESFLVEEDKKHERHPIFGNIVDEVAYHEKYPTIYHLRKKLVDSTDKADLRLIYLALAHMIKFRGHFLIEGDLNPDNSDVDKLFIQLVQTYNQLFEENPINASGVDAKAILSARLSKSRRLENLIAQLPGEKKNGLFGNLIALSLGLTPNFKSNFDLAEDAKLQLSKDTYDDDLDNLLAQIGDQYADLFLAAKNLSDAILLSDILRVNTEITKAPLSASMIKRYDEHHQDLTLLKALVRQQLPEKYKEIFFDQSKNGYAGYIDGGASQEEFYKFIKPILEKMDGTEELLVKLNREDLLRKQRTFDNGSIPHQIHLGELHAILRRQEDFYPFLKDNREKIEKILTFRIPYYVGPLARGNSRFAWMTRKSEETITPWNFEEVVDKGASAQSFIERMTNFDKNLPNEKVLPKHSLLYEYFTVYNELTKVKYVTEGMRKPAFLSGEQKKAIVDLLFKTNRKVTVKQLKEDYFKKIECFDSVEISGVEDRFNASLGTYHDLLKIIKDKDFLDNEENEDILEDIVLTLTLFEDREMIEERLKTYAHLFDDKVMKQLKRRRYTGWGRLSRKLINGIRDKQSGKTILDFLKSDGFANRNFMQLIHDDSLTFKEDIQKAQVSGQGDSLHEHIANLAGSPAIKKGILQTVKVVDELVKVMGRHKPENIVIEMARENQTTQKGQKNSRERMKRIEEGIKELGSQILKEHPVENTQLQNEKLYLYYLQNGRDMYVDQELDINRLSDYDVDHIVPQSFLKDDSIDNKVLTRSDKARGKSDNVPSEEVVKKMKNYWRQLLNAKLITQRKFDNLTKAERGGLSELDKAGFIKRQLVETRQITKHVAQILDSRMNTKYDENDKLIREVKVITLKSKLVSDFRKDFQFYKVREINNYHHAHDAYLNAVVGTALIKKYPKLESEFVYGDYKVYDVRKMIAKSEQEIGKATAKYFFYSNIMNFFKTEITLANGEIRKRPLIETNGETGEIVWDKGRDFATVRKVLSMPQVNIVKKTEVQTGGFSKESILPKRNSDKLIARKKDWDPKKYGGFDSPTVAYSVLVVAKVEKGKSKKLKSVKELLGITIMERSSFEKNPIDFLEAKGYKEVKKDLIIKLPKYSLFELENGRKRMLASAGELQKGNELALPSKYVNFLYLASHYEKLKGSPEDNEQKQLFVEQHKHYLDEIIEQISEFSKRVILADANLDKVLSAYNKHRDKPIREQAENIIHLFTLTNLGAPAAFKYFDTTIDRKRYTSTKEVLDATLIHQSITGLYETRIDLSQLGGDGGGGSGGGGSSGGLLGRDLLTKLKAQIQFSTEGPQVTWEDRPAMCLVLNLEEEYRLHEKPVPPSIDPSWLQLFPMVWAEKAGMGLANQVPPVVVELKSDASPVAVRQYPMSKEAREGIRPHIQRFLDLGILVPCQSPWNTPLLPVKKPGTNDYRPVQDLREVNKRVQDIHPTVPNPYNLLSSLPPSHTWYSVLDLKDAFFCLKLHPNSQPLFAFEWRDPEKGNTGQLTWTRLPQGFKNSPTLFNEALHRDLASFRALNPQVVMLQYVDDLLVAAPTYRDCKEGTRRLLQELSKLGYRVSAKKAQLCREEVTYLGYLLKGGKRWLTPARKATVMKIPTPTTPRQVREFLGTAGFCRLWIPGFASLAAPLYPLTRPKVPFTWTEAHQEAFGRIKEALLSAPALALPDLTKPFALYVDEKEGVARGVLTQTLGPWRRPVAYLSKKLDPVASGWPTCLKAIAAVALLLKDADKLTLGQNVLVIAPHNLESIVRQPPDRWMTNARMTHYQSLLLNERVSFAPPAILNPATLLPVESDDTPIHICSEILAEETGTRPDLRDQPLPGVPAWYTDGSSFIMDGRRQAGAAIVDNKRTVWASNLPEGTSAQKAELIALTQALRLAEGKSINIYTDSRYAFATAHVHGAIYKQRGWLTSAGKDIKNKEEILALLEAIHLPKRVAIIHCPGHQRGTDPVATGNRKADEAAKQAAQSTRILTETTKNAGKRTADGSEFEKRTADGSEFESPKKKAKVE

SEQ ID NO: 6804 - protein, 2125 aa, synthetic construct
MPAAKRVKLDGGDKKYSIGLDIGTNSVGWAVITDEYKVPSKKFKVLGNTDRHSIKKNLIGALLFDSGETAEATRLKRTARRRYTRRKNRICYLQEIFSNEMAKVDDSFFHRLEESFLVEEDKKHERHPIFGNIVDEVAYHEKYPTIYHLRKKLVDSTDKADLRLIYLALAHMIKFRGHFLIEGDLNPDNSDVDKLFIQLVQTYNQLFEENPINASGVDAKAILSARLSKSRRLENLIAQLPGEKKNGLFGNLIALSLGLTPNFKSNFDLAEDAKLQLSKDTYDDDLDNLLAQIGDQYADLFLAAKNLSDAILLSDILRVNTEITKAPLSASMIKRYDEHHQDLTLLKALVRQQLPEKYKEIFFDQSKNGYAGYIDGGASQEEFYKFIKPILEKMDGTEELLVKLNREDLLRKQRTFDNGSIPHQIHLGELHAILRRQEDFYPFLKDNREKIEKILTFRIPYYVGPLARGNSRFAWMTRKSEETITPWNFEEVVDKGASAQSFIERMTNFDKNLPNEKVLPKHSLLYEYFTVYNELTKVKYVTEGMRKPAFLSGEQKKAIVDLLFKTNRKVTVKQLKEDYFKKIECFDSVEISGVEDRFNASLGTYHDLLKIIKDKDFLDNEENEDILEDIVLTLTLFEDREMIEERLKTYAHLFDDKVMKQLKRRRYTGWGRLSRKLINGIRDKQSGKTILDFLKSDGFANRNFMQLIHDDSLTFKEDIQKAQVSGQGDSLHEHIANLAGSPAIKKGILQTVKVVDELVKVMGRHKPENIVIEMARENQTTQKGQKNSRERMKRIEEGIKELGSQILKEHPVENTQLQNEKLYLYYLQNGRDMYVDQELDINRLSDYDVDHIVPQSFLKDDSIDNKVLTRSDKARGKSDNVPSEEVVKKMKNYWRQLLNAKLITQRKFDNLTKAERGGLSELDKAGFIKRQLVETRQITKHVAQILDSRMNTKYDENDKLIREVKVITLKSKLVSDFRKDFQFYKVREINNYHHAHDAYLNAVVGTALIKKYPKLESEFVYGDYKVYDVRKMIAKSEQEIGKATAKYFFYSNIMNFFKTEITLANGEIRKRPLIETNGETGEIVWDKGRDFATVRKVLSMPQVNIVKKTEVQTGGFSKESILPKRNSDKLIARKKDWDPKKYGGFDSPTVAYSVLVVAKVEKGKSKKLKSVKELLGITIMERSSFEKNPIDFLEAKGYKEVKKDLIIKLPKYSLFELENGRKRMLASAGELQKGNELALPSKYVNFLYLASHYEKLKGSPEDNEQKQLFVEQHKHYLDEIIEQISEFSKRVILADANLDKVLSAYNKHRDKPIREQAENIIHLFTLTNLGAPAAFKYFDTTIDRKRYTSTKEVLDATLIHQSITGLYETRIDLSQLGGDGGGGSGGGGSSGGLLGRDLLTKLKAQIQFSTEGPQVTWEDRPAMCLVLNLEEEYRLHEKPVPPSIDPSWLQLFPMVWAEKAGMGLANQVPPVVVELKSDASPVAVRQYPMSKEAREGIRPHIQRFLDLGILVPCQSPWNTPLLPVKKPGTNDYRPVQDLREVNKRVQDIHPTVPNPYNLLSSLPPSHTWYSVLDLKDAFFCLKLHPNSQPLFAFEWRDPEKGNTGQLTWTRLPQGFKNSPTLFNEALHRDLASFRALNPQVVMLQYVDDLLVAAPTYRDCKEGTRRLLQELSKLGYRVSAKKAQLCREEVTYLGYLLKGGKRWLTPARKATVMKIPTPTTPRQVREFLGKAGFCRLFIPGFASLAAPLYPLTRPKVPFTWTEAHQEAFGRIKEALLSAPALALPDLTKPFALYVDEKEGVARGVLTQTLGPWRRPVAYLSKKLDPVASGWPTCLKAIAAVALLLKDADKLTLGQNVLVIAPHNLESIVRQPPDRWMTNARMTHYQSLLLNERVSFAPPAILNPATLLPVESDDTPIHICSEILAEETGTRPDLRDQPLPGVPAWYTDGSSFIMDGRRQAGAAIVDNKRTVWASNLPEGTSAQKAELIALTQALRLAEGKSINIYTDSRYAFATAHVHGAIYKQRGWLTSAGKDIKNKEEILALLEAIHLPKRVAIIHCPGHQRGTDPVATGNRKADEAAKQAAQSTRILTETTKNAGKRTADGSEFEKRTADGSEFESPKKKAKVE

SEQ ID NO: 6805 - protein, 2094 aa, synthetic construct
MPAAKRVKLDGGDKKYSIGLDIGTNSVGWAVITDEYKVPSKKFKVLGNTDRHSIKKNLIGALLFDSGETAEATRLKRTARRRYTRRKNRICYLQEIFSNEMAKVDDSFFHRLEESFLVEEDKKHERHPIFGNIVDEVAYHEKYPTIYHLRKKLVDSTDKADLRLIYLALAHMIKFRGHFLIEGDLNPDNSDVDKLFIQLVQTYNQLFEENPINASGVDAKAILSARLSKSRRLENLIAQLPGEKKNGLFGNLIALSLGLTPNFKSNFDLAEDAKLQLSKDTYDDDLDNLLAQIGDQYADLFLAAKNLSDAILLSDILRVNTEITKAPLSASMIKRYDEHHQDLTLLKALVRQQLPEKYKEIFFDQSKNGYAGYIDGGASQEEFYKFIKPILEKMDGTEELLVKLNREDLLRKQRTFDNGSIPHQIHLGELHAILRRQEDFYPFLKDNREKIEKILTFRIPYYVGPLARGNSRFAWMTRKSEETITPWNFEEVVDKGASAQSFIERMTNFDKNLPNEKVLPKHSLLYEYFTVYNELTKVKYVTEGMRKPAFLSGEQKKAIVDLLFKTNRKVTVKQLKEDYFKKIECFDSVEISGVEDRFNASLGTYHDLLKIIKDKDFLDNEENEDILEDIVLTLTLFEDREMIEERLKTYAHLFDDKVMKQLKRRRYTGWGRLSRKLINGIRDKQSGKTILDFLKSDGFANRNFMQLIHDDSLTFKEDIQKAQVSGQGDSLHEHIANLAGSPAIKKGILQTVKVVDELVKVMGRHKPENIVIEMARENQTTQKGQKNSRERMKRIEEGIKELGSQILKEHPVENTQLQNEKLYLYYLQNGRDMYVDQELDINRLSDYDVDHIVPQSFLKDDSIDNKVLTRSDKARGKSDNVPSEEVVKKMKNYWRQLLNAKLITQRKFDNLTKAERGGLSELDKAGFIKRQLVETRQITKHVAQILDSRMNTKYDENDKLIREVKVITLKSKLVSDFRKDFQFYKVREINNYHHAHDAYLNAVVGTALIKKYPKLESEFVYGDYKVYDVRKMIAKSEQEIGKATAKYFFYSNIMNFFKTEITLANGEIRKRPLIETNGETGEIVWDKGRDFATVRKVLSMPQVNIVKKTEVQTGGFSKESILPKRNSDKLIARKKDWDPKKYGGFDSPTVAYSVLVVAKVEKGKSKKLKSVKELLGITIMERSSFEKNPIDFLEAKGYKEVKKDLIIKLPKYSLFELENGRKRMLASAGELQKGNELALPSKYVNFLYLASHYEKLKGSPEDNEQKQLFVEQHKHYLDEIIEQISEFSKRVILADANLDKVLSAYNKHRDKPIREQAENIIHLFTLTNLGAPAAFKYFDTTIDRKRYTSTKEVLDATLIHQSITGLYETRIDLSQLGGDGGGGSGGGGSSGGTLNLEDEYRLYETSAEPEVSPGSTWLSDFPQAWAETGGMGLAVRQAPLIIPLKATSTPVSIKQYPMSQEAKLGIKPHIQRLLDQGILVPCQSPWNTPLLPVKKPGTNDYRPVQDLREVNKRVEDIHPTVPNPYNLLSGLPPSHRWYTVLDLKDAFFCLRLHPTSQPLFAFEWRDPGMGISGQLTWTRLPQGFKNSPTLFNEALHRDLADFRIQHPDLILLQYVDDILLAATSELDCQQGTRALLLTLGNLGYRASAKKAQLCQKQVKYLGYLLKEGQRWLTEARKETVMGQPTPKTPRQLREFLGKAGFCRLFIPGFAEMAAPLYPLTKPGTLFNWGPDQQKAYQEIKQALLTAPALGLPDLTKPFELFVDEKQGYAKGVLTQKLGPWRRPVAYLSKKLDPVAAGWPPCLRMVAAIAVLRKDAGKLTMGQPLVILAPHAVEALVKQPPDRWLSNARMTHYQAMLLDTDRVQFGPVVALNPATLLPLPEEGAPHDCLEILAETHGTRPDLTDQPIPDADHTWYTDGSSFLQEGQRKAGAAVTTETEVIWARALPAGTSAQRAELIALTQALKMAEGKRLNVYTDSRYAFATAHIHGEIYRRRGWLTSEGREIKNKSEILALLKALFLPKRLSIIHCLGHQKGDSAEARGNRLADQAAREAAIKTPPDTSTLLAGKRTADGSEFEKRTADGSEFESPKKKAKVE

SEQ ID NO: 6806 - protein, 2094 aa, synthetic construct
MPAAKRVKLDGGDKKYSIGLDIGTNSVGWAVITDEYKVPSKKFKVLGNTDRHSIKKNLIGALLFDSGETAEATRLKRTARRRYTRRKNRICYLQEIFSNEMAKVDDSFFHRLEESFLVEEDKKHERHPIFGNIVDEVAYHEKYPTIYHLRKKLVDSTDKADLRLIYLALAHMIKFRGHFLIEGDLNPDNSDVDKLFIQLVQTYNQLFEENPINASGVDAKAILSARLSKSRRLENLIAQLPGEKKNGLFGNLIALSLGLTPNFKSNFDLAEDAKLQLSKDTYDDDLDNLLAQIGDQYADLFLAAKNLSDAILLSDILRVNTEITKAPLSASMIKRYDEHHQDLTLLKALVRQQLPEKYKEIFFDQSKNGYAGYIDGGASQEEFYKFIKPILEKMDGTEELLVKLNREDLLRKQRTFDNGSIPHQIHLGELHAILRRQEDFYPFLKDNREKIEKILTFRIPYYVGPLARGNSRFAWMTRKSEETITPWNFEEVVDKGASAQSFIERMTNFDKNLPNEKVLPKHSLLYEYFTVYNELTKVKYVTEGMRKPAFLSGEQKKAIVDLLFKTNRKVTVKQLKEDYFKKIECFDSVEISGVEDRFNASLGTYHDLLKIIKDKDFLDNEENEDILEDIVLTLTLFEDREMIEERLKTYAHLFDDKVMKQLKRRRYTGWGRLSRKLINGIRDKQSGKTILDFLKSDGFANRNFMQLIHDDSLTFKEDIQKAQVSGQGDSLHEHIANLAGSPAIKKGILQTVKVVDELVKVMGRHKPENIVIEMARENQTTQKGQKNSRERMKRIEEGIKELGSQILKEHPVENTQLQNEKLYLYYLQNGRDMYVDQELDINRLSDYDVDHIVPQSFLKDDSIDNKVLTRSDKARGKSDNVPSEEVVKKMKNYWRQLLNAKLITQRKFDNLTKAERGGLSELDKAGFIKRQLVETRQITKHVAQILDSRMNTKYDENDKLIREVKVITLKSKLVSDFRKDFQFYKVREINNYHHAHDAYLNAVVGTALIKKYPKLESEFVYGDYKVYDVRKMIAKSEQEIGKATAKYFFYSNIMNFFKTEITLANGEIRKRPLIETNGETGEIVWDKGRDFATVRKVLSMPQVNIVKKTEVQTGGFSKESILPKRNSDKLIARKKDWDPKKYGGFDSPTVAYSVLVVAKVEKGKSKKLKSVKELLGITIMERSSFEKNPIDFLEAKGYKEVKKDLIIKLPKYSLFELENGRKRMLASAGELQKGNELALPSKYVNFLYLASHYEKLKGSPEDNEQKQLFVEQHKHYLDEIIEQISEFSKRVILADANLDKVLSAYNKHRDKPIREQAENIIHLFTLTNLGAPAAFKYFDTTIDRKRYTSTKEVLDATLIHQSITGLYETRIDLSQLGGDGGGGSGGGGSSGGTLGIEDEYRLHETSTEPDVSLGSTWLSDFPQAWAETGGMGLAVRQAPLIIPLKATSTPVSIQQYPMSHEARLGIKPHIQRLLDQGILVPCQSPWNTPLLPVKKPGTNDYRPVQDLREVNKRVEDIHPTVPNPYNLLSGLPPSHQWYTVLDLKDAFFCLRLHPTSQPLFAFEWRDPGMGISGQLTWTRLPQGFKNSPTLFNEALHRDLADFRIQHPDLILLQYVDDILLAATSELDCQQGTRALLQTLGDLGYRASAKKAQICQKQVKYLGYLLREGQRWLTEARKETVMGQPVPKTPRQLREFLGTAGFCRLWIPGFAEMAAPLYPLTKPGTLFSWGPDQQKAYQEIKQALLTAPALGLPDLTKPFELFVDEKQGYAKGVLTQKLGPWRRPVAYLSKKLDPVAAGWPPCLRMVAAIAVLTKDAGKLTMGQPLVILAPHAVEALVKQPPDRWLSNARMTHYQAMLLDTDRVQFGPVVALNPATLLPLPEEGAPHDCLEILAETHGTRPDLTDQPIPDADHTWYTDGSSFLQEGQRKAGAAVTTETEVIWAGALPAGTSAQRAELIALTQALKMAEGKRLNVYTDSRYAFATAHIHGEIYRRRGWLTSEGREIKNKSEILALLKALFLPKRLSIIHCLGHQKGDSAEARGNRLADQAAREAAIKTPPDTSTLLAGKRTADGSEFEKRTADGSEFESPKKKAKVE

SEQ ID NO: 6807 - protein, 2094 aa, synthetic construct; identical to SEQ ID NO: 6806

SEQ ID NO: 6808 - protein, 2094 aa, synthetic construct
MPAAKRVKLDGGDKKYSIGLDIGTNSVGWAVITDEYKVPSKKFKVLGNTDRHSIKKNLIGALLFDSGETAEATRLKRTARRRYTRRKNRICYLQEIFSNEMAKVDDSFFHRLEESFLVEEDKKHERHPIFGNIVDEVAYHEKYPTIYHLRKKLVDSTDKADLRLIYLALAHMIKFRGHFLIEGDLNPDNSDVDKLFIQLVQTYNQLFEENPINASGVDAKAILSARLSKSRRLENLIAQLPGEKKNGLFGNLIALSLGLTPNFKSNFDLAEDAKLQLSKDTYDDDLDNLLAQIGDQYADLFLAAKNLSDAILLSDILRVNTEITKAPLSASMIKRYDEHHQDLTLLKALVRQQLPEKYKEIFFDQSKNGYAGYIDGGASQEEFYKFIKPILEKMDGTEELLVKLNREDLLRKQRTFDNGSIPHQIHLGELHAILRRQEDFYPFLKDNREKIEKILTFRIPYYVGPLARGNSRFAWMTRKSEETITPWNFEEVVDKGASAQSFIERMTNFDKNLPNEKVLPKHSLLYEYFTVYNELTKVKYVTEGMRKPAFLSGEQKKAIVDLLFKTNRKVTVKQLKEDYFKKIECFDSVEISGVEDRFNASLGTYHDLLKIIKDKDFLDNEENEDILEDIVLTLTLFEDREMIEERLKTYAHLFDDKVMKQLKRRRYTGWGRLSRKLINGIRDKQSGKTILDFLKSDGFANRNFMQLIHDDSLTFKEDIQKAQVSGQGDSLHEHIANLAGSPAIKKGILQTVKVVDELVKVMGRHKPENIVIEMARENQTTQKGQKNSRERMKRIEEGIKELGSQILKEHPVENTQLQNEKLYLYYLQNGRDMYVDQELDINRLSDYDVDHIVPQSFLKDDSIDNKVLTRSDKARGKSDNVPSEEVVKKMKNYWRQLLNAKLITQRKFDNLTKAERGGLSELDKAGFIKRQLVETRQITKHVAQILDSRMNTKYDENDKLIREVKVITLKSKLVSDFRKDFQFYKVREINNYHHAHDAYLNAVVGTALIKKYPKLESEFVYGDYKVYDVRKMIAKSEQEIGKATAKYFFYSNIMNFFKTEITLANGEIRKRPLIETNGETGEIVWDKGRDFATVRKVLSMPQVNIVKKTEVQTGGFSKESILPKRNSDKLIARKKDWDPKKYGGFDSPTVAYSVLVVAKVEKGKSKKLKSVKELLGITIMERSSFEKNPIDFLEAKGYKEVKKDLIIKLPKYSLFELENGRKRMLASAGELQKGNELALPSKYVNFLYLASHYEKLKGSPEDNEQKQLFVEQHKHYLDEIIEQISEFSKRVILADANLDKVLSAYNKHRDKPIREQAENIIHLFTLTNLGAPAAFKYFDTTIDRKRYTSTKEVLDATLIHQSITGLYETRIDLSQLGGDGGGGSGGGGSSGGTLNIEDEYRLHETSKEPDVSLGSTWLSDFPQAWAETGGMGLAVRQAPLIIPLKATSTPVSIKQYPMSQEARLGIKPHIQRLLDQGILVPCQSPWNTPLLPVKKPGTNDYRPVQDLREVNKRVEDIHPTVPNPYNLLSGLPPSHQWYTVLDLKDAFFCLRLHPTSQPLFAFEWRDPEMGISGQLTWTRLPQGFKNSPTLFNEALHRDLAGFRIQHPDLILLQYVDDLLLAATSELDCQQGTRALLQTLGDLGYRASAKKAQICQKQVKYLGYLLKEGQRWLTEARKETVMGQPIPKTPRQLREFLGTAGFCRLWIPGFAEMAAPLYPLTKPGTLFNWGPDQQKAFQEIKQALLTAPALGLPDLTKPFELFVDEKQGYAKGVLTQKLGPWRRPVAYLSKKLDPVAAGWPPCLRMVAAIAVLTKDAGKLTMGQPLVILAPHAVEALVKQPPDRWLSNARMTHYQALLLDTDRVQFGPVVALNPATLLPLPEEGLQHDCLDILAEAHGTRSDLMDQPLPDADHTWYTDGSSFLQEGQRKAGAAVTTETEVIWARALPAGTSAQRAELIALTQALKMAEGKKLNVYTDSRYAFATAHIHGEIYRRRGWLTSEGKEIKNKDEILALLKALFLPKRLSIIHCPGHQKGNSAEARGNRMADQAAREVATRETPETSTLLAGKRTADGSEFEKRTADGSEFESPKKKAKVE

SEQ ID NO: 6809 - protein, 2094 aa, synthetic construct
MPAAKRVKLDGGDKKYSIGLDIGTNSVGWAVITDEYKVPSKKFKVLGNTDRHSIKKNLIGALLFDSGETAEATRLKRTARRRYTRRKNRICYLQEIFSNEMAKVDDSFFHRLEESFLVEEDKKHERHPIFGNIVDEVAYHEKYPTIYHLRKKLVDSTDKADLRLIYLALAHMIKFRGHFLIEGDLNPDNSDVDKLFIQLVQTYNQLFEENPINASGVDAKAILSARLSKSRRLENLIAQLPGEKKNGLFGNLIALSLGLTPNFKSNFDLAEDAKLQLSKDTYDDDLDNLLAQIGDQYADLFLAAKNLSDAILLSDILRVNTEITKAPLSASMIKRYDEHHQDLTLLKALVRQQLPEKYKEIFFDQSKNGYAGYIDGGASQEEFYKFIKPILEKMDGTEELLVKLNREDLLRKQRTFDNGSIPHQIHLGELHAILRRQEDFYPFLKDNREKIEKILTFRIPYYVGPLARGNSRFAWMTRKSEETITPWNFEEVVDKGASAQSFIERMTNFDKNLPNEKVLPKHSLLYEYFTVYNELTKVKYVTEGMRKPAFLSGEQKKAIVDLLFKTNRKVTVKQLKEDYFKKIECFDSVEISGVEDRFNASLGTYHDLLKIIKDKDFLDNEENEDILEDIVLTLTLFEDREMIEERLKTYAHLFDDKVMKQLKRRRYTGWGRLSRKLINGIRDKQSGKTILDFLKSDGFANRNFMQLIHDDSLTFKEDIQKAQVSGQGDSLHEHIANLAGSPAIKKGILQTVKVVDELVKVMGRHKPENIVIEMARENQTTQKGQKNSRERMKRIEEGIKELGSQILKEHPVENTQLQNEKLYLYYLQNGRDMYVDQELDINRLSDYDVDHIVPQSFLKDDSIDNKVLTRSDKARGKSDNVPSEEVVKKMKNYWRQLLNAKLITQRKFDNLTKAERGGLSELDKAGFIKRQLVETRQITKHVAQILDSRMNTKYDENDKLIREVKVITLKSKLVSDFRKDFQFYKVREINNYHHAHDAYLNAVVGTALIKKYPKLESEFVYGDYKVYDVRKMIAKSEQEIGKATAKYFFYSNIMNFFKTEITLANGEIRKRPLIETNGETGEIVWDKGRDFATVRKVLSMPQVNIVKKTEVQTGGFSKESILPKRNSDKLIARKKDWDPKKYGGFDSPTVAYSVLVVAKVEKGKSKKLKSVKELLGITIMERSSFEKNPIDFLEAKGYKEVKKDLIIKLPKYSLFELENGRKRMLASAGELQKGNELALPSKYVNFLYLASHYEKLKGSPEDNEQKQLFVEQHKHYLDEIIEQISEFSKRVILADANLDKVLSAYNKHRDKPIREQAENIIHLFTLTNLGAPAAFKYFDTTIDRKRYTSTKEVLDATLIHQSITGLYETRIDLSQLGGDGGGGSGGGGSSGGTLNIEDEHRLHETSKEPDVSLGSTWLSDFPQAWAETGGMGLAVRQAPLIIPLKATSTPVSIKQYPMSQEARLGIKPHIQRLLDQGILVPCQSPWNTPLLPVKKPGTNDYRPVQDLREVNKRVEDIHPTVPNPYNLLSGLPPSHQWYTVLDLKDAFFCLRLHPTSQPLFAFEWRDPEMGISGQLTWTRLPQGFKNSPTLFNEALHRDLADFRIQHPDLILLQYVDDLLLAATSELDCQQGTRALLQTLGNLGYRASAKKAQICQKQVKYLGYLLKEGQRWLTEARKETVMGQPTPKTPRQLREFLGTAGFCRLWIPGFAEMAAPLYPLTKPGTLFNWGPDQQKAYQEIKQALLTAPALGLPDLTKPFELFVDEKQGYAKGVLTQKLGPWRRPVAYLSKKLDPVAAGWPPCLRMVAAIAVLTKDAGKLTMGQPLVILAPHAVEALVKQPPDRWLSNARMTHYQALLLDTDRVQFGPVVALNPATLLPLPEEGLQHNCLDILAEAHGTRPDLTDQPLPDADHTWYTDGSSLLQEGQRKAGAAVTTETEVIWAKALPAGTSAQRAELIALTQALKMAEGKKLNVYTDSRYAFATAHIHGEIYRRRGWLTSEGKEIKNKDEILALLKALFLPKRLSIIHCPGHQKGHSAEARGNRMADQAARKAAITETPDTSTLLAGKRTADGSEFEKRTADGSEFESPKKKAKVE

SEQ ID NO: 6810 - protein, 2088 aa, synthetic construct
MPAAKRVKLDGGDKKYSIGLDIGTNSVGWAVITDEYKVPSKKFKVLGNTDRHSIKKNLIGALLFDSGETAEATRLKRTARRRYTRRKNRICYLQEIFSNEMAKVDDSFFHRLEESFLVEEDKKHERHPIFGNIVDEVAYHEKYPTIYHLRKKLVDSTDKADLRLIYLALAHMIKFRGHFLIEGDLNPDNSDVDKLFIQLVQTYNQLFEENPINASGVDAKAILSARLSKSRRLENLIAQLPGEKKNGLFGNLIALSLGLTPNFKSNFDLAEDAKLQLSKDTYDDDLDNLLAQIGDQYADLFLAAKNLSDAILLSDILRVNTEITKAPLSASMIKRYDEHHQDLTLLKALVRQQLPEKYKEIFFDQSKNGYAGYIDGGASQEEFYKFIKPILEKMDGTEELLVKLNREDLLRKQRTFDNGSIPHQIHLGELHAILRRQEDFYPFLKDNREKIEKILTFRIPYYVGPLARGNSRFAWMTRKSEETITPWNFEEVVDKGASAQSFIERMTNFDKNLPNEKVLPKHSLLYEYFTVYNELTKVKYVTEGMRKPAFLSGEQKKAIVDLLFKTNRKVTVKQLKEDYFKKIECFDSVEISGVEDRFNASLGTYHDLLKIIKDKDFLDNEENEDILEDIVLTLTLFEDREMIEERLKTYAHLFDDKVMKQLKRRRYTGWGRLSRKLINGIRDKQSGKTILDFLKSDGFANRNFMQLIHDDSLTFKEDIQKAQVSGQGDSLHEHIANLAGSPAIKKGILQTVKVVDELVKVMGRHKPENIVIEMARENQTTQKGQKNSRERMKRIEEGIKELGSQILKEHPVENTQLQNEKLYLYYLQNGRDMYVDQELDINRLSDYDVDHIVPQSFLKDDSIDNKVLTRSDKARGKSDNVPSEEVVKKMKNYWRQLLNAKLITQRKFDNLTKAERGGLSELDKAGFIKRQLVETRQITKHVAQILDSRMNTKYDENDKLIREVKVITLKSKLVSDFRKDFQFYKVREINNYHHAHDAYLNAVVGTALIKKYPKLESEFVYGDYKVYDVRKMIAKSEQEIGKATAKYFFYSNIMNFFKTEITLANGEIRKRPLIETNGETGEIVWDKGRDFATVRKVLSMPQVNIVKKTEVQTGGFSKESILPKRNSDKLIARKKDWDPKKYGGFDSPTVAYSVLVVAKVEKGKSKKLKSVKELLGITIMERSSFEKNPIDFLEAKGYKEVKKDLIIKLPKYSLFELENGRKRMLASAGELQKGNELALPSKYVNFLYLASHYEKLKGSPEDNEQKQLFVEQHKHYLDEIIEQISEFSKRVILADANLDKVLSAYNKHRDKPIREQAENIIHLFTLTNLGAPAAFKYFDTTIDRKRYTSTKEVLDATLIHQSITGLYETRIDLSQLGGDGGGGSGGGGSSGGTLQLDDEYRLYSPLVKPDQNIQFWLEQFPQAWAETAGMGLAKQVPPQVIQLKASATPVSVRQYPLSKEAQEGIRPHVQRLIQQGILVPVQSPWNTPLLPVRKPGTNDYRPVQDLREVNKRVQDIHPTVPNPYNLLCALPPQRSWYTVLDLKDAFFCLRLHPTSQPLFAFEWRDPGTGRTGQLTWTRLPQGFKNSPTIFDEALHRDLANFRIQHPQVTLLQYVDDLLLAGATKQDCLEGTKALLLELSDLGYRASAKKAQICRREVTYLGYSLRDGQRWLTEARKKTVVQIPAPTTAKQVREFLGTAGFCRLWIPGFATLAAPLYPLTKEKGEFSWAPEHQKAFDAIKKALLSAPALALPDVTKPFTLYVDERKGVARGVLTQTLGPWRRPVAYLSKKLDPVASGWPVCLKAIAAVAILVKDADKLTLGQNITVIAPHALENIVRQPPDRWMTNARMTHYQSLLLTERVTFAPPAALNPATLLPEETDEPVTHDCHQLLIEETGVRKDLTDIPLTGEVLTWFTDGSSYVVEGKRMAGAAVVDGTRTIWASSLPEGTSAQKAELMALTQALRLAEGKSINIYTDSRYAFATAHVHGAIYKQRGLLTSAGREIKNKEEILSLLEALHLPKRLAIIHCPGHQKAKDPISRGNQMADRVAKQAAQGVNLLAGKRTADGSEFEKRTADGSEFESPKKKAKVE

SEQ ID NO: 6811 - protein, 2088 aa, synthetic construct; identical to SEQ ID NO: 6810

SEQ ID NO: 6812 - protein, 2174 aa, synthetic construct
MPAAKRVKLDGGDKKYSIGLDIGTNSVGWAVITDEYKVPSKKFKVLGNTDRHSIKKNLIGALLFDSGETAEATRLKRTARRRYTRRKNRICYLQEIFSNEMAKVDDSFFHRLEESFLVEEDKKHERHPIFGNIVDEVAYHEKYPTIYHLRKKLVDSTDKADLRLIYLALAHMIKFRGHFLIEGDLNPDNSDVDKLFIQLVQTYNQLFEENPINASGVDAKAILSARLSKSRRLENLIAQLPGEKKNGLFGNLIALSLGLTPNFKSNFDLAEDAKLQLSKDTYDDDLDNLLAQIGDQYADLFLAAKNLSDAILLSDILRVNTEITKAPLSASMIKRYDEHHQDLTLLKALVRQQLPEKYKEIFFDQSKNGYAGYIDGGASQEEFYKFIKPILEKMDGTEELLVKLNREDLLRKQRTFDNGSIPHQIHLGELHAILRRQEDFYPFLKDNREKIEKILTFRIPYYVGPLARGNSRFAWMTRKSEETITPWNFEEVVDKGASAQSFIERMTNFDKNLPNEKVLPKHSLLYEYFTVYNELTKVKYVTEGMRKPAFLSGEQKKAIVDLLFKTNRKVTVKQLKEDYFKKIECFDSVEISGVEDRFNASLGTYHDLLKIIKDKDFLDNEENEDILEDIVLTLTLFEDREMIEERLKTYAHLFDDKVMKQLKRRRYTGWGRLSRKLINGIRDKQSGKTILDFLKSDGFANRNFMQLIHDDSLTFKEDIQKAQVSGQGDSLHEHIANLAGSPAIKKGILQTVKVVDELVKVMGRHKPENIVIEMARENQTTQKGQKNSRERMKRIEEGIKELGSQILKEHPVENTQLQNEKLYLYYLQNGRDMYVDQELDINRLSDYDVDHIVPQSFLKDDSIDNKVLTRSDKARGKSDNVPSEEVVKKMKNYWRQLLNAKLITQRKFDNLTKAERGGLSELDKAGFIKRQLVETRQITKHVAQILDSRMNTKYDENDKLIREVKVITLKSKLVSDFRKDFQFYKVREINNYHHAHDAYLNAVVGTALIKKYPKLESEFVYGDYKVYDVRKMIAKSEQEIGKATAKYFFYSNIMNFFKTEITLANGEIRKRPLIETNGETGEIVWDKGRDFATVRKVLSMPQVNIVKKTEVQTGGFSKESILPKRNSDKLIARKKDWDPKKYGGFDSPTVAYSVLVVAKVEKGKSKKLKSVKELLGITIMERSSFEKNPIDFLEAKGYKEVKKDLIIKLPKYSLFELENGRKRMLASAGELQKGNELALPSKYVNFLYLASHYEKLKGSPEDNEQKQLFVEQHKHYLDEIIEQISEFSKRVILADANLDKVLSAYNKHRDKPIREQAENIIHLFTLTNLGAPAAFKYFDTTIDRKRYTSTKEVLDATLIHQSITGLYETRIDLSQLGGDGGGGSGGGGSSGGMDPLQLLQPLEAEIKGTKLKAHWNSGATITCVPEAFLEDERPIQTMLIKTIHGEKQQDVYYLTFKVQGRKVEAEVLASPYDYILLNPSDVPWLMKKPLQLTVLVPLHEYQERLLQQTALPKEQKELLQKLFLKYDALWQHWENQVGHRRIKPHNIATGTLAPRPQKQYPINPKAKPSIQIVIDDLLKQGVLIQQNSTMNTPVYPVPKPDGKWRMVLDYREVNKTIPLIAAQNQHSAGILSSIYRGKYKTTLDLTNGFWAHPITPESYWLTAFTWQGKQYCWTRLPQGFLNSPALFTADVVDLLKEIPNVQAYVDDIYISHDDPQEHLEQLEKIFSILLNAGYVVSLKKSEIAQREVEFLGFNITKEGRGLTDTFKQKLLNITPPKDLKQLQSILGLLNFARNFIPNYSELVKPLYTIVANANGKFISWTEDNSNQLQHIISVLNQADNLEERNPETRLIIKVNSSPSAGYIRYYNEGSKRPIMYVNYIFSKAEAKFTQTEKLLTTMHKGLIKAMDLAMGQEILVYSPIVSMTKIQRTPLPERKALPVRWITWMTYLEDPRIQFHYDKSLPELQQIPNVTEDVIAKTKHPSEFAMVFYTDGSAIKHPDVNKSHSAGMGIAQVQFIPEYKIVHQWSIPLGDHTAQLAEIAAVEFACKKALKISGPVLIVTDSFYVAESANKELPYWKSNGFLNNKKKPLRHVSKWKSIAECLQLKPDIIIMHEKGHQQPMTTLHTEGNNLADKLATQGSYVVHAGKRTADGSEFEKRTADGSEFESPKKKAKVE

SEQ ID NO: 6813 - protein, 2085 aa, synthetic construct
MPAAKRVKLDGGDKKYSIGLDIGTNSVGWAVITDEYKVPSKKFKVLGNTDRHSIKKNLIGALLFDSGETAEATRLKRTARRRYTRRKNRICYLQEIFSNEMAKVDDSFFHRLEESFLVEEDKKHERHPIFGNIVDEVAYHEKYPTIYHLRKKLVDSTDKADLRLIYLALAHMIKFRGHFLIEGDLNPDNSDVDKLFIQLVQTYNQLFEENPINASGVDAKAILSARLSKSRRLENLIAQLPGEKKNGLFGNLIALSLGLTPNFKSNFDLAEDAKLQLSKDTYDDDLDNLLAQIGDQYADLFLAAKNLSDAILLSDILRVNTEITKAPLSASMIKRYDEHHQDLTLLKALVRQQLPEKYKEIFFDQSKNGYAGYIDGGASQEEFYKFIKPILEKMDGTEELLVKLNREDLLRKQRTFDNGSIPHQIHLGELHAILRRQEDFYPFLKDNREKIEKILTFRIPYYVGPLARGNSRFAWMTRKSEETITPWNFEEVVDKGASAQSFIERMTNFDKNLPNEKVLPKHSLLYEYFTVYNELTKVKYVTEGMRKPAFLSGEQKKAIVDLLFKTNRKVTVKQLKEDYFKKIECFDSVEISGVEDRFNASLGTYHDLLKIIKDKDFLDNEENEDILEDIVLTLTLFEDREMIEERLKTYAHLFDDKVMKQLKRRRYTGWGRLSRKLINGIRDKQSGKTILDFLKSDGFANRNFMQLIHDDSLTFKEDIQKAQVSGQGDSLHEHIANLAGSPAIKKGILQTVKVVDELVKVMGRHKPENIVIEMARENQTTQKGQKNSRERMKRIEEGIKELGSQILKEHPVENTQLQNEKLYLYYLQNGRDMYVDQELDINRLSDYDVDHIVPQSFLKDDSIDNKVLTRSDKARGKSDNVPSEEVVKKMKNYWRQLLNAKLITQRKFDNLTKAERGGLSELDKAGFIKRQLVETRQITKHVAQILDSRMNTKYDENDKLIREVKVITLKSKLVSDFRKDFQFYKVREINNYHHAHDAYLNAVVGTALIKKYPKLESEFVYGDYKVYDVRKMIAKSEQEIGKATAKYFFYSNIMNFFKTEITLANGEIRKRPLIETNGETGEIVWDKGRDFATVRKVLSMPQVNIVKKTEVQTGGFSKESILPKRNSDKLIARKKDWDPKKYGGFDSPTVAYSVLVVAKVEKGKSKKLKSVKELLGITIMERSSFEKNPIDFLEAKGYKEVKKDLIIKLPKYSLFELENGRKRMLASAGELQKGNELALPSKYVNFLYLASHYEKLKGSPEDNEQKQLFVEQHKHYLDEIIEQISEFSKRVILADANLDKVLSAYNKHRDKPIREQAENIIHLFTLTNLGAPAAFKYFDTTIDRKRYTSTKEVLDATLIHQSITGLYETRIDLSQLGGDGGGGSGGGGSSGGVPWLMKKPLQLTVLVPLHEYQERLLQQTALPKEQKELLQKLFLKYDALWQHWENQVGHRRIKPHNIATGTLAPRPQKQYPINPKAKPSIQIVIDDLLKQGVLIQQNSTMNTPVYPVPKPDGKWRMVLDYREVNKTIPLIAAQNQHSAGILSSIYRGKYKTTLDLTNGFWAHPITPESYWLTAFTWQGKQYCWTRLPQGFLNSPALFTADVVDLLKEIPNVQAYVDDIYISHDDPQEHLEQLEKIFSILLNAGYVVSLKKSEIAQREVEFLGFNITKEGRGLTDTFKQKLLNITPPKDLKQLQSILGLLNFARNFIPNYSELVKPLYTIVANANGKFISWTEDNSNQLQHIISVLNQADNLEERNPETRLIIKVNSSPSAGYIRYYNEGSKRPIMYVNYIFSKAEAKFTQTEKLLTTMHKGLIKAMDLAMGQEILVYSPIVSMTKIQRTPLPERKALPVRWITWMTYLEDPRIQFHYDKSLPELQQIPNVTEDVIAKTKHPSEFAMVFYTDGSAIKHPDVNKSHSAGMGIAQVQFIPEYKIVHQWSIPLGDHTAQLAEIAAVEFACKKALKISGPVLIVTDSFYVAESANKELPYWKSNGFLNNKKKPLRHVSKWKSIAECLQLKPDIIIMHEKGHQQPMTTLHTEGNNLADKLATQGSYVVHAGKRTADGSEFEKRTADGSEFESPKKKAKVE

SEQ ID NO: 6814 - protein, 2085 aa, synthetic construct
MPAAKRVKLDGGDKKYSIGLDIGTNSVGWAVITDEYKVPSKKFKVLGNTDRHSIKKNLIGALLFDSGETAEATRLKRTARRRYTRRKNRICYLQEIFSNEMAKVDDSFFHRLEESFLVEEDKKHERHPIFGNIVDEVAYHEKYPTIYHLRKKLVDSTDKADLRLIYLALAHMIKFRGHFLIEGDLNPDNSDVDKLFIQLVQTYNQLFEENPINASGVDAKAILSARLSKSRRLENLIAQLPGEKKNGLFGNLIALSLGLTPNFKSNFDLAEDAKLQLSKDTYDDDLDNLLAQIGDQYADLFLAAKNLSDAILLSDILRVNTEITKAPLSASMIKRYDEHHQDLTLLKALVRQQLPEKYKEIFFDQSKNGYAGYIDGGASQEEFYKFIKPILEKMDGTEELLVKLNREDLLRKQRTFDNGSIPHQIHLGELHAILRRQEDFYPFLKDNREKIEKILTFRIPYYVGPLARGNSRFAWMTRKSEETITPWNFEEVVDKGASAQSFIERMTNFDKNLPNEKVLPKHSLLYEYFTVYNELTKVKYVTEGMRKPAFLSGEQKKAIVDLLFKTNRKVTVKQLKEDYFKKIECFDSVEISGVEDRFNASLGTYHDLLKIIKDKDFLDNEENEDILEDIVLTLTLFEDREMIEERLKTYAHLFDDKVMKQLKRRRYTGWGRLSRKLINGIRDKQSGKTILDFLKSDGFANRNFMQLIHDDSLTFKEDIQKAQVSGQGDSLHEHIANLAGSPAIKKGILQTVKVVDELVKVMGRHKPENIVIEMARENQTTQKGQKNSRERMKRIEEGIKELGSQILKEHPVENTQLQNEKLYLYYLQNGRDMYVDQELDINRLSDYDVDHIVPQSFLKDDSIDNKVLTRSDKARGKSDNVPSEEVVKKMKNYWRQLLNAKLITQRKFDNLTKAERGGLSELDKAGFIKRQLVETRQITKHVAQILDSRMNTKYDENDKLIREVKVITLKSKLVSDFRKDFQFYKVREINNYHHAHDAYLNAVVGTALIKKYPKLESEFVYGDYKVYDVRKMIAKSEQEIGKATAKYFFYSNIMNFFKTEITLANGEIRKRPLIETNGETGEIVWDKGRDFATVRKVLSMPQVNIVKKTEVQTGGFSKESILPKRNSDKLIARKKDWDPKKYGGFDSPTVAYSVLVVAKVEKGKSKKLKSVKELLGITIMERSSFEKNPIDFLEAKGYKEVKKDLIIKLPKYSLFELENGRKRMLASAGELQKGNELALPSKYVNFLYLASHYEKLKGSPEDNEQKQLFVEQHKHYLDEIIEQISEFSKRVILADANLDKVLSAYNKHRDKPIREQAENIIHLFTLTNLGAPAAFKYFDTTIDRKRYTSTKEVLDATLIHQSITGLYETRIDLSQLGGDGGGGSGGGGSSGGIPWLMKKPLQLTTLVPLQEYEERLLKQTMLTGSYKEKLQSLFLKYDALWQHWENQVGHRRIKPHHIATGTVNPRPQKQYPINPKAKASIQTVINDLLKQGVLIQQNSIMNTPVYPVPKPDGKWRMVLDYREVNKTIPLIAAQNQHSAGILSSIFRGKYKTTLDLSNGFWAHSITPESYWLTAFTWLGQQYCWTRLPQGFLNSPALFNADVVDLLKEVPNVQVYVDDIYISHDDPREHLEQLEKVFSLLLNAGYVVSLKKSEIAQHEVEFLGFNITKEGRGLTETFKQKLLNITPPRDLKQLQSILGKLNFARNFIPNFSELVKPLYNIIATAPGKYITWTTDNSQQLQNIISMLNSAENLEERNPEVRLIMKVNTSPSAGYIRFYNEFAKRPIMYLNYVYTKAEVKFTNTEKLLTTIHKGLIKALDLGMGQEILVYSPIVSMTKIQKTPLPERKALPIRWITWMSYLEDPRIQFHYDKTLPELQQVPTVTDDIIAKIKHPSEFSMVFYTDGSAIKHPNVNKSHNAGMGIAQVQFKPEFTVINTWSIPLGDHTAQLAEVAAVEFACKKALKIDGPVLIVTDSFYVAESVNKELPYWQSNGFFNNKKKPLKHVSKWKSIADCIQLKPDIIIIHEKGHQPTASTFHTEGNNLADKLATQGSYVVNAGKRTADGSEFEKRTADGSEFESPKKKAKVE

SEQ ID NO: 6815 - protein, 2094 aa, synthetic construct
MPAAKRVKLDGGDKKYSIGLDIGTNSVGWAVITDEYKVPSKKFKVLGNTDRHSIKKNLIGALLFDSGETAEATRLKRTARRRYTRRKNRICYLQEIFSNEMAKVDDSFFHRLEESFLVEEDKKHERHPIFGNIVDEVAYHEKYPTIYHLRKKLVDSTDKADLRLIYLALAHMIKFRGHFLIEGDLNPDNSDVDKLFIQLVQTYNQLFEENPINASGVDAKAILSARLSKSRRLENLIAQLPGEKKNGLFGNLIALSLGLTPNFKSNFDLAEDAKLQLSKDTYDDDLDNLLAQIGDQYADLFLAAKNLSDAILLSDILRVNTEITKAPLSASMIKRYDEHHQDLTLLKALVRQQLPEKYKEIFFDQSKNGYAGYIDGGASQEEFYKFIKPILEKMDGTEELLVKLNREDLLRKQRTFDNGSIPHQIHLGELHAILRRQEDFYPFLKDNREKIEKILTFRIPYYVGPLARGNSRFAWMTRKSEETITPWNFEEVVDKGASAQSFIERMTNFDKNLPNEKVLPKHSLLYEYFTVYNELTKVKYVTEGMRKPAFLSGEQKKAIVDLLFKTNRKVTVKQLKEDYFKKIECFDSVEISGVEDRFNASLGTYHDLLKIIKDKDFLDNEENEDILEDIVLTLTLFEDREMIEERLKTYAHLFDDKVMKQLKRRRYTGWGRLSRKLINGIRDKQSGKTILDFLKSDGFANRNFMQLIHDDSLTFKEDIQKAQVSGQGDSLHEHIANLAGSPAIKKGILQTVKVVDELVKVMGRHKPENIVIEMARENQTTQKGQKNSRERMKRIEEGIKELGSQILKEHPVENTQLQNEKLYLYYLQNGRDMYVDQELDINRLSDYDVDHIVPQSFLKDDSIDNKVLTRSDKARGKSDNVPSEEVVKKMKNYWRQLLNAKLITQRKFDNLTKAERGGLSELDKAGFIKRQLVETRQITKHVAQILDSRMNTKYDENDKLIREVKVITLKSKLVSDFRKDFQFYKVREINNYHHAHDAYLNAVVGTALIKKYPKLESEFVYGDYKVYDVRKMIAKSEQEIGKATAKYFFYSNIMNFFKTEITLANGEIRKRPLIETNGETGEIVWDKGRDFATVRKVLSMPQVNIVKKTEVQTGGFSKESILPKRNSDKLIARKKDWDPKKYGGFDSPTVAYSVLVVAKVEKGKSKKLKSVKELLGITIMERSSFEKNPIDFLEAKGYKEVKKDLIIKLPKYSLFELENGRKRMLASAGELQKGNELALPSKYVNFLYLASHYEKLKGSPEDNEQKQLFVEQHKHYLDEIIEQISEFSKRVILADANLDKVLSAYNKHRDKPIREQAENIIHLFTLTNLGAPAAFKYFDTTIDRKRYTSTKEVLDATLIHQSITGLYETRIDLSQLGGDGGGGSGGGGSSGGTLNIEDEYRLHETSKEPDVPLGSTWLSDFPQAWAETGGMGLAVRQAPLIIPLKATSTPVSIKQYPMSQEARLGIKPHIQRLLDQGILVPCQSPWNTPLLPVKKPGTNDYRPVQDLREVNKRVEDIHPTVPNPYNLLSGLPPSHQWYTVLDLKDAFFCLRLHPTSQPLFAFEWRDPEMGISGQLTWTRLPQGFKNSPTLFNEALHRDLADFRIQHPDLILLQYVDDLLLAATSEQDCQRGTRALLQTLGNLGYRASAKKAQICQKQVKYLGYLLKEGQRWLTEARKETVMGQPTPKTPRQLREFLGTAGFCRLWIPGFAEMAAPLYPLTKPGTLFNWGPDQQKAYQEIKQALLTAPALGLPDLTKPFELFVDEKQGYAKGVLTQKLGPWRRPVAYLSKKLDPVAAGWPPCLRMVAAIAVLTKDAGKLTMGQPLVILAPHAVEALVKQPPDRWLSNARMTHYQAMLLDTDRVQFGPVVALNPATLLPLPEKEAPHDCLEILAETHGTRPDLTDQPIPDADYTWYTDGSSFLQEGQRRAGAAVTTETEVIWARALPAGTSAQRAELIALTQALKMAEGKKLNVYTDSRYAFATAHVHGEIYRRRGWLTSEGREIKNKNEILALLKALFLPKRLSIIHCPGHQKGNSAEARGNRMADQAAREAAMKAVLETSTLLAGKRTADGSEFEKRTADGSEFESPKKKAKVE

SEQ ID NO: 6816 - protein, 2094 aa, synthetic construct
MPAAKRVKLDGGDKKYSIGLDIGTNSVGWAVITDEYKVPSKKFKVLGNTDRHSIKKNLIGALLFDSGETAEATRLKRTARRRYTRRKNRICYLQEIFSNEMAKVDDSFFHRLEESFLVEEDKKHERHPIFGNIVDEVAYHEKYPTIYHLRKKLVDSTDKADLRLIYLALAHMIKFRGHFLIEGDLNPDNSDVDKLFIQLVQTYNQLFEENPINASGVDAKAILSARLSKSRRLENLIAQLPGEKKNGLFGNLIALSLGLTPNFKSNFDLAEDAKLQLSKDTYDDDLDNLLAQIGDQYADLFLAAKNLSDAILLSDILRVNTEITKAPLSASMIKRYDEHHQDLTLLKALVRQQLPEKYKEIFFDQSKNGYAGYIDGGASQEEFYKFIKPILEKMDGTEELLVKLNREDLLRKQRTFDNGSIPHQIHLGELHAILRRQEDFYPFLKDNREKIEKILTFRIPYYVGPLARGNSRFAWMTRKSEETITPWNFEEVVDKGASAQSFIERMTNFDKNLPNEKVLPKHSLLYEYFTVYNELTKVKYVTEGMRKPAFLSGEQKKAIVDLLFKTNRKVTVKQLKEDYFKKIECFDSVEISGVEDRFNASLGTYHDLLKIIKDKDFLDNEENEDILEDIVLTLTLFEDREMIEERLKTYAHLFDDKVMKQLKRRRYTGWGRLSRKLINGIRDKQSGKTILDFLKSDGFANRNFMQLIHDDSLTFKEDIQKAQVSGQGDSLHEHIANLAGSPAIKKGILQTVKVVDELVKVMGRHKPENIVIEMARENQTTQKGQKNSRERMKRIEEGIKELGSQILKEHPVENTQLQNEKLYLYYLQNGRDMYVDQELDINRLSDYDVDHIVPQSFLKDDSIDNKVLTRSDKARGKSDNVPSEEVVKKMKNYWRQLLNAKLITQRKFDNLTKAERGGLSELDKAGFIKRQLVETRQITKHVAQILDSRMNTKYDENDKLIREVKVITLKSKLVSDFRKDFQFYKVREINNYHHAHDAYLNAVVGTALIKKYPKLESEFVYGDYKVYDVRKMIAKSEQEIGKATAKYFFYSNIMNFFKTEITLANGEIRKRPLIETNGETGEIVWDKGRDFATVRKVLSMPQVNIVKKTEVQTGGFSKESILPKRNSDKLIARKKDWDPKKYGGFDSPTVAYSVLVVAKVEKGKSKKLKSVKELLGITIMERSSFEKNPIDFLEAKGYKEVKKDLIIKLPKYSLFELENGRKRMLASAGELQKGNELALPSKYVNFLYLASHYEKLKGSPEDNEQKQLFVEQHKHYLDEIIEQISEFSKRVILADANLDKVLSAYNKHRDKPIREQAENIIHLFTLTNLGAPAAFKYFDTTIDRKRYTSTKEVLDATLIHQSITGLYETRIDLSQLGGDGGGGSGGGGSSGGTLNIEDEYRLHETSKEPDVPLGSTWLSDFPQAWAETGGMGLAVRQAPLIIPLKATSTPVSIKQYPMSQEARLGIKPHIQRLLDQGILVPCQSPWNTPLLPVKKPGTNDYRPVQDLREVNKRVEDIHPTVPNPYNLLSGLPPSHQWYTVLDLKDAFFCLRLHPTSQPLFAFEWRDPEMGISGQLTWTRLPQGFKNSPTLFNEALHRDLADFRIQHPDLILLQYVDDLLLAATSEQDCQRGTRALLQTLGNLGYRASAKKAQICQKQVKYLGYLLKEGQRWLTEARKETVMGQPTPKTPRQLREFLGKAGFCRLFIPGFAEMAAPLYPLTKPGTLFNWGPDQQKAYQEIKQALLTAPALGLPDLTKPFELFVDEKQGYAKGVLTQKLGPWRRPVAYLSKKLDPVAAGWPPCLRMVAAIAVLTKDAGKLTMGQPLVILAPHAVEALVKQPPDRWLSNARMTHYQAMLLDTDRVQFGPVVALNPATLLPLPEKEAPHDCLEILAETHGTRPDLTDQPIPDADYTWYTDGSSFLQEGQRRAGAAVTTETEVIWARALPAGTSAQRAELIALTQALKMAEGKKLNVYTDSRYAFATAHVHGEIYRRRGWLTSEGREIKNKNEILALLKALFLPKRLSIIHCPGHQKGNSAEARGNRMADQAAREAAMKAVLETSTLLAGKRTADGSEFEKRTADGSEFESPKKKAKVE

SEQ ID NO: 6817 - protein, 2096 aa, synthetic construct
MPAAKRVKLDGGDKKYSIGLDIGTNSVGWAVITDEYKVPSKKFKVLGNTDRHSIKKNLIGALLFDSGETAEATRLKRTARRRYTRRKNRICYLQEIFSNEMAKVDDSFFHRLEESFLVEEDKKHERHPIFGNIVDEVAYHEKYPTIYHLRKKLVDSTDKADLRLIYLALAHMIKFRGHFLIEGDLNPDNSDVDKLFIQLVQTYNQLFEENPINASGVDAKAILSARLSKSRRLENLIAQLPGEKKNGLFGNLIALSLGLTPNFKSNFDLAEDAKLQLSKDTYDDDLDNLLAQIGDQYADLFLAAKNLSDAILLSDILRVNTEITKAPLSASMIKRYDEHHQDLTLLKALVRQQLPEKYKEIFFDQSKNGYAGYIDGGASQEEFYKFIKPILEKMDGTEELLVKLNREDLLRKQRTFDNGSIPHQIHLGELHAILRRQEDFYPFLKDNREKIEKILTFRIPYYVGPLARGNSRFAWMTRKSEETITPWNFEEVVDKGASAQSFIERMTNFDKNLPNEKVLPKHSLLYEYFTVYNELTKVKYVTEGMRKPAFLSGEQKKAIVDLLFKTNRKVTVKQLKEDYFKKIECFDSVEISGVEDRFNASLGTYHDLLKIIKDKDFLDNEENEDILEDIVLTLTLFEDREMIEERLKTYAHLFDDKVMKQLKRRRYTGWGRLSRKLINGIRDKQSGKTILDFLKSDGFANRNFMQLIHDDSLTFKEDIQKAQVSGQGDSLHEHIANLAGSPAIKKGILQTVKVVDELVKVMGRHKPENIVIEMARENQTTQKGQKNSRERMKRIEEGIKELGSQILKEHPVENTQLQNEKLYLYYLQNGRDMYVDQELDINRLSDYDVDHIVPQSFLKDDSIDNKVLTRSDKARGKSDNVPSEEVVKKMKNYWRQLLNAKLITQRKFDNLTKAERGGLSELDKAGFIKRQLVETRQITKHVAQILDSRMNTKYDENDKLIREVKVITLKSKLVSDFRKDFQFYKVREINNYHHAHDAYLNAVVGTALIKKYPKLESEFVYGDYKVYDVRKMIAKSEQEIGKATAKYFFYSNIMNFFKTEITLANGEIRKRPLIETNGETGEIVWDKGRDFATVRKVLSMPQVNIVKKTEVQTGGFSKESILPKRNSDKLIARKKDWDPKKYGGFDSPTVAYSVLVVAKVEKGKSKKLKSVKELLGITIMERSSFEKNPIDFLEAKGYKEVKKDLIIKLPKYSLFELENGRKRMLASAGELQKGNELALPSKYVNFLYLASHYEKLKGSPEDNEQKQLFVEQHKHYLDEIIEQISEFSKRVILADANLDKVLSAYNKHRDKPIREQAENIIHLFTLTNLGAPAAFKYFDTTIDRKRYTSTKEVLDATLIHQSITGLYETRIDLSQLGGDGGGGSGSSGGGGGTAPLEEEYRLFLEAPIQNVTLLEQWKREIPKVWAEINPPGLASTQAPIHVQLLSTALPVRVRQYPITLEAKRSLRETIRKFRAAGILRPVHSPWNTPLLPVRKSGTSEYRMVQDLREVNKRVETIHPTVPNPYTLLSLLPPDRIWYSVLDLKDAFFCIPLAPESQLIFAFEWADAEEGESGQLTWTRLPQGFKNSPTLFNEALNRDLQGFRLDHPSVSLLQYVDDLLIAADTQAACLSATRDLLMTLAELGYRVSGKKAQLCQEEVTYLGFKIHKGSRSLSNSRTQAILQIPVPKTKRQVREFLGTIGYCRLWIPGFAELAQPLYAATRPGNDPLVWGEKEEEAFQSLKLALTQPPALALPSLDKPFQLFVEETSGAAKGVLTQALGPWKRPVAYLSKRLDPVAAGWPRCLRAIAAAALLTREASKLTFGQDIEITSSHNLESLLRSPPDKWLTNARITQYQVLLLDPPRVRFKQTAALNPATLLPETDDTLPIHHCLDTLDSLTSTRPDLTDQPLAQAEATLFTDGSSYIRDGKRYAGAAVVTLDSVIWAEPLPIGTSAQKAELIALTKALEWSKDKSVNIYTDSRYAFATLHVHGMIYRERGWLTAGGKAIKNAPEILALLTAVWLPKRVAVMHCKGHQKDDAPTSTGNRRADEVAREVAIRPLSTQATISAGKRTADGSEFEKRTADGSEFESPKKKAKVE

SEQ ID NO: 6818 - protein, 2100 aa, synthetic construct
MPAAKRVKLDGGDKKYSIGLDIGTNSVGWAVITDEYKVPSKKFKVLGNTDRHSIKKNLIGALLFDSGETAEATRLKRTARRRYTRRKNRICYLQEIFSNEMAKVDDSFFHRLEESFLVEEDKKHERHPIFGNIVDEVAYHEKYPTIYHLRKKLVDSTDKADLRLIYLALAHMIKFRGHFLIEGDLNPDNSDVDKLFIQLVQTYNQLFEENPINASGVDAKAILSARLSKSRRLENLIAQLPGEKKNGLFGNLIALSLGLTPNFKSNFDLAEDAKLQLSKDTYDDDLDNLLAQIGDQYADLFLAAKNLSDAILLSDILRVNTEITKAPLSASMIKRYDEHHQDLTLLKALVRQQLPEKYKEIFFDQSKNGYAGYIDGGASQEEFYKFIKPILEKMDGTEELLVKLNREDLLRKQRTFDNGSIPHQIHLGELHAILRRQEDFYPFLKDNREKIEKILTFRIPYYVGPLARGNSRFAWMTRKSEETITPWNFEEVVDKGASAQSFIERMTNFDKNLPNEKVLPKHSLLYEYFTVYNELTKVKYVTEGMRKPAFLSGEQKKAIVDLLFKTNRKVTVKQLKEDYFKKIECFDSVEISGVEDRFNASLGTYHDLLKIIKDKDFLDNEENEDILEDIVLTLTLFEDREMIEERLKTYAHLFDDKVMKQLKRRRYTGWGRLSRKLINGIRDKQSGKTILDFLKSDGFANRNFMQLIHDDSLTFKEDIQKAQVSGQGDSLHEHIANLAGSPAIKKGILQTVKVVDELVKVMGRHKPENIVIEMARENQTTQKGQKNSRERMKRIEEGIKELGSQILKEHPVENTQLQNEKLYLYYLQNGRDMYVDQELDINRLSDYDVDHIVPQSFLKDDSIDNKVLTRSDKARGKSDNVPSEEVVKKMKNYWRQLLNAKLITQRKFDNLTKAERGGLSELDKAGFIKRQLVETRQITKHVAQILDSRMNTKYDENDKLIREVKVITLKSKLVSDFRKDFQFYKVREINNYHHAHDAYLNAVVGTALIKKYPKLESEFVYGDYKVYDVRKMIAKSEQEIGKATAKYFFYSNIMNFFKTEITLANGEIRKRPLIETNGETGEIVWDKGRDFATVRKVLSMPQVNIVKKTEVQTGGFSKESILPKRNSDKLIARKKDWDPKKYGGFDSPTVAYSVLVVAKVEKGKSKKLKSVKELLGITIMERSSFEKNPIDFLEAKGYKEVKKDLIIKLPKYSLFELENGRKRMLASAGELQKGNELALPSKYVNFLYLASHYEKLKGSPEDNEQKQLFVEQHKHYLDEIIEQISEFSKRVILADANLDKVLSAYNKHRDKPIREQAENIIHLFTLTNLGAPAAFKYFDTTIDRKRYTSTKEVLDATLIHQSITGLYETRIDLSQLGGDGGGGSGSSGGGGGTVSLQDEHRLFDIPVTTSLPDVWLQDFPQAWAETGGLGRAKCQAPIIIDLKPTAVPVSIKQYPMSLEAHMGIRQHIIKFLELGVLRPCRSPWNTPLLPVKKPGTQDYRPVQDLREINKRTVDIHPTVPNPYNLLSTLKPDYSWYTVLDLKDAFFCLPLAPQSQELFAFEWKDPERGISGQLTWTRLPQGFKNSPTLFDEALHRDLTDFRTQHPEVTLLQYVDDLLLAAPTKKACTQGTRHLLQELGEKGYRASAKKAQICQTKVTYLGYILSEGKRWLTPGRIETVARIPPPRNPREVREFLGTAGFCRLWIPGFAELAAPLYALTKESTPFTWQTEHQLAFEALKKALLSAPALGLPDTSKPFTLFLDERQGIAKGVLTQKLGPWKRPVAYLSKKLDPVAAGWPPCLRIMAATAMLVKDSAKLTLGQPLTVITPHTLEAIVRQPPDRWITNARLTHYQALLLDTDRVQFGPPVTLNPATLLPVPENQPSPHDCRQVLAETHGTREDLKDQELPDADHTWYTDGSSYLDSGTRRAGAAVVDGHNTIWAQSLPPGTSAQKAELIALTKALELSKGKKANIYTDSRYAFATAHTHGSIYERRGLLTSEGKEIKNKAEIIALLKALFLPQEVAIIHCPGHQKGQDPVAVGNRQADRVARQAAMAEVLTLATEPDNTSHITAGKRTADGSEFEKRTADGSEFESPKKKAKVE

SEQ ID NO: 6819 - protein, 2094 aa, synthetic construct
MPAAKRVKLDGGDKKYSIGLDIGTNSVGWAVITDEYKVPSKKFKVLGNTDRHSIKKNLIGALLFDSGETAEATRLKRTARRRYTRRKNRICYLQEIFSNEMAKVDDSFFHRLEESFLVEEDKKHERHPIFGNIVDEVAYHEKYPTIYHLRKKLVDSTDKADLRLIYLALAHMIKFRGHFLIEGDLNPDNSDVDKLFIQLVQTYNQLFEENPINASGVDAKAILSARLSKSRRLENLIAQLPGEKKNGLFGNLIALSLGLTPNFKSNFDLAEDAKLQLSKDTYDDDLDNLLAQIGDQYADLFLAAKNLSDAILLSDILRVNTEITKAPLSASMIKRYDEHHQDLTLLKALVRQQLPEKYKEIFFDQSKNGYAGYIDGGASQEEFYKFIKPILEKMDGTEELLVKLNREDLLRKQRTFDNGSIPHQIHLGELHAILRRQEDFYPFLKDNREKIEKILTFRIPYYVGPLARGNSRFAWMTRKSEETITPWNFEEVVDKGASAQSFIERMTNFDKNLPNEKVLPKHSLLYEYFTVYNELTKVKYVTEGMRKPAFLSGEQKKAIVDLLFKTNRKVTVKQLKEDYFKKIECFDSVEISGVEDRFNASLGTYHDLLKIIKDKDFLDNEENEDILEDIVLTLTLFEDREMIEERLKTYAHLFDDKVMKQLKRRRYTGWGRLSRKLINGIRDKQSGKTILDFLKSDGFANRNFMQLIHDDSLTFKEDIQKAQVSGQGDSLHEHIANLAGSPAIKKGILQTVKVVDELVKVMGRHKPENIVIEMARENQTTQKGQKNSRERMKRIEEGIKELGSQILKEHPVENTQLQNEKLYLYYLQNGRDMYVDQELDINRLSDYDVDHIVPQSFLKDDSIDNKVLTRSDKARGKSDNVPSEEVVKKMKNYWRQLLNAKLITQRKFDNLTKAERGGLSELDKAGFIKRQLVETRQITKHVAQILDSRMNTKYDENDKLIREVKVITLKSKLVSDFRKDFQFYKVREINNYHHAHDAYLNAVVGTALIKKYPKLESEFVYGDYKVYDVRKMIAKSEQEIGKATAKYFFYSNIMNFFKTEITLANGEIRKRPLIETNGETGEIVWDKGRDFATVRKVLSMPQVNIVKKTEVQTGGFSKESILPKRNSDKLIARKKDWDPKKYGGFDSPTVAYSVLVVAKVEKGKSKKLKSVKELLGITIMERSSFEKNPIDFLEAKGYKEVKKDLIIKLPKYSLFELENGRKRMLASAGELQKGNELALPSKYVNFLYLASHYEKLKGSPEDNEQKQLFVEQHKHYLDEIIEQISEFSKRVILADANLDKVLSAYNKHRDKPIREQAENIIHLFTLTNLGAPAAFKYFDTTIDRKRYTSTKEVLDATLIHQSITGLYETRIDLSQLGGDGGGGSGSSGGGGGTLNLEDEYRLYETSAEPEVSPGSTWLSDFPQAWAETGGMGLAVRQAPLIIPLKATSTPVSIKQYPMSQEAKLGIKPHIQRLLDQGILVPCQSPWNTPLLPVKKPGTNDYRPVQDLREVNKRVEDIHPTVPNPYNLLSGLPPSHRWYTVLDLKDAFFCLRLHPTSQPLFAFEWRDPGMGISGQLTWTRLPQGFKNSPTLFNEALHRDLADFRIQHPDLILLQYVDDILLAATSELDCQQGTRALLLTLGNLGYRASAKKAQLCQKQVKYLGYLLKEGQRWLTEARKETVMGQPTPKTPRQLREFLGKAGFCRLFIPGFAEMAAPLYPLTKPGTLFNWGPDQQKAYQEIKQALLTAPALGLPDLTKPFELFVDEKQGYAKGVLTQKLGPWRRPVAYLSKKLDPVAAGWPPCLRMVAAIAVLRKDAGKLTMGQPLVILAPHAVEALVKQPPDRWLSNARMTHYQAMLLDTDRVQFGPVVALNPATLLPLPEEGAPHDCLEILAETHGTRPDLTDQPIPDADHTWYTDGSSFLQEGQRKAGAAVTTETEVIWARALPAGTSAQRAELIALTQALKMAEGKRLNVYTDSRYAFATAHIHGEIYRRRGWLTSEGREIKNKSEILALLKALFLPKRLSIIHCLGHQKGDSAEARGNRLADQAAREAAIKTPPDTSTLLAGKRTADGSEFEKRTADGSEFESPKKKAKVE

SEQ ID NO: 6820 - protein, 2094 aa, synthetic construct
MPAAKRVKLDGGDKKYSIGLDIGTNSVGWAVITDEYKVPSKKFKVLGNTDRHSIKKNLIGALLFDSGETAEATRLKRTARRRYTRRKNRICYLQEIFSNEMAKVDDSFFHRLEESFLVEEDKKHERHPIFGNIVDEVAYHEKYPTIYHLRKKLVDSTDKADLRLIYLALAHMIKFRGHFLIEGDLNPDNSDVDKLFIQLVQTYNQLFEENPINASGVDAKAILSARLSKSRRLENLIAQLPGEKKNGLFGNLIALSLGLTPNFKSNFDLAEDAKLQLSKDTYDDDLDNLLAQIGDQYADLFLAAKNLSDAILLSDILRVNTEITKAPLSASMIKRYDEHHQDLTLLKALVRQQLPEKYKEIFFDQSKNGYAGYIDGGASQEEFYKFIKPILEKMDGTEELLVKLNREDLLRKQRTFDNGSIPHQIHLGELHAILRRQEDFYPFLKDNREKIEKILTFRIPYYVGPLARGNSRFAWMTRKSEETITPWNFEEVVDKGASAQSFIERMTNFDKNLPNEKVLPKHSLLYEYFTVYNELTKVKYVTEGMRKPAFLSGEQKKAIVDLLFKTNRKVTVKQLKEDYFKKIECFDSVEISGVEDRFNASLGTYHDLLKIIKDKDFLDNEENEDILEDIVLTLTLFEDREMIEERLKTYAHLFDDKVMKQLKRRRYTGWGRLSRKLINGIRDKQSGKTILDFLKSDGFANRNFMQLIHDDSLTFKEDIQKAQVSGQGDSLHEHIANLAGSPAIKKGILQTVKVVDELVKVMGRHKPENIVIEMARENQTTQKGQKNSRERMKRIEEGIKELGSQILKEHPVENTQLQNEKLYLYYLQNGRDMYVDQELDINRLSDYDVDHIVPQSFLKDDSIDNKVLTRSDKARGKSDNVPSEEVVKKMKNYWRQLLNAKLITQRKFDNLTKAERGGLSELDKAGFIKRQLVETRQITKHVAQILDSRMNTKYDENDKLIREVKVITLKSKLVSDFRKDFQFYKVREINNYHHAHDAYLNAVVGTALIKKYPKLESEFVYGDYKVYDVRKMIAKSEQEIGKATAKYFFYSNIMNFFKTEITLANGEIRKRPLIETNGETGEIVWDKGRDFATVRKVLSMPQVNIVKKTEVQTGGFSKESILPKRNSDKLIARKKDWDPKKYGGFDSPTVAYSVLVVAKVEKGKSKKLKSVKELLGITIMERSSFEKNPIDFLEAKGYKEVKKDLIIKLPKYSLFELENGRKRMLASAGELQKGNELALPSKYVNFLYLASHYEKLKGSPEDNEQKQLFVEQHKHYLDEIIEQISEFSKRVILADANLDKVLSAYNKHRDKPIREQAENIIHLFTLTNLGAPAAFKYFDTTIDRKRYTSTKEVLDATLIHQSITGLYETRIDLSQLGGDGGGGSGSSGGGGGLGIEDEYRLHETSTEPDVSLGSTWLSDFPQAWAETGGMGLAVRQAPLIIPLKATSTPVSIQQYPMSHEARLGIKPHIQRLLDQGILVPCQSPWNTPLLPVKKPGTNDYRPVQDLREVNKRVEDIHPTVPNPYNLLSGLPPSHQWYTVLDLKDAFFCLRLHPTSQPLFAFEWRDPGMGISGQLTWTRLPQGFKNSPTLFNEALHRDLADFRIQHPDLILLQYVDDILLAATSELDCQQGTRALLQTLGDLGYRASAKKAQICQKQVKYLGYLLREGQRWLTEARKETVMGQPVPKTPRQLREFLGKAGFCRLFIPGFAEMAAPLYPLTKPGTLFSWGPDQQKAYQEIKQALLTAPALGLPDLTKPFELFVDEKQGYAKGVLTQKLGPWRRPVAYLSKKLDPVAAGWPPCLRMVAAIAVLTKDAGKLTMGQPLVILAPHAVEALVKQPPDRWLSNARMTHYQAMLLDTDRVQFGPVVALNPATLLPLPEEGAPHDCLEILAETHGTRPDLTDQPIPDADHTWYTDGSSFLQEGQRKAGAAVTTETEVIWAGALPAGTSAQRAELIALTQALKMAEGKRLNVYTDSRYAFATAHIHGEIYRRRGWLTSEGREIKNKSEILALLKALFLPKRLSIIHCLGHQKGDSAEARGNRLADQAAREAAIKTPPDTSTLLIAGKRTADGSEFEKRTADGSEFESPKKKAKVE

SEQ ID NO: 6821 - protein, 2174 aa, synthetic construct
MPAAKRVKLDGGDKKYSIGLDIGTNSVGWAVITDEYKVPSKKFKVLGNTDRHSIKKNLIGALLFDSGETAEATRLKRTARRRYTRRKNRICYLQEIFSNEMAKVDDSFFHRLEESFLVEEDKKHERHPIFGNIVDEVAYHEKYPTIYHLRKKLVDSTDKADLRLIYLALAHMIKFRGHFLIEGDLNPDNSDVDKLFIQLVQTYNQLFEENPINASGVDAKAILSARLSKSRRLENLIAQLPGEKKNGLFGNLIALSLGLTPNFKSNFDLAEDAKLQLSKDTYDDDLDNLLAQIGDQYADLFLAAKNLSDAILLSDILRVNTEITKAPLSASMIKRYDEHHQDLTLLKALVRQQLPEKYKEIFFDQSKNGYAGYIDGGASQEEFYKFIKPILEKMDGTEELLVKLNREDLLRKQRTFDNGSIPHQIHLGELHAILRRQEDFYPFLKDNREKIEKILTFRIPYYVGPLARGNSRFAWMTRKSEETITPWNFEEVVDKGASAQSFIERMTNFDKNLPNEKVLPKHSLLYEYFTVYNELTKVKYVTEGMRKPAFLSGEQKKAIVDLLFKTNRKVTVKQLKEDYFKKIECFDSVEISGVEDRFNASLGTYHDLLKIIKDKDFLDNEENEDILEDIVLTLTLFEDREMIEERLKTYAHLFDDKVMKQLKRRRYTGWGRLSRKLINGIRDKQSGKTILDFLKSDGFANRNFMQLIHDDSLTFKEDIQKAQVSGQGDSLHEHIANLAGSPAIKKGILQTVKVVDELVKVMGRHKPENIVIEMARENQTTQKGQKNSRERMKRIEEGIKELGSQILKEHPVENTQLQNEKLYLYYLQNGRDMYVDQELDINRLSDYDVDHIVPQSFLKDDSIDNKVLTRSDKARGKSDNVPSEEVVKKMKNYWRQLLNAKLITQRKFDNLTKAERGGLSELDKAGFIKRQLVETRQITKHVAQILDSRMNTKYDENDKLIREVKVITLKSKLVSDFRKDFQFYKVREINNYHHAHDAYLNAVVGTALIKKYPKLESEFVYGDYKVYDVRKMIAKSEQEIGKATAKYFFYSNIMNFFKTEITLANGEIRKRPLIETNGETGEIVWDKGRDFATVRKVLSMPQVNIVKKTEVQTGGFSKESILPKRNSDKLIARKKDWDPKKYGGFDSPTVAYSVLVVAKVEKGKSKKLKSVKELLGITIMERSSFEKNPIDFLEAKGYKEVKKDLIIKLPKYSLFELENGRKRMLASAGELQKGNELALPSKYVNFLYLASHYEKLKGSPEDNEQKQLFVEQHKHYLDEIIEQISEFSKRVILADANLDKVLSAYNKHRDKPIREQAENIIHLFTLTNLGAPAAFKYFDTTIDRKRYTSTKEVLDATLIHQSITGLYETRIDLSQLGGDGGGGSGSSGGGGGMDPLQLLQPLEAEIKGTKLKAHWNSGATITCVPEAFLEDERPIQTMLIKTIHGEKQQDVYYLTFKVQGRKVEAEVLASPYDYILLNPSDVPWLMKKPLQLTVLVPLHEYQERLLQQTALPKEQKELLQKLFLKYDALWQHWENQVGHRRIKPHNIATGTLAPRPQKQYPINPKAKPSIQIVIDDLLKQGVLIQQNSTMNTPVYPVPKPDGKWRMVLDYREVNKTIPLIAAQNQHSAGILSSIYRGKYKTTLDLTNGFWAHPITPESYWLTAFTWQGKQYCWTRLPQGFLNSPALFNADVVDLLKEIPNVQAYVDDIYISHDDPQEHLEQLEKIFSILLNAGYVVSLKKSEIAQREVEFLGFNITKEGRGLTDTFKQKLLNITPPKDLKQLQSILGLLNFARNFIPNYSELVKPLYTIVAPANGKFISWTEDNSNQLQHIISVLNQADNLEERNPETRLIIKVNSSPSAGYIRYYNEGSKRPIMYVNYIFSKAEAKFTQTEKLLTTMHKGLIKAMDLAMGQEILVYSPIVSMTKIQRTPLPERKALPVRWITWMTYLEDPRIQFHYDKSLPELQQIPNVTEDVIAKTKHPSEFAMVFYTDGSAIKHPDVNKSHSAGMGIAQVQFIPEYKIVHQWSIPLGDHTAQLAEIAAVEFACKKALKISGPVLIVTDSFYVAESANKELPYWKSNGFLNNKKKPLRHVSKWKSIAECLQLKPDIIIMHEKGHQQPMTTLHTEGNNLADKLATQGSYVVHAGKRTADGSEFEKRTADGSEFESPKKKAKVE

SEQ ID NO: 6822 - protein, 2096 aa, synthetic construct
MPAAKRVKLDGGDKKYSIGLDIGTNSVGWAVITDEYKVPSKKFKVLGNTDRHSIKKNLIGALLFDSGETAEATRLKRTARRRYTRRKNRICYLQEIFSNEMAKVDDSFFHRLEESFLVEEDKKHERHPIFGNIVDEVAYHEKYPTIYHLRKKLVDSTDKADLRLIYLALAHMIKFRGHFLIEGDLNPDNSDVDKLFIQLVQTYNQLFEENPINASGVDAKAILSARLSKSRRLENLIAQLPGEKKNGLFGNLIALSLGLTPNFKSNFDLAEDAKLQLSKDTYDDDLDNLLAQIGDQYADLFLAAKNLSDAILLSDILRVNTEITKAPLSASMIKRYDEHHQDLTLLKALVRQQLPEKYKEIFFDQSKNGYAGYIDGGASQEEFYKFIKPILEKMDGTEELLVKLNREDLLRKQRTFDNGSIPHQIHLGELHAILRRQEDFYPFLKDNREKIEKILTFRIPYYVGPLARGNSRFAWMTRKSEETITPWNFEEVVDKGASAQSFIERMTNFDKNLPNEKVLPKHSLLYEYFTVYNELTKVKYVTEGMRKPAFLSGEQKKAIVDLLFKTNRKVTVKQLKEDYFKKIECFDSVEISGVEDRFNASLGTYHDLLKIIKDKDFLDNEENEDILEDIVLTLTLFEDREMIEERLKTYAHLFDDKVMKQLKRRRYTGWGRLSRKLINGIRDKQSGKTILDFLKSDGFANRNFMQLIHDDSLTFKEDIQKAQVSGQGDSLHEHIANLAGSPAIKKGILQTVKVVDELVKVMGRHKPENIVIEMARENQTTQKGQKNSRERMKRIEEGIKELGSQILKEHPVENTQLQNEKLYLYYLQNGRDMYVDQELDINRLSDYDVDHIVPQSFLKDDSIDNKVLTRSDKARGKSDNVPSEEVVKKMKNYWRQLLNAKLITQRKFDNLTKAERGGLSELDKAGFIKRQLVETRQITKHVAQILDSRMNTKYDENDKLIREVKVITLKSKLVSDFRKDFQFYKVREINNYHHAHDAYLNAVVGTALIKKYPKLESEFVYGDYKVYDVRKMIAKSEQEIGKATAKYFFYSNIMNFFKTEITLANGEIRKRPLIETNGETGEIVWDKGRDFATVRKVLSMPQVNIVKKTEVQTGGFSKESILPKRNSDKLIARKKDWDPKKYGGFDSPTVAYSVLVVAKVEKGKSKKLKSVKELLGITIMERSSFEKNPIDFLEAKGYKEVKKDLIIKLPKYSLFELENGRKRMLASAGELQKGNELALPSKYVNFLYLASHYEKLKGSPEDNEQKQLFVEQHKHYLDEIIEQISEFSKRVILADANLDKVLSAYNKHRDKPIREQAENIIHLFTLTNLGAPAAFKYFDTTIDRKRYTSTKEVLDATLIHQSITGLYETRIDLSQLGGDGGGGGGGSGSSGGTAPLEEEYRLFLEAPIQNVTLLEQWKREIPKVWAEINPPGLASTQAPIHVQLLSTALPVRVRQYPITLEAKRSLRETIRKFRAAGILRPVHSPWNTPLLPVRKSGTSEYRMVQDLREVNKRVETIHPTVPNPYTLLSLLPPDRIWYSVLDLKDAFFCIPLAPESQLIFAFEWADAEEGESGQLTWTRLPQGFKNSPTLFDEALNRDLQGFRLDHPSVSLLQYVDDLLIAADTQAACLSATRDLLMTLAELGYRVSGKKAQLCQEEVTYLGFKIHKGSRSLSNSRTQAILQIPVPKTKRQVREFLGTIGYCRLWIPGFAELAQPLYAATRGGNDPLVWGEKEEEAFQSLKLALTQPPALALPSLDKPFQLFVEETSGAAKGVLTQALGPWKRPVAYLSKRLDPVAAGWPRCLRAIAAAALLTREASKLTFGQDIEITSSHNLESLLRSPPDKWLTNARITQYQVLLLDPPRVRFKQTAALNPATLLPETDDTLPIHHCLDTLDSLTSTRPDLTDQPLAQAEATLFTDGSSYIRDGKRYAGAAVVTLDSVIWAEPLPIGTSAQKAELIALTKALEWSKDKSVNIYTDSRYAFATLHVHGMIYRERGLLTAGGKAIKNAPEILALLTAVWLPKRVAVMHCKGHQKDDAPTSTGNRRADEVAREVAIRPLSTQATISAGKRTADGSEFEKRTADGSEFESPKKKAKVE

SEQ ID NO: 6823 - protein, 2096 aa, synthetic construct
MPAAKRVKLDGGDKKYSIGLDIGTNSVGWAVITDEYKVPSKKFKVLGNTDRHSIKKNLIGALLFDSGETAEATRLKRTARRRYTRRKNRICYLQEIFSNEMAKVDDSFFHRLEESFLVEEDKKHERHPIFGNIVDEVAYHEKYPTIYHLRKKLVDSTDKADLRLIYLALAHMIKFRGHFLIEGDLNPDNSDVDKLFIQLVQTYNQLFEENPINASGVDAKAILSARLSKSRRLENLIAQLPGEKKNGLFGNLIALSLGLTPNFKSNFDLAEDAKLQLSKDTYDDDLDNLLAQIGDQYADLFLAAKNLSDAILLSDILRVNTEITKAPLSASMIKRYDEHHQDLTLLKALVRQQLPEKYKEIFFDQSKNGYAGYIDGGASQEEFYKFIKPILEKMDGTEELLVKLNREDLLRKQRTFDNGSIPHQIHLGELHAILRRQEDFYPFLKDNREKIEKILTFRIPYYVGPLARGNSRFAWMTRKSEETITPWNFEEVVDKGASAQSFIERMTNFDKNLPNEKVLPKHSLLYEYFTVYNELTKVKYVTEGMRKPAFLSGEQKKAIVDLLFKTNRKVTVKQLKEDYFKKIECFDSVEISGVEDRFNASLGTYHDLLKIIKDKDFLDNEENEDILEDIVLTLTLFEDREMIEERLKTYAHLFDDKVMKQLKRRRYTGWGRLSRKLINGIRDKQSGKTILDFLKSDGFANRNFMQLIHDDSLTFKEDIQKAQVSGQGDSLHEHIANLAGSPAIKKGILQTVKVVDELVKVMGRHKPENIVIEMARENQTTQKGQKNSRERMKRIEEGIKELGSQILKEHPVENTQLQNEKLYLYYLQNGRDMYVDQELDINRLSDYDVDHIVPQSFLKDDSIDNKVLTRSDKARGKSDNVPSEEVVKKMKNYWRQLLNAKLITQRKFDNLTKAERGGLSELDKAGFIKRQLVETRQITKHVAQILDSRMNTKYDENDKLIREVKVITLKSKLVSDFRKDFQFYKVREINNYHHAHDAYLNAVVGTALIKKYPKLESEFVYGDYKVYDVRKMIAKSEQEIGKATAKYFFYSNIMNFFKTEITLANGEIRKRPLIETNGETGEIVWDKGRDFATVRKVLSMPQVNIVKKTEVQTGGFSKESILPKRNSDKLIARKKDWDPKKYGGFDSPTVAYSVLVVAKVEKGKSKKLKSVKELLGITIMERSSFEKNPIDFLEAKGYKEVKKDLIIKLPKYSLFELENGRKRMLASAGELQKGNELALPSKYVNFLYLASHYEKLKGSPEDNEQKQLFVEQHKHYLDEIIEQISEFSKRVILADANLDKVLSAYNKHRDKPIREQAENIIHLFTLTNLGAPAAFKYFDTTIDRKRYTSTKEVLDATLIHQSITGLYETRIDLSQLGGDGGGGGGGSGSSGGTAPLEEEYRLFLEAPIQNVTLLEQWKREIPKVWAEINPPGLASTQAPIHVQLLSTALPVRVRQYPITLEAKRSLRETIRKFRAAGILRPVHSPWNTPLLPVRKSGTSEYRMVQDLREVNKRVETIHPTVPNPYTLLSLLPPDRIWYSVLDLKDAFFCIPLAPESQLIFAFEWADAEEGESGQLTWTRLPQGFKNSPTLFNEALNRDLQGFRLDHPSVSLLQYVDDLLIAADTQAACLSATRDLLMTLAELGYRVSGKKAQLCQEEVTYLGFKIHKGSRSLSNSRTQAILQIPVPKTKRQVREFLGTIGYCRLWIPGFAELAQPLYAATRPGNDPLVWGEKEEEAFQSLKLALTQPPALALPSLDKPFQLFVEETSGAAKGVLTQALGPWKRPVAYLSKRLDPVAAGWPRCLRAIAAAALLTREASKLTFGQDIEITSSHNLESLLRSPPDKWLTNARITQYQVLLLDPPRVRFKQTAALNPATLLPETDDTLPIHHCLDTLDSLTSTRPDLTDQPLAQAEATLFTDGSSYIRDGKRYAGAAVVTLDSVIWAEPLPIGTSAQKAELIALTKALEWSKDKSVNIYTDSRYAFATLHVHGMIYRERGWLTAGGKAIKNAPEILALLTAVWLPKRVAVMHCKGHQKDDAPTSTGNRRADEVAREVAIRPLSTQATISAGKRTADGSEFEKRTADGSEFESPKKKAKVE

SEQ ID NO: 6824 - protein, 2096 aa, synthetic construct
MPAAKRVKLDGGDKKYSIGLDIGTNSVGWAVITDEYKVPSKKFKVLGNTDRHSIKKNLIGALLFDSGETAEATRLKRTARRRYTRRKNRICYLQEIFSNEMAKVDDSFFHRLEESFLVEEDKKHERHPIFGNIVDEVAYHEKYPTIYHLRKKLVDSTDKADLRLIYLALAHMIKFRGHFLIEGDLNPDNSDVDKLFIQLVQTYNQLFEENPINASGVDAKAILSARLSKSRRLENLIAQLPGEKKNGLFGNLIALSLGLTPNFKSNFDLAEDAKLQLSKDTYDDDLDNLLAQIGDQYADLFLAAKNLSDAILLSDILRVNTEITKAPLSASMIKRYDEHHQDLTLLKALVRQQLPEKYKEIFFDQSKNGYAGYIDGGASQEEFYKFIKPILEKMDGTEELLVKLNREDLLRKQRTFDNGSIPHQIHLGELHAILRRQEDFYPFLKDNREKIEKILTFRIPYYVGPLARGNSRFAWMTRKSEETITPWNFEEVVDKGASAQSFIERMTNFDKNLPNEKVLPKHSLLYEYFTVYNELTKVKYVTEGMRKPAFLSGEQKKAIVDLLFKTNRKVTVKQLKEDYFKKIECFDSVEISGVEDRFNASLGTYHDLLKIIKDKDFLDNEENEDILEDIVLTLTLFEDREMIEERLKTYAHLFDDKVMKQLKRRRYTGWGRLSRKLINGIRDKQSGKTILDFLKSDGFANRNFMQLIHDDSLTFKEDIQKAQVSGQGDSLHEHIANLAGSPAIKKGILQTVKVVDELVKVMGRHKPENIVIEMARENQTTQKGQKNSRERMKRIEEGIKELGSQILKEHPVENTQLQNEKLYLYYLQNGRDMYVDQELDINRLSDYDVDHIVPQSFLKDDSIDNKVLTRSDKARGKSDNVPSEEVVKKMKNYWRQLLNAKLITQRKFDNLTKAERGGLSELDKAGFIKRQLVETRQITKHVAQILDSRMNTKYDENDKLIREVKVITLKSKLVSDFRKDFQFYKVREINNYHHAHDAYLNAVVGTALIKKYPKLESEFVYGDYKVYDVRKMIAKSEQEIGKATAKYFFYSNIMNFFKTEITLANGEIRKRPLIETNGETGEIVWDKGRDFATVRKVLSMPQVNIVKKTEVQTGGFSKESILPKRNSDKLIARKKDWDPKKYGGFDSPTVAYSVLVVAKVEKGKSKKLKSVKELLGITIMERSSFEKNPIDFLEAKGYKEVKKDLIIKLPKYSLFELENGRKRMLASAGELQKGNELALPSKYVNFLYLASHYEKLKGSPEDNEQKQLFVEQHKHYLDEIIEQISEFSKRVILADANLDKVLSAYNKHRDKPIREQAENIIHLFTLTNLGAPAAFKYFDTTIDRKRYTSTKEVLDATLIHQSITGLYETRIDLSQLGGDGGGGGGGSGSSGGTAPLEEEYRLFLEAPIQNVTLLEQWKREIPKVWAEINPPGLASTQAPIHVQLLSTALPVRVRQYPITLEAKRSLRETIRKFRAAGILRPVHSPWNTPLLPVRKSGTSEYRMVQDLREVNKRVETIHPTVPNPYTLLSLLPPDRIWYSVLDLKDAFFCIPLAPESQLIFAFEWADAEEGESGQLTWTRLPQGFKNSPTLFNEALNRDLQGFRLDHPSVSLLQYVDDLLIAADTQAACLSATRDLLMTLAELGYRVSGKKAQLCQEEVTYLGFKIHKGSRSLSNSRTQAILQIPVPKTKRQVREFLGKIGYCRLFIPGFAELAQPLYAATRPGNDPLVWGEKEEEAFQSLKLALTQPPALALPSLDKPFQLFVEETSGAAKGVLTQALGPWKRPVAYLSKRLDPVAAGWPRCLRAIAAAALLTREASKLTFGQDIEITSSHNLESLLRSPPDKWLTNARITQYQVLLLDPPRVRFKQTAALNPATLLPETDDTLPIHHCLDTLDSLTSTRPDLTDQPLAQAEATLFTDGSSYIRDGKRYAGAAVVTLDSVIWAEPLPIGTSAQKAELIALTKALEWSKDKSVNIYTDSRYAFATLHVHGMIYRERGWLTAGGKAIKNAPEILALLTAVWLPKRVAVMHCKGHQKDDAPTSTGNRRADEVAREVAIRPLSTQATISAGKRTADGSEFEKRTADGSEFESPKKKAKVE

SEQ ID NO: 6825 - protein, 2100 aa, synthetic construct
MPAAKRVKLDGGDKKYSIGLDIGTNSVGWAVITDEYKVPSKKFKVLGNTDRHSIKKNLIGALLFDSGETAEATRLKRTARRRYTRRKNRICYLQEIFSNEMAKVDDSFFHRLEESFLVEEDKKHERHPIFGNIVDEVAYHEKYPTIYHLRKKLVDSTDKADLRLIYLALAHMIKFRGHFLIEGDLNPDNSDVDKLFIQLVQTYNQLFEENPINASGVDAKAILSARLSKSRRLENLIAQLPGEKKNGLFGNLIALSLGLTPNFKSNFDLAEDAKLQLSKDTYDDDLDNLLAQIGDQYADLFLAAKNLSDAILLSDILRVNTEITKAPLSASMIKRYDEHHQDLTLLKALVRQQLPEKYKEIFFDQSKNGYAGYIDGGASQEEFYKFIKPILEKMDGTEELLVKLNREDLLRKQRTFDNGSIPHQIHLGELHAILRRQEDFYPFLKDNREKIEKILTFRIPYYVGPLARGNSRFAWMTRKSEETITPWNFEEVVDKGASAQSFIERMTNFDKNLPNEKVLPKHSLLYEYFTVYNELTKVKYVTEGMRKPAFLSGEQKKAIVDLLFKTNRKVTVKQLKEDYFKKIECFDSVEISGVEDRFNASLGTYHDLLKIIKDKDFLDNEENEDILEDIVLTLTLFEDREMIEERLKTYAHLFDDKVMKQLKRRRYTGWGRLSRKLINGIRDKQSGKTILDFLKSDGFANRNFMQLIHDDSLTFKEDIQKAQVSGQGDSLHEHIANLAGSPAIKKGILQTVKVVDELVKVMGRHKPENIVIEMARENQTTQKGQKNSRERMKRIEEGIKELGSQILKEHPVENTQLQNEKLYLYYLQNGRDMYVDQELDINRLSDYDVDHIVPQSFLKDDSIDNKVLTRSDKARGKSDNVPSEEVVKKMKNYWRQLLNAKLITQRKFDNLTKAERGGLSELDKAGFIKRQLVETRQITKHVAQILDSRMNTKYDENDKLIREVKVITLKSKLVSDFRKDFQFYKVREINNYHHAHDAYLNAVVGTALIKKYPKLESEFVYGDYKVYDVRKMIAKSEQEIGKATAKYFFYSNIMNFFKTEITLANGEIRKRPLIETNGETGEIVWDKGRDFATVRKVLSMPQVNIVKKTEVQTGGFSKESILPKRNSDKLIARKKDWDPKKYGGFDSPTVAYSVLVVAKVEKGKSKKLKSVKELLGITIMERSSFEKNPIDFLEAKGYKEVKKDLIIKLPKYSLFELENGRKRMLASAGELQKGNELALPSKYVNFLYLASHYEKLKGSPEDNEQKQLFVEQHKHYLDEIIEQISEFSKRVILADANLDKVLSAYNKHRDKPIREQAENIIHLFTLTNLGAPAAFKYFDTTIDRKRYTSTKEVLDATLIHQSITGLYETRIDLSQLGGDGGGGGGGSGSSGGTVSLQDEHRLFDIPVTTSLPDVWLQDFPQAWAETGGLGRAKCQAPIIIDLKPTAVPVSIKQYPMSLEAHMGIRQHIIKFLELGVLRPCRSPWNTPLLPVKKPGTQDYRPVQDLREINKRTVDIHPTVPNPYNLLSTLKPDYSWYTVLDLKDAFFCLPLAPQSQELFAFEWKDPERGISGQLTWTRLPQGFKNSPTLFNEALHRDLTDFRTQHPEVTLLQYVDDLLLAAPTKKACTQGTRHLLQELGEKGYRASAKKAQICQTKVTYLGYILSEGKRWLTPGRIETVARIPPPRNPREVREFLGTAGFCRLWIPGFAELAAPLYALTKPSTPFTWQTEHQLAFEALKKALLSAPALGLPDTSKPFTLFLDERQGIAKGVLTQKLGPWKRPVAYLSKKLDPVAAGWPPCLRIMAATAMLVKDSAKLTLGQPLTVITPHTLEAIVRQPPDRWITNARLTHYQALLLDTDRVQFGPPVTLNPATLLPVPENQPSPHDCRQVLAETHGTREDLKDQELPDADHTWYTDGSSYLDSGTRRAGAAVVDGHNTIWAQSLPPGTSAQKAELIALTKALELSKGKKANIYTDSRYAFATAHTHGSIYERRGWLTSEGKEIKNKAEIIALLKALFLPQEVAIIHCPGHQKGQDPVAVGNRQADRVARQAAMAEVLTLATEPDNTSHITAGKRTADGSEFEKRTADGSEFESPKKKAKVE

SEQ ID NO: 6826 - protein, 2093 aa, synthetic construct
MPAAKRVKLDGGDKKYSIGLDIGTNSVGWAVITDEYKVPSKKFKVLGNTDRHSIKKNLIGALLFDSGETAEATRLKRTARRRYTRRKNRICYLQEIFSNEMAKVDDSFFHRLEESFLVEEDKKHERHPIFGNIVDEVAYHEKYPTIYHLRKKLVDSTDKADLRLIYLALAHMIKFRGHFLIEGDLNPDNSDVDKLFIQLVQTYNQLFEENPINASGVDAKAILSARLSKSRRLENLIAQLPGEKKNGLFGNLIALSLGLTPNFKSNFDLAEDAKLQLSKDTYDDDLDNLLAQIGDQYADLFLAAKNLSDAILLSDILRVNTEITKAPLSASMIKRYDEHHQDLTLLKALVRQQLPEKYKEIFFDQSKNGYAGYIDGGASQEEFYKFIKPILEKMDGTEELLVKLNREDLLRKQRTFDNGSIPHQIHLGELHAILRRQEDFYPFLKDNREKIEKILTFRIPYYVGPLARGNSRFAWMTRKSEETITPWNFEEVVDKGASAQSFIERMTNFDKNLPNEKVLPKHSLLYEYFTVYNELTKVKYVTEGMRKPAFLSGEQKKAIVDLLFKTNRKVTVKQLKEDYFKKIECFDSVEISGVEDRFNASLGTYHDLLKIIKDKDFLDNEENEDILEDIVLTLTLFEDREMIEERLKTYAHLFDDKVMKQLKRRRYTGWGRLSRKLINGIRDKQSGKTILDFLKSDGFANRNFMQLIHDDSLTFKEDIQKAQVSGQGDSLHEHIANLAGSPAIKKGILQTVKVVDELVKVMGRHKPENIVIEMARENQTTQKGQKNSRERMKRIEEGIKELGSQILKEHPVENTQLQNEKLYLYYLQNGRDMYVDQELDINRLSDYDVDHIVPQSFLKDDSIDNKVLTRSDKARGKSDNVPSEEVVKKMKNYWRQLLNAKLITQRKFDNLTKAERGGLSELDKAGFIKRQLVETRQITKHVAQILDSRMNTKYDENDKLIREVKVITLKSKLVSDFRKDFQFYKVREINNYHHAHDAYLNAVVGTALIKKYPKLESEFVYGDYKVYDVRKMIAKSEQEIGKATAKYFFYSNIMNFFKTEITLANGEIRKRPLIETNGETGEIVWDKGRDFATVRKVLSMPQVNIVKKTEVQTGGFSKESILPKRNSDKLIARKKDWDPKKYGGFDSPTVAYSVLVVAKVEKGKSKKLKSVKELLGITIMERSSFEKNPIDFLEAKGYKEVKKDLIIKLPKYSLFELENGRKRMLASAGELQKGNELALPSKYVNFLYLASHYEKLKGSPEDNEQKQLFVEQHKHYLDEIIEQISEFSKRVILADANLDKVLSAYNKHRDKPIREQAENIIHLFTLTNLGAPAAFKYFDTTIDRKRYTSTKEVLDATLIHQSITGLYETRIDLSQLGGDGGGGGGGSGSSGGTLQLEEEYRLFEPESTQKQEMDIWLKNFPQAWAETGGMGTAHCQAPVLIQLKATATPISIRQYPMPHEAYQGIKPHIRRMLDQGILKPCQSPWNTPLLPVKKPGTEDYRPVQDLREVNKRVEDIHPTVPNPYNLLSTLPPSHPWYTVLDLKDAFFCLRLHSESQLLFAFEWRDPEIGLSGQLTWTRLPQGFKNSPTLFNEALHSDLADFRVRYPALVLLQYVDDLLLAAATRTECLEGTKALLETLGNKGYRASAKKAQICLQEVTYLGYSLKDGQRWLTKARKEAILSIPVPKNSRQVREFLGKAGYCRLFIPGFAELAAPLYPLTRPGTLFQWGTEQQLAFEDIKKALLSSPALGLPDITKPFELFIDENSGFAKGVLVQKLGPWKRPVAYLSKKLDTVASGWPPCLRMVAAIAILVKDAGKLTLGQPLTILTSHPVEALVRQPPNKWLSNARMTHYQAMLLDAERVHFGPTVSLNPATLLPLPSGGNHHDCLQILAETHGTRPDLTDQPLPDADLTWYTDGSSFIRNGEREAGAAVTTESEVIWAAPLPPGTSAQRAELIALTQALKMAEGKKLTVYTDSRYAFATTHVHGEIYRRRGWLTSEGKEIKNKNEILALLEALFLPKRLSIIHCPGHQKGDSPQAKGNRLADDTAKKAATETHSSLTVLPAGKRTADGSEFEKRTADGSEFESPKKKAKVE

SEQ ID NO: 6827 - protein, 2174 aa, synthetic construct
MPAAKRVKLDGGDKKYSIGLDIGTNSVGWAVITDEYKVPSKKFKVLGNTDRHSIKKNLIGALLFDSGETAEATRLKRTARRRYTRRKNRICYLQEIFSNEMAKVDDSFFHRLEESFLVEEDKKHERHPIFGNIVDEVAYHEKYPTIYHLRKKLVDSTDKADLRLIYLALAHMIKFRGHFLIEGDLNPDNSDVDKLFIQLVQTYNQLFEENPINASGVDAKAILSARLSKSRRLENLIAQLPGEKKNGLFGNLIALSLGLTPNFKSNFDLAEDAKLQLSKDTYDDDLDNLLAQIGDQYADLFLAAKNLSDAILLSDILRVNTEITKAPLSASMIKRYDEHHQDLTLLKALVRQQLPEKYKEIFFDQSKNGYAGYIDGGASQEEFYKFIKPILEKMDGTEELLVKLNREDLLRKQRTFDNGSIPHQIHLGELHAILRRQEDFYPFLKDNREKIEKILTFRIPYYVGPLARGNSRFAWMTRKSEETITPWNFEEVVDKGASAQSFIERMTNFDKNLPNEKVLPKHSLLYEYFTVYNELTKVKYVTEGMRKPAFLSGEQKKAIVDLLFKTNRKVTVKQLKEDYFKKIECFDSVEISGVEDRFNASLGTYHDLLKIIKDKDFLDNEENEDILEDIVLTLTLFEDREMIEERLKTYAHLFDDKVMKQLKRRRYTGWGRLSRKLINGIRDKQSGKTILDFLKSDGFANRNFMQLIHDDSLTFKEDIQKAQVSGQGDSLHEHIANLAGSPAIKKGILQTVKVVDELVKVMGRHKPENIVIEMARENQTTQKGQKNSRERMKRIEEGIKELGSQILKEHPVENTQLQNEKLYLYYLQNGRDMYVDQELDINRLSDYDVDHIVPQSFLKDDSIDNKVLTRSDKARGKSDNVPSEEVVKKMKNYWRQLLNAKLITQRKFDNLTKAERGGLSELDKAGFIKRQLVETRQITKHVAQILDSRMNTKYDENDKLIREVKVITLKSKLVSDFRKDFQFYKVREINNYHHAHDAYLNAVVGTALIKKYPKLESEFVYGDYKVYDVRKMIAKSEQEIGKATAKYFFYSNIMNFFKTEITLANGEIRKRPLIETNGETGEIVWDKGRDFATVRKVLSMPQVNIVKKTEVQTGGFSKESILPKRNSDKLIARKKDWDPKKYGGFDSPTVAYSVLVVAKVEKGKSKKLKSVKELLGITIMERSSFEKNPIDFLEAKGYKEVKKDLIIKLPKYSLFELENGRKRMLASAGELQKGNELALPSKYVNFLYLASHYEKLKGSPEDNEQKQLFVEQHKHYLDEIIEQISEFSKRVILADANLDKVLSAYNKHRDKPIREQAENIIHLFTLTNLGAPAAFKYFDTTIDRKRYTSTKEVLDATLIHQSITGLYETRIDLSQLGGDGGGGGGGSGSSGGMNPLQLLQPLPAEIKGTKLLAHWNSGATITCIPESFLEDEQPIKKTLIKTIHGEKQQNVYYVTFKVKGRKVEAEVIASPYEYILLSPTDVPWLTQQPLQLTILVPLQEYQEKILSKTALPEDQKQQLKTLFVKYDNLWQHWENQVGHRKIRPHNIATGDYPPRPQKQYPINPKAKPSIQIVIDDLLKQGVLTPQNSTMNTPVYPVPKPDGRWRMVLDYREVNKTIPLTAAQNQHSAGILATIVRQKYKTTLDLANGFWAHPITPESYWLTAFTWQGKQYCWTRLPQGFLNSPALFNADVVDLLKEIPNVQVYVDDIYLSHDDPKEHVQQLEKVFQILLQAGYVVSLKKSEIGQKTVEFLGFNITKEGRGLTDTFKTKLLNITPPKDLKQLQSILGKLNFARNFIPNFAELVQPLYNLIAPAKGKYIEWSEENTKQLNMVIEALNTASNLEERLPEQRLVIKVNTSPSAGYVRYYNETGKKPIMYLNYVFSKAELKFSMLEKLLTTMHKALIKAMDLAMGQEILVYSPIVSMTKIQKTPLPERKALPIRWITWMTYLEDPRIQFHYDKTLPELKHIPDVYTSSQSPVKHPSQYEGVFYTDGSAIKSPDPTKSNNAGMGIVHATYKPEYQVLNQWSIPLGNHTAQMAEIAAVEFACKKALKIPGPVLVITDSFYVAESANKELPYWKSNGFVNNKKKPLKHISKWKSIAECLSMKPDITIQHEKGISLQIPVFILKGNALADKLATQGSYVVNAGKRTADGSEFEKRTADGSEFESPKKKAKVE

SEQ ID NO: 6828 - protein, 2125 aa, synthetic construct
MPAAKRVKLDGGDKKYSIGLDIGTNSVGWAVITDEYKVPSKKFKVLGNTDRHSIKKNLIGALLFDSGETAEATRLKRTARRRYTRRKNRICYLQEIFSNEMAKVDDSFFHRLEESFLVEEDKKHERHPIFGNIVDEVAYHEKYPTIYHLRKKLVDSTDKADLRLIYLALAHMIKFRGHFLIEGDLNPDNSDVDKLFIQLVQTYNQLFEENPINASGVDAKAILSARLSKSRRLENLIAQLPGEKKNGLFGNLIALSLGLTPNFKSNFDLAEDAKLQLSKDTYDDDLDNLLAQIGDQYADLFLAAKNLSDAILLSDILRVNTEITKAPLSASMIKRYDEHHQDLTLLKALVRQQLPEKYKEIFFDQSKNGYAGYIDGGASQEEFYKFIKPILEKMDGTEELLVKLNREDLLRKQRTFDNGSIPHQIHLGELHAILRRQEDFYPFLKDNREKIEKILTFRIPYYVGPLARGNSRFAWMTRKSEETITPWNFEEVVDKGASAQSFIERMTNFDKNLPNEKVLPKHSLLYEYFTVYNELTKVKYVTEGMRKPAFLSGEQKKAIVDLLFKTNRKVTVKQLKEDYFKKIECFDSVEISGVEDRFNASLGTYHDLLKIIKDKDFLDNEENEDILEDIVLTLTLFEDREMIEERLKTYAHLFDDKVMKQLKRRRYTGWGRLSRKLINGIRDKQSGKTILDFLKSDGFANRNFMQLIHDDSLTFKEDIQKAQVSGQGDSLHEHIANLAGSPAIKKGILQTVKVVDELVKVMGRHKPENIVIEMARENQTTQKGQKNSRERMKRIEEGIKELGSQILKEHPVENTQLQNEKLYLYYLQNGRDMYVDQELDINRLSDYDVDHIVPQSFLKDDSIDNKVLTRSDKARGKSDNVPSEEVVKKMKNYWRQLLNAKLITQRKFDNLTKAERGGLSELDKAGFIKRQLVETRQITKHVAQILDSRMNTKYDENDKLIREVKVITLKSKLVSDFRKDFQFYKVREINNYHHAHDAYLNAVVGTALIKKYPKLESEFVYGDYKVYDVRKMIAKSEQEIGKATAKYFFYSNIMNFFKTEITLANGEIRKRPLIETNGETGEIVWDKGRDFATVRKVLSMPQVNIVKKTEVQTGGFSKESILPKRNSDKLIARKKDWDPKKYGGFDSPTVAYSVLVVAKVEKGKSKKLKSVKELLGITIMERSSFEKNPIDFLEAKGYKEVKKDLIIKLPKYSLFELENGRKRMLASAGELQKGNELALPSKYVNFLYLASHYEKLKGSPEDNEQKQLFVEQHKHYLDEIIEQISEFSKRVILADANLDKVLSAYNKHRDKPIREQAENIIHLFTLTNLGAPAAFKYFDTTIDRKRYTSTKEVLDATLIHQSITGLYETRIDLSQLGGDGGGGGGGSGSSGGLLGRDLLTKLKAQIQFSTEGPQVTWEDRPAMCLVLNLEEEYRLHEKPVPPSIDPSWLQLFPMVWAEKAGMGLANQVPPVVVELKSDASPVAVRQYPMSKEAREGIRPHIQRFLDLGILVPCQSPWNTPLLPVKKPGTNDYRPVQDLREVNKRVQDIHPTVPNPYNLLSSLPPSHTWYSVLDLKDAFFCLKLHPNSQPLFAFEWRDPEKGNTGQLTWTRLPQGFKNSPTLFNEALHRDLASFRALNPQVVMLQYVDDLLVAAPTYRDCKEGTRRLLQELSKLGYRVSAKKAQLCREEVTYLGYLLKGGKRWLTPARKATVMKIPTPTTPRQVREFLGTAGFCRLWIPGFASLAAPLYPLTRPKVPFTWTEAHQEAFGRIKEALLSAPALALPDLTKPFALYVDEKEGVARGVLTQTLGPWRRPVAYLSKKLDPVASGWPTCLKAIAAVALLLKDADKLTLGQNVLVIAPHNLESIVRQPPDRWMTNARMTHYQSLLLNERVSFAPPAILNPATLLPVESDDTPIHICSEILAEETGTRPDLRDQPLPGVPAWYTDGSSFIMDGRRQAGAAIVDNKRTVWASNLPEGTSAQKAELIALTQALRLAEGKSINIYTDSRYAFATAHVHGAIYKQRGWLTSAGKDIKNKEEILALLEAIHLPKRVAIIHCPGHQRGTDPVATGNRKADEAAKQAAQSTRILTETTKNAGKRTADGSEFEKRTADGSEFESPKKKAKVE

SEQ ID NO: 6829 - protein, 2125 aa, synthetic construct
MPAAKRVKLDGGDKKYSIGLDIGTNSVGWAVITDEYKVPSKKFKVLGNTDRHSIKKNLIGALLFDSGETAEATRLKRTARRRYTRRKNRICYLQEIFSNEMAKVDDSFFHRLEESFLVEEDKKHERHPIFGNIVDEVAYHEKYPTIYHLRKKLVDSTDKADLRLIYLALAHMIKFRGHFLIEGDLNPDNSDVDKLFIQLVQTYNQLFEENPINASGVDAKAILSARLSKSRRLENLIAQLPGEKKNGLFGNLIALSLGLTPNFKSNFDLAEDAKLQLSKDTYDDDLDNLLAQIGDQYADLFLAAKNLSDAILLSDILRVNTEITKAPLSASMIKRYDEHHQDLTLLKALVRQQLPEKYKEIFFDQSKNGYAGYIDGGASQEEFYKFIKPILEKMDGTEELLVKLNREDLLRKQRTFDNGSIPHQIHLGELHAILRRQEDFYPFLKDNREKIEKILTFRIPYYVGPLARGNSRFAWMTRKSEETITPWNFEEVVDKGASAQSFIERMTNFDKNLPNEKVLPKHSLLYEYFTVYNELTKVKYVTEGMRKPAFLSGEQKKAIVDLLFKTNRKVTVKQLKEDYFKKIECFDSVEISGVEDRFNASLGTYHDLLKIIKDKDFLDNEENEDILEDIVLTLTLFEDREMIEERLKTYAHLFDDKVMKQLKRRRYTGWGRLSRKLINGIRDKQSGKTILDFLKSDGFANRNFMQLIHDDSLTFKEDIQKAQVSGQGDSLHEHIANLAGSPAIKKGILQTVKVVDELVKVMGRHKPENIVIEMARENQTTQKGQKNSRERMKRIEEGIKELGSQILKEHPVENTQLQNEKLYLYYLQNGRDMYVDQELDINRLSDYDVDHIVPQSFLKDDSIDNKVLTRSDKARGKSDNVPSEEVVKKMKNYWRQLLNAKLITQRKFDNLTKAERGGLSELDKAGFIKRQLVETRQITKHVAQILDSRMNTKYDENDKLIREVKVITLKSKLVSDFRKDFQFYKVREINNYHHAHDAYLNAVVGTALIKKYPKLESEFVYGDYKVYDVRKMIAKSEQEIGKATAKYFFYSNIMNFFKTEITLANGEIRKRPLIETNGETGEIVWDKGRDFATVRKVLSMPQVNIVKKTEVQTGGFSKESILPKRNSDKLIARKKDWDPKKYGGFDSPTVAYSVLVVAKVEKGKSKKLKSVKELLGITIMERSSFEKNPIDFLEAKGYKEVKKDLIIKLPKYSLFELENGRKRMLASAGELQKGNELALPSKYVNFLYLASHYEKLKGSPEDNEQKQLFVEQHKHYLDEIIEQISEFSKRVILADANLDKVLSAYNKHRDKPIREQAENIIHLFTLTNLGAPAAFKYFDTTIDRKRYTSTKEVLDATLIHQSITGLYETRIDLSQLGGDGGGGGGGSGSSGGLLGRDLLTKLKAQIQFSTEGPQVTWEDRPAMCLVLNLEEEYRLHEKPVPPSIDPSWLQLFPMVWAEKAGMGLANQVPPVVVELKSDASPVAVRQYPMSKEAREGIRPHIQRFLDLGILVPCQSPWNTPLLPVKKPGTNDYRPVQDLREVNKRVQDIHPTVPNPYNLLSSLPPSHTWYSVLDLKDAFFCLKLHPNSQPLFAFEWRDPEKGNTGQLTWTRLPQGFKNSPTLFNEALHRDLASFRALNPQVVMLQYVDDLLVAAPTYRDCKEGTRRLLQELSKLGYRVSAKKAQLCREEVTYLGYLLKGGKRWLTPARKATVMKIPTPTTPRQVREFLGKAGFCRLFIPGFASLAAPLYPLTRPKVPFTWTEAHQEAFGRIKEALLSAPALALPDLTKPFALYVDEKEGVARGVLTQTLGPWRRPVAYLSKKLDPVASGWPTCLKAIAAVALLLKDADKLTLGQNVLVIAPHNLESIVRQPPDRWMTNARMTHYQSLLLNERVSFAPPAILNPATLLPVESDDTPIHICSEILAEETGTRPDLRDQPLPGVPAWYTDGSSFIMDGRRQAGAAIVDNKRTVWASNLPEGTSAQKAELIALTQALRLAEGKSINIYTDSRYAFATAHVHGAIYKQRGWLTSAGKDIKNKEEILALLEAIHLPKRVAIIHCPGHQRGTDPVATGNRKADEAAKQAAQSTRILTETTKNAGKRTADGSEFEKRTADGSEFESPKKKAKVE

SEQ ID NO: 6830 - protein, 2094 aa, synthetic construct
MPAAKRVKLDGGDKKYSIGLDIGTNSVGWAVITDEYKVPSKKFKVLGNTDRHSIKKNLIGALLFDSGETAEATRLKRTARRRYTRRKNRICYLQEIFSNEMAKVDDSFFHRLEESFLVEEDKKHERHPIFGNIVDEVAYHEKYPTIYHLRKKLVDSTDKADLRLIYLALAHMIKFRGHFLIEGDLNPDNSDVDKLFIQLVQTYNQLFEENPINASGVDAKAILSARLSKSRRLENLIAQLPGEKKNGLFGNLIALSLGLTPNFKSNFDLAEDAKLQLSKDTYDDDLDNLLAQIGDQYADLFLAAKNLSDAILLSDILRVNTEITKAPLSASMIKRYDEHHQDLTLLKALVRQQLPEKYKEIFFDQSKNGYAGYIDGGASQEEFYKFIKPILEKMDGTEELLVKLNREDLLRKQRTFDNGSIPHQIHLGELHAILRRQEDFYPFLKDNREKIEKILTFRIPYYVGPLARGNSRFAWMTRKSEETITPWNFEEVVDKGASAQSFIERMTNFDKNLPNEKVLPKHSLLYEYFTVYNELTKVKYVTEGMRKPAFLSGEQKKAIVDLLFKTNRKVTVKQLKEDYFKKIECFDSVEISGVEDRFNASLGTYHDLLKIIKDKDFLDNEENEDILEDIVLTLTLFEDREMIEERLKTYAHLFDDKVMKQLKRRRYTGWGRLSRKLINGIRDKQSGKTILDFLKSDGFANRNFMQLIHDDSLTFKEDIQKAQVSGQGDSLHEHIANLAGSPAIKKGILQTVKVVDELVKVMGRHKPENIVIEMARENQTTQKGQKNSRERMKRIEEGIKELGSQILKEHPVENTQLQNEKLYLYYLQNGRDMYVDQELDINRLSDYDVDHIVPQSFLKDDSIDNKVLTRSDKARGKSDNVPSEEVVKKMKNYWRQLLNAKLITQRKFDNLTKAERGGLSELDKAGFIKRQLVETRQITKHVAQILDSRMNTKYDENDKLIREVKVITLKSKLVSDFRKDFQFYKVREINNYHHAHDAYLNAVVGTALIKKYPKLESEFVYGDYKVYDVRKMIAKSEQEIGKATAKYFFYSNIMNFFKTEITLANGEIRKRPLIETNGETGEIVWDKGRDFATVRKVLSMPQVNIVKKTEVQTGGFSKESILPKRNSDKLIARKKDWDPKKYGGFDSPTVAYSVLVVAKVEKGKSKKLKSVKELLGITIMERSSFEKNPIDFLEAKGYKEVKKDLIIKLPKYSLFELENGRKRMLASAGELQKGNELALPSKYVNFLYLASHYEKLKGSPEDNEQKQLFVEQHKHYLDEIIEQISEFSKRVILADANLDKVLSAYNKHRDKPIREQAENIIHLFTLTNLGAPAAFKYFDTTIDRKRYTSTKEVLDATLIHQSITGLYETRIDLSQLGGDGGGGGGGSGSSGGTLNIEDEYRLHETSKGPDVPLGSTWLSDFPQAWAETGGMGLAVRQAPLIIPLKATSTPVSIKQYPMSQEARLGIKPHIQRLLDQGILVPCQSPWNTPLLPVKKPGTNDYRPVQDLREVNKRVEDIHPTVPNPYNLLSGLPPSHQWYTVLDLKDAFFCLRLHPTSQSLFAFEWRDPEMGISGQLTWTRLPQGFKNSPTLFNEALHRDLADFRIQHPDLILLQYVDDLLLAATSELDCQQGTRALLQTLGDLGYRASAKKAQICQKQVKYLGYLLKEGQRWLTEARKETVMGQPTPKTPRQLREFLGTAGFCRLWIPGFAEMAAPLYPLTKPGTLFEWGPDQQKAYQEIKQALLTAPALGLPDLTKPFELFVDEKQGYAKGVLTQKLGPWRRPVAYLSKKLDPVAAGWPPCLRMVAAIAVLTKDAGKLTMGQPLVILAPHAVEALVKQPPDRWLSNARMTHYQALLLDTDRVQFGPIVALNPATLLPLPEEGLQHDCLDILAEAHGTRPDLTDQPLPDADHTWYTDGSSFLQEGQRKAGAAVTTETEVVWAKALPAGTSAQRAELIALTQALKMAEGKKLNVYTDSRYAFATAHIHGEIYRRRGWLTSEGKEIKNKDEILALLKALFLPKRLSIIHCPGHQKGNRAEARGNRMADQAAREVATRETPETSTLLAGKRTADGSEFEKRTADGSEFESPKKKAKVE

SEQ ID NO: 6831 - protein, 2094 aa, synthetic construct
MPAAKRVKLDGGDKKYSIGLDIGTNSVGWAVITDEYKVPSKKFKVLGNTDRHSIKKNLIGALLFDSGETAEATRLKRTARRRYTRRKNRICYLQEIFSNEMAKVDDSFFHRLEESFLVEEDKKHERHPIFGNIVDEVAYHEKYPTIYHLRKKLVDSTDKADLRLIYLALAHMIKFRGHFLIEGDLNPDNSDVDKLFIQLVQTYNQLFEENPINASGVDAKAILSARLSKSRRLENLIAQLPGEKKNGLFGNLIALSLGLTPNFKSNFDLAEDAKLQLSKDTYDDDLDNLLAQIGDQYADLFLAAKNLSDAILLSDILRVNTEITKAPLSASMIKRYDEHHQDLTLLKALVRQQLPEKYKEIFFDQSKNGYAGYIDGGASQEEFYKFIKPILEKMDGTEELLVKLNREDLLRKQRTFDNGSIPHQIHLGELHAILRRQEDFYPFLKDNREKIEKILTFRIPYYVGPLARGNSRFAWMTRKSEETITPWNFEEVVDKGASAQSFIERMTNFDKNLPNEKVLPKHSLLYEYFTVYNELTKVKYVTEGMRKPAFLSGEQKKAIVDLLFKTNRKVTVKQLKEDYFKKIECFDSVEISGVEDRFNASLGTYHDLLKIIKDKDFLDNEENEDILEDIVLTLTLFEDREMIEERLKTYAHLFDDKVMKQLKRRRYTGWGRLSRKLINGIRDKQSGKTILDFLKSDGFANRNFMQLIHDDSLTFKEDIQKAQVSGQGDSLHEHIANLAGSPAIKKGILQTVKVVDELVKVMGRHKPENIVIEMARENQTTQKGQKNSRERMKRIEEGIKELGSQILKEHPVENTQLQNEKLYLYYLQNGRDMYVDQELDINRLSDYDVDHIVPQSFLKDDSIDNKVLTRSDKARGKSDNVPSEEVVKKMKNYWRQLLNAKLITQRKFDNLTKAERGGLSELDKAGFIKRQLVETRQITKHVAQILDSRMNTKYDENDKLIREVKVITLKSKLVSDFRKDFQFYKVREINNYHHAHDAYLNAVVGTALIKKYPKLESEFVYGDYKVYDVRKMIAKSEQEIGKATAKYFFYSNIMNFFKTEITLANGEIRKRPLIETNGETGEIVWDKGRDFATVRKVLSMPQVNIVKKTEVQTGGFSKESILPKRNSDKLIARKKDWDPKKYGGFDSPTVAYSVLVVAKVEKGKSKKLKSVKELLGITIMERSSFEKNPIDFLEAKGYKEVKKDLIIKLPKYSLFELENGRKRMLASAGELQKGNELALPSKYVNFLYLASHYEKLKGSPEDNEQKQLFVEQHKHYLDEIIEQISEFSKRVILADANLDKVLSAYNKHRDKPIREQAENIIHLFTLTNLGAPAAFKYFDTTIDRKRYTSTKEVLDATLIHQSITGLYETRIDLSQLGGDGGGGGGGSGSSGGTLNIEDEHRLHETSKEPDVSLGSTWLSDFPQAWAETGGMGLAVRQAPLIIPLKATSTPVSIKQYPMSQEARLGIKPHIQRLLDQGILVPCQSPWNTPLLPVKKPGTNDYRPVQDLREVNKRVEDIHPTVPNPYNLLSGLPPSHQWYTVLDLKDAFFCLRLHPTSQPLFAFEWRDPEMGISGQLTWTRLPQGFKNSPTLFNEALHRDLADFRIQHPDLILLQYVDDLLLAATSELDCQQGTRALLQTLGNLGYRASAKKAQICQKQVKYLGYLLKEGQRWLTEARKETVMGQPTPKTPRQLREFLGTAGFCRLWIPGFAEMAAPLYPLTKPGTLFNWGPDQQKAYQEIKQALLTAPALGLPDLTKPFELFVDEKQGYAKGVLTQKLGPWRRPVAYLSKKLDPVAAGWPPCLRMVAAIAVLTKDAGKLTMGQPLVILAPHAVEALVKQPPDRWLSNARMTHYQALLLDTDRVQFGPVVALNPATLLPLPEEGLQHNCLDILAEAHGTRPDLTDQPLPDADHTWYTDGSSLLQEGQRKAGAAVTTETEVIWAKALPAGTSAQRAELIALTQALKMAEGKKLNVYTDSRYAFATAHIHGEIYRRRGWLTSEGKEIKNKDEILALLKALFLPKRLSIIHCPGHQKGHSAEARGNRMADQAARKAAITETPDTSTLLAGKRTADGSEFEKRTADGSEFESPKKKAKVE

SEQ ID NO: 6832 - protein, 2094 aa, synthetic construct; identical to SEQ ID NO: 6831

SEQ ID NO: 6833 - protein, 2086 aa, synthetic construct
MPAAKRVKLDGGDKKYSIGLDIGTNSVGWAVITDEYKVPSKKFKVLGNTDRHSIKKNLIGALLFDSGETAEATRLKRTARRRYTRRKNRICYLQEIFSNEMAKVDDSFFHRLEESFLVEEDKKHERHPIFGNIVDEVAYHEKYPTIYHLRKKLVDSTDKADLRLIYLALAHMIKFRGHFLIEGDLNPDNSDVDKLFIQLVQTYNQLFEENPINASGVDAKAILSARLSKSRRLENLIAQLPGEKKNGLFGNLIALSLGLTPNFKSNFDLAEDAKLQLSKDTYDDDLDNLLAQIGDQYADLFLAAKNLSDAILLSDILRVNTEITKAPLSASMIKRYDEHHQDLTLLKALVRQQLPEKYKEIFFDQSKNGYAGYIDGGASQEEFYKFIKPILEKMDGTEELLVKLNREDLLRKQRTFDNGSIPHQIHLGELHAILRRQEDFYPFLKDNREKIEKILTFRIPYYVGPLARGNSRFAWMTRKSEETITPWNFEEVVDKGASAQSFIERMTNFDKNLPNEKVLPKHSLLYEYFTVYNELTKVKYVTEGMRKPAFLSGEQKKAIVDLLFKTNRKVTVKQLKEDYFKKIECFDSVEISGVEDRFNASLGTYHDLLKIIKDKDFLDNEENEDILEDIVLTLTLFEDREMIEERLKTYAHLFDDKVMKQLKRRRYTGWGRLSRKLINGIRDKQSGKTILDFLKSDGFANRNFMQLIHDDSLTFKEDIQKAQVSGQGDSLHEHIANLAGSPAIKKGILQTVKVVDELVKVMGRHKPENIVIEMARENQTTQKGQKNSRERMKRIEEGIKELGSQILKEHPVENTQLQNEKLYLYYLQNGRDMYVDQELDINRLSDYDVDHIVPQSFLKDDSIDNKVLTRSDKARGKSDNVPSEEVVKKMKNYWRQLLNAKLITQRKFDNLTKAERGGLSELDKAGFIKRQLVETRQITKHVAQILDSRMNTKYDENDKLIREVKVITLKSKLVSDFRKDFQFYKVREINNYHHAHDAYLNAVVGTALIKKYPKLESEFVYGDYKVYDVRKMIAKSEQEIGKATAKYFFYSNIMNFFKTEITLANGEIRKRPLIETNGETGEIVWDKGRDFATVRKVLSMPQVNIVKKTEVQTGGFSKESILPKRNSDKLIARKKDWDPKKYGGFDSPTVAYSVLVVAKVEKGKSKKLKSVKELLGITIMERSSFEKNPIDFLEAKGYKEVKKDLIIKLPKYSLFELENGRKRMLASAGELQKGNELALPSKYVNFLYLASHYEKLKGSPEDNEQKQLFVEQHKHYLDEIIEQISEFSKRVILADANLDKVLSAYNKHRDKPIREQAENIIHLFTLTNLGAPAAFKYFDTTIDRKRYTSTKEVLDATLIHQSITGLYETRIDLSQLGGDGGGGGGGSGSSGGLDDEYRLYSPLVKPDQNIQFWLEQFPQAWAETAGMGLAKQVPPQVIQLKASATPVSVRQYPLSKEAQEGIRPHVQRLIQQGILVPVQSPWNTPLLPVRKPGTNDYRPVQDLREVNKRVQDIHPTVPNPYNLLCALPPQRSWYTVLDLKDAFFCLRLHPTSQPLFAFEWRDPGTGRTGQLTWTRLPQGFKNSPTIFNEALHRDLANFRIQHPQVTLLQYVDDLLLAGATKQDCLEGTKALLLELSDLGYRASAKKAQICRREVTYLGYSLRDGQRWLTEARKKTVVQIPAPTTAKQVREFLGKAGFCRLFIPGFATLAAPLYPLTKPKGEFSWAPEHQKAFDAIKKALLSAPALALPDVTKPFTLYVDERKGVARGVLTQTLGPWRRPVAYLSKKLDPVASGWPVCLKAIAAVAILVKDADKLTLGQNITVIAPHALENIVRQPPDRWMTNARMTHYQSLLLTERVTFAPPAALNPATLLPEETDEPVTHDCHQLLIEETGVRKDLTDIPLTGEVLTWFTDGSSYVVEGKRMAGAAVVDGTRTIWASSLPEGTSAQKAELMALTQALRLAEGKSINIYTDSRYAFATAHVHGAIYKQRGWLTSAGREIKNKEEILSLLEALHLPKRLAIIHCPGHQKAKDPISRGNQMADRVAKQAAQGVNLLPAGKRTADGSEFEKRTADGSEFESPKKKAKVE

SEQ ID NO: 6834 - protein, 2086 aa, synthetic construct; identical to SEQ ID NO: 6833

SEQ ID NO: 6835 - protein, 2088 aa, synthetic construct
MPAAKRVKLDGGDKKYSIGLDIGTNSVGWAVITDEYKVPSKKFKVLGNTDRHSIKKNLIGALLFDSGETAEATRLKRTARRRYTRRKNRICYLQEIFSNEMAKVDDSFFHRLEESFLVEEDKKHERHPIFGNIVDEVAYHEKYPTIYHLRKKLVDSTDKADLRLIYLALAHMIKFRGHFLIEGDLNPDNSDVDKLFIQLVQTYNQLFEENPINASGVDAKAILSARLSKSRRLENLIAQLPGEKKNGLFGNLIALSLGLTPNFKSNFDLAEDAKLQLSKDTYDDDLDNLLAQIGDQYADLFLAAKNLSDAILLSDILRVNTEITKAPLSASMIKRYDEHHQDLTLLKALVRQQLPEKYKEIFFDQSKNGYAGYIDGGASQEEFYKFIKPILEKMDGTEELLVKLNREDLLRKQRTFDNGSIPHQIHLGELHAILRRQEDFYPFLKDNREKIEKILTFRIPYYVGPLARGNSRFAWMTRKSEETITPWNFEEVVDKGASAQSFIERMTNFDKNLPNEKVLPKHSLLYEYFTVYNELTKVKYVTEGMRKPAFLSGEQKKAIVDLLFKTNRKVTVKQLKEDYFKKIECFDSVEISGVEDRFNASLGTYHDLLKIIKDKDFLDNEENEDILEDIVLTLTLFEDREMIEERLKTYAHLFDDKVMKQLKRRRYTGWGRLSRKLINGIRDKQSGKTILDFLKSDGFANRNFMQLIHDDSLTFKEDIQKAQVSGQGDSLHEHIANLAGSPAIKKGILQTVKVVDELVKVMGRHKPENIVIEMARENQTTQKGQKNSRERMKRIEEGIKELGSQILKEHPVENTQLQNEKLYLYYLQNGRDMYVDQELDINRLSDYDVDHIVPQSFLKDDSIDNKVLTRSDKARGKSDNVPSEEVVKKMKNYWRQLLNAKLITQRKFDNLTKAERGGLSELDKAGFIKRQLVETRQITKHVAQILDSRMNTKYDENDKLIREVKVITLKSKLVSDFRKDFQFYKVREINNYHHAHDAYLNAVVGTALIKKYPKLESEFVYGDYKVYDVRKMIAKSEQEIGKATAKYFFYSNIMNFFKTEITLANGEIRKRPLIETNGETGEIVWDKGRDFATVRKVLSMPQVNIVKKTEVQTGGFSKESILPKRNSDKLIARKKDWDPKKYGGFDSPTVAYSVLVVAKVEKGKSKKLKSVKELLGITIMERSSFEKNPIDFLEAKGYKEVKKDLIIKLPKYSLFELENGRKRMLASAGELQKGNELALPSKYVNFLYLASHYEKLKGSPEDNEQKQLFVEQHKHYLDEIIEQISEFSKRVILADANLDKVLSAYNKHRDKPIREQAENIIHLFTLTNLGAPAAFKYFDTTIDRKRYTSTKEVLDATLIHQSITGLYETRIDLSQLGGDGGGGGGGSGSSGGTLQLDDEYRLYSPLVKPDQNIQFWLEQFPQAWAETAGMGLAKQVPPQVIQLKASATPVSVRQYPLSKEAQEGIRPHVQRLIQQGILVPVQSPWNTPLLPVRKPGTNDYRPVQDLREVNKRVQDIHPTVPNPYNLLCALPPQRSWYTVLDLKDAFFCLRLHPTSQPLFAFEWRDPGTGRTGQLTWTRLPQGFKNSPTIFDEALHRDLANFRIQHPQVTLLQYVDDLLLAGATKQDCLEGTKALLLELSDLGYRASAKKAQICRREVTYLGYSLRDGQRWLTEARKKTVVQIPAPTTAKQVREFLGTAGFCRLWIPGFATLAAPLYPLTKEKGEFSWAPEHQKAFDAIKKALLSAPALALPDVTKPFTLYVDERKGVARGVLTQTLGPWRRPVAYLSKKLDPVASGWPVCLKAIAAVAILVKDADKLTLGQNITVIAPHALENIVRQPPDRWMTNARMTHYQSLLLTERVTFAPPAALNPATLLPEETDEPVTHDCHQLLIEETGVRKDLTDIPLTGEVLTWFTDGSSYVVEGKRMAGAAVVDGTRTIWASSLPEGTSAQKAELMALTQALRLAEGKSINIYTDSRYAFATAHVHGAIYKQRGLLTSAGREIKNKEEILSLLEALHLPKRLAIIHCPGHQKAKDPISRGNQMADRVAKQAAQGVNLLAGKRTADGSEFEKRTADGSEFESPKKKAKVE

SEQ ID NO: 6836 - protein, 2085 aa, synthetic construct
MPAAKRVKLDGGDKKYSIGLDIGTNSVGWAVITDEYKVPSKKFKVLGNTDRHSIKKNLIGALLFDSGETAEATRLKRTARRRYTRRKNRICYLQEIFSNEMAKVDDSFFHRLEESFLVEEDKKHERHPIFGNIVDEVAYHEKYPTIYHLRKKLVDSTDKADLRLIYLALAHMIKFRGHFLIEGDLNPDNSDVDKLFIQLVQTYNQLFEENPINASGVDAKAILSARLSKSRRLENLIAQLPGEKKNGLFGNLIALSLGLTPNFKSNFDLAEDAKLQLSKDTYDDDLDNLLAQIGDQYADLFLAAKNLSDAILLSDILRVNTEITKAPLSASMIKRYDEHHQDLTLLKALVRQQLPEKYKEIFFDQSKNGYAGYIDGGASQEEFYKFIKPILEKMDGTEELLVKLNREDLLRKQRTFDNGSIPHQIHLGELHAILRRQEDFYPFLKDNREKIEKILTFRIPYYVGPLARGNSRFAWMTRKSEETITPWNFEEVVDKGASAQSFIERMTNFDKNLPNEKVLPKHSLLYEYFTVYNELTKVKYVTEGMRKPAFLSGEQKKAIVDLLFKTNRKVTVKQLKEDYFKKIECFDSVEISGVEDRFNASLGTYHDLLKIIKDKDFLDNEENEDILEDIVLTLTLFEDREMIEERLKTYAHLFDDKVMKQLKRRRYTGWGRLSRKLINGIRDKQSGKTILDFLKSDGFANRNFMQLIHDDSLTFKEDIQKAQVSGQGDSLHEHIANLAGSPAIKKGILQTVKVVDELVKVMGRHKPENIVIEMARENQTTQKGQKNSRERMKRIEEGIKELGSQILKEHPVENTQLQNEKLYLYYLQNGRDMYVDQELDINRLSDYDVDHIVPQSFLKDDSIDNKVLTRSDKARGKSDNVPSEEVVKKMKNYWRQLLNAKLITQRKFDNLTKAERGGLSELDKAGFIKRQLVETRQITKHVAQILDSRMNTKYDENDKLIREVKVITLKSKLVSDFRKDFQFYKVREINNYHHAHDAYLNAVVGTALIKKYPKLESEFVYGDYKVYDVRKMIAKSEQEIGKATAKYFFYSNIMNFFKTEITLANGEIRKRPLIETNGETGEIVWDKGRDFATVRKVLSMPQVNIVKKTEVQTGGFSKESILPKRNSDKLIARKKDWDPKKYGGFDSPTVAYSVLVVAKVEKGKSKKLKSVKELLGITIMERSSFEKNPIDFLEAKGYKEVKKDLIIKLPKYSLFELENGRKRMLASAGELQKGNELALPSKYVNFLYLASHYEKLKGSPEDNEQKQLFVEQHKHYLDEIIEQISEFSKRVILADANLDKVLSAYNKHRDKPIREQAENIIHLFTLTNLGAPAAFKYFDTTIDRKRYTSTKEVLDATLIHQSITGLYETRIDLSQLGGDGGGGGGGSGSSGGVPWLMKKPLQLTVLVPLHEYQERLLQQTALPKEQKELLQKLFLKYDALWQHWENQVGHRRIKPHNIATGTLAPRPQKQYPINPKAKPSIQIVIDDLLKQGVLIQQNSTMNTPVYPVPKPDGKWRMVLDYREVNKTIPLIAAQNQHSAGILSSIYRGKYKTTLDLTNGFWAHPITPESYWLTAFTWQGKQYCWTRLPQGFLNSPALFTADVVDLLKEIPNVQAYVDDIYISHDDPQEHLEQLEKIFSILLNAGYVVSLKKSEIAQREVEFLGFNITKEGRGLTDTFKQKLLNITPPKDLKQLQSILGLLNFARNFIPNYSELVKPLYTIVANANGKFISWTEDNSNQLQHIISVLNQADNLEERNPETRLIIKVNSSPSAGYIRYYNEGSKRPIMYVNYIFSKAEAKFTQTEKLLTTMHKGLIKAMDLAMGQEILVYSPIVSMTKIQRTPLPERKALPVRWITWMTYLEDPRIQFHYDKSLPELQQIPNVTEDVIAKTKHPSEFAMVFYTDGSAIKHPDVNKSHSAGMGIAQVQFIPEYKIVHQWSIPLGDHTAQLAEIAAVEFACKKALKISGPVLIVTDSFYVAESANKELPYWKSNGFLNNKKKPLRHVSKWKSIAECLQLKPDIIIMHEKGHQQPMTTLHTEGNNLADKLATQGSYVVHAGKRTADGSEFEKRTADGSEFESPKKKAKVE

SEQ ID NO: 6837 - protein, 2085 aa, synthetic construct
MPAAKRVKLDGGDKKYSIGLDIGTNSVGWAVITDEYKVPSKKFKVLGNTDRHSIKKNLIGALLFDSGETAEATRLKRTARRRYTRRKNRICYLQEIFSNEMAKVDDSFFHRLEESFLVEEDKKHERHPIFGNIVDEVAYHEKYPTIYHLRKKLVDSTDKADLRLIYLALAHMIKFRGHFLIEGDLNPDNSDVDKLFIQLVQTYNQLFEENPINASGVDAKAILSARLSKSRRLENLIAQLPGEKKNGLFGNLIALSLGLTPNFKSNFDLAEDAKLQLSKDTYDDDLDNLLAQIGDQYADLFLAAKNLSDAILLSDILRVNTEITKAPLSASMIKRYDEHHQDLTLLKALVRQQLPEKYKEIFFDQSKNGYAGYIDGGASQEEFYKFIKPILEKMDGTEELLVKLNREDLLRKQRTFDNGSIPHQIHLGELHAILRRQEDFYPFLKDNREKIEKILTFRIPYYVGPLARGNSRFAWMTRKSEETITPWNFEEVVDKGASAQSFIERMTNFDKNLPNEKVLPKHSLLYEYFTVYNELTKVKYVTEGMRKPAFLSGEQKKAIVDLLFKTNRKVTVKQLKEDYFKKIECFDSVEISGVEDRFNASLGTYHDLLKIIKDKDFLDNEENEDILEDIVLTLTLFEDREMIEERLKTYAHLFDDKVMKQLKRRRYTGWGRLSRKLINGIRDKQSGKTILDFLKSDGFANRNFMQLIHDDSLTFKEDIQKAQVSGQGDSLHEHIANLAGSPAIKKGILQTVKVVDELVKVMGRHKPENIVIEMARENQTTQKGQKNSRERMKRIEEGIKELGSQILKEHPVENTQLQNEKLYLYYLQNGRDMYVDQELDINRLSDYDVDHIVPQSFLKDDSIDNKVLTRSDKARGKSDNVPSEEVVKKMKNYWRQLLNAKLITQRKFDNLTKAERGGLSELDKAGFIKRQLVETRQITKHVAQILDSRMNTKYDENDKLIREVKVITLKSKLVSDFRKDFQFYKVREINNYHHAHDAYLNAVVGTALIKKYPKLESEFVYGDYKVYDVRKMIAKSEQEIGKATAKYFFYSNIMNFFKTEITLANGEIRKRPLIETNGETGEIVWDKGRDFATVRKVLSMPQVNIVKKTEVQTGGFSKESILPKRNSDKLIARKKDWDPKKYGGFDSPTVAYSVLVVAKVEKGKSKKLKSVKELLGITIMERSSFEKNPIDFLEAKGYKEVKKDLIIKLPKYSLFELENGRKRMLASAGELQKGNELALPSKYVNFLYLASHYEKLKGSPEDNEQKQLFVEQHKHYLDEIIEQISEFSKRVILADANLDKVLSAYNKHRDKPIREQAENIIHLFTLTNLGAPAAFKYFDTTIDRKRYTSTKEVLDATLIHQSITGLYETRIDLSQLGGDGGGGGGGSGSSGGVPWLMKKPLQLTVLVPLHEYQERLLQQTALPKEQKELLQKLFLKYDALWQHWENQVGHRRIKPHNIATGTLAPRPQKQYPINPKAKPSIQIVIDDLLKQGVLIQQNSTMNTPVYPVPKPDGKWRMVLDYREVNKTIPLIAAQNQHSAGILSSIYRGKYKTTLDLTNGFWAHPITPESYWLTAFTWQGKQYCWTRLPQGFLNSPALFNADVVDLLKEIPNVQAYVDDIYISHDDPQEHLEQLEKIFSILLNAGYVVSLKKSEIAQREVEFLGFNITKEGRGLTDTFKQKLLNITPPKDLKQLQSILGLLNFARNFIPNYSELVKPLYTIVAPANGKFISWTEDNSNQLQHIISVLNQADNLEERNPETRLIIKVNSSPSAGYIRYYNEGSKRPIMYVNYIFSKAEAKFTQTEKLLTTMHKGLIKAMDLAMGQEILVYSPIVSMTKIQRTPLPERKALPVRWITWMTYLEDPRIQFHYDKSLPELQQIPNVTEDVIAKTKHPSEFAMVFYTDGSAIKHPDVNKSHSAGMGIAQVQFIPEYKIVHQWSIPLGDHTAQLAEIAAVEFACKKALKISGPVLIVTDSFYVAESANKELPYWKSNGFLNNKKKPLRHVSKWKSIAECLQLKPDIIIMHEKGHQQPMTTLHTEGNNLADKLATQGSYVVHAGKRTADGSEFEKRTADGSEFESPKKKAKVE

SEQ ID NO: 6838 - protein, 2174 aa, synthetic construct
MPAAKRVKLDGGDKKYSIGLDIGTNSVGWAVITDEYKVPSKKFKVLGNTDRHSIKKNLIGALLFDSGETAEATRLKRTARRRYTRRKNRICYLQEIFSNEMAKVDDSFFHRLEESFLVEEDKKHERHPIFGNIVDEVAYHEKYPTIYHLRKKLVDSTDKADLRLIYLALAHMIKFRGHFLIEGDLNPDNSDVDKLFIQLVQTYNQLFEENPINASGVDAKAILSARLSKSRRLENLIAQLPGEKKNGLFGNLIALSLGLTPNFKSNFDLAEDAKLQLSKDTYDDDLDNLLAQIGDQYADLFLAAKNLSDAILLSDILRVNTEITKAPLSASMIKRYDEHHQDLTLLKALVRQQLPEKYKEIFFDQSKNGYAGYIDGGASQEEFYKFIKPILEKMDGTEELLVKLNREDLLRKQRTFDNGSIPHQIHLGELHAILRRQEDFYPFLKDNREKIEKILTFRIPYYVGPLARGNSRFAWMTRKSEETITPWNFEEVVDKGASAQSFIERMTNFDKNLPNEKVLPKHSLLYEYFTVYNELTKVKYVTEGMRKPAFLSGEQKKAIVDLLFKTNRKVTVKQLKEDYFKKIECFDSVEISGVEDRFNASLGTYHDLLKIIKDKDFLDNEENEDILEDIVLTLTLFEDREMIEERLKTYAHLFDDKVMKQLKRRRYTGWGRLSRKLINGIRDKQSGKTILDFLKSDGFANRNFMQLIHDDSLTFKEDIQKAQVSGQGDSLHEHIANLAGSPAIKKGILQTVKVVDELVKVMGRHKPENIVIEMARENQTTQKGQKNSRERMKRIEEGIKELGSQILKEHPVENTQLQNEKLYLYYLQNGRDMYVDQELDINRLSDYDVDHIVPQSFLKDDSIDNKVLTRSDKARGKSDNVPSEEVVKKMKNYWRQLLNAKLITQRKFDNLTKAERGGLSELDKAGFIKRQLVETRQITKHVAQILDSRMNTKYDENDKLIREVKVITLKSKLVSDFRKDFQFYKVREINNYHHAHDAYLNAVVGTALIKKYPKLESEFVYGDYKVYDVRKMIAKSEQEIGKATAKYFFYSNIMNFFKTEITLANGEIRKRPLIETNGETGEIVWDKGRDFATVRKVLSMPQVNIVKKTEVQTGGFSKESILPKRNSDKLIARKKDWDPKKYGGFDSPTVAYSVLVVAKVEKGKSKKLKSVKELLGITIMERSSFEKNPIDFLEAKGYKEVKKDLIIKLPKYSLFELENGRKRMLASAGELQKGNELALPSKYVNFLYLASHYEKLKGSPEDNEQKQLFVEQHKHYLDEIIEQISEFSKRVILADANLDKVLSAYNKHRDKPIREQAENIIHLFTLTNLGAPAAFKYFDTTIDRKRYTSTKEVLDATLIHQSITGLYETRIDLSQLGGDGGGGGGGSGSSGGMDPLQLLQPLEAEIKGTKLKAHWNSGATITCVPQAFLEEEVPIKNIWIKTIHGEKEQPVYYLTFKIQGRKVEAEVISSPYDYILVSPSDIPWLMKKPLQLTTLVPLQEYEERLLKQTMLTGSYKEKLQSLFLKYDALWQHWENQVGHRRIKPHHIATGTVNPRPQKQYPINPKAKASIQTVINDLLKQGVLIQQNSIMNTPVYPVPKPDGKWRMVLDYREVNKTIPLIAAQNQHSAGILSSIFRGKYKTTLDLSNGFWAHSITPESYWLTAFTWLGQQYCWTRLPQGFLNSPALFNADVVDLLKEVPNVQVYVDDIYISHDDPREHLEQLEKVFSLLLNAGYVVSLKKSEIAQHEVEFLGFNITKEGRGLTETFKQKLLNITPPRDLKQLQSILGLLNFARNFIPNFSELVKPLYNIIATAPGKYITWTTDNSQQLQNIISMLNSAENLEERNPEVRLIMKVNTSPSAGYIRFYNEFAKRPIMYLNYVYTKAEVKFTNTEKLLTTIHKGLIKALDLGMGQEILVYSPIVSMTKIQKTPLPERKALPIRWITWMSYLEDPRIQFHYDKTLPELQQVPTVTDDIIAKIKHPSEFSMVFYTDGSAIKHPNVNKSHNAGMGIAQVQFKPEFTVINTWSIPLGDHTAQLAEVAAVEFACKKALKIDGPVLIVTDSFYVAESVNKELPYWQSNGFFNNKKKPLKHVSKWKSIADCIQLKPDIIIIHEKGHQPTASTFHTEGNNLADKLATQGSYVVNAGKRTADGSEFEKRTADGSEFESPKKKAKVE

SEQ ID NO: 6839 - protein, 2092 aa, synthetic construct
MPAAKRVKLDGGDKKYSIGLDIGTNSVGWAVITDEYKVPSKKFKVLGNTDRHSIKKNLIGALLFDSGETAEATRLKRTARRRYTRRKNRICYLQEIFSNEMAKVDDSFFHRLEESFLVEEDKKHERHPIFGNIVDEVAYHEKYPTIYHLRKKLVDSTDKADLRLIYLALAHMIKFRGHFLIEGDLNPDNSDVDKLFIQLVQTYNQLFEENPINASGVDAKAILSARLSKSRRLENLIAQLPGEKKNGLFGNLIALSLGLTPNFKSNFDLAEDAKLQLSKDTYDDDLDNLLAQIGDQYADLFLAAKNLSDAILLSDILRVNTEITKAPLSASMIKRYDEHHQDLTLLKALVRQQLPEKYKEIFFDQSKNGYAGYIDGGASQEEFYKFIKPILEKMDGTEELLVKLNREDLLRKQRTFDNGSIPHQIHLGELHAILRRQEDFYPFLKDNREKIEKILTFRIPYYVGPLARGNSRFAWMTRKSEETITPWNFEEVVDKGASAQSFIERMTNFDKNLPNEKVLPKHSLLYEYFTVYNELTKVKYVTEGMRKPAFLSGEQKKAIVDLLFKTNRKVTVKQLKEDYFKKIECFDSVEISGVEDRFNASLGTYHDLLKIIKDKDFLDNEENEDILEDIVLTLTLFEDREMIEERLKTYAHLFDDKVMKQLKRRRYTGWGRLSRKLINGIRDKQSGKTILDFLKSDGFANRNFMQLIHDDSLTFKEDIQKAQVSGQGDSLHEHIANLAGSPAIKKGILQTVKVVDELVKVMGRHKPENIVIEMARENQTTQKGQKNSRERMKRIEEGIKELGSQILKEHPVENTQLQNEKLYLYYLQNGRDMYVDQELDINRLSDYDVDHIVPQSFLKDDSIDNKVLTRSDKARGKSDNVPSEEVVKKMKNYWRQLLNAKLITQRKFDNLTKAERGGLSELDKAGFIKRQLVETRQITKHVAQILDSRMNTKYDENDKLIREVKVITLKSKLVSDFRKDFQFYKVREINNYHHAHDAYLNAVVGTALIKKYPKLESEFVYGDYKVYDVRKMIAKSEQEIGKATAKYFFYSNIMNFFKTEITLANGEIRKRPLIETNGETGEIVWDKGRDFATVRKVLSMPQVNIVKKTEVQTGGFSKESILPKRNSDKLIARKKDWDPKKYGGFDSPTVAYSVLVVAKVEKGKSKKLKSVKELLGITIMERSSFEKNPIDFLEAKGYKEVKKDLIIKLPKYSLFELENGRKRMLASAGELQKGNELALPSKYVNFLYLASHYEKLKGSPEDNEQKQLFVEQHKHYLDEIIEQISEFSKRVILADANLDKVLSAYNKHRDKPIREQAENIIHLFTLTNLGAPAAFKYFDTTIDRKRYTSTKEVLDATLIHQSITGLYETRIDLSQLGGDGGGGGGGSGSSGGVLNLEEEYRLHEKPVPSSIDPSWLQLFPTVWAERAGMGLANQVPPVVVELRSGASPVAVRQYPMSKEAREGIRPHIQRFLDLGVLVPCQSPWNTPLLPVKKPGTNDYRPVQDLREINKRVQDIHPTVPNPYNLLSSLPPSHTWYSVLDLKDAFFCLKLHPNSQPLFAFEWRDPEKGNTGQLTWTRLPQGFKNSPTLFNEALHRDLAPFRALNPQVVLLQYVDDLLVAAPTYRDCKEGTQKLLQELSKLGYRVSAKKAQLCQKEVTYLGYLLKEGKRWLTPARKATVMKIPPPTTPRQVREFLGTAGFCRLWIPGFASLAAPLYPLTKPSIPFIWTEEHQKAFDRIKEALLSAPALALPDLTKPFTLYVDERAGVARGVLTQTLGPWRRPVAYLSKKLDPVASGWPTCLKAVAAVALLLKDADKLTLGQNVTVIASHSLESIVRQPPDRWMTNARMTHYQSLLLNERVSFAPPAVLNPATLLPVESEATPVHRCSEILAEETGTRRDLKDQPLPGVPAWYTDGSSFIAEGKRRAGAAIVDGKRTVWASSLPEGTSAQKAELVALTQALRLAEGKDINIYTDSRYAFATAHIHGAIYKQRGWLTSAGKDIKNKEEILALLEAIHLPKRVAIIHCPGHQKGNDPVATGNRRADEAAKQAALSTRVLAETTKPAGKRTADGSEFEKRTADGSEFESPKKKAKVE

SEQ ID NO: 6840 - protein, 2096 aa, synthetic construct
MPAAKRVKLDGGDKKYSIGLDIGTNSVGWAVITDEYKVPSKKFKVLGNTDRHSIKKNLIGALLFDSGETAEATRLKRTARRRYTRRKNRICYLQEIFSNEMAKVDDSFFHRLEESFLVEEDKKHERHPIFGNIVDEVAYHEKYPTIYHLRKKLVDSTDKADLRLIYLALAHMIKFRGHFLIEGDLNPDNSDVDKLFIQLVQTYNQLFEENPINASGVDAKAILSARLSKSRRLENLIAQLPGEKKNGLFGNLIALSLGLTPNFKSNFDLAEDAKLQLSKDTYDDDLDNLLAQIGDQYADLFLAAKNLSDAILLSDILRVNTEITKAPLSASMIKRYDEHHQDLTLLKALVRQQLPEKYKEIFFDQSKNGYAGYIDGGASQEEFYKFIKPILEKMDGTEELLVKLNREDLLRKQRTFDNGSIPHQIHLGELHAILRRQEDFYPFLKDNREKIEKILTFRIPYYVGPLARGNSRFAWMTRKSEETITPWNFEEVVDKGASAQSFIERMTNFDKNLPNEKVLPKHSLLYEYFTVYNELTKVKYVTEGMRKPAFLSGEQKKAIVDLLFKTNRKVTVKQLKEDYFKKIECFDSVEISGVEDRFNASLGTYHDLLKIIKDKDFLDNEENEDILEDIVLTLTLFEDREMIEERLKTYAHLFDDKVMKQLKRRRYTGWGRLSRKLINGIRDKQSGKTILDFLKSDGFANRNFMQLIHDDSLTFKEDIQKAQVSGQGDSLHEHIANLAGSPAIKKGILQTVKVVDELVKVMGRHKPENIVIEMARENQTTQKGQKNSRERMKRIEEGIKELGSQILKEHPVENTQLQNEKLYLYYLQNGRDMYVDQELDINRLSDYDVDHIVPQSFLKDDSIDNKVLTRSDKARGKSDNVPSEEVVKKMKNYWRQLLNAKLITQRKFDNLTKAERGGLSELDKAGFIKRQLVETRQITKHVAQILDSRMNTKYDENDKLIREVKVITLKSKLVSDFRKDFQFYKVREINNYHHAHDAYLNAVVGTALIKKYPKLESEFVYGDYKVYDVRKMIAKSEQEIGKATAKYFFYSNIMNFFKTEITLANGEIRKRPLIETNGETGEIVWDKGRDFATVRKVLSMPQVNIVKKTEVQTGGFSKESILPKRNSDKLIARKKDWDPKKYGGFDSPTVAYSVLVVAKVEKGKSKKLKSVKELLGITIMERSSFEKNPIDFLEAKGYKEVKKDLIIKLPKYSLFELENGRKRMLASAGELQKGNELALPSKYVNFLYLASHYEKLKGSPEDNEQKQLFVEQHKHYLDEIIEQISEFSKRVILADANLDKVLSAYNKHRDKPIREQAENIIHLFTLTNLGAPAAFKYFDTTIDRKRYTSTKEVLDATLIHQSITGLYETRIDLSQLGGDGGGGGGSSGGSGGTAPLEEEYRLFLEAPIQNVTLLEQWKREIPKVWAEINPPGLASTQAPIHVQLLSTALPVRVRQYPITLEAKRSLRETIRKFRAAGILRPVHSPWNTPLLPVRKSGTSEYRMVQDLREVNKRVETIHPTVPNPYTLLSLLPPDRIWYSVLDLKDAFFCIPLAPESQLIFAFEWADAEEGESGQLTWTRLPQGFKNSPTLFDEALNRDLQGFRLDHPSVSLLQYVDDLLIAADTQAACLSATRDLLMTLAELGYRVSGKKAQLCQEEVTYLGFKIHKGSRSLSNSRTQAILQIPVPKTKRQVREFLGTIGYCRLWIPGFAELAQPLYAATRGGNDPLVWGEKEEEAFQSLKLALTQPPALALPSLDKPFQLFVEETSGAAKGVLTQALGPWKRPVAYLSKRLDPVAAGWPRCLRAIAAAALLTREASKLTFGQDIEITSSHNLESLLRSPPDKWLTNARITQYQVLLLDPPRVRFKQTAALNPATLLPETDDTLPIHHCLDTLDSLTSTRPDLTDQPLAQAEATLFTDGSSYIRDGKRYAGAAVVTLDSVIWAEPLPIGTSAQKAELIALTKALEWSKDKSVNIYTDSRYAFATLHVHGMIYRERGLLTAGGKAIKNAPEILALLTAVWLPKRVAVMHCKGHQKDDAPTSTGNRRADEVAREVAIRPLSTQATISAGKRTADGSEFEKRTADGSEFESPKKKAKVE

SEQ ID NO: 6841 - protein, 2096 aa, synthetic construct
MPAAKRVKLDGGDKKYSIGLDIGTNSVGWAVITDEYKVPSKKFKVLGNTDRHSIKKNLIGALLFDSGETAEATRLKRTARRRYTRRKNRICYLQEIFSNEMAKVDDSFFHRLEESFLVEEDKKHERHPIFGNIVDEVAYHEKYPTIYHLRKKLVDSTDKADLRLIYLALAHMIKFRGHFLIEGDLNPDNSDVDKLFIQLVQTYNQLFEENPINASGVDAKAILSARLSKSRRLENLIAQLPGEKKNGLFGNLIALSLGLTPNFKSNFDLAEDAKLQLSKDTYDDDLDNLLAQIGDQYADLFLAAKNLSDAILLSDILRVNTEITKAPLSASMIKRYDEHHQDLTLLKALVRQQLPEKYKEIFFDQSKNGYAGYIDGGASQEEFYKFIKPILEKMDGTEELLVKLNREDLLRKQRTFDNGSIPHQIHLGELHAILRRQEDFYPFLKDNREKIEKILTFRIPYYVGPLARGNSRFAWMTRKSEETITPWNFEEVVDKGASAQSFIERMTNFDKNLPNEKVLPKHSLLYEYFTVYNELTKVKYVTEGMRKPAFLSGEQKKAIVDLLFKTNRKVTVKQLKEDYFKKIECFDSVEISGVEDRFNASLGTYHDLLKIIKDKDFLDNEENEDILEDIVLTLTLFEDREMIEERLKTYAHLFDDKVMKQLKRRRYTGWGRLSRKLINGIRDKQSGKTILDFLKSDGFANRNFMQLIHDDSLTFKEDIQKAQVSGQGDSLHEHIANLAGSPAIKKGILQTVKVVDELVKVMGRHKPENIVIEMARENQTTQKGQKNSRERMKRIEEGIKELGSQILKEHPVENTQLQNEKLYLYYLQNGRDMYVDQELDINRLSDYDVDHIVPQSFLKDDSIDNKVLTRSDKARGKSDNVPSEEVVKKMKNYWRQLLNAKLITQRKFDNLTKAERGGLSELDKAGFIKRQLVETRQITKHVAQILDSRMNTKYDENDKLIREVKVITLKSKLVSDFRKDFQFYKVREINNYHHAHDAYLNAVVGTALIKKYPKLESEFVYGDYKVYDVRKMIAKSEQEIGKATAKYFFYSNIMNFFKTEITLANGEIRKRPLIETNGETGEIVWDKGRDFATVRKVLSMPQVNIVKKTEVQTGGFSKESILPKRNSDKLIARKKDWDPKKYGGFDSPTVAYSVLVVAKVEKGKSKKLKSVKELLGITIMERSSFEKNPIDFLEAKGYKEVKKDLIIKLPKYSLFELENGRKRMLASAGELQKGNELALPSKYVNFLYLASHYEKLKGSPEDNEQKQLFVEQHKHYLDEIIEQISEFSKRVILADANLDKVLSAYNKHRDKPIREQAENIIHLFTLTNLGAPAAFKYFDTTIDRKRYTSTKEVLDATLIHQSITGLYETRIDLSQLGGDGGGGGGSSGGSGGTAPLEEEYRLFLEAPIQNVTLLEQWKREIPKVWAEINPPGLASTQAPIHVQLLSTALPVRVRQYPITLEAKRSLRETIRKFRAAGILRPVHSPWNTPLLPVRKSGTSEYRMVQDLREVNKRVETIHPTVPNPYTLLSLLPPDRIWYSVLDLKDAFFCIPLAPESQLIFAFEWADAEEGESGQLTWTRLPQGFKNSPTLFNEALNRDLQGFRLDHPSVSLLQYVDDLLIAADTQAACLSATRDLLMTLAELGYRVSGKKAQLCQEEVTYLGFKIHKGSRSLSNSRTQAILQIPVPKTKRQVREFLGTIGYCRLWIPGFAELAQPLYAATRPGNDPLVWGEKEEEAFQSLKLALTQPPALALPSLDKPFQLFVEETSGAAKGVLTQALGPWKRPVAYLSKRLDPVAAGWPRCLRAIAAAALLTREASKLTFGQDIEITSSHNLESLLRSPPDKWLTNARITQYQVLLLDPPRVRFKQTAALNPATLLPETDDTLPIHHCLDTLDSLTSTRPDLTDQPLAQAEATLFTDGSSYIRDGKRYAGAAVVTLDSVIWAEPLPIGTSAQKAELIALTKALEWSKDKSVNIYTDSRYAFATLHVHGMIYRERGWLTAGGKAIKNAPEILALLTAVWLPKRVAVMHCKGHQKDDAPTSTGNRRADEVAREVAIRPLSTQATISAGKRTADGSEFEKRTADGSEFESPKKKAKVE

SEQ ID NO: 6842 - protein, 2100 aa, synthetic construct
MPAAKRVKLDGGDKKYSIGLDIGTNSVGWAVITDEYKVPSKKFKVLGNTDRHSIKKNLIGALLFDSGETAEATRLKRTARRRYTRRKNRICYLQEIFSNEMAKVDDSFFHRLEESFLVEEDKKHERHPIFGNIVDEVAYHEKYPTIYHLRKKLVDSTDKADLRLIYLALAHMIKFRGHFLIEGDLNPDNSDVDKLFIQLVQTYNQLFEENPINASGVDAKAILSARLSKSRRLENLIAQLPGEKKNGLFGNLIALSLGLTPNFKSNFDLAEDAKLQLSKDTYDDDLDNLLAQIGDQYADLFLAAKNLSDAILLSDILRVNTEITKAPLSASMIKRYDEHHQDLTLLKALVRQQLPEKYKEIFFDQSKNGYAGYIDGGASQEEFYKFIKPILEKMDGTEELLVKLNREDLLRKQRTFDNGSIPHQIHLGELHAILRRQEDFYPFLKDNREKIEKILTFRIPYYVGPLARGNSRFAWMTRKSEETITPWNFEEVVDKGASAQSFIERMTNFDKNLPNEKVLPKHSLLYEYFTVYNELTKVKYVTEGMRKPAFLSGEQKKAIVDLLFKTNRKVTVKQLKEDYFKKIECFDSVEISGVEDRFNASLGTYHDLLKIIKDKDFLDNEENEDILEDIVLTLTLFEDREMIEERLKTYAHLFDDKVMKQLKRRRYTGWGRLSRKLINGIRDKQSGKTILDFLKSDGFANRNFMQLIHDDSLTFKEDIQKAQVSGQGDSLHEHIANLAGSPAIKKGILQTVKVVDELVKVMGRHKPENIVIEMARENQTTQKGQKNSRERMKRIEEGIKELGSQILKEHPVENTQLQNEKLYLYYLQNGRDMYVDQELDINRLSDYDVDHIVPQSFLKDDSIDNKVLTRSDKARGKSDNVPSEEVVKKMKNYWRQLLNAKLITQRKFDNLTKAERGGLSELDKAGFIKRQLVETRQITKHVAQILDSRMNTKYDENDKLIREVKVITLKSKLVSDFRKDFQFYKVREINNYHHAHDAYLNAVVGTALIKKYPKLESEFVYGDYKVYDVRKMIAKSEQEIGKATAKYFFYSNIMNFFKTEITLANGEIRKRPLIETNGETGEIVWDKGRDFATVRKVLSMPQVNIVKKTEVQTGGFSKESILPKRNSDKLIARKKDWDPKKYGGFDSPTVAYSVLVVAKVEKGKSKKLKSVKELLGITIMERSSFEKNPIDFLEAKGYKEVKKDLIIKLPKYSLFELENGRKRMLASAGELQKGNELALPSKYVNFLYLASHYEKLKGSPEDNEQKQLFVEQHKHYLDEIIEQISEFSKRVILADANLDKVLSAYNKHRDKPIREQAENIIHLFTLTNLGAPAAFKYFDTTIDRKRYTSTKEVLDATLIHQSITGLYETRIDLSQLGGDGGGGGGSSGGSGGTVSLQDEHRLFDIPVTTSLPDVWLQDFPQAWAETGGLGRAKCQAPIIIDLKPTAVPVSIKQYPMSLEAHMGIRQHIIKFLELGVLRPCRSPWNTPLLPVKKPGTQDYRPVQDLREINKRTVDIHPTVPNPYNLLSTLKPDYSWYTVLDLKDAFFCLPLAPQSQELFAFEWKDPERGISGQLTWTRLPQGFKNSPTLFNEALHRDLTDFRTQHPEVTLLQYVDDLLLAAPTKKACTQGTRHLLQELGEKGYRASAKKAQICQTKVTYLGYILSEGKRWLTPGRIETVARIPPPRNPREVREFLGTAGFCRLWIPGFAELAAPLYALTKPSTPFTWQTEHQLAFEALKKALLSAPALGLPDTSKPFTLFLDERQGIAKGVLTQKLGPWKRPVAYLSKKLDPVAAGWPPCLRIMAATAMLVKDSAKLTLGQPLTVITPHTLEAIVRQPPDRWITNARLTHYQALLLDTDRVQFGPPVTLNPATLLPVPENQPSPHDCRQVLAETHGTREDLKDQELPDADHTWYTDGSSYLDSGTRRAGAAVVDGHNTIWAQSLPPGTSAQKAELIALTKALELSKGKKANIYTDSRYAFATAHTHGSIYERRGWLTSEGKEIKNKAEIIALLKALFLPQEVAIIHCPGHQKGQDPVAVGNRQADRVARQAAMAEVLTLATEPDNTSHITAGKRTADGSEFEKRTADGSEFESPKKKAKVE

SEQ ID NO: 6843 - protein, 2085 aa, synthetic construct
MPAAKRVKLDGGDKKYSIGLDIGTNSVGWAVITDEYKVPSKKFKVLGNTDRHSIKKNLIGALLFDSGETAEATRLKRTARRRYTRRKNRICYLQEIFSNEMAKVDDSFFHRLEESFLVEEDKKHERHPIFGNIVDEVAYHEKYPTIYHLRKKLVDSTDKADLRLIYLALAHMIKFRGHFLIEGDLNPDNSDVDKLFIQLVQTYNQLFEENPINASGVDAKAILSARLSKSRRLENLIAQLPGEKKNGLFGNLIALSLGLTPNFKSNFDLAEDAKLQLSKDTYDDDLDNLLAQIGDQYADLFLAAKNLSDAILLSDILRVNTEITKAPLSASMIKRYDEHHQDLTLLKALVRQQLPEKYKEIFFDQSKNGYAGYIDGGASQEEFYKFIKPILEKMDGTEELLVKLNREDLLRKQRTFDNGSIPHQIHLGELHAILRRQEDFYPFLKDNREKIEKILTFRIPYYVGPLARGNSRFAWMTRKSEETITPWNFEEVVDKGASAQSFIERMTNFDKNLPNEKVLPKHSLLYEYFTVYNELTKVKYVTEGMRKPAFLSGEQKKAIVDLLFKTNRKVTVKQLKEDYFKKIECFDSVEISGVEDRFNASLGTYHDLLKIIKDKDFLDNEENEDILEDIVLTLTLFEDREMIEERLKTYAHLFDDKVMKQLKRRRYTGWGRLSRKLINGIRDKQSGKTILDFLKSDGFANRNFMQLIHDDSLTFKEDIQKAQVSGQGDSLHEHIANLAGSPAIKKGILQTVKVVDELVKVMGRHKPENIVIEMARENQTTQKGQKNSRERMKRIEEGIKELGSQILKEHPVENTQLQNEKLYLYYLQNGRDMYVDQELDINRLSDYDVDHIVPQSFLKDDSIDNKVLTRSDKARGKSDNVPSEEVVKKMKNYWRQLLNAKLITQRKFDNLTKAERGGLSELDKAGFIKRQLVETRQITKHVAQILDSRMNTKYDENDKLIREVKVITLKSKLVSDFRKDFQFYKVREINNYHHAHDAYLNAVVGTALIKKYPKLESEFVYGDYKVYDVRKMIAKSEQEIGKATAKYFFYSNIMNFFKTEITLANGEIRKRPLIETNGETGEIVWDKGRDFATVRKVLSMPQVNIVKKTEVQTGGFSKESILPKRNSDKLIARKKDWDPKKYGGFDSPTVAYSVLVVAKVEKGKSKKLKSVKELLGITIMERSSFEKNPIDFLEAKGYKEVKKDLIIKLPKYSLFELENGRKRMLASAGELQKGNELALPSKYVNFLYLASHYEKLKGSPEDNEQKQLFVEQHKHYLDEIIEQISEFSKRVILADANLDKVLSAYNKHRDKPIREQAENIIHLFTLTNLGAPAAFKYFDTTIDRKRYTSTKEVLDATLIHQSITGLYETRIDLSQLGGDGGGGGGSSGGSGGVPWILKKPLELTIKLDLEEQQGTLLNNSILSKKGKEELKQLFEKYSALWQSWENQVGHRRIRPHKIATGTVKPTPQKQYHINPKAKPDIQIVINDLLKQGVLIQKESTMNTPVYPVPKPNGRWRMVLDYRAVNKVTPLIAVQNQHSYGILGSLFKGRYKTTIDLSNGFWAHPIVPEDYWITAFTWQGKQYCWTVLPQGFLNSPGLFTGDVVDLLQGIPNVEVYVDDVYISHDSEKEHLEYLDILFNRLKEAGYIISLKKSNIANSIVDFLGFQITNEGRGLTDTFKEKLENITAPTTLKQLQSILGLLNFARNFIPDFTELIAPLYALIPKSTKNYVPWQIEHSTTLETLITKLNGAEYLQGRKGDKTLIMKVNASYTTGYIRYYNEGEKKPISYVSIVFSKTELKFTELEKLLTTVHKGLLKALDLSMGQNIHVYSPIVSMQNIQKTPQTAKKALASRWLSWLSYLEDPRIRFFYDPQMPALKDLPAVDTGKDNKKHPSNFQHIFYTDGSAITSPTKEGHLNAGMGIVYFINKDGNLQKQQEWSISLGNHTAQFAEIAAFEFALKKCLPLGGNILVVTDSNYVAKAYNEELDVWASNGFVNNRKKPLKHISKWKSVADLKRLRPDVVVTHEPGHQKLDSSPHAYGNNLADQLATQASFKVHAGKRTADGSEFEKRTADGSEFESPKKKAKVE

SEQ ID NO: 6844 - protein, 2093 aa, synthetic construct
MPAAKRVKLDGGDKKYSIGLDIGTNSVGWAVITDEYKVPSKKFKVLGNTDRHSIKKNLIGALLFDSGETAEATRLKRTARRRYTRRKNRICYLQEIFSNEMAKVDDSFFHRLEESFLVEEDKKHERHPIFGNIVDEVAYHEKYPTIYHLRKKLVDSTDKADLRLIYLALAHMIKFRGHFLIEGDLNPDNSDVDKLFIQLVQTYNQLFEENPINASGVDAKAILSARLSKSRRLENLIAQLPGEKKNGLFGNLIALSLGLTPNFKSNFDLAEDAKLQLSKDTYDDDLDNLLAQIGDQYADLFLAAKNLSDAILLSDILRVNTEITKAPLSASMIKRYDEHHQDLTLLKALVRQQLPEKYKEIFFDQSKNGYAGYIDGGASQEEFYKFIKPILEKMDGTEELLVKLNREDLLRKQRTFDNGSIPHQIHLGELHAILRRQEDFYPFLKDNREKIEKILTFRIPYYVGPLARGNSRFAWMTRKSEETITPWNFEEVVDKGASAQSFIERMTNFDKNLPNEKVLPKHSLLYEYFTVYNELTKVKYVTEGMRKPAFLSGEQKKAIVDLLFKTNRKVTVKQLKEDYFKKIECFDSVEISGVEDRFNASLGTYHDLLKIIKDKDFLDNEENEDILEDIVLTLTLFEDREMIEERLKTYAHLFDDKVMKQLKRRRYTGWGRLSRKLINGIRDKQSGKTILDFLKSDGFANRNFMQLIHDDSLTFKEDIQKAQVSGQGDSLHEHIANLAGSPAIKKGILQTVKVVDELVKVMGRHKPENIVIEMARENQTTQKGQKNSRERMKRIEEGIKELGSQILKEHPVENTQLQNEKLYLYYLQNGRDMYVDQELDINRLSDYDVDHIVPQSFLKDDSIDNKVLTRSDKARGKSDNVPSEEVVKKMKNYWRQLLNAKLITQRKFDNLTKAERGGLSELDKAGFIKRQLVETRQITKHVAQILDSRMNTKYDENDKLIREVKVITLKSKLVSDFRKDFQFYKVREINNYHHAHDAYLNAVVGTALIKKYPKLESEFVYGDYKVYDVRKMIAKSEQEIGKATAKYFFYSNIMNFFKTEITLANGEIRKRPLIETNGETGEIVWDKGRDFATVRKVLSMPQVNIVKKTEVQTGGFSKESILPKRNSDKLIARKKDWDPKKYGGFDSPTVAYSVLVVAKVEKGKSKKLKSVKELLGITIMERSSFEKNPIDFLEAKGYKEVKKDLIIKLPKYSLFELENGRKRMLASAGELQKGNELALPSKYVNFLYLASHYEKLKGSPEDNEQKQLFVEQHKHYLDEIIEQISEFSKRVILADANLDKVLSAYNKHRDKPIREQAENIIHLFTLTNLGAPAAFKYFDTTIDRKRYTSTKEVLDATLIHQSITGLYETRIDLSQLGGDGGGGGGSSGGSGGTLQLEEEYRLFEPESTQKQEMDIWLKNFPQAWAETGGMGTAHCQAPVLIQLKATATPISIRQYPMPHEAYQGIKPHIRRMLDQGILKPCQSPWNTPLLPVKKPGTEDYRPVQDLREVNKRVEDIHPTVPNPYNLLSTLPPSHPWYTVLDLKDAFFCLRLHSESQLLFAFEWRDPEIGLSGQLTWTRLPQGFKNSPTLFNEALHSDLADFRVRYPALVLLQYVDDLLLAAATRTECLEGTKALLETLGNKGYRASAKKAQICLQEVTYLGYSLKDGQRWLTKARKEAILSIPVPKNSRQVREFLGTAGYCRLWIPGFAELAAPLYPLTRPGTLFQWGTEQQLAFEDIKKALLSSPALGLPDITKPFELFIDENSGFAKGVLVQKLGPWKRPVAYLSKKLDTVASGWPPCLRMVAAIAILVKDAGKLTLGQPLTILTSHPVEALVRQPPNKWLSNARMTHYQAMLLDAERVHFGPTVSLNPATLLPLPSGGNHHDCLQILAETHGTRPDLTDQPLPDADLTWYTDGSSFIRNGEREAGAAVTTESEVIWAAPLPPGTSAQRAELIALTQALKMAEGKKLTVYTDSRYAFATTHVHGEIYRRRGWLTSEGKEIKNKNEILALLEALFLPKRLSIIHCPGHQKGDSPQAKGNRLADDTAKKAATETHSSLTVLPAGKRTADGSEFEKRTADGSEFESPKKKAKVE

SEQ ID NO: 6845 - protein, 2125 aa, synthetic construct
MPAAKRVKLDGGDKKYSIGLDIGTNSVGWAVITDEYKVPSKKFKVLGNTDRHSIKKNLIGALLFDSGETAEATRLKRTARRRYTRRKNRICYLQEIFSNEMAKVDDSFFHRLEESFLVEEDKKHERHPIFGNIVDEVAYHEKYPTIYHLRKKLVDSTDKADLRLIYLALAHMIKFRGHFLIEGDLNPDNSDVDKLFIQLVQTYNQLFEENPINASGVDAKAILSARLSKSRRLENLIAQLPGEKKNGLFGNLIALSLGLTPNFKSNFDLAEDAKLQLSKDTYDDDLDNLLAQIGDQYADLFLAAKNLSDAILLSDILRVNTEITKAPLSASMIKRYDEHHQDLTLLKALVRQQLPEKYKEIFFDQSKNGYAGYIDGGASQEEFYKFIKPILEKMDGTEELLVKLNREDLLRKQRTFDNGSIPHQIHLGELHAILRRQEDFYPFLKDNREKIEKILTFRIPYYVGPLARGNSRFAWMTRKSEETITPWNFEEVVDKGASAQSFIERMTNFDKNLPNEKVLPKHSLLYEYFTVYNELTKVKYVTEGMRKPAFLSGEQKKAIVDLLFKTNRKVTVKQLKEDYFKKIECFDSVEISGVEDRFNASLGTYHDLLKIIKDKDFLDNEENEDILEDIVLTLTLFEDREMIEERLKTYAHLFDDKVMKQLKRRRYTGWGRLSRKLINGIRDKQSGKTILDFLKSDGFANRNFMQLIHDDSLTFKEDIQKAQVSGQGDSLHEHIANLAGSPAIKKGILQTVKVVDELVKVMGRHKPENIVIEMARENQTTQKGQKNSRERMKRIEEGIKELGSQILKEHPVENTQLQNEKLYLYYLQNGRDMYVDQELDINRLSDYDVDHIVPQSFLKDDSIDNKVLTRSDKARGKSDNVPSEEVVKKMKNYWRQLLNAKLITQRKFDNLTKAERGGLSELDKAGFIKRQLVETRQITKHVAQILDSRMNTKYDENDKLIREVKVITLKSKLVSDFRKDFQFYKVREINNYHHAHDAYLNAVVGTALIKKYPKLESEFVYGDYKVYDVRKMIAKSEQEIGKATAKYFFYSNIMNFFKTEITLANGEIRKRPLIETNGETGEIVWDKGRDFATVRKVLSMPQVNIVKKTEVQTGGFSKESILPKRNSDKLIARKKDWDPKKYGGFDSPTVAYSVLVVAKVEKGKSKKLKSVKELLGITIMERSSFEKNPIDFLEAKGYKEVKKDLIIKLPKYSLFELENGRKRMLASAGELQKGNELALPSKYVNFLYLASHYEKLKGSPEDNEQKQLFVEQHKHYLDEIIEQISEFSKRVILADANLDKVLSAYNKHRDKPIREQAENIIHLFTLTNLGAPAAFKYFDTTIDRKRYTSTKEVLDATLIHQSITGLYETRIDLSQLGGDGGGGGGSSGGSGGLLGRDLLTKLKAQIQFSTEGPQVTWEDRPAMCLVLNLEEEYRLHEKPVPPSIDPSWLQLFPMVWAEKAGMGLANQVPPVVVELKSDASPVAVRQYPMSKEAREGIRPHIQRFLDLGILVPCQSPWNTPLLPVKKPGTNDYRPVQDLREVNKRVQDIHPTVPNPYNLLSSLPPSHTWYSVLDLKDAFFCLKLHPNSQPLFAFEWRDPEKGNTGQLTWTRLPQGFKNSPTLFNEALHRDLASFRALNPQVVMLQYVDDLLVAAPTYRDCKEGTRRLLQELSKLGYRVSAKKAQLCREEVTYLGYLLKGGKRWLTPARKATVMKIPTPTTPRQVREFLGTAGFCRLWIPGFASLAAPLYPLTRPKVPFTWTEAHQEAFGRIKEALLSAPALALPDLTKPFALYVDEKEGVARGVLTQTLGPWRRPVAYLSKKLDPVASGWPTCLKAIAAVALLLKDADKLTLGQNVLVIAPHNLESIVRQPPDRWMTNARMTHYQSLLLNERVSFAPPAILNPATLLPVESDDTPIHICSEILAEETGTRPDLRDQPLPGVPAWYTDGSSFIMDGRRQAGAAIVDNKRTVWASNLPEGTSAQKAELIALTQALRLAEGKSINIYTDSRYAFATAHVHGAIYKQRGWLTSAGKDIKNKEEILALLEAIHLPKRVAIIHCPGHQRGTDPVATGNRKADEAAKQAAQSTRILTETTKNAGKRTADGSEFEKRTADGSEFESPKKKAKVE

SEQ ID NO: 6846 - protein, 2125 aa, synthetic construct
MPAAKRVKLDGGDKKYSIGLDIGTNSVGWAVITDEYKVPSKKFKVLGNTDRHSIKKNLIGALLFDSGETAEATRLKRTARRRYTRRKNRICYLQEIFSNEMAKVDDSFFHRLEESFLVEEDKKHERHPIFGNIVDEVAYHEKYPTIYHLRKKLVDSTDKADLRLIYLALAHMIKFRGHFLIEGDLNPDNSDVDKLFIQLVQTYNQLFEENPINASGVDAKAILSARLSKSRRLENLIAQLPGEKKNGLFGNLIALSLGLTPNFKSNFDLAEDAKLQLSKDTYDDDLDNLLAQIGDQYADLFLAAKNLSDAILLSDILRVNTEITKAPLSASMIKRYDEHHQDLTLLKALVRQQLPEKYKEIFFDQSKNGYAGYIDGGASQEEFYKFIKPILEKMDGTEELLVKLNREDLLRKQRTFDNGSIPHQIHLGELHAILRRQEDFYPFLKDNREKIEKILTFRIPYYVGPLARGNSRFAWMTRKSEETITPWNFEEVVDKGASAQSFIERMTNFDKNLPNEKVLPKHSLLYEYFTVYNELTKVKYVTEGMRKPAFLSGEQKKAIVDLLFKTNRKVTVKQLKEDYFKKIECFDSVEISGVEDRFNASLGTYHDLLKIIKDKDFLDNEENEDILEDIVLTLTLFEDREMIEERLKTYAHLFDDKVMKQLKRRRYTGWGRLSRKLINGIRDKQSGKTILDFLKSDGFANRNFMQLIHDDSLTFKEDIQKAQVSGQGDSLHEHIANLAGSPAIKKGILQTVKVVDELVKVMGRHKPENIVIEMARENQTTQKGQKNSRERMKRIEEGIKELGSQILKEHPVENTQLQNEKLYLYYLQNGRDMYVDQELDINRLSDYDVDHIVPQSFLKDDSIDNKVLTRSDKARGKSDNVPSEEVVKKMKNYWRQLLNAKLITQRKFDNLTKAERGGLSELDKAGFIKRQLVETRQITKHVAQILDSRMNTKYDENDKLIREVKVITLKSKLVSDFRKDFQFYKVREINNYHHAHDAYLNAVVGTALIKKYPKLESEFVYGDYKVYDVRKMIAKSEQEIGKATAKYFFYSNIMNFFKTEITLANGEIRKRPLIETNGETGEIVWDKGRDFATVRKVLSMPQVNIVKKTEVQTGGFSKESILPKRNSDKLIARKKDWDPKKYGGFDSPTVAYSVLVVAKVEKGKSKKLKSVKELLGITIMERSSFEKNPIDFLEAKGYKEVKKDLIIKLPKYSLFELENGRKRMLASAGELQKGNELALPSKYVNFLYLASHYEKLKGSPEDNEQKQLFVEQHKHYLDEIIEQISEFSKRVILADANLDKVLSAYNKHRDKPIREQAENIIHLFTLTNLGAPAAFKYFDTTIDRKRYTSTKEVLDATLIHQSITGLYETRIDLSQLGGDGGGGGGSSGGSGGLLGRDLLTKLKAQIQFSTEGPQVTWEDRPAMCLVLNLEEEYRLHEKPVPPSIDPSWLQLFPMVWAEKAGMGLANQVPPVVVELKSDASPVAVRQYPMSKEAREGIRPHIQRFLDLGILVPCQSPWNTPLLPVKKPGTNDYRPVQDLREVNKRVQDIHPTVPNPYNLLSSLPPSHTWYSVLDLKDAFFCLKLHPNSQPLFAFEWRDPEKGNTGQLTWTRLPQGFKNSPTLFNEALHRDLASFRALNPQVVMLQYVDDLLVAAPTYRDCKEGTRRLLQELSKLGYRVSAKKAQLCREEVTYLGYLLKGGKRWLTPARKATVMKIPTPTTPRQVREFLGKAGFCRLFIPGFASLAAPLYPLTRPKVPFTWTEAHQEAFGRIKEALLSAPALALPDLTKPFALYVDEKEGVARGVLTQTLGPWRRPVAYLSKKLDPVASGWPTCLKAIAAVALLLKDADKLTLGQNVLVIAPHNLESIVRQPPDRWMTNARMTHYQSLLLNERVSFAPPAILNPATLLPVESDDTPIHICSEILAEETGTRPDLRDQPLPGVPAWYTDGSSFIMDGRRQAGAAIVDNKRTVWASNLPEGTSAQKAELIALTQALRLAEGKSINIYTDSRYAFATAHVHGAIYKQRGWLTSAGKDIKNKEEILALLEAIHLPKRVAIIHCPGHQRGTDPVATGNRKADEAAKQAAQSTRILTETTKNAGKRTADGSEFEKRTADGSEFESPKKKAKVE

SEQ ID NO: 6847 - protein, 2216 aa, synthetic construct
MPAAKRVKLDGGDKKYSIGLDIGTNSVGWAVITDEYKVPSKKFKVLGNTDRHSIKKNLIGALLFDSGETAEATRLKRTARRRYTRRKNRICYLQEIFSNEMAKVDDSFFHRLEESFLVEEDKKHERHPIFGNIVDEVAYHEKYPTIYHLRKKLVDSTDKADLRLIYLALAHMIKFRGHFLIEGDLNPDNSDVDKLFIQLVQTYNQLFEENPINASGVDAKAILSARLSKSRRLENLIAQLPGEKKNGLFGNLIALSLGLTPNFKSNFDLAEDAKLQLSKDTYDDDLDNLLAQIGDQYADLFLAAKNLSDAILLSDILRVNTEITKAPLSASMIKRYDEHHQDLTLLKALVRQQLPEKYKEIFFDQSKNGYAGYIDGGASQEEFYKFIKPILEKMDGTEELLVKLNREDLLRKQRTFDNGSIPHQIHLGELHAILRRQEDFYPFLKDNREKIEKILTFRIPYYVGPLARGNSRFAWMTRKSEETITPWNFEEVVDKGASAQSFIERMTNFDKNLPNEKVLPKHSLLYEYFTVYNELTKVKYVTEGMRKPAFLSGEQKKAIVDLLFKTNRKVTVKQLKEDYFKKIECFDSVEISGVEDRFNASLGTYHDLLKIIKDKDFLDNEENEDILEDIVLTLTLFEDREMIEERLKTYAHLFDDKVMKQLKRRRYTGWGRLSRKLINGIRDKQSGKTILDFLKSDGFANRNFMQLIHDDSLTFKEDIQKAQVSGQGDSLHEHIANLAGSPAIKKGILQTVKVVDELVKVMGRHKPENIVIEMARENQTTQKGQKNSRERMKRIEEGIKELGSQILKEHPVENTQLQNEKLYLYYLQNGRDMYVDQELDINRLSDYDVDHIVPQSFLKDDSIDNKVLTRSDKARGKSDNVPSEEVVKKMKNYWRQLLNAKLITQRKFDNLTKAERGGLSELDKAGFIKRQLVETRQITKHVAQILDSRMNTKYDENDKLIREVKVITLKSKLVSDFRKDFQFYKVREINNYHHAHDAYLNAVVGTALIKKYPKLESEFVYGDYKVYDVRKMIAKSEQEIGKATAKYFFYSNIMNFFKTEITLANGEIRKRPLIETNGETGEIVWDKGRDFATVRKVLSMPQVNIVKKTEVQTGGFSKESILPKRNSDKLIARKKDWDPKKYGGFDSPTVAYSVLVVAKVEKGKSKKLKSVKELLGITIMERSSFEKNPIDFLEAKGYKEVKKDLIIKLPKYSLFELENGRKRMLASAGELQKGNELALPSKYVNFLYLASHYEKLKGSPEDNEQKQLFVEQHKHYLDEIIEQISEFSKRVILADANLDKVLSAYNKHRDKPIREQAENIIHLFTLTNLGAPAAFKYFDTTIDRKRYTSTKEVLDATLIHQSITGLYETRIDLSQLGGDGGGGGGSSGGSGGTLGDQGSRGSDPLPEPRVTLTVEGIPTEFLVNTGAEHSVLTKPMGKMGSKRTVVAGATGSKVYPWTTKRLLKIGQKQVTHSFLVIPECPAPLLGRDLLTKLKAQIQFSTEGPQVTWEDRPAMCLVLNLEEEYRLHEKPVPPSIDPSWLQLFPMVWAEKAGMGLANQVPPVVVELKSDASPVAVRQYPMSKEAREGIRPHIQRFLDLGILVPCQSPWNTPLLPVKKPGTNDYRPVQDLREVNKRVQDIHPTVPNPYNLLSSLPPSHTWYSVLDLKDAFFCLKLHPNSQPLFAFEWRDPEKGNTGQLTWTRLPQGFKNSPTLFNEALHRDLASFRALNPQVVMLQYVDDLLVAAPTYRDCKEGTRRLLQELSKLGYRVSAKKAQLCREEVTYLGYLLKGGKRWLTPARKATVMKIPTPTTPRQVREFLGKAGFCRLFIPGFASLAAPLYPLTRPKVPFTWTEAHQEAFGRIKEALLSAPALALPDLTKPFALYVDEKEGVARGVLTQTLGPWRRPVAYLSKKLDPVASGWPTCLKAIAAVALLLKDADKLTLGQNVLVIAPHNLESIVRQPPDRWMTNARMTHYQSLLLNERVSFAPPAILNPATLLPVESDDTPIHICSEILAEETGTRPDLRDQPLPGVPAWYTDGSSFIMDGRRQAGAAIVDNKRTVWASNLPEGTSAQKAELIALTQALRLAEGKSINIYTDSRYAFATAHVHGAIYKQRGWLTSAGKDIKNKEEILALLEAIHLPKRVAIIHCPGHQRGTDPVATGNRKADEAAKQAAQSTRILTETTKNAGKRTADGSEFEKRTADGSEFESPKKKAKVE

SEQ ID NO: 6848 - protein, 2094 aa, synthetic construct
MPAAKRVKLDGGDKKYSIGLDIGTNSVGWAVITDEYKVPSKKFKVLGNTDRHSIKKNLIGALLFDSGETAEATRLKRTARRRYTRRKNRICYLQEIFSNEMAKVDDSFFHRLEESFLVEEDKKHERHPIFGNIVDEVAYHEKYPTIYHLRKKLVDSTDKADLRLIYLALAHMIKFRGHFLIEGDLNPDNSDVDKLFIQLVQTYNQLFEENPINASGVDAKAILSARLSKSRRLENLIAQLPGEKKNGLFGNLIALSLGLTPNFKSNFDLAEDAKLQLSKDTYDDDLDNLLAQIGDQYADLFLAAKNLSDAILLSDILRVNTEITKAPLSASMIKRYDEHHQDLTLLKALVRQQLPEKYKEIFFDQSKNGYAGYIDGGASQEEFYKFIKPILEKMDGTEELLVKLNREDLLRKQRTFDNGSIPHQIHLGELHAILRRQEDFYPFLKDNREKIEKILTFRIPYYVGPLARGNSRFAWMTRKSEETITPWNFEEVVDKGASAQSFIERMTNFDKNLPNEKVLPKHSLLYEYFTVYNELTKVKYVTEGMRKPAFLSGEQKKAIVDLLFKTNRKVTVKQLKEDYFKKIECFDSVEISGVEDRFNASLGTYHDLLKIIKDKDFLDNEENEDILEDIVLTLTLFEDREMIEERLKTYAHLFDDKVMKQLKRRRYTGWGRLSRKLINGIRDKQSGKTILDFLKSDGFANRNFMQLIHDDSLTFKEDIQKAQVSGQGDSLHEHIANLAGSPAIKKGILQTVKVVDELVKVMGRHKPENIVIEMARENQTTQKGQKNSRERMKRIEEGIKELGSQILKEHPVENTQLQNEKLYLYYLQNGRDMYVDQELDINRLSDYDVDHIVPQSFLKDDSIDNKVLTRSDKARGKSDNVPSEEVVKKMKNYWRQLLNAKLITQRKFDNLTKAERGGLSELDKAGFIKRQLVETRQITKHVAQILDSRMNTKYDENDKLIREVKVITLKSKLVSDFRKDFQFYKVREINNYHHAHDAYLNAVVGTALIKKYPKLESEFVYGDYKVYDVRKMIAKSEQEIGKATAKYFFYSNIMNFFKTEITLANGEIRKRPLIETNGETGEIVWDKGRDFATVRKVLSMPQVNIVKKTEVQTGGFSKESILPKRNSDKLIARKKDWDPKKYGGFDSPTVAYSVLVVAKVEKGKSKKLKSVKELLGITIMERSSFEKNPIDFLEAKGYKEVKKDLIIKLPKYSLFELENGRKRMLASAGELQKGNELALPSKYVNFLYLASHYEKLKGSPEDNEQKQLFVEQHKHYLDEIIEQISEFSKRVILADANLDKVLSAYNKHRDKPIREQAENIIHLFTLTNLGAPAAFKYFDTTIDRKRYTSTKEVLDATLIHQSITGLYETRIDLSQLGGDGGGGGGSSGGSGGTLGIEDEYRLHETSTEPDVSLGSTWLSDFPQAWAETGGMGLAVRQAPLIIPLKATSTPVSIQQYPMSHEARLGIKPHIQRLLDQGILVPCQSPWNTPLLPVKKPGTNDYRPVQDLREVNKRVEDIHPTVPNPYNLLSGLPPSHQWYTVLDLKDAFFCLRLHPTSQPLFAFEWRDPGMGISGQLTWTRLPQGFKNSPTLFNEALHRDLADFRIQHPDLILLQYVDDILLAATSELDCQQGTRALLQTLGDLGYRASAKKAQICQKQVKYLGYLLREGQRWLTEARKETVMGQPVPKTPRQLREFLGTAGFCRLWIPGFAEMAAPLYPLTKPGTLFSWGPDQQKAYQEIKQALLTAPALGLPDLTKPFELFVDEKQGYAKGVLTQKLGPWRRPVAYLSKKLDPVAAGWPPCLRMVAAIAVLTKDAGKLTMGQPLVILAPHAVEALVKQPPDRWLSNARMTHYQAMLLDTDRVQFGPVVALNPATLLPLPEEGAPHDCLEILAETHGTRPDLTDQPIPDADHTWYTDGSSFLQEGQRKAGAAVTTETEVIWAGALPAGTSAQRAELIALTQALKMAEGKRLNVYTDSRYAFATAHIHGEIYRRRGWLTSEGREIKNKSEILALLKALFLPKRLSIIHCLGHQKGDSAEARGNRLADQAAREAAIKTPPDTSTLLAGKRTADGSEFEKRTADGSEFESPKKKAKVE

SEQ ID NO: 6849 - protein, 2094 aa, synthetic construct
MPAAKRVKLDGGDKKYSIGLDIGTNSVGWAVITDEYKVPSKKFKVLGNTDRHSIKKNLIGALLFDSGETAEATRLKRTARRRYTRRKNRICYLQEIFSNEMAKVDDSFFHRLEESFLVEEDKKHERHPIFGNIVDEVAYHEKYPTIYHLRKKLVDSTDKADLRLIYLALAHMIKFRGHFLIEGDLNPDNSDVDKLFIQLVQTYNQLFEENPINASGVDAKAILSARLSKSRRLENLIAQLPGEKKNGLFGNLIALSLGLTPNFKSNFDLAEDAKLQLSKDTYDDDLDNLLAQIGDQYADLFLAAKNLSDAILLSDILRVNTEITKAPLSASMIKRYDEHHQDLTLLKALVRQQLPEKYKEIFFDQSKNGYAGYIDGGASQEEFYKFIKPILEKMDGTEELLVKLNREDLLRKQRTFDNGSIPHQIHLGELHAILRRQEDFYPFLKDNREKIEKILTFRIPYYVGPLARGNSRFAWMTRKSEETITPWNFEEVVDKGASAQSFIERMTNFDKNLPNEKVLPKHSLLYEYFTVYNELTKVKYVTEGMRKPAFLSGEQKKAIVDLLFKTNRKVTVKQLKEDYFKKIECFDSVEISGVEDRFNASLGTYHDLLKIIKDKDFLDNEENEDILEDIVLTLTLFEDREMIEERLKTYAHLFDDKVMKQLKRRRYTGWGRLSRKLINGIRDKQSGKTILDFLKSDGFANRNFMQLIHDDSLTFKEDIQKAQVSGQGDSLHEHIANLAGSPAIKKGILQTVKVVDELVKVMGRHKPENIVIEMARENQTTQKGQKNSRERMKRIEEGIKELGSQILKEHPVENTQLQNEKLYLYYLQNGRDMYVDQELDINRLSDYDVDHIVPQSFLKDDSIDNKVLTRSDKARGKSDNVPSEEVVKKMKNYWRQLLNAKLITQRKFDNLTKAERGGLSELDKAGFIKRQLVETRQITKHVAQILDSRMNTKYDENDKLIREVKVITLKSKLVSDFRKDFQFYKVREINNYHHAHDAYLNAVVGTALIKKYPKLESEFVYGDYKVYDVRKMIAKSEQEIGKATAKYFFYSNIMNFFKTEITLANGEIRKRPLIETNGETGEIVWDKGRDFATVRKVLSMPQVNIVKKTEVQTGGFSKESILPKRNSDKLIARKKDWDPKKYGGFDSPTVAYSVLVVAKVEKGKSKKLKSVKELLGITIMERSSFEKNPIDFLEAKGYKEVKKDLIIKLPKYSLFELENGRKRMLASAGELQKGNELALPSKYVNFLYLASHYEKLKGSPEDNEQKQLFVEQHKHYLDEIIEQISEFSKRVILADANLDKVLSAYNKHRDKPIREQAENIIHLFTLTNLGAPAAFKYFDTTIDRKRYTSTKEVLDATLIHQSITGLYETRIDLSQLGGDGGGGGGSSGGSGGTLNIEDEYRLHETSKEPDVSLGSTWLSDFPQAWAETGGMGLAVRQAPLIIPLKATSTPVSIKQYPMSQEARLGIKPHIQRLLDQGILVPCQSPWNTPLLPVKKPGTNDYRPVQDLREVNKRVEDIHPTVPNPYNLLSGLPPSHQWYTVLDLKDAFFCLRLHPTSQPLFAFEWRDPEMGISGQLTWTRLPQGFKNSPTLFNEALHRDLAGFRIQHPDLILLQYVDDLLLAATSELDCQQGTRALLQTLGDLGYRASAKKAQICQKQVKYLGYLLKEGQRWLTEARKETVMGQPIPKTPRQLREFLGTAGFCRLWIPGFAEMAAPLYPLTKPGTLFNWGPDQQKAFQEIKQALLTAPALGLPDLTKPFELFVDEKQGYAKGVLTQKLGPWRRPVAYLSKKLDPVAAGWPPCLRMVAAIAVLTKDAGKLTMGQPLVILAPHAVEALVKQPPDRWLSNARMTHYQALLLDTDRVQFGPVVALNPATLLPLPEEGLQHDCLDILAEAHGTRSDLMDQPLPDADHTWYTDGSSFLQEGQRKAGAAVTTETEVIWARALPAGTSAQRAELIALTQALKMAEGKKLNVYTDSRYAFATAHIHGEIYRRRGWLTSEGKEIKNKDEILALLKALFLPKRLSIIHCPGHQKGNSAEARGNRMADQAAREVATRETPETSTLLAGKRTADGSEFEKRTADGSEFESPKKKAKVE

SEQ ID NO: 6850 - protein, 2094 aa, synthetic construct
MPAAKRVKLDGGDKKYSIGLDIGTNSVGWAVITDEYKVPSKKFKVLGNTDRHSIKKNLIGALLFDSGETAEATRLKRTARRRYTRRKNRICYLQEIFSNEMAKVDDSFFHRLEESFLVEEDKKHERHPIFGNIVDEVAYHEKYPTIYHLRKKLVDSTDKADLRLIYLALAHMIKFRGHFLIEGDLNPDNSDVDKLFIQLVQTYNQLFEENPINASGVDAKAILSARLSKSRRLENLIAQLPGEKKNGLFGNLIALSLGLTPNFKSNFDLAEDAKLQLSKDTYDDDLDNLLAQIGDQYADLFLAAKNLSDAILLSDILRVNTEITKAPLSASMIKRYDEHHQDLTLLKALVRQQLPEKYKEIFFDQSKNGYAGYIDGGASQEEFYKFIKPILEKMDGTEELLVKLNREDLLRKQRTFDNGSIPHQIHLGELHAILRRQEDFYPFLKDNREKIEKILTFRIPYYVGPLARGNSRFAWMTRKSEETITPWNFEEVVDKGASAQSFIERMTNFDKNLPNEKVLPKHSLLYEYFTVYNELTKVKYVTEGMRKPAFLSGEQKKAIVDLLFKTNRKVTVKQLKEDYFKKIECFDSVEISGVEDRFNASLGTYHDLLKIIKDKDFLDNEENEDILEDIVLTLTLFEDREMIEERLKTYAHLFDDKVMKQLKRRRYTGWGRLSRKLINGIRDKQSGKTILDFLKSDGFANRNFMQLIHDDSLTFKEDIQKAQVSGQGDSLHEHIANLAGSPAIKKGILQTVKVVDELVKVMGRHKPENIVIEMARENQTTQKGQKNSRERMKRIEEGIKELGSQILKEHPVENTQLQNEKLYLYYLQNGRDMYVDQELDINRLSDYDVDHIVPQSFLKDDSIDNKVLTRSDKARGKSDNVPSEEVVKKMKNYWRQLLNAKLITQRKFDNLTKAERGGLSELDKAGFIKRQLVETRQITKHVAQILDSRMNTKYDENDKLIREVKVITLKSKLVSDFRKDFQFYKVREINNYHHAHDAYLNAVVGTALIKKYPKLESEFVYGDYKVYDVRKMIAKSEQEIGKATAKYFFYSNIMNFFKTEITLANGEIRKRPLIETNGETGEIVWDKGRDFATVRKVLSMPQVNIVKKTEVQTGGFSKESILPKRNSDKLIARKKDWDPKKYGGFDSPTVAYSVLVVAKVEKGKSKKLKSVKELLGITIMERSSFEKNPIDFLEAKGYKEVKKDLIIKLPKYSLFELENGRKRMLASAGELQKGNELALPSKYVNFLYLASHYEKLKGSPEDNEQKQLFVEQHKHYLDEIIEQISEFSKRVILADANLDKVLSAYNKHRDKPIREQAENIIHLFTLTNLGAPAAFKYFDTTIDRKRYTSTKEVLDATLIHQSITGLYETRIDLSQLGGDGGGGGGSSGGSGGTLNIEDEYRLHETSKGPDVPLGSTWLSDFPQAWAETGGMGLAVRQAPLIIPLKATSTPVSIKQYPMSQEARLGIKPHIQRLLDQGILVPCQSPWNTPLLPVKKPGTNDYRPVQDLREVNKRVEDIHPTVPNPYNLLSGLPPSHQWYTVLDLKDAFFCLRLHPTSQSLFAFEWRDPEMGISGQLTWTRLPQGFKNSPTLFNEALHRDLADFRIQHPDLILLQYVDDLLLAATSELDCQQGTRALLQTLGDLGYRASAKKAQICQKQVKYLGYLLKEGQRWLTEARKETVMGQPTPKTPRQLREFLGTAGFCRLWIPGFAEMAAPLYPLTKPGTLFEWGPDQQKAYQEIKQALLTAPALGLPDLTKPFELFVDEKQGYAKGVLTQKLGPWRRPVAYLSKKLDPVAAGWPPCLRMVAAIAVLTKDAGKLTMGQPLVILAPHAVEALVKQPPDRWLSNARMTHYQALLLDTDRVQFGPIVALNPATLLPLPEEGLQHDCLDILAEAHGTRPDLTDQPLPDADHTWYTDGSSFLQEGQRKAGAAVTTETEVVWAKALPAGTSAQRAELIALTQALKMAEGKKLNVYTDSRYAFATAHIHGEIYRRRGWLTSEGKEIKNKDEILALLKALFLPKRLSIIHCPGHQKGNRAEARGNRMADQAAREVATRETPETSTLLAGKRTADGSEFEKRTADGSEFESPKKKAKVE

SEQ ID NO: 6851 - protein, 2114 aa, synthetic construct
MPAAKRVKLDGGDKKYSIGLDIGTNSVGWAVITDEYKVPSKKFKVLGNTDRHSIKKNLIGALLFDSGETAEATRLKRTARRRYTRRKNRICYLQEIFSNEMAKVDDSFFHRLEESFLVEEDKKHERHPIFGNIVDEVAYHEKYPTIYHLRKKLVDSTDKADLRLIYLALAHMIKFRGHFLIEGDLNPDNSDVDKLFIQLVQTYNQLFEENPINASGVDAKAILSARLSKSRRLENLIAQLPGEKKNGLFGNLIALSLGLTPNFKSNFDLAEDAKLQLSKDTYDDDLDNLLAQIGDQYADLFLAAKNLSDAILLSDILRVNTEITKAPLSASMIKRYDEHHQDLTLLKALVRQQLPEKYKEIFFDQSKNGYAGYIDGGASQEEFYKFIKPILEKMDGTEELLVKLNREDLLRKQRTFDNGSIPHQIHLGELHAILRRQEDFYPFLKDNREKIEKILTFRIPYYVGPLARGNSRFAWMTRKSEETITPWNFEEVVDKGASAQSFIERMTNFDKNLPNEKVLPKHSLLYEYFTVYNELTKVKYVTEGMRKPAFLSGEQKKAIVDLLFKTNRKVTVKQLKEDYFKKIECFDSVEISGVEDRFNASLGTYHDLLKIIKDKDFLDNEENEDILEDIVLTLTLFEDREMIEERLKTYAHLFDDKVMKQLKRRRYTGWGRLSRKLINGIRDKQSGKTILDFLKSDGFANRNFMQLIHDDSLTFKEDIQKAQVSGQGDSLHEHIANLAGSPAIKKGILQTVKVVDELVKVMGRHKPENIVIEMARENQTTQKGQKNSRERMKRIEEGIKELGSQILKEHPVENTQLQNEKLYLYYLQNGRDMYVDQELDINRLSDYDVDHIVPQSFLKDDSIDNKVLTRSDKARGKSDNVPSEEVVKKMKNYWRQLLNAKLITQRKFDNLTKAERGGLSELDKAGFIKRQLVETRQITKHVAQILDSRMNTKYDENDKLIREVKVITLKSKLVSDFRKDFQFYKVREINNYHHAHDAYLNAVVGTALIKKYPKLESEFVYGDYKVYDVRKMIAKSEQEIGKATAKYFFYSNIMNFFKTEITLANGEIRKRPLIETNGETGEIVWDKGRDFATVRKVLSMPQVNIVKKTEVQTGGFSKESILPKRNSDKLIARKKDWDPKKYGGFDSPTVAYSVLVVAKVEKGKSKKLKSVKELLGITIMERSSFEKNPIDFLEAKGYKEVKKDLIIKLPKYSLFELENGRKRMLASAGELQKGNELALPSKYVNFLYLASHYEKLKGSPEDNEQKQLFVEQHKHYLDEIIEQISEFSKRVILADANLDKVLSAYNKHRDKPIREQAENIIHLFTLTNLGAPAAFKYFDTTIDRKRYTSTKEVLDATLIHQSITGLYETRIDLSQLGGDGGGGGGSSGGSGGVQEISDSRPMLHIYLNGRRFLGLLDTGADKTCIAGRDWPANWPIHQTESSLQGLGMACGVARSSQPLRWQHEDKSGIIHPFVIPTLPFTLWGRDIMKDIKVRLMTDSPDDSQDLMIGAIESNLFADQISWKSDQPVWLNQWPLKQEKLQALQQLVTEQLQLGHLEESNSPWNTPVFVIKKKSGKWRLLQDLRAVNATMHDMGALQPGLPSPPAVPKGWEIIIIDLQDCFFNIKLHPEDCKRFAFSVPSPNFKRPYQRFQWKVLPQGMKNSPTLCQKFVDKAILTVRDKYQDSYIVHYMDDILLAHPSRSIVDEILTSMIQALNKHGLVVSTEKIQKYDNLKYLGTHIQGDSVSYQKLQIRTDKLRTLNDFQKLLGNINWIRPFLKLTTGELKPLFEILNPDSNPISTRKLTPEACKALQLMNERLSTARVKRLDLSQPWSLCILKTEYTPTACLWQDGVVEWIHLPHISPKVITPYDIFCTQLIIKGRHRSKELFSKDPDYIVVPYTKVQFDLLLQEKEDWPISLLGFLGEVHFHLPKDPLLTFTLQTAIIFPHMTSTTPLEKGIVIFTDGSANGRSVTYIQGREPIIKENTQNTAQQAEIVAVITAFEEVSQPFNLYTDSKYVTGLFPEIETATLSPRTKIYTELKHLQRLIHKRQEKFYIGHIRGHTGLPGPLAQGNAYADSLTRILTAAGKRTADGSEFEKRTADGSEFESPKKKAKVE

SEQ ID NO: 6852 - protein, 2088 aa, synthetic construct
MPAAKRVKLDGGDKKYSIGLDIGTNSVGWAVITDEYKVPSKKFKVLGNTDRHSIKKNLIGALLFDSGETAEATRLKRTARRRYTRRKNRICYLQEIFSNEMAKVDDSFFHRLEESFLVEEDKKHERHPIFGNIVDEVAYHEKYPTIYHLRKKLVDSTDKADLRLIYLALAHMIKFRGHFLIEGDLNPDNSDVDKLFIQLVQTYNQLFEENPINASGVDAKAILSARLSKSRRLENLIAQLPGEKKNGLFGNLIALSLGLTPNFKSNFDLAEDAKLQLSKDTYDDDLDNLLAQIGDQYADLFLAAKNLSDAILLSDILRVNTEITKAPLSASMIKRYDEHHQDLTLLKALVRQQLPEKYKEIFFDQSKNGYAGYIDGGASQEEFYKFIKPILEKMDGTEELLVKLNREDLLRKQRTFDNGSIPHQIHLGELHAILRRQEDFYPFLKDNREKIEKILTFRIPYYVGPLARGNSRFAWMTRKSEETITPWNFEEVVDKGASAQSFIERMTNFDKNLPNEKVLPKHSLLYEYFTVYNELTKVKYVTEGMRKPAFLSGEQKKAIVDLLFKTNRKVTVKQLKEDYFKKIECFDSVEISGVEDRFNASLGTYHDLLKIIKDKDFLDNEENEDILEDIVLTLTLFEDREMIEERLKTYAHLFDDKVMKQLKRRRYTGWGRLSRKLINGIRDKQSGKTILDFLKSDGFANRNFMQLIHDDSLTFKEDIQKAQVSGQGDSLHEHIANLAGSPAIKKGILQTVKVVDELVKVMGRHKPENIVIEMARENQTTQKGQKNSRERMKRIEEGIKELGSQILKEHPVENTQLQNEKLYLYYLQNGRDMYVDQELDINRLSDYDVDHIVPQSFLKDDSIDNKVLTRSDKARGKSDNVPSEEVVKKMKNYWRQLLNAKLITQRKFDNLTKAERGGLSELDKAGFIKRQLVETRQITKHVAQILDSRMNTKYDENDKLIREVKVITLKSKLVSDFRKDFQFYKVREINNYHHAHDAYLNAVVGTALIKKYPKLESEFVYGDYKVYDVRKMIAKSEQEIGKATAKYFFYSNIMNFFKTEITLANGEIRKRPLIETNGETGEIVWDKGRDFATVRKVLSMPQVNIVKKTEVQTGGFSKESILPKRNSDKLIARKKDWDPKKYGGFDSPTVAYSVLVVAKVEKGKSKKLKSVKELLGITIMERSSFEKNPIDFLEAKGYKEVKKDLIIKLPKYSLFELENGRKRMLASAGELQKGNELALPSKYVNFLYLASHYEKLKGSPEDNEQKQLFVEQHKHYLDEIIEQISEFSKRVILADANLDKVLSAYNKHRDKPIREQAENIIHLFTLTNLGAPAAFKYFDTTIDRKRYTSTKEVLDATLIHQSITGLYETRIDLSQLGGDGGGGGGSSGGSGGTLQLDDEYRLYSPLVKPDQNIQFWLEQFPQAWAETAGMGLAKQVPPQVIQLKASATPVSVRQYPLSKEAQEGIRPHVQRLIQQGILVPVQSPWNTPLLPVRKPGTNDYRPVQDLREVNKRVQDIHPTVPNPYNLLCALPPQRSWYTVLDLKDAFFCLRLHPTSQPLFAFEWRDPGTGRTGQLTWTRLPQGFKNSPTIFDEALHRDLANFRIQHPQVTLLQYVDDLLLAGATKQDCLEGTKALLLELSDLGYRASAKKAQICRREVTYLGYSLRDGQRWLTEARKKTVVQIPAPTTAKQVREFLGTAGFCRLWIPGFATLAAPLYPLTKEKGEFSWAPEHQKAFDAIKKALLSAPALALPDVTKPFTLYVDERKGVARGVLTQTLGPWRRPVAYLSKKLDPVASGWPVCLKAIAAVAILVKDADKLTLGQNITVIAPHALENIVRQPPDRWMTNARMTHYQSLLLTERVTFAPPAALNPATLLPEETDEPVTHDCHQLLIEETGVRKDLTDIPLTGEVLTWFTDGSSYVVEGKRMAGAAVVDGTRTIWASSLPEGTSAQKAELMALTQALRLAEGKSINIYTDSRYAFATAHVHGAIYKQRGLLTSAGREIKNKEEILSLLEALHLPKRLAIIHCPGHQKAKDPISRGNQMADRVAKQAAQGVNLLAGKRTADGSEFEKRTADGSEFESPKKKAKVE

SEQ ID NO: 6853 - protein, 2085 aa, synthetic construct
MPAAKRVKLDGGDKKYSIGLDIGTNSVGWAVITDEYKVPSKKFKVLGNTDRHSIKKNLIGALLFDSGETAEATRLKRTARRRYTRRKNRICYLQEIFSNEMAKVDDSFFHRLEESFLVEEDKKHERHPIFGNIVDEVAYHEKYPTIYHLRKKLVDSTDKADLRLIYLALAHMIKFRGHFLIEGDLNPDNSDVDKLFIQLVQTYNQLFEENPINASGVDAKAILSARLSKSRRLENLIAQLPGEKKNGLFGNLIALSLGLTPNFKSNFDLAEDAKLQLSKDTYDDDLDNLLAQIGDQYADLFLAAKNLSDAILLSDILRVNTEITKAPLSASMIKRYDEHHQDLTLLKALVRQQLPEKYKEIFFDQSKNGYAGYIDGGASQEEFYKFIKPILEKMDGTEELLVKLNREDLLRKQRTFDNGSIPHQIHLGELHAILRRQEDFYPFLKDNREKIEKILTFRIPYYVGPLARGNSRFAWMTRKSEETITPWNFEEVVDKGASAQSFIERMTNFDKNLPNEKVLPKHSLLYEYFTVYNELTKVKYVTEGMRKPAFLSGEQKKAIVDLLFKTNRKVTVKQLKEDYFKKIECFDSVEISGVEDRFNASLGTYHDLLKIIKDKDFLDNEENEDILEDIVLTLTLFEDREMIEERLKTYAHLFDDKVMKQLKRRRYTGWGRLSRKLINGIRDKQSGKTILDFLKSDGFANRNFMQLIHDDSLTFKEDIQKAQVSGQGDSLHEHIANLAGSPAIKKGILQTVKVVDELVKVMGRHKPENIVIEMARENQTTQKGQKNSRERMKRIEEGIKELGSQILKEHPVENTQLQNEKLYLYYLQNGRDMYVDQELDINRLSDYDVDHIVPQSFLKDDSIDNKVLTRSDKARGKSDNVPSEEVVKKMKNYWRQLLNAKLITQRKFDNLTKAERGGLSELDKAGFIKRQLVETRQITKHVAQILDSRMNTKYDENDKLIREVKVITLKSKLVSDFRKDFQFYKVREINNYHHAHDAYLNAVVGTALIKKYPKLESEFVYGDYKVYDVRKMIAKSEQEIGKATAKYFFYSNIMNFFKTEITLANGEIRKRPLIETNGETGEIVWDKGRDFATVRKVLSMPQVNIVKKTEVQTGGFSKESILPKRNSDKLIARKKDWDPKKYGGFDSPTVAYSVLVVAKVEKGKSKKLKSVKELLGITIMERSSFEKNPIDFLEAKGYKEVKKDLIIKLPKYSLFELENGRKRMLASAGELQKGNELALPSKYVNFLYLASHYEKLKGSPEDNEQKQLFVEQHKHYLDEIIEQISEFSKRVILADANLDKVLSAYNKHRDKPIREQAENIIHLFTLTNLGAPAAFKYFDTTIDRKRYTSTKEVLDATLIHQSITGLYETRIDLSQLGGDGGGGGGSSGGSGGIPWLMKKPLQLTTLVPLQEYEERLLKQTMLTGSYKEKLQSLFLKYDALWQHWENQVGHRRIKPHHIATGTVNPRPQKQYPINPKAKASIQTVINDLLKQGVLIQQNSIMNTPVYPVPKPDGKWRMVLDYREVNKTIPLIAAQNQHSAGILSSIFRGKYKTTLDLSNGFWAHSITPESYWLTAFTWLGQQYCWTRLPQGFLNSPALFNADVVDLLKEVPNVQVYVDDIYISHDDPREHLEQLEKVFSLLLNAGYVVSLKKSEIAQHEVEFLGFNITKEGRGLTETFKQKLLNITPPRDLKQLQSILGKLNFARNFIPNFSELVKPLYNIIATAPGKYITWTTDNSQQLQNIISMLNSAENLEERNPEVRLIMKVNTSPSAGYIRFYNEFAKRPIMYLNYVYTKAEVKFTNTEKLLTTIHKGLIKALDLGMGQEILVYSPIVSMTKIQKTPLPERKALPIRWITWMSYLEDPRIQFHYDKTLPELQQVPTVTDDIIAKIKHPSEFSMVFYTDGSAIKHPNVNKSHNAGMGIAQVQFKPEFTVINTWSIPLGDHTAQLAEVAAVEFACKKALKIDGPVLIVTDSFYVAESVNKELPYWQSNGFFNNKKKPLKHVSKWKSIADCIQLKPDIIIIHEKGHQPTASTFHTEGNNLADKLATQGSYVVNAGKRTADGSEFEKRTADGSEFESPKKKAKVE

SEQ ID NO: 6854 - protein, 2174 aa, synthetic construct
MPAAKRVKLDGGDKKYSIGLDIGTNSVGWAVITDEYKVPSKKFKVLGNTDRHSIKKNLIGALLFDSGETAEATRLKRTARRRYTRRKNRICYLQEIFSNEMAKVDDSFFHRLEESFLVEEDKKHERHPIFGNIVDEVAYHEKYPTIYHLRKKLVDSTDKADLRLIYLALAHMIKFRGHFLIEGDLNPDNSDVDKLFIQLVQTYNQLFEENPINASGVDAKAILSARLSKSRRLENLIAQLPGEKKNGLFGNLIALSLGLTPNFKSNFDLAEDAKLQLSKDTYDDDLDNLLAQIGDQYADLFLAAKNLSDAILLSDILRVNTEITKAPLSASMIKRYDEHHQDLTLLKALVRQQLPEKYKEIFFDQSKNGYAGYIDGGASQEEFYKFIKPILEKMDGTEELLVKLNREDLLRKQRTFDNGSIPHQIHLGELHAILRRQEDFYPFLKDNREKIEKILTFRIPYYVGPLARGNSRFAWMTRKSEETITPWNFEEVVDKGASAQSFIERMTNFDKNLPNEKVLPKHSLLYEYFTVYNELTKVKYVTEGMRKPAFLSGEQKKAIVDLLFKTNRKVTVKQLKEDYFKKIECFDSVEISGVEDRFNASLGTYHDLLKIIKDKDFLDNEENEDILEDIVLTLTLFEDREMIEERLKTYAHLFDDKVMKQLKRRRYTGWGRLSRKLINGIRDKQSGKTILDFLKSDGFANRNFMQLIHDDSLTFKEDIQKAQVSGQGDSLHEHIANLAGSPAIKKGILQTVKVVDELVKVMGRHKPENIVIEMARENQTTQKGQKNSRERMKRIEEGIKELGSQILKEHPVENTQLQNEKLYLYYLQNGRDMYVDQELDINRLSDYDVDHIVPQSFLKDDSIDNKVLTRSDKARGKSDNVPSEEVVKKMKNYWRQLLNAKLITQRKFDNLTKAERGGLSELDKAGFIKRQLVETRQITKHVAQILDSRMNTKYDENDKLIREVKVITLKSKLVSDFRKDFQFYKVREINNYHHAHDAYLNAVVGTALIKKYPKLESEFVYGDYKVYDVRKMIAKSEQEIGKATAKYFFYSNIMNFFKTEITLANGEIRKRPLIETNGETGEIVWDKGRDFATVRKVLSMPQVNIVKKTEVQTGGFSKESILPKRNSDKLIARKKDWDPKKYGGFDSPTVAYSVLVVAKVEKGKSKKLKSVKELLGITIMERSSFEKNPIDFLEAKGYKEVKKDLIIKLPKYSLFELENGRKRMLASAGELQKGNELALPSKYVNFLYLASHYEKLKGSPEDNEQKQLFVEQHKHYLDEIIEQISEFSKRVILADANLDKVLSAYNKHRDKPIREQAENIIHLFTLTNLGAPAAFKYFDTTIDRKRYTSTKEVLDATLIHQSITGLYETRIDLSQLGGDGGGGGGSSGGSGGMDPLQLLQPLEAEIKGTKLKAHWNSGATITCVPQAFLEEEVPIKNIWIKTIHGEKEQPVYYLTFKIQGRKVEAEVISSPYDYILVSPSDIPWLMKKPLQLTTLVPLQEYEERLLKQTMLTGSYKEKLQSLFLKYDALWQHWENQVGHRRIKPHHIATGTVNPRPQKQYPINPKAKASIQTVINDLLKQGVLIQQNSIMNTPVYPVPKPDGKWRMVLDYREVNKTIPLIAAQNQHSAGILSSIFRGKYKTTLDLSNGFWAHSITPESYWLTAFTWLGQQYCWTRLPQGFLNSPALFNADVVDLLKEVPNVQVYVDDIYISHDDPREHLEQLEKVFSLLLNAGYVVSLKKSEIAQHEVEFLGFNITKEGRGLTETFKQKLLNITPPRDLKQLQSILGLLNFARNFIPNFSELVKPLYNIIATAPGKYITWTTDNSQQLQNIISMLNSAENLEERNPEVRLIMKVNTSPSAGYIRFYNEFAKRPIMYLNYVYTKAEVKFTNTEKLLTTIHKGLIKALDLGMGQEILVYSPIVSMTKIQKTPLPERKALPIRWITWMSYLEDPRIQFHYDKTLPELQQVPTVTDDIIAKIKHPSEFSMVFYTDGSAIKHPNVNKSHNAGMGIAQVQFKPEFTVINTWSIPLGDHTAQLAEVAAVEFACKKALKIDGPVLIVTDSFYVAESVNKELPYWQSNGFFNNKKKPLKHVSKWKSIADCIQLKPDIIIIHEKGHQPTASTFHTEGNNLADKLATQGSYVVNAGKRTADGSEFEKRTADGSEFESPKKKAKVE

SEQ ID NO: 6855 - protein, 2094 aa, synthetic construct
MPAAKRVKLDGGDKKYSIGLDIGTNSVGWAVITDEYKVPSKKFKVLGNTDRHSIKKNLIGALLFDSGETAEATRLKRTARRRYTRRKNRICYLQEIFSNEMAKVDDSFFHRLEESFLVEEDKKHERHPIFGNIVDEVAYHEKYPTIYHLRKKLVDSTDKADLRLIYLALAHMIKFRGHFLIEGDLNPDNSDVDKLFIQLVQTYNQLFEENPINASGVDAKAILSARLSKSRRLENLIAQLPGEKKNGLFGNLIALSLGLTPNFKSNFDLAEDAKLQLSKDTYDDDLDNLLAQIGDQYADLFLAAKNLSDAILLSDILRVNTEITKAPLSASMIKRYDEHHQDLTLLKALVRQQLPEKYKEIFFDQSKNGYAGYIDGGASQEEFYKFIKPILEKMDGTEELLVKLNREDLLRKQRTFDNGSIPHQIHLGELHAILRRQEDFYPFLKDNREKIEKILTFRIPYYVGPLARGNSRFAWMTRKSEETITPWNFEEVVDKGASAQSFIERMTNFDKNLPNEKVLPKHSLLYEYFTVYNELTKVKYVTEGMRKPAFLSGEQKKAIVDLLFKTNRKVTVKQLKEDYFKKIECFDSVEISGVEDRFNASLGTYHDLLKIIKDKDFLDNEENEDILEDIVLTLTLFEDREMIEERLKTYAHLFDDKVMKQLKRRRYTGWGRLSRKLINGIRDKQSGKTILDFLKSDGFANRNFMQLIHDDSLTFKEDIQKAQVSGQGDSLHEHIANLAGSPAIKKGILQTVKVVDELVKVMGRHKPENIVIEMARENQTTQKGQKNSRERMKRIEEGIKELGSQILKEHPVENTQLQNEKLYLYYLQNGRDMYVDQELDINRLSDYDVDHIVPQSFLKDDSIDNKVLTRSDKARGKSDNVPSEEVVKKMKNYWRQLLNAKLITQRKFDNLTKAERGGLSELDKAGFIKRQLVETRQITKHVAQILDSRMNTKYDENDKLIREVKVITLKSKLVSDFRKDFQFYKVREINNYHHAHDAYLNAVVGTALIKKYPKLESEFVYGDYKVYDVRKMIAKSEQEIGKATAKYFFYSNIMNFFKTEITLANGEIRKRPLIETNGETGEIVWDKGRDFATVRKVLSMPQVNIVKKTEVQTGGFSKESILPKRNSDKLIARKKDWDPKKYGGFDSPTVAYSVLVVAKVEKGKSKKLKSVKELLGITIMERSSFEKNPIDFLEAKGYKEVKKDLIIKLPKYSLFELENGRKRMLASAGELQKGNELALPSKYVNFLYLASHYEKLKGSPEDNEQKQLFVEQHKHYLDEIIEQISEFSKRVILADANLDKVLSAYNKHRDKPIREQAENIIHLFTLTNLGAPAAFKYFDTTIDRKRYTSTKEVLDATLIHQSITGLYETRIDLSQLGGDGGGGGGSSGGSGGTLNIEDEYRLHETSKEPDVPLGSTWLSDFPQAWAETGGMGLAVRQAPLIIPLKATSTPVSIKQYPMSQEARLGIKPHIQRLLDQGILVPCQSPWNTPLLPVKKPGTNDYRPVQDLREVNKRVEDIHPTVPNPYNLLSGLPPSHQWYTVLDLKDAFFCLRLHPTSQPLFAFEWRDPEMGISGQLTWTRLPQGFKNSPTLFNEALHRDLADFRIQHPDLILLQYVDDLLLAATSEQDCQRGTRALLQTLGNLGYRASAKKAQICQKQVKYLGYLLKEGQRWLTEARKETVMGQPTPKTPRQLREFLGTAGFCRLWIPGFAEMAAPLYPLTKPGTLFNWGPDQQKAYQEIKQALLTAPALGLPDLTKPFELFVDEKQGYAKGVLTQKLGPWRRPVAYLSKKLDPVAAGWPPCLRMVAAIAVLTKDAGKLTMGQPLVILAPHAVEALVKQPPDRWLSNARMTHYQAMLLDTDRVQFGPVVALNPATLLPLPEKEAPHDCLEILAETHGTRPDLTDQPIPDADYTWYTDGSSFLQEGQRRAGAAVTTETEVIWARALPAGTSAQRAELIALTQALKMAEGKKLNVYTDSRYAFATAHVHGEIYRRRGWLTSEGREIKNKNEILALLKALFLPKRLSIIHCPGHQKGNSAEARGNRMADQAAREAAMKAVLETSTLLAGKRTADGSEFEKRTADGSEFESPKKKAKVE

SEQ ID NO: 6856 - protein, 2171 aa, synthetic construct
MPAAKRVKLDGGDKKYSIGLDIGTNSVGWAVITDEYKVPSKKFKVLGNTDRHSIKKNLIGALLFDSGETAEATRLKRTARRRYTRRKNRICYLQEIFSNEMAKVDDSFFHRLEESFLVEEDKKHERHPIFGNIVDEVAYHEKYPTIYHLRKKLVDSTDKADLRLIYLALAHMIKFRGHFLIEGDLNPDNSDVDKLFIQLVQTYNQLFEENPINASGVDAKAILSARLSKSRRLENLIAQLPGEKKNGLFGNLIALSLGLTPNFKSNFDLAEDAKLQLSKDTYDDDLDNLLAQIGDQYADLFLAAKNLSDAILLSDILRVNTEITKAPLSASMIKRYDEHHQDLTLLKALVRQQLPEKYKEIFFDQSKNGYAGYIDGGASQEEFYKFIKPILEKMDGTEELLVKLNREDLLRKQRTFDNGSIPHQIHLGELHAILRRQEDFYPFLKDNREKIEKILTFRIPYYVGPLARGNSRFAWMTRKSEETITPWNFEEVVDKGASAQSFIERMTNFDKNLPNEKVLPKHSLLYEYFTVYNELTKVKYVTEGMRKPAFLSGEQKKAIVDLLFKTNRKVTVKQLKEDYFKKIECFDSVEISGVEDRFNASLGTYHDLLKIIKDKDFLDNEENEDILEDIVLTLTLFEDREMIEERLKTYAHLFDDKVMKQLKRRRYTGWGRLSRKLINGIRDKQSGKTILDFLKSDGFANRNFMQLIHDDSLTFKEDIQKAQVSGQGDSLHEHIANLAGSPAIKKGILQTVKVVDELVKVMGRHKPENIVIEMARENQTTQKGQKNSRERMKRIEEGIKELGSQILKEHPVENTQLQNEKLYLYYLQNGRDMYVDQELDINRLSDYDVDHIVPQSFLKDDSIDNKVLTRSDKARGKSDNVPSEEVVKKMKNYWRQLLNAKLITQRKFDNLTKAERGGLSELDKAGFIKRQLVETRQITKHVAQILDSRMNTKYDENDKLIREVKVITLKSKLVSDFRKDFQFYKVREINNYHHAHDAYLNAVVGTALIKKYPKLESEFVYGDYKVYDVRKMIAKSEQEIGKATAKYFFYSNIMNFFKTEITLANGEIRKRPLIETNGETGEIVWDKGRDFATVRKVLSMPQVNIVKKTEVQTGGFSKESILPKRNSDKLIARKKDWDPKKYGGFDSPTVAYSVLVVAKVEKGKSKKLKSVKELLGITIMERSSFEKNPIDFLEAKGYKEVKKDLIIKLPKYSLFELENGRKRMLASAGELQKGNELALPSKYVNFLYLASHYEKLKGSPEDNEQKQLFVEQHKHYLDEIIEQISEFSKRVILADANLDKVLSAYNKHRDKPIREQAENIIHLFTLTNLGAPAAFKYFDTTIDRKRYTSTKEVLDATLIHQSITGLYETRIDLSQLGGDGGGSSGGSGGGGGMDLLKPLTVERKGVKIKGYWNSQADITCVPKDLLQGEEPVRQQNVTTIHGTQEGDVYYVNLKIDGRRINTEVIGTTLDYAIITPGDVPWILKKPLELTIKLDLEEQQGTLLNNSILSKKGKEELKQLFEKYSALWQSWENQVGHRRIRPHKIATGTVKPTPQKQYHINPKAKPDIQIVINDLLKQGVLIQKESTMNTPVYPVPKPNGRWRMVLDYRAVNKVTPLIAVQNQHSYGILGSLFKGRYKTTIDLSNGFWAHPIVPEDYWITAFTWQGKQYCWTVLPQGFLNSPGLFTGDVVDLLQGIPNVEVYVDDVYISHDSEKEHLEYLDILFNRLKEAGYIISLKKSNIANSIVDFLGFQITNEGRGLTDTFKEKLENITAPTTLKQLQSILGLLNFARNFIPDFTELIAPLYALIPKSTKNYVPWQIEHSTTLETLITKLNGAEYLQGRKGDKTLIMKVNASYTTGYIRYYNEGEKKPISYVSIVFSKTELKFTELEKLLTTVHKGLLKALDLSMGQNIHVYSPIVSMQNIQKTPQTAKKALASRWLSWLSYLEDPRIRFFYDPQMPALKDLPAVDTGKDNKKHPSNFQHIFYTDGSAITSPTKEGHLNAGMGIVYFINKDGNLQKQQEWSISLGNHTAQFAEIAAFEFALKKCLPLGGNILVVTDSNYVAKAYNEELDVWASNGFVNNRKKPLKHISKWKSVADLKRLRPDVVVTHEPGHQKLDSSPHAYGNNLADQLATQASFKVHAGKRTADGSEFEKRTADGSEFESPKKKAKVE

SEQ ID NO: 6857 - protein, 2093 aa, synthetic construct
MPAAKRVKLDGGDKKYSIGLDIGTNSVGWAVITDEYKVPSKKFKVLGNTDRHSIKKNLIGALLFDSGETAEATRLKRTARRRYTRRKNRICYLQEIFSNEMAKVDDSFFHRLEESFLVEEDKKHERHPIFGNIVDEVAYHEKYPTIYHLRKKLVDSTDKADLRLIYLALAHMIKFRGHFLIEGDLNPDNSDVDKLFIQLVQTYNQLFEENPINASGVDAKAILSARLSKSRRLENLIAQLPGEKKNGLFGNLIALSLGLTPNFKSNFDLAEDAKLQLSKDTYDDDLDNLLAQIGDQYADLFLAAKNLSDAILLSDILRVNTEITKAPLSASMIKRYDEHHQDLTLLKALVRQQLPEKYKEIFFDQSKNGYAGYIDGGASQEEFYKFIKPILEKMDGTEELLVKLNREDLLRKQRTFDNGSIPHQIHLGELHAILRRQEDFYPFLKDNREKIEKILTFRIPYYVGPLARGNSRFAWMTRKSEETITPWNFEEVVDKGASAQSFIERMTNFDKNLPNEKVLPKHSLLYEYFTVYNELTKVKYVTEGMRKPAFLSGEQKKAIVDLLFKTNRKVTVKQLKEDYFKKIECFDSVEISGVEDRFNASLGTYHDLLKIIKDKDFLDNEENEDILEDIVLTLTLFEDREMIEERLKTYAHLFDDKVMKQLKRRRYTGWGRLSRKLINGIRDKQSGKTILDFLKSDGFANRNFMQLIHDDSLTFKEDIQKAQVSGQGDSLHEHIANLAGSPAIKKGILQTVKVVDELVKVMGRHKPENIVIEMARENQTTQKGQKNSRERMKRIEEGIKELGSQILKEHPVENTQLQNEKLYLYYLQNGRDMYVDQELDINRLSDYDVDHIVPQSFLKDDSIDNKVLTRSDKARGKSDNVPSEEVVKKMKNYWRQLLNAKLITQRKFDNLTKAERGGLSELDKAGFIKRQLVETRQITKHVAQILDSRMNTKYDENDKLIREVKVITLKSKLVSDFRKDFQFYKVREINNYHHAHDAYLNAVVGTALIKKYPKLESEFVYGDYKVYDVRKMIAKSEQEIGKATAKYFFYSNIMNFFKTEITLANGEIRKRPLIETNGETGEIVWDKGRDFATVRKVLSMPQVNIVKKTEVQTGGFSKESILPKRNSDKLIARKKDWDPKKYGGFDSPTVAYSVLVVAKVEKGKSKKLKSVKELLGITIMERSSFEKNPIDFLEAKGYKEVKKDLIIKLPKYSLFELENGRKRMLASAGELQKGNELALPSKYVNFLYLASHYEKLKGSPEDNEQKQLFVEQHKHYLDEIIEQISEFSKRVILADANLDKVLSAYNKHRDKPIREQAENIIHLFTLTNLGAPAAFKYFDTTIDRKRYTSTKEVLDATLIHQSITGLYETRIDLSQLGGDGGGSSGGSGGGGGTLQLEEEYRLFEPESTQKQEMDIWLKNFPQAWAETGGMGTAHCQAPVLIQLKATATPISIRQYPMPHEAYQGIKPHIRRMLDQGILKPCQSPWNTPLLPVKKPGTEDYRPVQDLREVNKRVEDIHPTVPNPYNLLSTLPPSHPWYTVLDLKDAFFCLRLHSESQLLFAFEWRDPEIGLSGQLTWTRLPQGFKNSPTLFNEALHSDLADFRVRYPALVLLQYVDDLLLAAATRTECLEGTKALLETLGNKGYRASAKKAQICLQEVTYLGYSLKDGQRWLTKARKEAILSIPVPKNSRQVREFLGKAGYCRLFIPGFAELAAPLYPLTRPGTLFQWGTEQQLAFEDIKKALLSSPALGLPDITKPFELFIDENSGFAKGVLVQKLGPWKRPVAYLSKKLDTVASGWPPCLRMVAAIAILVKDAGKLTLGQPLTILTSHPVEALVRQPPNKWLSNARMTHYQAMLLDAERVHFGPTVSLNPATLLPLPSGGNHHDCLQILAETHGTRPDLTDQPLPDADLTWYTDGSSFIRNGEREAGAAVTTESEVIWAAPLPPGTSAQRAELIALTQALKMAEGKKLTVYTDSRYAFATTHVHGEIYRRRGWLTSEGKEIKNKNEILALLEALFLPKRLSIIHCPGHQKGDSPQAKGNRLADDTAKKAATETHSSLTVLPAGKRTADGSEFEKRTADGSEFESPKKKAKVE

SEQ ID NO: 6858 - protein, 2216 aa, synthetic construct
MPAAKRVKLDGGDKKYSIGLDIGTNSVGWAVITDEYKVPSKKFKVLGNTDRHSIKKNLIGALLFDSGETAEATRLKRTARRRYTRRKNRICYLQEIFSNEMAKVDDSFFHRLEESFLVEEDKKHERHPIFGNIVDEVAYHEKYPTIYHLRKKLVDSTDKADLRLIYLALAHMIKFRGHFLIEGDLNPDNSDVDKLFIQLVQTYNQLFEENPINASGVDAKAILSARLSKSRRLENLIAQLPGEKKNGLFGNLIALSLGLTPNFKSNFDLAEDAKLQLSKDTYDDDLDNLLAQIGDQYADLFLAAKNLSDAILLSDILRVNTEITKAPLSASMIKRYDEHHQDLTLLKALVRQQLPEKYKEIFFDQSKNGYAGYIDGGASQEEFYKFIKPILEKMDGTEELLVKLNREDLLRKQRTFDNGSIPHQIHLGELHAILRRQEDFYPFLKDNREKIEKILTFRIPYYVGPLARGNSRFAWMTRKSEETITPWNFEEVVDKGASAQSFIERMTNFDKNLPNEKVLPKHSLLYEYFTVYNELTKVKYVTEGMRKPAFLSGEQKKAIVDLLFKTNRKVTVKQLKEDYFKKIECFDSVEISGVEDRFNASLGTYHDLLKIIKDKDFLDNEENEDILEDIVLTLTLFEDREMIEERLKTYAHLFDDKVMKQLKRRRYTGWGRLSRKLINGIRDKQSGKTILDFLKSDGFANRNFMQLIHDDSLTFKEDIQKAQVSGQGDSLHEHIANLAGSPAIKKGILQTVKVVDELVKVMGRHKPENIVIEMARENQTTQKGQKNSRERMKRIEEGIKELGSQILKEHPVENTQLQNEKLYLYYLQNGRDMYVDQELDINRLSDYDVDHIVPQSFLKDDSIDNKVLTRSDKARGKSDNVPSEEVVKKMKNYWRQLLNAKLITQRKFDNLTKAERGGLSELDKAGFIKRQLVETRQITKHVAQILDSRMNTKYDENDKLIREVKVITLKSKLVSDFRKDFQFYKVREINNYHHAHDAYLNAVVGTALIKKYPKLESEFVYGDYKVYDVRKMIAKSEQEIGKATAKYFFYSNIMNFFKTEITLANGEIRKRPLIETNGETGEIVWDKGRDFATVRKVLSMPQVNIVKKTEVQTGGFSKESILPKRNSDKLIARKKDWDPKKYGGFDSPTVAYSVLVVAKVEKGKSKKLKSVKELLGITIMERSSFEKNPIDFLEAKGYKEVKKDLIIKLPKYSLFELENGRKRMLASAGELQKGNELALPSKYVNFLYLASHYEKLKGSPEDNEQKQLFVEQHKHYLDEIIEQISEFSKRVILADANLDKVLSAYNKHRDKPIREQAENIIHLFTLTNLGAPAAFKYFDTTIDRKRYTSTKEVLDATLIHQSITGLYETRIDLSQLGGDGGGSSGGSGGGGGTLGDQGSRGSDPLPEPRVTLTVEGIPTEFLVNTGAEHSVLTKPMGKMGSKRTVVAGATGSKVYPWTTKRLLKIGQKQVTHSFLVIPECPAPLLGRDLLTKLKAQIQFSTEGPQVTWEDRPAMCLVLNLEEEYRLHEKPVPPSIDPSWLQLFPMVWAEKAGMGLANQVPPVVVELKSDASPVAVRQYPMSKEAREGIRPHIQRFLDLGILVPCQSPWNTPLLPVKKPGTNDYRPVQDLREVNKRVQDIHPTVPNPYNLLSSLPPSHTWYSVLDLKDAFFCLKLHPNSQPLFAFEWRDPEKGNTGQLTWTRLPQGFKNSPTLFDEALHRDLASFRALNPQVVMLQYVDDLLVAAPTYRDCKEGTRRLLQELSKLGYRVSAKKAQLCREEVTYLGYLLKGGKRWLTPARKATVMKIPTPTTPRQVREFLGTAGFCRLWIPGFASLAAPLYPLTREKVPFTWTEAHQEAFGRIKEALLSAPALALPDLTKPFALYVDEKEGVARGVLTQTLGPWRRPVAYLSKKLDPVASGWPTCLKAIAAVALLLKDADKLTLGQNVLVIAPHNLESIVRQPPDRWMTNARMTHYQSLLLNERVSFAPPAILNPATLLPVESDDTPIHICSEILAEETGTRPDLRDQPLPGVPAWYTDGSSFIMDGRRQAGAAIVDNKRTVWASNLPEGTSAQKAELIALTQALRLAEGKSINIYTDSRYAFATAHVHGAIYKQRGLLTSAGKDIKNKEEILALLEAIHLPKRVAIIHCPGHQRGTDPVATGNRKADEAAKQAAQSTRILTETTKNAGKRTADGSEFEKRTADGSEFESPKKKAKVE

SEQ ID NO: 6859 - protein, 2125 aa, synthetic construct
MPAAKRVKLDGGDKKYSIGLDIGTNSVGWAVITDEYKVPSKKFKVLGNTDRHSIKKNLIGALLFDSGETAEATRLKRTARRRYTRRKNRICYLQEIFSNEMAKVDDSFFHRLEESFLVEEDKKHERHPIFGNIVDEVAYHEKYPTIYHLRKKLVDSTDKADLRLIYLALAHMIKFRGHFLIEGDLNPDNSDVDKLFIQLVQTYNQLFEENPINASGVDAKAILSARLSKSRRLENLIAQLPGEKKNGLFGNLIALSLGLTPNFKSNFDLAEDAKLQLSKDTYDDDLDNLLAQIGDQYADLFLAAKNLSDAILLSDILRVNTEITKAPLSASMIKRYDEHHQDLTLLKALVRQQLPEKYKEIFFDQSKNGYAGYIDGGASQEEFYKFIKPILEKMDGTEELLVKLNREDLLRKQRTFDNGSIPHQIHLGELHAILRRQEDFYPFLKDNREKIEKILTFRIPYYVGPLARGNSRFAWMTRKSEETITPWNFEEVVDKGASAQSFIERMTNFDKNLPNEKVLPKHSLLYEYFTVYNELTKVKYVTEGMRKPAFLSGEQKKAIVDLLFKTNRKVTVKQLKEDYFKKIECFDSVEISGVEDRFNASLGTYHDLLKIIKDKDFLDNEENEDILEDIVLTLTLFEDREMIEERLKTYAHLFDDKVMKQLKRRRYTGWGRLSRKLINGIRDKQSGKTILDFLKSDGFANRNFMQLIHDDSLTFKEDIQKAQVSGQGDSLHEHIANLAGSPAIKKGILQTVKVVDELVKVMGRHKPENIVIEMARENQTTQKGQKNSRERMKRIEEGIKELGSQILKEHPVENTQLQNEKLYLYYLQNGRDMYVDQELDINRLSDYDVDHIVPQSFLKDDSIDNKVLTRSDKARGKSDNVPSEEVVKKMKNYWRQLLNAKLITQRKFDNLTKAERGGLSELDKAGFIKRQLVETRQITKHVAQILDSRMNTKYDENDKLIREVKVITLKSKLVSDFRKDFQFYKVREINNYHHAHDAYLNAVVGTALIKKYPKLESEFVYGDYKVYDVRKMIAKSEQEIGKATAKYFFYSNIMNFFKTEITLANGEIRKRPLIETNGETGEIVWDKGRDFATVRKVLSMPQVNIVKKTEVQTGGFSKESILPKRNSDKLIARKKDWDPKKYGGFDSPTVAYSVLVVAKVEKGKSKKLKSVKELLGITIMERSSFEKNPIDFLEAKGYKEVKKDLIIKLPKYSLFELENGRKRMLASAGELQKGNELALPSKYVNFLYLASHYEKLKGSPEDNEQKQLFVEQHKHYLDEIIEQISEFSKRVILADANLDKVLSAYNKHRDKPIREQAENIIHLFTLTNLGAPAAFKYFDTTIDRKRYTSTKEVLDATLIHQSITGLYETRIDLSQLGGDGGGSSGGSGGGGGLLGRDLLTKLKAQIQFSTEGPQVTWEDRPAMCLVLNLEEEYRLHEKPVPPSIDPSWLQLFPMVWAEKAGMGLANQVPPVVVELKSDASPVAVRQYPMSKEAREGIRPHIQRFLDLGILVPCQSPWNTPLLPVKKPGTNDYRPVQDLREVNKRVQDIHPTVPNPYNLLSSLPPSHTWYSVLDLKDAFFCLKLHPNSQPLFAFEWRDPEKGNTGQLTWTRLPQGFKNSPTLFNEALHRDLASFRALNPQVVMLQYVDDLLVAAPTYRDCKEGTRRLLQELSKLGYRVSAKKAQLCREEVTYLGYLLKGGKRWLTPARKATVMKIPTPTTPRQVREFLGTAGFCRLWIPGFASLAAPLYPLTRPKVPFTWTEAHQEAFGRIKEALLSAPALALPDLTKPFALYVDEKEGVARGVLTQTLGPWRRPVAYLSKKLDPVASGWPTCLKAIAAVALLLKDADKLTLGQNVLVIAPHNLESIVRQPPDRWMTNARMTHYQSLLLNERVSFAPPAILNPATLLPVESDDTPIHICSEILAEETGTRPDLRDQPLPGVPAWYTDGSSFIMDGRRQAGAAIVDNKRTVWASNLPEGTSAQKAELIALTQALRLAEGKSINIYTDSRYAFATAHVHGAIYKQRGWLTSAGKDIKNKEEILALLEAIHLPKRVAIIHCPGHQRGTDPVATGNRKADEAAKQAAQSTRILTETTKNAGKRTADGSEFEKRTADGSEFESPKKKAKVE

SEQ ID NO: 6860 - protein, 2125 aa, synthetic construct
MPAAKRVKLDGGDKKYSIGLDIGTNSVGWAVITDEYKVPSKKFKVLGNTDRHSIKKNLIGALLFDSGETAEATRLKRTARRRYTRRKNRICYLQEIFSNEMAKVDDSFFHRLEESFLVEEDKKHERHPIFGNIVDEVAYHEKYPTIYHLRKKLVDSTDKADLRLIYLALAHMIKFRGHFLIEGDLNPDNSDVDKLFIQLVQTYNQLFEENPINASGVDAKAILSARLSKSRRLENLIAQLPGEKKNGLFGNLIALSLGLTPNFKSNFDLAEDAKLQLSKDTYDDDLDNLLAQIGDQYADLFLAAKNLSDAILLSDILRVNTEITKAPLSASMIKRYDEHHQDLTLLKALVRQQLPEKYKEIFFDQSKNGYAGYIDGGASQEEFYKFIKPILEKMDGTEELLVKLNREDLLRKQRTFDNGSIPHQIHLGELHAILRRQEDFYPFLKDNREKIEKILTFRIPYYVGPLARGNSRFAWMTRKSEETITPWNFEEVVDKGASAQSFIERMTNFDKNLPNEKVLPKHSLLYEYFTVYNELTKVKYVTEGMRKPAFLSGEQKKAIVDLLFKTNRKVTVKQLKEDYFKKIECFDSVEISGVEDRFNASLGTYHDLLKIIKDKDFLDNEENEDILEDIVLTLTLFEDREMIEERLKTYAHLFDDKVMKQLKRRRYTGWGRLSRKLINGIRDKQSGKTILDFLKSDGFANRNFMQLIHDDSLTFKEDIQKAQVSGQGDSLHEHIANLAGSPAIKKGILQTVKVVDELVKVMGRHKPENIVIEMARENQTTQKGQKNSRERMKRIEEGIKELGSQILKEHPVENTQLQNEKLYLYYLQNGRDMYVDQELDINRLSDYDVDHIVPQSFLKDDSIDNKVLTRSDKARGKSDNVPSEEVVKKMKNYWRQLLNAKLITQRKFDNLTKAERGGLSELDKAGFIKRQLVETRQITKHVAQILDSRMNTKYDENDKLIREVKVITLKSKLVSDFRKDFQFYKVREINNYHHAHDAYLNAVVGTALIKKYPKLESEFVYGDYKVYDVRKMIAKSEQEIGKATAKYFFYSNIMNFFKTEITLANGEIRKRPLIETNGETGEIVWDKGRDFATVRKVLSMPQVNIVKKTEVQTGGFSKESILPKRNSDKLIARKKDWDPKKYGGFDSPTVAYSVLVVAKVEKGKSKKLKSVKELLGITIMERSSFEKNPIDFLEAKGYKEVKKDLIIKLPKYSLFELENGRKRMLASAGELQKGNELALPSKYVNFLYLASHYEKLKGSPEDNEQKQLFVEQHKHYLDEIIEQISEFSKRVILADANLDKVLSAYNKHRDKPIREQAENIIHLFTLTNLGAPAAFKYFDTTIDRKRYTSTKEVLDATLIHQSITGLYETRIDLSQLGGDGGGSSGGSGGGGGLLGRDLLTKLKAQIQFSTEGPQVTWEDRPAMCLVLNLEEEYRLHEKPVPPSIDPSWLQLFPMVWAEKAGMGLANQVPPVVVELKSDASPVAVRQYPMSKEAREGIRPHIQRFLDLGILVPCQSPWNTPLLPVKKPGTNDYRPVQDLREVNKRVQDIHPTVPNPYNLLSSLPPSHTWYSVLDLKDAFFCLKLHPNSQPLFAFEWRDPEKGNTGQLTWTRLPQGFKNSPTLFNEALHRDLASFRALNPQVVMLQYVDDLLVAAPTYRDCKEGTRRLLQELSKLGYRVSAKKAQLCREEVTYLGYLLKGGKRWLTPARKATVMKIPTPTTPRQVREFLGKAGFCRLFIPGFASLAAPLYPLTRPKVPFTWTEAHQEAFGRIKEALLSAPALALPDLTKPFALYVDEKEGVARGVLTQTLGPWRRPVAYLSKKLDPVASGWPTCLKAIAAVALLLKDADKLTLGQNVLVIAPHNLESIVRQPPDRWMTNARMTHYQSLLLNERVSFAPPAILNPATLLPVESDDTPIHICSEILAEETGTRPDLRDQPLPGVPAWYTDGSSFIMDGRRQAGAAIVDNKRTVWASNLPEGTSAQKAELIALTQALRLAEGKSINIYTDSRYAFATAHVHGAIYKQRGWLTSAGKDIKNKEEILALLEAIHLPKRVAIIHCPGHQRGTDPVATGNRKADEAAKQAAQSTRILTETTKNAGKRTADGSEFEKRTADGSEFESPKKKAKVE

SEQ ID NO: 6861 - protein, 2216 aa, synthetic construct
MPAAKRVKLDGGDKKYSIGLDIGTNSVGWAVITDEYKVPSKKFKVLGNTDRHSIKKNLIGALLFDSGETAEATRLKRTARRRYTRRKNRICYLQEIFSNEMAKVDDSFFHRLEESFLVEEDKKHERHPIFGNIVDEVAYHEKYPTIYHLRKKLVDSTDKADLRLIYLALAHMIKFRGHFLIEGDLNPDNSDVDKLFIQLVQTYNQLFEENPINASGVDAKAILSARLSKSRRLENLIAQLPGEKKNGLFGNLIALSLGLTPNFKSNFDLAEDAKLQLSKDTYDDDLDNLLAQIGDQYADLFLAAKNLSDAILLSDILRVNTEITKAPLSASMIKRYDEHHQDLTLLKALVRQQLPEKYKEIFFDQSKNGYAGYIDGGASQEEFYKFIKPILEKMDGTEELLVKLNREDLLRKQRTFDNGSIPHQIHLGELHAILRRQEDFYPFLKDNREKIEKILTFRIPYYVGPLARGNSRFAWMTRKSEETITPWNFEEVVDKGASAQSFIERMTNFDKNLPNEKVLPKHSLLYEYFTVYNELTKVKYVTEGMRKPAFLSGEQKKAIVDLLFKTNRKVTVKQLKEDYFKKIECFDSVEISGVEDRFNASLGTYHDLLKIIKDKDFLDNEENEDILEDIVLTLTLFEDREMIEERLKTYAHLFDDKVMKQLKRRRYTGWGRLSRKLINGIRDKQSGKTILDFLKSDGFANRNFMQLIHDDSLTFKEDIQKAQVSGQGDSLHEHIANLAGSPAIKKGILQTVKVVDELVKVMGRHKPENIVIEMARENQTTQKGQKNSRERMKRIEEGIKELGSQILKEHPVENTQLQNEKLYLYYLQNGRDMYVDQELDINRLSDYDVDHIVPQSFLKDDSIDNKVLTRSDKARGKSDNVPSEEVVKKMKNYWRQLLNAKLITQRKFDNLTKAERGGLSELDKAGFIKRQLVETRQITKHVAQILDSRMNTKYDENDKLIREVKVITLKSKLVSDFRKDFQFYKVREINNYHHAHDAYLNAVVGTALIKKYPKLESEFVYGDYKVYDVRKMIAKSEQEIGKATAKYFFYSNIMNFFKTEITLANGEIRKRPLIETNGETGEIVWDKGRDFATVRKVLSMPQVNIVKKTEVQTGGFSKESILPKRNSDKLIARKKDWDPKKYGGFDSPTVAYSVLVVAKVEKGKSKKLKSVKELLGITIMERSSFEKNPIDFLEAKGYKEVKKDLIIKLPKYSLFELENGRKRMLASAGELQKGNELALPSKYVNFLYLASHYEKLKGSPEDNEQKQLFVEQHKHYLDEIIEQISEFSKRVILADANLDKVLSAYNKHRDKPIREQAENIIHLFTLTNLGAPAAFKYFDTTIDRKRYTSTKEVLDATLIHQSITGLYETRIDLSQLGGDGGGSSGGSGGGGGTLGDQGSRGSDPLPEPRVTLTVEGIPTEFLVNTGAEHSVLTKPMGKMGSKRTVVAGATGSKVYPWTTKRLLKIGQKQVTHSFLVIPECPAPLLGRDLLTKLKAQIQFSTEGPQVTWEDRPAMCLVLNLEEEYRLHEKPVPPSIDPSWLQLFPMVWAEKAGMGLANQVPPVVVELKSDASPVAVRQYPMSKEAREGIRPHIQRFLDLGILVPCQSPWNTPLLPVKKPGTNDYRPVQDLREVNKRVQDIHPTVPNPYNLLSSLPPSHTWYSVLDLKDAFFCLKLHPNSQPLFAFEWRDPEKGNTGQLTWTRLPQGFKNSPTLFNEALHRDLASFRALNPQVVMLQYVDDLLVAAPTYRDCKEGTRRLLQELSKLGYRVSAKKAQLCREEVTYLGYLLKGGKRWLTPARKATVMKIPTPTTPRQVREFLGTAGFCRLWIPGFASLAAPLYPLTRPKVPFTWTEAHQEAFGRIKEALLSAPALALPDLTKPFALYVDEKEGVARGVLTQTLGPWRRPVAYLSKKLDPVASGWPTCLKAIAAVALLLKDADKLTLGQNVLVIAPHNLESIVRQPPDRWMTNARMTHYQSLLLNERVSFAPPAILNPATLLPVESDDTPIHICSEILAEETGTRPDLRDQPLPGVPAWYTDGSSFIMDGRRQAGAAIVDNKRTVWASNLPEGTSAQKAELIALTQALRLAEGKSINIYTDSRYAFATAHVHGAIYKQRGWLTSAGKDIKNKEEILALLEAIHLPKRVAIIHCPGHQRGTDPVATGNRKADEAAKQAAQSTRILTETTKNAGKRTADGSEFEKRTADGSEFESPKKKAKVE

SEQ ID NO: 6862 - protein, 2216 aa, synthetic construct
MPAAKRVKLDGGDKKYSIGLDIGTNSVGWAVITDEYKVPSKKFKVLGNTDRHSIKKNLIGALLFDSGETAEATRLKRTARRRYTRRKNRICYLQEIFSNEMAKVDDSFFHRLEESFLVEEDKKHERHPIFGNIVDEVAYHEKYPTIYHLRKKLVDSTDKADLRLIYLALAHMIKFRGHFLIEGDLNPDNSDVDKLFIQLVQTYNQLFEENPINASGVDAKAILSARLSKSRRLENLIAQLPGEKKNGLFGNLIALSLGLTPNFKSNFDLAEDAKLQLSKDTYDDDLDNLLAQIGDQYADLFLAAKNLSDAILLSDILRVNTEITKAPLSASMIKRYDEHHQDLTLLKALVRQQLPEKYKEIFFDQSKNGYAGYIDGGASQEEFYKFIKPILEKMDGTEELLVKLNREDLLRKQRTFDNGSIPHQIHLGELHAILRRQEDFYPFLKDNREKIEKILTFRIPYYVGPLARGNSRFAWMTRKSEETITPWNFEEVVDKGASAQSFIERMTNFDKNLPNEKVLPKHSLLYEYFTVYNELTKVKYVTEGMRKPAFLSGEQKKAIVDLLFKTNRKVTVKQLKEDYFKKIECFDSVEISGVEDRFNASLGTYHDLLKIIKDKDFLDNEENEDILEDIVLTLTLFEDREMIEERLKTYAHLFDDKVMKQLKRRRYTGWGRLSRKLINGIRDKQSGKTILDFLKSDGFANRNFMQLIHDDSLTFKEDIQKAQVSGQGDSLHEHIANLAGSPAIKKGILQTVKVVDELVKVMGRHKPENIVIEMARENQTTQKGQKNSRERMKRIEEGIKELGSQILKEHPVENTQLQNEKLYLYYLQNGRDMYVDQELDINRLSDYDVDHIVPQSFLKDDSIDNKVLTRSDKARGKSDNVPSEEVVKKMKNYWRQLLNAKLITQRKFDNLTKAERGGLSELDKAGFIKRQLVETRQITKHVAQILDSRMNTKYDENDKLIREVKVITLKSKLVSDFRKDFQFYKVREINNYHHAHDAYLNAVVGTALIKKYPKLESEFVYGDYKVYDVRKMIAKSEQEIGKATAKYFFYSNIMNFFKTEITLANGEIRKRPLIETNGETGEIVWDKGRDFATVRKVLSMPQVNIVKKTEVQTGGFSKESILPKRNSDKLIARKKDWDPKKYGGFDSPTVAYSVLVVAKVEKGKSKKLKSVKELLGITIMERSSFEKNPIDFLEAKGYKEVKKDLIIKLPKYSLFELENGRKRMLASAGELQKGNELALPSKYVNFLYLASHYEKLKGSPEDNEQKQLFVEQHKHYLDEIIEQISEFSKRVILADANLDKVLSAYNKHRDKPIREQAENIIHLFTLTNLGAPAAFKYFDTTIDRKRYTSTKEVLDATLIHQSITGLYETRIDLSQLGGDGGGSSGGSGGGGGTLGDQGSRGSDPLPEPRVTLTVEGIPTEFLVNTGAEHSVLTKPMGKMGSKRTVVAGATGSKVYPWTTKRLLKIGQKQVTHSFLVIPECPAPLLGRDLLTKLKAQIQFSTEGPQVTWEDRPAMCLVLNLEEEYRLHEKPVPPSIDPSWLQLFPMVWAEKAGMGLANQVPPVVVELKSDASPVAVRQYPMSKEAREGIRPHIQRFLDLGILVPCQSPWNTPLLPVKKPGTNDYRPVQDLREVNKRVQDIHPTVPNPYNLLSSLPPSHTWYSVLDLKDAFFCLKLHPNSQPLFAFEWRDPEKGNTGQLTWTRLPQGFKNSPTLFNEALHRDLASFRALNPQVVMLQYVDDLLVAAPTYRDCKEGTRRLLQELSKLGYRVSAKKAQLCREEVTYLGYLLKGGKRWLTPARKATVMKIPTPTTPRQVREFLGKAGFCRLFIPGFASLAAPLYPLTRPKVPFTWTEAHQEAFGRIKEALLSAPALALPDLTKPFALYVDEKEGVARGVLTQTLGPWRRPVAYLSKKLDPVASGWPTCLKAIAAVALLLKDADKLTLGQNVLVIAPHNLESIVRQPPDRWMTNARMTHYQSLLLNERVSFAPPAILNPATLLPVESDDTPIHICSEILAEETGTRPDLRDQPLPGVPAWYTDGSSFIMDGRRQAGAAIVDNKRTVWASNLPEGTSAQKAELIALTQALRLAEGKSINIYTDSRYAFATAHVHGAIYKQRGWLTSAGKDIKNKEEILALLEAIHLPKRVAIIHCPGHQRGTDPVATGNRKADEAAKQAAQSTRILTETTKNAGKRTADGSEFEKRTADGSEFESPKKKAKVE

SEQ ID NO: 6863 - protein, 2094 aa, synthetic construct
MPAAKRVKLDGGDKKYSIGLDIGTNSVGWAVITDEYKVPSKKFKVLGNTDRHSIKKNLIGALLFDSGETAEATRLKRTARRRYTRRKNRICYLQEIFSNEMAKVDDSFFHRLEESFLVEEDKKHERHPIFGNIVDEVAYHEKYPTIYHLRKKLVDSTDKADLRLIYLALAHMIKFRGHFLIEGDLNPDNSDVDKLFIQLVQTYNQLFEENPINASGVDAKAILSARLSKSRRLENLIAQLPGEKKNGLFGNLIALSLGLTPNFKSNFDLAEDAKLQLSKDTYDDDLDNLLAQIGDQYADLFLAAKNLSDAILLSDILRVNTEITKAPLSASMIKRYDEHHQDLTLLKALVRQQLPEKYKEIFFDQSKNGYAGYIDGGASQEEFYKFIKPILEKMDGTEELLVKLNREDLLRKQRTFDNGSIPHQIHLGELHAILRRQEDFYPFLKDNREKIEKILTFRIPYYVGPLARGNSRFAWMTRKSEETITPWNFEEVVDKGASAQSFIERMTNFDKNLPNEKVLPKHSLLYEYFTVYNELTKVKYVTEGMRKPAFLSGEQKKAIVDLLFKTNRKVTVKQLKEDYFKKIECFDSVEISGVEDRFNASLGTYHDLLKIIKDKDFLDNEENEDILEDIVLTLTLFEDREMIEERLKTYAHLFDDKVMKQLKRRRYTGWGRLSRKLINGIRDKQSGKTILDFLKSDGFANRNFMQLIHDDSLTFKEDIQKAQVSGQGDSLHEHIANLAGSPAIKKGILQTVKVVDELVKVMGRHKPENIVIEMARENQTTQKGQKNSRERMKRIEEGIKELGSQILKEHPVENTQLQNEKLYLYYLQNGRDMYVDQELDINRLSDYDVDHIVPQSFLKDDSIDNKVLTRSDKARGKSDNVPSEEVVKKMKNYWRQLLNAKLITQRKFDNLTKAERGGLSELDKAGFIKRQLVETRQITKHVAQILDSRMNTKYDENDKLIREVKVITLKSKLVSDFRKDFQFYKVREINNYHHAHDAYLNAVVGTALIKKYPKLESEFVYGDYKVYDVRKMIAKSEQEIGKATAKYFFYSNIMNFFKTEITLANGEIRKRPLIETNGETGEIVWDKGRDFATVRKVLSMPQVNIVKKTEVQTGGFSKESILPKRNSDKLIARKKDWDPKKYGGFDSPTVAYSVLVVAKVEKGKSKKLKSVKELLGITIMERSSFEKNPIDFLEAKGYKEVKKDLIIKLPKYSLFELENGRKRMLASAGELQKGNELALPSKYVNFLYLASHYEKLKGSPEDNEQKQLFVEQHKHYLDEIIEQISEFSKRVILADANLDKVLSAYNKHRDKPIREQAENIIHLFTLTNLGAPAAFKYFDTTIDRKRYTSTKEVLDATLIHQSITGLYETRIDLSQLGGDGGGSSGGSGGGGGTLNLEDEYRLYETSAEPEVSPGSTWLSDFPQAWAETGGMGLAVRQAPLIIPLKATSTPVSIKQYPMSQEAKLGIKPHIQRLLDQGILVPCQSPWNTPLLPVKKPGTNDYRPVQDLREVNKRVEDIHPTVPNPYNLLSGLPPSHRWYTVLDLKDAFFCLRLHPTSQPLFAFEWRDPGMGISGQLTWTRLPQGFKNSPTLFNEALHRDLADFRIQHPDLILLQYVDDILLAATSELDCQQGTRALLLTLGNLGYRASAKKAQLCQKQVKYLGYLLKEGQRWLTEARKETVMGQPTPKTPRQLREFLGTAGFCRLWIPGFAEMAAPLYPLTKPGTLFNWGPDQQKAYQEIKQALLTAPALGLPDLTKPFELFVDEKQGYAKGVLTQKLGPWRRPVAYLSKKLDPVAAGWPPCLRMVAAIAVLRKDAGKLTMGQPLVILAPHAVEALVKQPPDRWLSNARMTHYQAMLLDTDRVQFGPVVALNPATLLPLPEEGAPHDCLEILAETHGTRPDLTDQPIPDADHTWYTDGSSFLQEGQRKAGAAVTTETEVIWARALPAGTSAQRAELIALTQALKMAEGKRLNVYTDSRYAFATAHIHGEIYRRRGWLTSEGREIKNKSEILALLKALFLPKRLSIIHCLGHQKGDSAEARGNRLADQAAREAAIKTPPDTSTLLAGKRTADGSEFEKRTADGSEFESPKKKAKVE

SEQ ID NO: 6864 - protein, 2094 aa, synthetic construct
MPAAKRVKLDGGDKKYSIGLDIGTNSVGWAVITDEYKVPSKKFKVLGNTDRHSIKKNLIGALLFDSGETAEATRLKRTARRRYTRRKNRICYLQEIFSNEMAKVDDSFFHRLEESFLVEEDKKHERHPIFGNIVDEVAYHEKYPTIYHLRKKLVDSTDKADLRLIYLALAHMIKFRGHFLIEGDLNPDNSDVDKLFIQLVQTYNQLFEENPINASGVDAKAILSARLSKSRRLENLIAQLPGEKKNGLFGNLIALSLGLTPNFKSNFDLAEDAKLQLSKDTYDDDLDNLLAQIGDQYADLFLAAKNLSDAILLSDILRVNTEITKAPLSASMIKRYDEHHQDLTLLKALVRQQLPEKYKEIFFDQSKNGYAGYIDGGASQEEFYKFIKPILEKMDGTEELLVKLNREDLLRKQRTFDNGSIPHQIHLGELHAILRRQEDFYPFLKDNREKIEKILTFRIPYYVGPLARGNSRFAWMTRKSEETITPWNFEEVVDKGASAQSFIERMTNFDKNLPNEKVLPKHSLLYEYFTVYNELTKVKYVTEGMRKPAFLSGEQKKAIVDLLFKTNRKVTVKQLKEDYFKKIECFDSVEISGVEDRFNASLGTYHDLLKIIKDKDFLDNEENEDILEDIVLTLTLFEDREMIEERLKTYAHLFDDKVMKQLKRRRYTGWGRLSRKLINGIRDKQSGKTILDFLKSDGFANRNFMQLIHDDSLTFKEDIQKAQVSGQGDSLHEHIANLAGSPAIKKGILQTVKVVDELVKVMGRHKPENIVIEMARENQTTQKGQKNSRERMKRIEEGIKELGSQILKEHPVENTQLQNEKLYLYYLQNGRDMYVDQELDINRLSDYDVDHIVPQSFLKDDSIDNKVLTRSDKARGKSDNVPSEEVVKKMKNYWRQLLNAKLITQRKFDNLTKAERGGLSELDKAGFIKRQLVETRQITKHVAQILDSRMNTKYDENDKLIREVKVITLKSKLVSDFRKDFQFYKVREINNYHHAHDAYLNAVVGTALIKKYPKLESEFVYGDYKVYDVRKMIAKSEQEIGKATAKYFFYSNIMNFFKTEITLANGEIRKRPLIETNGETGEIVWDKGRDFATVRKVLSMPQVNIVKKTEVQTGGFSKESILPKRNSDKLIARKKDWDPKKYGGFDSPTVAYSVLVVAKVEKGKSKKLKSVKELLGITIMERSSFEKNPIDFLEAKGYKEVKKDLIIKLPKYSLFELENGRKRMLASAGELQKGNELALPSKYVNFLYLASHYEKLKGSPEDNEQKQLFVEQHKHYLDEIIEQISEFSKRVILADANLDKVLSAYNKHRDKPIREQAENIIHLFTLTNLGAPAAFKYFDTTIDRKRYTSTKEVLDATLIHQSITGLYETRIDLSQLGGDGGGSSGGSGGGGGTLNIEDEHRLHETSKEPDVSLGSTWLSDFPQAWAETGGMGLAVRQAPLIIPLKATSTPVSIKQYPMSQEARLGIKPHIQRLLDQGILVPCQSPWNTPLLPVKKPGTNDYRPVQDLREVNKRVEDIHPTVPNPYNLLSGLPPSHQWYTVLDLKDAFFCLRLHPTSQPLFAFEWRDPEMGISGQLTWTRLPQGFKNSPTLFNEALHRDLADFRIQHPDLILLQYVDDLLLAATSELDCQQGTRALLQTLGNLGYRASAKKAQICQKQVKYLGYLLKEGQRWLTEARKETVMGQPTPKTPRQLREFLGTAGFCRLWIPGFAEMAAPLYPLTKPGTLFNWGPDQQKAYQEIKQALLTAPALGLPDLTKPFELFVDEKQGYAKGVLTQKLGPWRRPVAYLSKKLDPVAAGWPPCLRMVAAIAVLTKDAGKLTMGQPLVILAPHAVEALVKQPPDRWLSNARMTHYQALLLDTDRVQFGPVVALNPATLLPLPEEGLQHNCLDILAEAHGTRPDLTDQPLPDADHTWYTDGSSLLQEGQRKAGAAVTTETEVIWAKALPAGTSAQRAELIALTQALKMAEGKKLNVYTDSRYAFATAHIHGEIYRRRGWLTSEGKEIKNKDEILALLKALFLPKRLSIIHCPGHQKGHSAEARGNRMADQAARKAAITETPDTSTLLAGKRTADGSEFEKRTADGSEFESPKKKAKVE

SEQ ID NO: 6865 - protein, 2094 aa, synthetic construct
MPAAKRVKLDGGDKKYSIGLDIGTNSVGWAVITDEYKVPSKKFKVLGNTDRHSIKKNLIGALLFDSGETAEATRLKRTARRRYTRRKNRICYLQEIFSNEMAKVDDSFFHRLEESFLVEEDKKHERHPIFGNIVDEVAYHEKYPTIYHLRKKLVDSTDKADLRLIYLALAHMIKFRGHFLIEGDLNPDNSDVDKLFIQLVQTYNQLFEENPINASGVDAKAILSARLSKSRRLENLIAQLPGEKKNGLFGNLIALSLGLTPNFKSNFDLAEDAKLQLSKDTYDDDLDNLLAQIGDQYADLFLAAKNLSDAILLSDILRVNTEITKAPLSASMIKRYDEHHQDLTLLKALVRQQLPEKYKEIFFDQSKNGYAGYIDGGASQEEFYKFIKPILEKMDGTEELLVKLNREDLLRKQRTFDNGSIPHQIHLGELHAILRRQEDFYPFLKDNREKIEKILTFRIPYYVGPLARGNSRFAWMTRKSEETITPWNFEEVVDKGASAQSFIERMTNFDKNLPNEKVLPKHSLLYEYFTVYNELTKVKYVTEGMRKPAFLSGEQKKAIVDLLFKTNRKVTVKQLKEDYFKKIECFDSVEISGVEDRFNASLGTYHDLLKIIKDKDFLDNEENEDILEDIVLTLTLFEDREMIEERLKTYAHLFDDKVMKQLKRRRYTGWGRLSRKLINGIRDKQSGKTILDFLKSDGFANRNFMQLIHDDSLTFKEDIQKAQVSGQGDSLHEHIANLAGSPAIKKGILQTVKVVDELVKVMGRHKPENIVIEMARENQTTQKGQKNSRERMKRIEEGIKELGSQILKEHPVENTQLQNEKLYLYYLQNGRDMYVDQELDINRLSDYDVDHIVPQSFLKDDSIDNKVLTRSDKARGKSDNVPSEEVVKKMKNYWRQLLNAKLITQRKFDNLTKAERGGLSELDKAGFIKRQLVETRQITKHVAQILDSRMNTKYDENDKLIREVKVITLKSKLVSDFRKDFQFYKVREINNYHHAHDAYLNAVVGTALIKKYPKLESEFVYGDYKVYDVRKMIAKSEQEIGKATAKYFFYSNIMNFFKTEITLANGEIRKRPLIETNGETGEIVWDKGRDFATVRKVLSMPQVNIVKKTEVQTGGFSKESILPKRNSDKLIARKKDWDPKKYGGFDSPTVAYSVLVVAKVEKGKSKKLKSVKELLGITIMERSSFEKNPIDFLEAKGYKEVKKDLIIKLPKYSLFELENGRKRMLASAGELQKGNELALPSKYVNFLYLASHYEKLKGSPEDNEQKQLFVEQHKHYLDEIIEQISEFSKRVILADANLDKVLSAYNKHRDKPIREQAENIIHLFTLTNLGAPAAFKYFDTTIDRKRYTSTKEVLDATLIHQSITGLYETRIDLSQLGGDGGGSSGGSGGGGGTLNIEDEHRLHETSKEPDVSLGSTWLSDFPQAWAETGGMGLAVRQAPLIIPLKATSTPVSIKQYPMSQEARLGIKPHIQRLLDQGILVPCQSPWNTPLLPVKKPGTNDYRPVQDLREVNKRVEDIHPTVPNPYNLLSGLPPSHQWYTVLDLKDAFFCLRLHPTSQPLFAFEWRDPEMGISGQLTWTRLPQGFKNSPTLFDEALHRDLADFRIQHPDLILLQYVDDLLLAATSELDCQQGTRALLQTLGNLGYRASAKKAQICQKQVKYLGYLLKEGQRWLTEARKETVMGQPTPKTPRQLREFLGTAGFCRLWIPGFAEMAAPLYPLTKTGTLFNWGPDQQKAYQEIKQALLTAPALGLPDLTKPFELFVDEKQGYAKGVLTQKLGPWRRPVAYLSKKLDPVAAGWPPCLRMVAAIAVLTKDAGKLTMGQPLVILAPHAVEALVKQPPDRWLSNARMTHYQALLLDTDRVQFGPVVALNPATLLPLPEEGLQHNCLDILAEAHGTRPDLTDQPLPDADHTWYTDGSSLLQEGQRKAGAAVTTETEVIWAKALPAGTSAQRAELIALTQALKMAEGKKLNVYTDSRYAFATAHIHGEIYRRRGLLTSEGKEIKNKDEILALLKALFLPKRLSIIHCPGHQKGHSAEARGNRMADQAARKAAITETPDTSTLLAGKRTADGSEFEKRTADGSEFESPKKKAKVE

SEQ ID NO: 6866 - protein, 2094 aa, synthetic construct; identical to SEQ ID NO: 6864

SEQ ID NO: 6867 - protein, 2088 aa, synthetic construct
MPAAKRVKLDGGDKKYSIGLDIGTNSVGWAVITDEYKVPSKKFKVLGNTDRHSIKKNLIGALLFDSGETAEATRLKRTARRRYTRRKNRICYLQEIFSNEMAKVDDSFFHRLEESFLVEEDKKHERHPIFGNIVDEVAYHEKYPTIYHLRKKLVDSTDKADLRLIYLALAHMIKFRGHFLIEGDLNPDNSDVDKLFIQLVQTYNQLFEENPINASGVDAKAILSARLSKSRRLENLIAQLPGEKKNGLFGNLIALSLGLTPNFKSNFDLAEDAKLQLSKDTYDDDLDNLLAQIGDQYADLFLAAKNLSDAILLSDILRVNTEITKAPLSASMIKRYDEHHQDLTLLKALVRQQLPEKYKEIFFDQSKNGYAGYIDGGASQEEFYKFIKPILEKMDGTEELLVKLNREDLLRKQRTFDNGSIPHQIHLGELHAILRRQEDFYPFLKDNREKIEKILTFRIPYYVGPLARGNSRFAWMTRKSEETITPWNFEEVVDKGASAQSFIERMTNFDKNLPNEKVLPKHSLLYEYFTVYNELTKVKYVTEGMRKPAFLSGEQKKAIVDLLFKTNRKVTVKQLKEDYFKKIECFDSVEISGVEDRFNASLGTYHDLLKIIKDKDFLDNEENEDILEDIVLTLTLFEDREMIEERLKTYAHLFDDKVMKQLKRRRYTGWGRLSRKLINGIRDKQSGKTILDFLKSDGFANRNFMQLIHDDSLTFKEDIQKAQVSGQGDSLHEHIANLAGSPAIKKGILQTVKVVDELVKVMGRHKPENIVIEMARENQTTQKGQKNSRERMKRIEEGIKELGSQILKEHPVENTQLQNEKLYLYYLQNGRDMYVDQELDINRLSDYDVDHIVPQSFLKDDSIDNKVLTRSDKARGKSDNVPSEEVVKKMKNYWRQLLNAKLITQRKFDNLTKAERGGLSELDKAGFIKRQLVETRQITKHVAQILDSRMNTKYDENDKLIREVKVITLKSKLVSDFRKDFQFYKVREINNYHHAHDAYLNAVVGTALIKKYPKLESEFVYGDYKVYDVRKMIAKSEQEIGKATAKYFFYSNIMNFFKTEITLANGEIRKRPLIETNGETGEIVWDKGRDFATVRKVLSMPQVNIVKKTEVQTGGFSKESILPKRNSDKLIARKKDWDPKKYGGFDSPTVAYSVLVVAKVEKGKSKKLKSVKELLGITIMERSSFEKNPIDFLEAKGYKEVKKDLIIKLPKYSLFELENGRKRMLASAGELQKGNELALPSKYVNFLYLASHYEKLKGSPEDNEQKQLFVEQHKHYLDEIIEQISEFSKRVILADANLDKVLSAYNKHRDKPIREQAENIIHLFTLTNLGAPAAFKYFDTTIDRKRYTSTKEVLDATLIHQSITGLYETRIDLSQLGGDGGGSSGGSGGGGGTLQLDDEYRLYSPLVKPDQNIQFWLEQFPQAWAETAGMGLAKQVPPQVIQLKASATPVSVRQYPLSKEAQEGIRPHVQRLIQQGILVPVQSPWNTPLLPVRKPGTNDYRPVQDLREVNKRVQDIHPTVPNPYNLLCALPPQRSWYTVLDLKDAFFCLRLHPTSQPLFAFEWRDPGTGRTGQLTWTRLPQGFKNSPTIFDEALHRDLANFRIQHPQVTLLQYVDDLLLAGATKQDCLEGTKALLLELSDLGYRASAKKAQICRREVTYLGYSLRDGQRWLTEARKKTVVQIPAPTTAKQVREFLGTAGFCRLWIPGFATLAAPLYPLTKEKGEFSWAPEHQKAFDAIKKALLSAPALALPDVTKPFTLYVDERKGVARGVLTQTLGPWRRPVAYLSKKLDPVASGWPVCLKAIAAVAILVKDADKLTLGQNITVIAPHALENIVRQPPDRWMTNARMTHYQSLLLTERVTFAPPAALNPATLLPEETDEPVTHDCHQLLIEETGVRKDLTDIPLTGEVLTWFTDGSSYVVEGKRMAGAAVVDGTRTIWASSLPEGTSAQKAELMALTQALRLAEGKSINIYTDSRYAFATAHVHGAIYKQRGLLTSAGREIKNKEEILSLLEALHLPKRLAIIHCPGHQKAKDPISRGNQMADRVAKQAAQGVNLLAGKRTADGSEFEKRTADGSEFESPKKKAKVE

SEQ ID NO: 6868 - protein, 2088 aa, synthetic construct; identical to SEQ ID NO: 6867

SEQ ID NO: 6869 - protein, 2092 aa, synthetic construct
MPAAKRVKLDGGDKKYSIGLDIGTNSVGWAVITDEYKVPSKKFKVLGNTDRHSIKKNLIGALLFDSGETAEATRLKRTARRRYTRRKNRICYLQEIFSNEMAKVDDSFFHRLEESFLVEEDKKHERHPIFGNIVDEVAYHEKYPTIYHLRKKLVDSTDKADLRLIYLALAHMIKFRGHFLIEGDLNPDNSDVDKLFIQLVQTYNQLFEENPINASGVDAKAILSARLSKSRRLENLIAQLPGEKKNGLFGNLIALSLGLTPNFKSNFDLAEDAKLQLSKDTYDDDLDNLLAQIGDQYADLFLAAKNLSDAILLSDILRVNTEITKAPLSASMIKRYDEHHQDLTLLKALVRQQLPEKYKEIFFDQSKNGYAGYIDGGASQEEFYKFIKPILEKMDGTEELLVKLNREDLLRKQRTFDNGSIPHQIHLGELHAILRRQEDFYPFLKDNREKIEKILTFRIPYYVGPLARGNSRFAWMTRKSEETITPWNFEEVVDKGASAQSFIERMTNFDKNLPNEKVLPKHSLLYEYFTVYNELTKVKYVTEGMRKPAFLSGEQKKAIVDLLFKTNRKVTVKQLKEDYFKKIECFDSVEISGVEDRFNASLGTYHDLLKIIKDKDFLDNEENEDILEDIVLTLTLFEDREMIEERLKTYAHLFDDKVMKQLKRRRYTGWGRLSRKLINGIRDKQSGKTILDFLKSDGFANRNFMQLIHDDSLTFKEDIQKAQVSGQGDSLHEHIANLAGSPAIKKGILQTVKVVDELVKVMGRHKPENIVIEMARENQTTQKGQKNSRERMKRIEEGIKELGSQILKEHPVENTQLQNEKLYLYYLQNGRDMYVDQELDINRLSDYDVDHIVPQSFLKDDSIDNKVLTRSDKARGKSDNVPSEEVVKKMKNYWRQLLNAKLITQRKFDNLTKAERGGLSELDKAGFIKRQLVETRQITKHVAQILDSRMNTKYDENDKLIREVKVITLKSKLVSDFRKDFQFYKVREINNYHHAHDAYLNAVVGTALIKKYPKLESEFVYGDYKVYDVRKMIAKSEQEIGKATAKYFFYSNIMNFFKTEITLANGEIRKRPLIETNGETGEIVWDKGRDFATVRKVLSMPQVNIVKKTEVQTGGFSKESILPKRNSDKLIARKKDWDPKKYGGFDSPTVAYSVLVVAKVEKGKSKKLKSVKELLGITIMERSSFEKNPIDFLEAKGYKEVKKDLIIKLPKYSLFELENGRKRMLASAGELQKGNELALPSKYVNFLYLASHYEKLKGSPEDNEQKQLFVEQHKHYLDEIIEQISEFSKRVILADANLDKVLSAYNKHRDKPIREQAENIIHLFTLTNLGAPAAFKYFDTTIDRKRYTSTKEVLDATLIHQSITGLYETRIDLSQLGGDGGGSSGGSGGGGGVLNLEEEYRLHEKPVPSSIDPSWLQLFPTVWAERAGMGLANQVPPVVVELRSGASPVAVRQYPMSKEAREGIRPHIQRFLDLGVLVPCQSPWNTPLLPVKKPGTNDYRPVQDLREINKRVQDIHPTVPNPYNLLSSLPPSHTWYSVLDLKDAFFCLKLHPNSQPLFAFEWRDPEKGNTGQLTWTRLPQGFKNSPTLFNEALHRDLAPFRALNPQVVLLQYVDDLLVAAPTYRDCKEGTQKLLQELSKLGYRVSAKKAQLCQKEVTYLGYLLKEGKRWLTPARKATVMKIPPPTTPRQVREFLGTAGFCRLWIPGFASLAAPLYPLTKPSIPFIWTEEHQKAFDRIKEALLSAPALALPDLTKPFTLYVDERAGVARGVLTQTLGPWRRPVAYLSKKLDPVASGWPTCLKAVAAVALLLKDADKLTLGQNVTVIASHSLESIVRQPPDRWMTNARMTHYQSLLLNERVSFAPPAVLNPATLLPVESEATPVHRCSEILAEETGTRRDLKDQPLPGVPAWYTDGSSFIAEGKRRAGAAIVDGKRTVWASSLPEGTSAQKAELVALTQALRLAEGKDINIYTDSRYAFATAHIHGAIYKQRGWLTSAGKDIKNKEEILALLEAIHLPKRVAIIHCPGHQKGNDPVATGNRRADEAAKQAALSTRVLAETTKPAGKRTADGSEFEKRTADGSEFESPKKKAKVE

SEQ ID NO: 6870 - protein, 2092 aa, synthetic construct
MPAAKRVKLDGGDKKYSIGLDIGTNSVGWAVITDEYKVPSKKFKVLGNTDRHSIKKNLIGALLFDSGETAEATRLKRTARRRYTRRKNRICYLQEIFSNEMAKVDDSFFHRLEESFLVEEDKKHERHPIFGNIVDEVAYHEKYPTIYHLRKKLVDSTDKADLRLIYLALAHMIKFRGHFLIEGDLNPDNSDVDKLFIQLVQTYNQLFEENPINASGVDAKAILSARLSKSRRLENLIAQLPGEKKNGLFGNLIALSLGLTPNFKSNFDLAEDAKLQLSKDTYDDDLDNLLAQIGDQYADLFLAAKNLSDAILLSDILRVNTEITKAPLSASMIKRYDEHHQDLTLLKALVRQQLPEKYKEIFFDQSKNGYAGYIDGGASQEEFYKFIKPILEKMDGTEELLVKLNREDLLRKQRTFDNGSIPHQIHLGELHAILRRQEDFYPFLKDNREKIEKILTFRIPYYVGPLARGNSRFAWMTRKSEETITPWNFEEVVDKGASAQSFIERMTNFDKNLPNEKVLPKHSLLYEYFTVYNELTKVKYVTEGMRKPAFLSGEQKKAIVDLLFKTNRKVTVKQLKEDYFKKIECFDSVEISGVEDRFNASLGTYHDLLKIIKDKDFLDNEENEDILEDIVLTLTLFEDREMIEERLKTYAHLFDDKVMKQLKRRRYTGWGRLSRKLINGIRDKQSGKTILDFLKSDGFANRNFMQLIHDDSLTFKEDIQKAQVSGQGDSLHEHIANLAGSPAIKKGILQTVKVVDELVKVMGRHKPENIVIEMARENQTTQKGQKNSRERMKRIEEGIKELGSQILKEHPVENTQLQNEKLYLYYLQNGRDMYVDQELDINRLSDYDVDHIVPQSFLKDDSIDNKVLTRSDKARGKSDNVPSEEVVKKMKNYWRQLLNAKLITQRKFDNLTKAERGGLSELDKAGFIKRQLVETRQITKHVAQILDSRMNTKYDENDKLIREVKVITLKSKLVSDFRKDFQFYKVREINNYHHAHDAYLNAVVGTALIKKYPKLESEFVYGDYKVYDVRKMIAKSEQEIGKATAKYFFYSNIMNFFKTEITLANGEIRKRPLIETNGETGEIVWDKGRDFATVRKVLSMPQVNIVKKTEVQTGGFSKESILPKRNSDKLIARKKDWDPKKYGGFDSPTVAYSVLVVAKVEKGKSKKLKSVKELLGITIMERSSFEKNPIDFLEAKGYKEVKKDLIIKLPKYSLFELENGRKRMLASAGELQKGNELALPSKYVNFLYLASHYEKLKGSPEDNEQKQLFVEQHKHYLDEIIEQISEFSKRVILADANLDKVLSAYNKHRDKPIREQAENIIHLFTLTNLGAPAAFKYFDTTIDRKRYTSTKEVLDATLIHQSITGLYETRIDLSQLGGDGGGSSGGSGGGGGVLNLEEEYRLHEKPVPSSIDPSWLQLFPTVWAERAGMGLANQVPPVVVELRSGASPVAVRQYPMSKEAREGIRPHIQRFLDLGVLVPCQSPWNTPLLPVKKPGTNDYRPVQDLREINKRVQDIHPTVPNPYNLLSSLPPSHTWYSVLDLKDAFFCLKLHPNSQPLFAFEWRDPEKGNTGQLTWTRLPQGFKNSPTLFNEALHRDLAPFRALNPQVVLLQYVDDLLVAAPTYRDCKEGTQKLLQELSKLGYRVSAKKAQLCQKEVTYLGYLLKEGKRWLTPARKATVMKIPPPTTPRQVREFLGKAGFCRLFIPGFASLAAPLYPLTKPSIPFIWTEEHQKAFDRIKEALLSAPALALPDLTKPFTLYVDERAGVARGVLTQTLGPWRRPVAYLSKKLDPVASGWPTCLKAVAAVALLLKDADKLTLGQNVTVIASHSLESIVRQPPDRWMTNARMTHYQSLLLNERVSFAPPAVLNPATLLPVESEATPVHRCSEILAEETGTRRDLKDQPLPGVPAWYTDGSSFIAEGKRRAGAAIVDGKRTVWASSLPEGTSAQKAELVALTQALRLAEGKDINIYTDSRYAFATAHIHGAIYKQRGWLTSAGKDIKNKEEILALLEAIHLPKRVAIIHCPGHQKGNDPVATGNRRADEAAKQAALSTRVLAETTKPAGKRTADGSEFEKRTADGSEFESPKKKAKVE

SEQ ID NO: 6871 - protein, 2096 aa, synthetic construct
MPAAKRVKLDGGDKKYSIGLDIGTNSVGWAVITDEYKVPSKKFKVLGNTDRHSIKKNLIGALLFDSGETAEATRLKRTARRRYTRRKNRICYLQEIFSNEMAKVDDSFFHRLEESFLVEEDKKHERHPIFGNIVDEVAYHEKYPTIYHLRKKLVDSTDKADLRLIYLALAHMIKFRGHFLIEGDLNPDNSDVDKLFIQLVQTYNQLFEENPINASGVDAKAILSARLSKSRRLENLIAQLPGEKKNGLFGNLIALSLGLTPNFKSNFDLAEDAKLQLSKDTYDDDLDNLLAQIGDQYADLFLAAKNLSDAILLSDILRVNTEITKAPLSASMIKRYDEHHQDLTLLKALVRQQLPEKYKEIFFDQSKNGYAGYIDGGASQEEFYKFIKPILEKMDGTEELLVKLNREDLLRKQRTFDNGSIPHQIHLGELHAILRRQEDFYPFLKDNREKIEKILTFRIPYYVGPLARGNSRFAWMTRKSEETITPWNFEEVVDKGASAQSFIERMTNFDKNLPNEKVLPKHSLLYEYFTVYNELTKVKYVTEGMRKPAFLSGEQKKAIVDLLFKTNRKVTVKQLKEDYFKKIECFDSVEISGVEDRFNASLGTYHDLLKIIKDKDFLDNEENEDILEDIVLTLTLFEDREMIEERLKTYAHLFDDKVMKQLKRRRYTGWGRLSRKLINGIRDKQSGKTILDFLKSDGFANRNFMQLIHDDSLTFKEDIQKAQVSGQGDSLHEHIANLAGSPAIKKGILQTVKVVDELVKVMGRHKPENIVIEMARENQTTQKGQKNSRERMKRIEEGIKELGSQILKEHPVENTQLQNEKLYLYYLQNGRDMYVDQELDINRLSDYDVDHIVPQSFLKDDSIDNKVLTRSDKARGKSDNVPSEEVVKKMKNYWRQLLNAKLITQRKFDNLTKAERGGLSELDKAGFIKRQLVETRQITKHVAQILDSRMNTKYDENDKLIREVKVITLKSKLVSDFRKDFQFYKVREINNYHHAHDAYLNAVVGTALIKKYPKLESEFVYGDYKVYDVRKMIAKSEQEIGKATAKYFFYSNIMNFFKTEITLANGEIRKRPLIETNGETGEIVWDKGRDFATVRKVLSMPQVNIVKKTEVQTGGFSKESILPKRNSDKLIARKKDWDPKKYGGFDSPTVAYSVLVVAKVEKGKSKKLKSVKELLGITIMERSSFEKNPIDFLEAKGYKEVKKDLIIKLPKYSLFELENGRKRMLASAGELQKGNELALPSKYVNFLYLASHYEKLKGSPEDNEQKQLFVEQHKHYLDEIIEQISEFSKRVILADANLDKVLSAYNKHRDKPIREQAENIIHLFTLTNLGAPAAFKYFDTTIDRKRYTSTKEVLDATLIHQSITGLYETRIDLSQLGGDGGGSSGGGGGSGGTAPLEEEYRLFLEAPIQNVTLLEQWKREIPKVWAEINPPGLASTQAPIHVQLLSTALPVRVRQYPITLEAKRSLRETIRKFRAAGILRPVHSPWNTPLLPVRKSGTSEYRMVQDLREVNKRVETIHPTVPNPYTLLSLLPPDRIWYSVLDLKDAFFCIPLAPESQLIFAFEWADAEEGESGQLTWTRLPQGFKNSPTLFNEALNRDLQGFRLDHPSVSLLQYVDDLLIAADTQAACLSATRDLLMTLAELGYRVSGKKAQLCQEEVTYLGFKIHKGSRSLSNSRTQAILQIPVPKTKRQVREFLGTIGYCRLWIPGFAELAQPLYAATRPGNDPLVWGEKEEEAFQSLKLALTQPPALALPSLDKPFQLFVEETSGAAKGVLTQALGPWKRPVAYLSKRLDPVAAGWPRCLRAIAAAALLTREASKLTFGQDIEITSSHNLESLLRSPPDKWLTNARITQYQVLLLDPPRVRFKQTAALNPATLLPETDDTLPIHHCLDTLDSLTSTRPDLTDQPLAQAEATLFTDGSSYIRDGKRYAGAAVVTLDSVIWAEPLPIGTSAQKAELIALTKALEWSKDKSVNIYTDSRYAFATLHVHGMIYRERGWLTAGGKAIKNAPEILALLTAVWLPKRVAVMHCKGHQKDDAPTSTGNRRADEVAREVAIRPLSTQATISAGKRTADGSEFEKRTADGSEFESPKKKAKVE

SEQ ID NO: 6872 - protein, 2100 aa, synthetic construct
MPAAKRVKLDGGDKKYSIGLDIGTNSVGWAVITDEYKVPSKKFKVLGNTDRHSIKKNLIGALLFDSGETAEATRLKRTARRRYTRRKNRICYLQEIFSNEMAKVDDSFFHRLEESFLVEEDKKHERHPIFGNIVDEVAYHEKYPTIYHLRKKLVDSTDKADLRLIYLALAHMIKFRGHFLIEGDLNPDNSDVDKLFIQLVQTYNQLFEENPINASGVDAKAILSARLSKSRRLENLIAQLPGEKKNGLFGNLIALSLGLTPNFKSNFDLAEDAKLQLSKDTYDDDLDNLLAQIGDQYADLFLAAKNLSDAILLSDILRVNTEITKAPLSASMIKRYDEHHQDLTLLKALVRQQLPEKYKEIFFDQSKNGYAGYIDGGASQEEFYKFIKPILEKMDGTEELLVKLNREDLLRKQRTFDNGSIPHQIHLGELHAILRRQEDFYPFLKDNREKIEKILTFRIPYYVGPLARGNSRFAWMTRKSEETITPWNFEEVVDKGASAQSFIERMTNFDKNLPNEKVLPKHSLLYEYFTVYNELTKVKYVTEGMRKPAFLSGEQKKAIVDLLFKTNRKVTVKQLKEDYFKKIECFDSVEISGVEDRFNASLGTYHDLLKIIKDKDFLDNEENEDILEDIVLTLTLFEDREMIEERLKTYAHLFDDKVMKQLKRRRYTGWGRLSRKLINGIRDKQSGKTILDFLKSDGFANRNFMQLIHDDSLTFKEDIQKAQVSGQGDSLHEHIANLAGSPAIKKGILQTVKVVDELVKVMGRHKPENIVIEMARENQTTQKGQKNSRERMKRIEEGIKELGSQILKEHPVENTQLQNEKLYLYYLQNGRDMYVDQELDINRLSDYDVDHIVPQSFLKDDSIDNKVLTRSDKARGKSDNVPSEEVVKKMKNYWRQLLNAKLITQRKFDNLTKAERGGLSELDKAGFIKRQLVETRQITKHVAQILDSRMNTKYDENDKLIREVKVITLKSKLVSDFRKDFQFYKVREINNYHHAHDAYLNAVVGTALIKKYPKLESEFVYGDYKVYDVRKMIAKSEQEIGKATAKYFFYSNIMNFFKTEITLANGEIRKRPLIETNGETGEIVWDKGRDFATVRKVLSMPQVNIVKKTEVQTGGFSKESILPKRNSDKLIARKKDWDPKKYGGFDSPTVAYSVLVVAKVEKGKSKKLKSVKELLGITIMERSSFEKNPIDFLEAKGYKEVKKDLIIKLPKYSLFELENGRKRMLASAGELQKGNELALPSKYVNFLYLASHYEKLKGSPEDNEQKQLFVEQHKHYLDEIIEQISEFSKRVILADANLDKVLSAYNKHRDKPIREQAENIIHLFTLTNLGAPAAFKYFDTTIDRKRYTSTKEVLDATLIHQSITGLYETRIDLSQLGGDGGGSSGGGGGSGGTVSLQDEHRLFDIPVTTSLPDVWLQDFPQAWAETGGLGRAKCQAPIIIDLKPTAVPVSIKQYPMSLEAHMGIRQHIIKFLELGVLRPCRSPWNTPLLPVKKPGTQDYRPVQDLREINKRTVDIHPTVPNPYNLLSTLKPDYSWYTVLDLKDAFFCLPLAPQSQELFAFEWKDPERGISGQLTWTRLPQGFKNSPTLFNEALHRDLTDFRTQHPEVTLLQYVDDLLLAAPTKKACTQGTRHLLQELGEKGYRASAKKAQICQTKVTYLGYILSEGKRWLTPGRIETVARIPPPRNPREVREFLGTAGFCRLWIPGFAELAAPLYALTKPSTPFTWQTEHQLAFEALKKALLSAPALGLPDTSKPFTLFLDERQGIAKGVLTQKLGPWKRPVAYLSKKLDPVAAGWPPCLRIMAATAMLVKDSAKLTLGQPLTVITPHTLEAIVRQPPDRWITNARLTHYQALLLDTDRVQFGPPVTLNPATLLPVPENQPSPHDCRQVLAETHGTREDLKDQELPDADHTWYTDGSSYLDSGTRRAGAAVVDGHNTIWAQSLPPGTSAQKAELIALTKALELSKGKKANIYTDSRYAFATAHTHGSIYERRGWLTSEGKEIKNKAEIIALLKALFLPQEVAIIHCPGHQKGQDPVAVGNRQADRVARQAAMAEVLTLATEPDNTSHITAGKRTADGSEFEKRTADGSEFESPKKKAKVE

SEQ ID NO: 6873 - protein, 2216 aa, synthetic construct
MPAAKRVKLDGGDKKYSIGLDIGTNSVGWAVITDEYKVPSKKFKVLGNTDRHSIKKNLIGALLFDSGETAEATRLKRTARRRYTRRKNRICYLQEIFSNEMAKVDDSFFHRLEESFLVEEDKKHERHPIFGNIVDEVAYHEKYPTIYHLRKKLVDSTDKADLRLIYLALAHMIKFRGHFLIEGDLNPDNSDVDKLFIQLVQTYNQLFEENPINASGVDAKAILSARLSKSRRLENLIAQLPGEKKNGLFGNLIALSLGLTPNFKSNFDLAEDAKLQLSKDTYDDDLDNLLAQIGDQYADLFLAAKNLSDAILLSDILRVNTEITKAPLSASMIKRYDEHHQDLTLLKALVRQQLPEKYKEIFFDQSKNGYAGYIDGGASQEEFYKFIKPILEKMDGTEELLVKLNREDLLRKQRTFDNGSIPHQIHLGELHAILRRQEDFYPFLKDNREKIEKILTFRIPYYVGPLARGNSRFAWMTRKSEETITPWNFEEVVDKGASAQSFIERMTNFDKNLPNEKVLPKHSLLYEYFTVYNELTKVKYVTEGMRKPAFLSGEQKKAIVDLLFKTNRKVTVKQLKEDYFKKIECFDSVEISGVEDRFNASLGTYHDLLKIIKDKDFLDNEENEDILEDIVLTLTLFEDREMIEERLKTYAHLFDDKVMKQLKRRRYTGWGRLSRKLINGIRDKQSGKTILDFLKSDGFANRNFMQLIHDDSLTFKEDIQKAQVSGQGDSLHEHIANLAGSPAIKKGILQTVKVVDELVKVMGRHKPENIVIEMARENQTTQKGQKNSRERMKRIEEGIKELGSQILKEHPVENTQLQNEKLYLYYLQNGRDMYVDQELDINRLSDYDVDHIVPQSFLKDDSIDNKVLTRSDKARGKSDNVPSEEVVKKMKNYWRQLLNAKLITQRKFDNLTKAERGGLSELDKAGFIKRQLVETRQITKHVAQILDSRMNTKYDENDKLIREVKVITLKSKLVSDFRKDFQFYKVREINNYHHAHDAYLNAVVGTALIKKYPKLESEFVYGDYKVYDVRKMIAKSEQEIGKATAKYFFYSNIMNFFKTEITLANGEIRKRPLIETNGETGEIVWDKGRDFATVRKVLSMPQVNIVKKTEVQTGGFSKESILPKRNSDKLIARKKDWDPKKYGGFDSPTVAYSVLVVAKVEKGKSKKLKSVKELLGITIMERSSFEKNPIDFLEAKGYKEVKKDLIIKLPKYSLFELENGRKRMLASAGELQKGNELALPSKYVNFLYLASHYEKLKGSPEDNEQKQLFVEQHKHYLDEIIEQISEFSKRVILADANLDKVLSAYNKHRDKPIREQAENIIHLFTLTNLGAPAAFKYFDTTIDRKRYTSTKEVLDATLIHQSITGLYETRIDLSQLGGDGGGSSGGGGGSGGTLGDQGSRGSDPLPEPRVTLTVEGIPTEFLVNTGAEHSVLTKPMGKMGSKRTVVAGATGSKVYPWTTKRLLKIGQKQVTHSFLVIPECPAPLLGRDLLTKLKAQIQFSTEGPQVTWEDRPAMCLVLNLEEEYRLHEKPVPPSIDPSWLQLFPMVWAEKAGMGLANQVPPVVVELKSDASPVAVRQYPMSKEAREGIRPHIQRFLDLGILVPCQSPWNTPLLPVKKPGTNDYRPVQDLREVNKRVQDIHPTVPNPYNLLSSLPPSHTWYSVLDLKDAFFCLKLHPNSQPLFAFEWRDPEKGNTGQLTWTRLPQGFKNSPTLFDEALHRDLASFRALNPQVVMLQYVDDLLVAAPTYRDCKEGTRRLLQELSKLGYRVSAKKAQLCREEVTYLGYLLKGGKRWLTPARKATVMKIPTPTTPRQVREFLGTAGFCRLWIPGFASLAAPLYPLTREKVPFTWTEAHQEAFGRIKEALLSAPALALPDLTKPFALYVDEKEGVARGVLTQTLGPWRRPVAYLSKKLDPVASGWPTCLKAIAAVALLLKDADKLTLGQNVLVIAPHNLESIVRQPPDRWMTNARMTHYQSLLLNERVSFAPPAILNPATLLPVESDDTPIHICSEILAEETGTRPDLRDQPLPGVPAWYTDGSSFIMDGRRQAGAAIVDNKRTVWASNLPEGTSAQKAELIALTQALRLAEGKSINIYTDSRYAFATAHVHGAIYKQRGLLTSAGKDIKNKEEILALLEAIHLPKRVAIIHCPGHQRGTDPVATGNRKADEAAKQAAQSTRILTETTKNAGKRTADGSEFEKRTADGSEFESPKKKAKVE

SEQ ID NO: 6874 - protein, 2125 aa, synthetic construct
MPAAKRVKLDGGDKKYSIGLDIGTNSVGWAVITDEYKVPSKKFKVLGNTDRHSIKKNLIGALLFDSGETAEATRLKRTARRRYTRRKNRICYLQEIFSNEMAKVDDSFFHRLEESFLVEEDKKHERHPIFGNIVDEVAYHEKYPTIYHLRKKLVDSTDKADLRLIYLALAHMIKFRGHFLIEGDLNPDNSDVDKLFIQLVQTYNQLFEENPINASGVDAKAILSARLSKSRRLENLIAQLPGEKKNGLFGNLIALSLGLTPNFKSNFDLAEDAKLQLSKDTYDDDLDNLLAQIGDQYADLFLAAKNLSDAILLSDILRVNTEITKAPLSASMIKRYDEHHQDLTLLKALVRQQLPEKYKEIFFDQSKNGYAGYIDGGASQEEFYKFIKPILEKMDGTEELLVKLNREDLLRKQRTFDNGSIPHQIHLGELHAILRRQEDFYPFLKDNREKIEKILTFRIPYYVGPLARGNSRFAWMTRKSEETITPWNFEEVVDKGASAQSFIERMTNFDKNLPNEKVLPKHSLLYEYFTVYNELTKVKYVTEGMRKPAFLSGEQKKAIVDLLFKTNRKVTVKQLKEDYFKKIECFDSVEISGVEDRFNASLGTYHDLLKIIKDKDFLDNEENEDILEDIVLTLTLFEDREMIEERLKTYAHLFDDKVMKQLKRRRYTGWGRLSRKLINGIRDKQSGKTILDFLKSDGFANRNFMQLIHDDSLTFKEDIQKAQVSGQGDSLHEHIANLAGSPAIKKGILQTVKVVDELVKVMGRHKPENIVIEMARENQTTQKGQKNSRERMKRIEEGIKELGSQILKEHPVENTQLQNEKLYLYYLQNGRDMYVDQELDINRLSDYDVDHIVPQSFLKDDSIDNKVLTRSDKARGKSDNVPSEEVVKKMKNYWRQLLNAKLITQRKFDNLTKAERGGLSELDKAGFIKRQLVETRQITKHVAQILDSRMNTKYDENDKLIREVKVITLKSKLVSDFRKDFQFYKVREINNYHHAHDAYLNAVVGTALIKKYPKLESEFVYGDYKVYDVRKMIAKSEQEIGKATAKYFFYSNIMNFFKTEITLANGEIRKRPLIETNGETGEIVWDKGRDFATVRKVLSMPQVNIVKKTEVQTGGFSKESILPKRNSDKLIARKKDWDPKKYGGFDSPTVAYSVLVVAKVEKGKSKKLKSVKELLGITIMERSSFEKNPIDFLEAKGYKEVKKDLIIKLPKYSLFELENGRKRMLASAGELQKGNELALPSKYVNFLYLASHYEKLKGSPEDNEQKQLFVEQHKHYLDEIIEQISEFSKRVILADANLDKVLSAYNKHRDKPIREQAENIIHLFTLTNLGAPAAFKYFDTTIDRKRYTSTKEVLDATLIHQSITGLYETRIDLSQLGGDGGGSSGGGGGSGGLLGRDLLTKLKAQIQFSTEGPQVTWEDRPAMCLVLNLEEEYRLHEKPVPPSIDPSWLQLFPMVWAEKAGMGLANQVPPVVVELKSDASPVAVRQYPMSKEAREGIRPHIQRFLDLGILVPCQSPWNTPLLPVKKPGTNDYRPVQDLREVNKRVQDIHPTVPNPYNLLSSLPPSHTWYSVLDLKDAFFCLKLHPNSQPLFAFEWRDPEKGNTGQLTWTRLPQGFKNSPTLFNEALHRDLASFRALNPQVVMLQYVDDLLVAAPTYRDCKEGTRRLLQELSKLGYRVSAKKAQLCREEVTYLGYLLKGGKRWLTPARKATVMKIPTPTTPRQVREFLGTAGFCRLWIPGFASLAAPLYPLTRPKVPFTWTEAHQEAFGRIKEALLSAPALALPDLTKPFALYVDEKEGVARGVLTQTLGPWRRPVAYLSKKLDPVASGWPTCLKAIAAVALLLKDADKLTLGQNVLVIAPHNLESIVRQPPDRWMTNARMTHYQSLLLNERVSFAPPAILNPATLLPVESDDTPIHICSEILAEETGTRPDLRDQPLPGVPAWYTDGSSFIMDGRRQAGAAIVDNKRTVWASNLPEGTSAQKAELIALTQALRLAEGKSINIYTDSRYAFATAHVHGAIYKQRGWLTSAGKDIKNKEEILALLEAIHLPKRVAIIHCPGHQRGTDPVATGNRKADEAAKQAAQSTRILTETTKNAGKRTADGSEFEKRTADGSEFESPKKKAKVE

SEQ ID NO: 6875 - protein, 2094 aa, synthetic construct; identical to SEQ ID NO: 4517

SEQ ID NO: 6876 - protein, 2094 aa, synthetic construct; identical to SEQ ID NO: 4517

SEQ ID NO: 6877 - protein, 2094 aa, synthetic construct
MPAAKRVKLDGGDKKYSIGLDIGTNSVGWAVITDEYKVPSKKFKVLGNTDRHSIKKNLIGALLFDSGETAEATRLKRTARRRYTRRKNRICYLQEIFSNEMAKVDDSFFHRLEESFLVEEDKKHERHPIFGNIVDEVAYHEKYPTIYHLRKKLVDSTDKADLRLIYLALAHMIKFRGHFLIEGDLNPDNSDVDKLFIQLVQTYNQLFEENPINASGVDAKAILSARLSKSRRLENLIAQLPGEKKNGLFGNLIALSLGLTPNFKSNFDLAEDAKLQLSKDTYDDDLDNLLAQIGDQYADLFLAAKNLSDAILLSDILRVNTEITKAPLSASMIKRYDEHHQDLTLLKALVRQQLPEKYKEIFFDQSKNGYAGYIDGGASQEEFYKFIKPILEKMDGTEELLVKLNREDLLRKQRTFDNGSIPHQIHLGELHAILRRQEDFYPFLKDNREKIEKILTFRIPYYVGPLARGNSRFAWMTRKSEETITPWNFEEVVDKGASAQSFIERMTNFDKNLPNEKVLPKHSLLYEYFTVYNELTKVKYVTEGMRKPAFLSGEQKKAIVDLLFKTNRKVTVKQLKEDYFKKIECFDSVEISGVEDRFNASLGTYHDLLKIIKDKDFLDNEENEDILEDIVLTLTLFEDREMIEERLKTYAHLFDDKVMKQLKRRRYTGWGRLSRKLINGIRDKQSGKTILDFLKSDGFANRNFMQLIHDDSLTFKEDIQKAQVSGQGDSLHEHIANLAGSPAIKKGILQTVKVVDELVKVMGRHKPENIVIEMARENQTTQKGQKNSRERMKRIEEGIKELGSQILKEHPVENTQLQNEKLYLYYLQNGRDMYVDQELDINRLSDYDVDHIVPQSFLKDDSIDNKVLTRSDKARGKSDNVPSEEVVKKMKNYWRQLLNAKLITQRKFDNLTKAERGGLSELDKAGFIKRQLVETRQITKHVAQILDSRMNTKYDENDKLIREVKVITLKSKLVSDFRKDFQFYKVREINNYHHAHDAYLNAVVGTALIKKYPKLESEFVYGDYKVYDVRKMIAKSEQEIGKATAKYFFYSNIMNFFKTEITLANGEIRKRPLIETNGETGEIVWDKGRDFATVRKVLSMPQVNIVKKTEVQTGGFSKESILPKRNSDKLIARKKDWDPKKYGGFDSPTVAYSVLVVAKVEKGKSKKLKSVKELLGITIMERSSFEKNPIDFLEAKGYKEVKKDLIIKLPKYSLFELENGRKRMLASAGELQKGNELALPSKYVNFLYLASHYEKLKGSPEDNEQKQLFVEQHKHYLDEIIEQISEFSKRVILADANLDKVLSAYNKHRDKPIREQAENIIHLFTLTNLGAPAAFKYFDTTIDRKRYTSTKEVLDATLIHQSITGLYETRIDLSQLGGDGGGSSGGGGGSGGTLGIEDEYRLHETSTEPDVSLGSTWLSDFPQAWAETGGMGLAVRQAPLIIPLKATSTPVSIQQYPMSHEARLGIKPHIQRLLDQGILVPCQSPWNTPLLPVKKPGTNDYRPVQDLREVNKRVEDIHPTVPNPYNLLSGLPPSHQWYTVLDLKDAFFCLRLHPTSQPLFAFEWRDPGMGISGQLTWTRLPQGFKNSPTLFNEALHRDLADFRIQHPDLILLQYVDDILLAATSELDCQQGTRALLQTLGDLGYRASAKKAQICQKQVKYLGYLLREGQRWLTEARKETVMGQPVPKTPRQLREFLGTAGFCRLWIPGFAEMAAPLYPLTKPGTLFSWGPDQQKAYQEIKQALLTAPALGLPDLTKPFELFVDEKQGYAKGVLTQKLGPWRRPVAYLSKKLDPVAAGWPPCLRMVAAIAVLTKDAGKLTMGQPLVILAPHAVEALVKQPPDRWLSNARMTHYQAMLLDTDRVQFGPVVALNPATLLPLPEEGAPHDCLEILAETHGTRPDLTDQPIPDADHTWYTDGSSFLQEGQRKAGAAVTTETEVIWAGALPAGTSAQRAELIALTQALKMAEGKRLNVYTDSRYAFATAHIHGEIYRRRGWLTSEGREIKNKSEILALLKALFLPKRLSIIHCLGHQKGDSAEARGNRLADQAAREAAIKTPPDTSTLLAGKRTADGSEFEKRTADGSEFESPKKKAKVE

SEQ ID NO: 6878 - protein, 2094 aa, synthetic construct
MPAAKRVKLDGGDKKYSIGLDIGTNSVGWAVITDEYKVPSKKFKVLGNTDRHSIKKNLIGALLFDSGETAEATRLKRTARRRYTRRKNRICYLQEIFSNEMAKVDDSFFHRLEESFLVEEDKKHERHPIFGNIVDEVAYHEKYPTIYHLRKKLVDSTDKADLRLIYLALAHMIKFRGHFLIEGDLNPDNSDVDKLFIQLVQTYNQLFEENPINASGVDAKAILSARLSKSRRLENLIAQLPGEKKNGLFGNLIALSLGLTPNFKSNFDLAEDAKLQLSKDTYDDDLDNLLAQIGDQYADLFLAAKNLSDAILLSDILRVNTEITKAPLSASMIKRYDEHHQDLTLLKALVRQQLPEKYKEIFFDQSKNGYAGYIDGGASQEEFYKFIKPILEKMDGTEELLVKLNREDLLRKQRTFDNGSIPHQIHLGELHAILRRQEDFYPFLKDNREKIEKILTFRIPYYVGPLARGNSRFAWMTRKSEETITPWNFEEVVDKGASAQSFIERMTNFDKNLPNEKVLPKHSLLYEYFTVYNELTKVKYVTEGMRKPAFLSGEQKKAIVDLLFKTNRKVTVKQLKEDYFKKIECFDSVEISGVEDRFNASLGTYHDLLKIIKDKDFLDNEENEDILEDIVLTLTLFEDREMIEERLKTYAHLFDDKVMKQLKRRRYTGWGRLSRKLINGIRDKQSGKTILDFLKSDGFANRNFMQLIHDDSLTFKEDIQKAQVSGQGDSLHEHIANLAGSPAIKKGILQTVKVVDELVKVMGRHKPENIVIEMARENQTTQKGQKNSRERMKRIEEGIKELGSQILKEHPVENTQLQNEKLYLYYLQNGRDMYVDQELDINRLSDYDVDHIVPQSFLKDDSIDNKVLTRSDKARGKSDNVPSEEVVKKMKNYWRQLLNAKLITQRKFDNLTKAERGGLSELDKAGFIKRQLVETRQITKHVAQILDSRMNTKYDENDKLIREVKVITLKSKLVSDFRKDFQFYKVREINNYHHAHDAYLNAVVGTALIKKYPKLESEFVYGDYKVYDVRKMIAKSEQEIGKATAKYFFYSNIMNFFKTEITLANGEIRKRPLIETNGETGEIVWDKGRDFATVRKVLSMPQVNIVKKTEVQTGGFSKESILPKRNSDKLIARKKDWDPKKYGGFDSPTVAYSVLVVAKVEKGKSKKLKSVKELLGITIMERSSFEKNPIDFLEAKGYKEVKKDLIIKLPKYSLFELENGRKRMLASAGELQKGNELALPSKYVNFLYLASHYEKLKGSPEDNEQKQLFVEQHKHYLDEIIEQISEFSKRVILADANLDKVLSAYNKHRDKPIREQAENIIHLFTLTNLGAPAAFKYFDTTIDRKRYTSTKEVLDATLIHQSITGLYETRIDLSQLGGDGGGSSGGGGGSGGTLNIEDEYRLHETSKEPDVSLGSTWLSDFPQAWAETGGMGLAVRQAPLIIPLKATSTPVSIKQYPMSQEARLGIKPHIQRLLDQGILVPCQSPWNTPLLPVKKPGTNDYRPVQDLREVNKRVEDIHPTVPNPYNLLSGLPPSHQWYTVLDLKDAFFCLRLHPTSQPLFAFEWRDPEMGISGQLTWTRLPQGFKNSPTLFNEALHRDLAGFRIQHPDLILLQYVDDLLLAATSELDCQQGTRALLQTLGDLGYRASAKKAQICQKQVKYLGYLLKEGQRWLTEARKETVMGQPIPKTPRQLREFLGTAGFCRLWIPGFAEMAAPLYPLTKPGTLFNWGPDQQKAFQEIKQALLTAPALGLPDLTKPFELFVDEKQGYAKGVLTQKLGPWRRPVAYLSKKLDPVAAGWPPCLRMVAAIAVLTKDAGKLTMGQPLVILAPHAVEALVKQPPDRWLSNARMTHYQALLLDTDRVQFGPVVALNPATLLPLPEEGLQHDCLDILAEAHGTRSDLMDQPLPDADHTWYTDGSSFLQEGQRKAGAAVTTETEVIWARALPAGTSAQRAELIALTQALKMAEGKKLNVYTDSRYAFATAHIHGEIYRRRGWLTSEGKEIKNKDEILALLKALFLPKRLSIIHCPGHQKGNSAEARGNRMADQAAREVATRETPETSTLLAGKRTADGSEFEKRTADGSEFESPKKKAKVE

SEQ ID NO: 6879 - protein, 2094 aa, synthetic construct
MPAAKRVKLDGGDKKYSIGLDIGTNSVGWAVITDEYKVPSKKFKVLGNTDRHSIKKNLIGALLFDSGETAEATRLKRTARRRYTRRKNRICYLQEIFSNEMAKVDDSFFHRLEESFLVEEDKKHERHPIFGNIVDEVAYHEKYPTIYHLRKKLVDSTDKADLRLIYLALAHMIKFRGHFLIEGDLNPDNSDVDKLFIQLVQTYNQLFEENPINASGVDAKAILSARLSKSRRLENLIAQLPGEKKNGLFGNLIALSLGLTPNFKSNFDLAEDAKLQLSKDTYDDDLDNLLAQIGDQYADLFLAAKNLSDAILLSDILRVNTEITKAPLSASMIKRYDEHHQDLTLLKALVRQQLPEKYKEIFFDQSKNGYAGYIDGGASQEEFYKFIKPILEKMDGTEELLVKLNREDLLRKQRTFDNGSIPHQIHLGELHAILRRQEDFYPFLKDNREKIEKILTFRIPYYVGPLARGNSRFAWMTRKSEETITPWNFEEVVDKGASAQSFIERMTNFDKNLPNEKVLPKHSLLYEYFTVYNELTKVKYVTEGMRKPAFLSGEQKKAIVDLLFKTNRKVTVKQLKEDYFKKIECFDSVEISGVEDRFNASLGTYHDLLKIIKDKDFLDNEENEDILEDIVLTLTLFEDREMIEERLKTYAHLFDDKVMKQLKRRRYTGWGRLSRKLINGIRDKQSGKTILDFLKSDGFANRNFMQLIHDDSLTFKEDIQKAQVSGQGDSLHEHIANLAGSPAIKKGILQTVKVVDELVKVMGRHKPENIVIEMARENQTTQKGQKNSRERMKRIEEGIKELGSQILKEHPVENTQLQNEKLYLYYLQNGRDMYVDQELDINRLSDYDVDHIVPQSFLKDDSIDNKVLTRSDKARGKSDNVPSEEVVKKMKNYWRQLLNAKLITQRKFDNLTKAERGGLSELDKAGFIKRQLVETRQITKHVAQILDSRMNTKYDENDKLIREVKVITLKSKLVSDFRKDFQFYKVREINNYHHAHDAYLNAVVGTALIKKYPKLESEFVYGDYKVYDVRKMIAKSEQEIGKATAKYFFYSNIMNFFKTEITLANGEIRKRPLIETNGETGEIVWDKGRDFATVRKVLSMPQVNIVKKTEVQTGGFSKESILPKRNSDKLIARKKDWDPKKYGGFDSPTVAYSVLVVAKVEKGKSKKLKSVKELLGITIMERSSFEKNPIDFLEAKGYKEVKKDLIIKLPKYSLFELENGRKRMLASAGELQKGNELALPSKYVNFLYLASHYEKLKGSPEDNEQKQLFVEQHKHYLDEIIEQISEFSKRVILADANLDKVLSAYNKHRDKPIREQAENIIHLFTLTNLGAPAAFKYFDTTIDRKRYTSTKEVLDATLIHQSITGLYETRIDLSQLGGDGGGSSGGGGGSGGTLNIEDEYRLHETSKEPDVSLGSTWLSDFPQAWAETGGMGLAVRQAPLIIPLKATSTPVSIKQYPMSQEARLGIKPHIQRLLDQGILVPCQSPWNTPLLPVKKPGTNDYRPVQDLREVNKRVEDIHPTVPNPYNLLSGLPPSHQWYTVLDLKDAFFCLRLHPTSQPLFAFEWRDPEMGISGQLTWTRLPQGFKNSPTLFNEALHRDLAGFRIQHPDLILLQYVDDLLLAATSELDCQQGTRALLQTLGDLGYRASAKKAQICQKQVKYLGYLLKEGQRWLTEARKETVMGQPIPKTPRQLREFLGKAGFCRLFIPGFAEMAAPLYPLTKPGTLFNWGPDQQKAFQEIKQALLTAPALGLPDLTKPFELFVDEKQGYAKGVLTQKLGPWRRPVAYLSKKLDPVAAGWPPCLRMVAAIAVLTKDAGKLTMGQPLVILAPHAVEALVKQPPDRWLSNARMTHYQALLLDTDRVQFGPVVALNPATLLPLPEEGLQHDCLDILAEAHGTRSDLMDQPLPDADHTWYTDGSSFLQEGQRKAGAAVTTETEVIWARALPAGTSAQRAELIALTQALKMAEGKKLNVYTDSRYAFATAHIHGEIYRRRGWLTSEGKEIKNKDEILALLKALFLPKRLSIIHCPGHQKGNSAEARGNRMADQAAREVATRETPETSTLLAGKRTADGSEFEKRTADGSEFESPKKKAKVE

SEQ ID NO: 6880 - protein, 2114 aa, synthetic construct
MPAAKRVKLDGGDKKYSIGLDIGTNSVGWAVITDEYKVPSKKFKVLGNTDRHSIKKNLIGALLFDSGETAEATRLKRTARRRYTRRKNRICYLQEIFSNEMAKVDDSFFHRLEESFLVEEDKKHERHPIFGNIVDEVAYHEKYPTIYHLRKKLVDSTDKADLRLIYLALAHMIKFRGHFLIEGDLNPDNSDVDKLFIQLVQTYNQLFEENPINASGVDAKAILSARLSKSRRLENLIAQLPGEKKNGLFGNLIALSLGLTPNFKSNFDLAEDAKLQLSKDTYDDDLDNLLAQIGDQYADLFLAAKNLSDAILLSDILRVNTEITKAPLSASMIKRYDEHHQDLTLLKALVRQQLPEKYKEIFFDQSKNGYAGYIDGGASQEEFYKFIKPILEKMDGTEELLVKLNREDLLRKQRTFDNGSIPHQIHLGELHAILRRQEDFYPFLKDNREKIEKILTFRIPYYVGPLARGNSRFAWMTRKSEETITPWNFEEVVDKGASAQSFIERMTNFDKNLPNEKVLPKHSLLYEYFTVYNELTKVKYVTEGMRKPAFLSGEQKKAIVDLLFKTNRKVTVKQLKEDYFKKIECFDSVEISGVEDRFNASLGTYHDLLKIIKDKDFLDNEENEDILEDIVLTLTLFEDREMIEERLKTYAHLFDDKVMKQLKRRRYTGWGRLSRKLINGIRDKQSGKTILDFLKSDGFANRNFMQLIHDDSLTFKEDIQKAQVSGQGDSLHEHIANLAGSPAIKKGILQTVKVVDELVKVMGRHKPENIVIEMARENQTTQKGQKNSRERMKRIEEGIKELGSQILKEHPVENTQLQNEKLYLYYLQNGRDMYVDQELDINRLSDYDVDHIVPQSFLKDDSIDNKVLTRSDKARGKSDNVPSEEVVKKMKNYWRQLLNAKLITQRKFDNLTKAERGGLSELDKAGFIKRQLVETRQITKHVAQILDSRMNTKYDENDKLIREVKVITLKSKLVSDFRKDFQFYKVREINNYHHAHDAYLNAVVGTALIKKYPKLESEFVYGDYKVYDVRKMIAKSEQEIGKATAKYFFYSNIMNFFKTEITLANGEIRKRPLIETNGETGEIVWDKGRDFATVRKVLSMPQVNIVKKTEVQTGGFSKESILPKRNSDKLIARKKDWDPKKYGGFDSPTVAYSVLVVAKVEKGKSKKLKSVKELLGITIMERSSFEKNPIDFLEAKGYKEVKKDLIIKLPKYSLFELENGRKRMLASAGELQKGNELALPSKYVNFLYLASHYEKLKGSPEDNEQKQLFVEQHKHYLDEIIEQISEFSKRVILADANLDKVLSAYNKHRDKPIREQAENIIHLFTLTNLGAPAAFKYFDTTIDRKRYTSTKEVLDATLIHQSITGLYETRIDLSQLGGDGGGSSGGGGGSGGVQEISDSRPMLHIYLNGRRFLGLLDTGADKTCIAGRDWPANWPIHQTESSLQGLGMACGVARSSQPLRWQHEDKSGIIHPFVIPTLPFTLWGRDIMKDIKVRLMTDSPDDSQDLMIGAIESNLFADQISWKSDQPVWLNQWPLKQEKLQALQQLVTEQLQLGHLEESNSPWNTPVFVIKKKSGKWRLLQDLRAVNATMHDMGALQPGLPSPVAVPKGWEIIIIDLQDCFFNIKLHPEDCKRFAFSVPSPNFKRPYQRFQWKVLPQGMKNSPTLCQKFVDKAILTVRDKYQDSYIVHYMDDILLAHPSRSIVDEILTSMIQALNKHGLVVSTEKIQKYDNLKYLGTHIQGDSVSYQKLQIRTDKLRTLNDFQKLLGNINWIRPFLKLTTGELKPLFEILNGDSNPISTRKLTPEACKALQLMNERLSTARVKRLDLSQPWSLCILKTEYTPTACLWQDGVVEWIHLPHISPKVITPYDIFCTQLIIKGRHRSKELFSKDPDYIVVPYTKVQFDLLLQEKEDWPISLLGFLGEVHFHLPKDPLLTFTLQTAIIFPHMTSTTPLEKGIVIFTDGSANGRSVTYIQGREPIIKENTQNTAQQAEIVAVITAFEEVSQPFNLYTDSKYVTGLFPEIETATLSPRTKIYTELKHLQRLIHKRQEKFYIGHIRGHTGLPGPLAQGNAYADSLTRILTAAGKRTADGSEFEKRTADGSEFESPKKKAKVE

SEQ ID NO: 6881 - protein, 2086 aa, synthetic construct
MPAAKRVKLDGGDKKYSIGLDIGTNSVGWAVITDEYKVPSKKFKVLGNTDRHSIKKNLIGALLFDSGETAEATRLKRTARRRYTRRKNRICYLQEIFSNEMAKVDDSFFHRLEESFLVEEDKKHERHPIFGNIVDEVAYHEKYPTIYHLRKKLVDSTDKADLRLIYLALAHMIKFRGHFLIEGDLNPDNSDVDKLFIQLVQTYNQLFEENPINASGVDAKAILSARLSKSRRLENLIAQLPGEKKNGLFGNLIALSLGLTPNFKSNFDLAEDAKLQLSKDTYDDDLDNLLAQIGDQYADLFLAAKNLSDAILLSDILRVNTEITKAPLSASMIKRYDEHHQDLTLLKALVRQQLPEKYKEIFFDQSKNGYAGYIDGGASQEEFYKFIKPILEKMDGTEELLVKLNREDLLRKQRTFDNGSIPHQIHLGELHAILRRQEDFYPFLKDNREKIEKILTFRIPYYVGPLARGNSRFAWMTRKSEETITPWNFEEVVDKGASAQSFIERMTNFDKNLPNEKVLPKHSLLYEYFTVYNELTKVKYVTEGMRKPAFLSGEQKKAIVDLLFKTNRKVTVKQLKEDYFKKIECFDSVEISGVEDRFNASLGTYHDLLKIIKDKDFLDNEENEDILEDIVLTLTLFEDREMIEERLKTYAHLFDDKVMKQLKRRRYTGWGRLSRKLINGIRDKQSGKTILDFLKSDGFANRNFMQLIHDDSLTFKEDIQKAQVSGQGDSLHEHIANLAGSPAIKKGILQTVKVVDELVKVMGRHKPENIVIEMARENQTTQKGQKNSRERMKRIEEGIKELGSQILKEHPVENTQLQNEKLYLYYLQNGRDMYVDQELDINRLSDYDVDHIVPQSFLKDDSIDNKVLTRSDKARGKSDNVPSEEVVKKMKNYWRQLLNAKLITQRKFDNLTKAERGGLSELDKAGFIKRQLVETRQITKHVAQILDSRMNTKYDENDKLIREVKVITLKSKLVSDFRKDFQFYKVREINNYHHAHDAYLNAVVGTALIKKYPKLESEFVYGDYKVYDVRKMIAKSEQEIGKATAKYFFYSNIMNFFKTEITLANGEIRKRPLIETNGETGEIVWDKGRDFATVRKVLSMPQVNIVKKTEVQTGGFSKESILPKRNSDKLIARKKDWDPKKYGGFDSPTVAYSVLVVAKVEKGKSKKLKSVKELLGITIMERSSFEKNPIDFLEAKGYKEVKKDLIIKLPKYSLFELENGRKRMLASAGELQKGNELALPSKYVNFLYLASHYEKLKGSPEDNEQKQLFVEQHKHYLDEIIEQISEFSKRVILADANLDKVLSAYNKHRDKPIREQAENIIHLFTLTNLGAPAAFKYFDTTIDRKRYTSTKEVLDATLIHQSITGLYETRIDLSQLGGDGGGSSGGGGGSGGLDDEYRLYSPLVKPDQNIQFWLEQFPQAWAETAGMGLAKQVPPQVIQLKASATPVSVRQYPLSKEAQEGIRPHVQRLIQQGILVPVQSPWNTPLLPVRKPGTNDYRPVQDLREVNKRVQDIHPTVPNPYNLLCALPPQRSWYTVLDLKDAFFCLRLHPTSQPLFAFEWRDPGTGRTGQLTWTRLPQGFKNSPTIFNEALHRDLANFRIQHPQVTLLQYVDDLLLAGATKQDCLEGTKALLLELSDLGYRASAKKAQICRREVTYLGYSLRDGQRWLTEARKKTVVQIPAPTTAKQVREFLGKAGFCRLFIPGFATLAAPLYPLTKPKGEFSWAPEHQKAFDAIKKALLSAPALALPDVTKPFTLYVDERKGVARGVLTQTLGPWRRPVAYLSKKLDPVASGWPVCLKAIAAVAILVKDADKLTLGQNITVIAPHALENIVRQPPDRWMTNARMTHYQSLLLTERVTFAPPAALNPATLLPEETDEPVTHDCHQLLIEETGVRKDLTDIPLTGEVLTWFTDGSSYVVEGKRMAGAAVVDGTRTIWASSLPEGTSAQKAELMALTQALRLAEGKSINIYTDSRYAFATAHVHGAIYKQRGWLTSAGREIKNKEEILSLLEALHLPKRLAIIHCPGHQKAKDPISRGNQMADRVAKQAAQGVNLLPAGKRTADGSEFEKRTADGSEFESPKKKAKVE

SEQ ID NO: 6882 - protein, 2094 aa, synthetic construct
MPAAKRVKLDGGDKKYSIGLDIGTNSVGWAVITDEYKVPSKKFKVLGNTDRHSIKKNLIGALLFDSGETAEATRLKRTARRRYTRRKNRICYLQEIFSNEMAKVDDSFFHRLEESFLVEEDKKHERHPIFGNIVDEVAYHEKYPTIYHLRKKLVDSTDKADLRLIYLALAHMIKFRGHFLIEGDLNPDNSDVDKLFIQLVQTYNQLFEENPINASGVDAKAILSARLSKSRRLENLIAQLPGEKKNGLFGNLIALSLGLTPNFKSNFDLAEDAKLQLSKDTYDDDLDNLLAQIGDQYADLFLAAKNLSDAILLSDILRVNTEITKAPLSASMIKRYDEHHQDLTLLKALVRQQLPEKYKEIFFDQSKNGYAGYIDGGASQEEFYKFIKPILEKMDGTEELLVKLNREDLLRKQRTFDNGSIPHQIHLGELHAILRRQEDFYPFLKDNREKIEKILTFRIPYYVGPLARGNSRFAWMTRKSEETITPWNFEEVVDKGASAQSFIERMTNFDKNLPNEKVLPKHSLLYEYFTVYNELTKVKYVTEGMRKPAFLSGEQKKAIVDLLFKTNRKVTVKQLKEDYFKKIECFDSVEISGVEDRFNASLGTYHDLLKIIKDKDFLDNEENEDILEDIVLTLTLFEDREMIEERLKTYAHLFDDKVMKQLKRRRYTGWGRLSRKLINGIRDKQSGKTILDFLKSDGFANRNFMQLIHDDSLTFKEDIQKAQVSGQGDSLHEHIANLAGSPAIKKGILQTVKVVDELVKVMGRHKPENIVIEMARENQTTQKGQKNSRERMKRIEEGIKELGSQILKEHPVENTQLQNEKLYLYYLQNGRDMYVDQELDINRLSDYDVDHIVPQSFLKDDSIDNKVLTRSDKARGKSDNVPSEEVVKKMKNYWRQLLNAKLITQRKFDNLTKAERGGLSELDKAGFIKRQLVETRQITKHVAQILDSRMNTKYDENDKLIREVKVITLKSKLVSDFRKDFQFYKVREINNYHHAHDAYLNAVVGTALIKKYPKLESEFVYGDYKVYDVRKMIAKSEQEIGKATAKYFFYSNIMNFFKTEITLANGEIRKRPLIETNGETGEIVWDKGRDFATVRKVLSMPQVNIVKKTEVQTGGFSKESILPKRNSDKLIARKKDWDPKKYGGFDSPTVAYSVLVVAKVEKGKSKKLKSVKELLGITIMERSSFEKNPIDFLEAKGYKEVKKDLIIKLPKYSLFELENGRKRMLASAGELQKGNELALPSKYVNFLYLASHYEKLKGSPEDNEQKQLFVEQHKHYLDEIIEQISEFSKRVILADANLDKVLSAYNKHRDKPIREQAENIIHLFTLTNLGAPAAFKYFDTTIDRKRYTSTKEVLDATLIHQSITGLYETRIDLSQLGGDGGGSSGGGGGSGGTLNIEDEYRLHETSKEPDVPLGSTWLSDFPQAWAETGGMGLAVRQAPLIIPLKATSTPVSIKQYPMSQEARLGIKPHIQRLLDQGILVPCQSPWNTPLLPVKKPGTNDYRPVQDLREVNKRVEDIHPTVPNPYNLLSGLPPSHQWYTVLDLKDAFFCLRLHPTSQPLFAFEWRDPEMGISGQLTWTRLPQGFKNSPTLFNEALHRDLADFRIQHPDLILLQYVDDLLLAATSEQDCQRGTRALLQTLGNLGYRASAKKAQICQKQVKYLGYLLKEGQRWLTEARKETVMGQPTPKTPRQLREFLGTAGFCRLWIPGFAEMAAPLYPLTKPGTLFNWGPDQQKAYQEIKQALLTAPALGLPDLTKPFELFVDEKQGYAKGVLTQKLGPWRRPVAYLSKKLDPVAAGWPPCLRMVAAIAVLTKDAGKLTMGQPLVILAPHAVEALVKQPPDRWLSNARMTHYQAMLLDTDRVQFGPVVALNPATLLPLPEKEAPHDCLEILAETHGTRPDLTDQPIPDADYTWYTDGSSFLQEGQRRAGAAVTTETEVIWARALPAGTSAQRAELIALTQALKMAEGKKLNVYTDSRYAFATAHVHGEIYRRRGWLTSEGREIKNKNEILALLKALFLPKRLSIIHCPGHQKGNSAEARGNRMADQAAREAAMKAVLETSTLLAGKRTADGSEFEKRTADGSEFESPKKKAKVE

SEQ ID NO: 6883 - protein, 2094 aa, synthetic construct; identical to SEQ ID NO: 4518

SEQ ID NO: 6884 - protein, 2098 aa, synthetic construct
MPAAKRVKLDGGDKKYSIGLDIGTNSVGWAVITDEYKVPSKKFKVLGNTDRHSIKKNLIGALLFDSGETAEATRLKRTARRRYTRRKNRICYLQEIFSNEMAKVDDSFFHRLEESFLVEEDKKHERHPIFGNIVDEVAYHEKYPTIYHLRKKLVDSTDKADLRLIYLALAHMIKFRGHFLIEGDLNPDNSDVDKLFIQLVQTYNQLFEENPINASGVDAKAILSARLSKSRRLENLIAQLPGEKKNGLFGNLIALSLGLTPNFKSNFDLAEDAKLQLSKDTYDDDLDNLLAQIGDQYADLFLAAKNLSDAILLSDILRVNTEITKAPLSASMIKRYDEHHQDLTLLKALVRQQLPEKYKEIFFDQSKNGYAGYIDGGASQEEFYKFIKPILEKMDGTEELLVKLNREDLLRKQRTFDNGSIPHQIHLGELHAILRRQEDFYPFLKDNREKIEKILTFRIPYYVGPLARGNSRFAWMTRKSEETITPWNFEEVVDKGASAQSFIERMTNFDKNLPNEKVLPKHSLLYEYFTVYNELTKVKYVTEGMRKPAFLSGEQKKAIVDLLFKTNRKVTVKQLKEDYFKKIECFDSVEISGVEDRFNASLGTYHDLLKIIKDKDFLDNEENEDILEDIVLTLTLFEDREMIEERLKTYAHLFDDKVMKQLKRRRYTGWGRLSRKLINGIRDKQSGKTILDFLKSDGFANRNFMQLIHDDSLTFKEDIQKAQVSGQGDSLHEHIANLAGSPAIKKGILQTVKVVDELVKVMGRHKPENIVIEMARENQTTQKGQKNSRERMKRIEEGIKELGSQILKEHPVENTQLQNEKLYLYYLQNGRDMYVDQELDINRLSDYDVDHIVPQSFLKDDSIDNKVLTRSDKARGKSDNVPSEEVVKKMKNYWRQLLNAKLITQRKFDNLTKAERGGLSELDKAGFIKRQLVETRQITKHVAQILDSRMNTKYDENDKLIREVKVITLKSKLVSDFRKDFQFYKVREINNYHHAHDAYLNAVVGTALIKKYPKLESEFVYGDYKVYDVRKMIAKSEQEIGKATAKYFFYSNIMNFFKTEITLANGEIRKRPLIETNGETGEIVWDKGRDFATVRKVLSMPQVNIVKKTEVQTGGFSKESILPKRNSDKLIARKKDWDPKKYGGFDSPTVAYSVLVVAKVEKGKSKKLKSVKELLGITIMERSSFEKNPIDFLEAKGYKEVKKDLIIKLPKYSLFELENGRKRMLASAGELQKGNELALPSKYVNFLYLASHYEKLKGSPEDNEQKQLFVEQHKHYLDEIIEQISEFSKRVILADANLDKVLSAYNKHRDKPIREQAENIIHLFTLTNLGAPAAFKYFDTTIDRKRYTSTKEVLDATLIHQSITGLYETRIDLSQLGGDGGGGSGGGEAAAKGGTAPLEEEYRLFLEAPIQNVTLLEQWKREIPKVWAEINPPGLASTQAPIHVQLLSTALPVRVRQYPITLEAKRSLRETIRKFRAAGILRPVHSPWNTPLLPVRKSGTSEYRMVQDLREVNKRVETIHPTVPNPYTLLSLLPPDRIWYSVLDLKDAFFCIPLAPESQLIFAFEWADAEEGESGQLTWTRLPQGFKNSPTLFDEALNRDLQGFRLDHPSVSLLQYVDDLLIAADTQAACLSATRDLLMTLAELGYRVSGKKAQLCQEEVTYLGFKIHKGSRSLSNSRTQAILQIPVPKTKRQVREFLGTIGYCRLWIPGFAELAQPLYAATRGGNDPLVWGEKEEEAFQSLKLALTQPPALALPSLDKPFQLFVEETSGAAKGVLTQALGPWKRPVAYLSKRLDPVAAGWPRCLRAIAAAALLTREASKLTFGQDIEITSSHNLESLLRSPPDKWLTNARITQYQVLLLDPPRVRFKQTAALNPATLLPETDDTLPIHHCLDTLDSLTSTRPDLTDQPLAQAEATLFTDGSSYIRDGKRYAGAAVVTLDSVIWAEPLPIGTSAQKAELIALTKALEWSKDKSVNIYTDSRYAFATLHVHGMIYRERGLLTAGGKAIKNAPEILALLTAVWLPKRVAVMHCKGHQKDDAPTSTGNRRADEVAREVAIRPLSTQATISAGKRTADGSEFEKRTADGSEFESPKKKAKVE

SEQ ID NO: 6885 - protein, 2098 aa, synthetic construct
MPAAKRVKLDGGDKKYSIGLDIGTNSVGWAVITDEYKVPSKKFKVLGNTDRHSIKKNLIGALLFDSGETAEATRLKRTARRRYTRRKNRICYLQEIFSNEMAKVDDSFFHRLEESFLVEEDKKHERHPIFGNIVDEVAYHEKYPTIYHLRKKLVDSTDKADLRLIYLALAHMIKFRGHFLIEGDLNPDNSDVDKLFIQLVQTYNQLFEENPINASGVDAKAILSARLSKSRRLENLIAQLPGEKKNGLFGNLIALSLGLTPNFKSNFDLAEDAKLQLSKDTYDDDLDNLLAQIGDQYADLFLAAKNLSDAILLSDILRVNTEITKAPLSASMIKRYDEHHQDLTLLKALVRQQLPEKYKEIFFDQSKNGYAGYIDGGASQEEFYKFIKPILEKMDGTEELLVKLNREDLLRKQRTFDNGSIPHQIHLGELHAILRRQEDFYPFLKDNREKIEKILTFRIPYYVGPLARGNSRFAWMTRKSEETITPWNFEEVVDKGASAQSFIERMTNFDKNLPNEKVLPKHSLLYEYFTVYNELTKVKYVTEGMRKPAFLSGEQKKAIVDLLFKTNRKVTVKQLKEDYFKKIECFDSVEISGVEDRFNASLGTYHDLLKIIKDKDFLDNEENEDILEDIVLTLTLFEDREMIEERLKTYAHLFDDKVMKQLKRRRYTGWGRLSRKLINGIRDKQSGKTILDFLKSDGFANRNFMQLIHDDSLTFKEDIQKAQVSGQGDSLHEHIANLAGSPAIKKGILQTVKVVDELVKVMGRHKPENIVIEMARENQTTQKGQKNSRERMKRIEEGIKELGSQILKEHPVENTQLQNEKLYLYYLQNGRDMYVDQELDINRLSDYDVDHIVPQSFLKDDSIDNKVLTRSDKARGKSDNVPSEEVVKKMKNYWRQLLNAKLITQRKFDNLTKAERGGLSELDKAGFIKRQLVETRQITKHVAQILDSRMNTKYDENDKLIREVKVITLKSKLVSDFRKDFQFYKVREINNYHHAHDAYLNAVVGTALIKKYPKLESEFVYGDYKVYDVRKMIAKSEQEIGKATAKYFFYSNIMNFFKTEITLANGEIRKRPLIETNGETGEIVWDKGRDFATVRKVLSMPQVNIVKKTEVQTGGFSKESILPKRNSDKLIARKKDWDPKKYGGFDSPTVAYSVLVVAKVEKGKSKKLKSVKELLGITIMERSSFEKNPIDFLEAKGYKEVKKDLIIKLPKYSLFELENGRKRMLASAGELQKGNELALPSKYVNFLYLASHYEKLKGSPEDNEQKQLFVEQHKHYLDEIIEQISEFSKRVILADANLDKVLSAYNKHRDKPIREQAENIIHLFTLTNLGAPAAFKYFDTTIDRKRYTSTKEVLDATLIHQSITGLYETRIDLSQLGGDGGGGSGGGEAAAKGGTAPLEEEYRLFLEAPIQNVTLLEQWKREIPKVWAEINPPGLASTQAPIHVQLLSTALPVRVRQYPITLEAKRSLRETIRKFRAAGILRPVHSPWNTPLLPVRKSGTSEYRMVQDLREVNKRVETIHPTVPNPYTLLSLLPPDRIWYSVLDLKDAFFCIPLAPESQLIFAFEWADAEEGESGQLTWTRLPQGFKNSPTLFNEALNRDLQGFRLDHPSVSLLQYVDDLLIAADTQAACLSATRDLLMTLAELGYRVSGKKAQLCQEEVTYLGFKIHKGSRSLSNSRTQAILQIPVPKTKRQVREFLGTIGYCRLWIPGFAELAQPLYAATRPGNDPLVWGEKEEEAFQSLKLALTQPPALALPSLDKPFQLFVEETSGAAKGVLTQALGPWKRPVAYLSKRLDPVAAGWPRCLRAIAAAALLTREASKLTFGQDIEITSSHNLESLLRSPPDKWLTNARITQYQVLLLDPPRVRFKQTAALNPATLLPETDDTLPIHHCLDTLDSLTSTRPDLTDQPLAQAEATLFTDGSSYIRDGKRYAGAAVVTLDSVIWAEPLPIGTSAQKAELIALTKALEWSKDKSVNIYTDSRYAFATLHVHGMIYRERGWLTAGGKAIKNAPEILALLTAVWLPKRVAVMHCKGHQKDDAPTSTGNRRADEVAREVAIRPLSTQATISAGKRTADGSEFEKRTADGSEFESPKKKAKVE

SEQ ID NO: 6886 - protein, 2102 aa, synthetic construct
MPAAKRVKLDGGDKKYSIGLDIGTNSVGWAVITDEYKVPSKKFKVLGNTDRHSIKKNLIGALLFDSGETAEATRLKRTARRRYTRRKNRICYLQEIFSNEMAKVDDSFFHRLEESFLVEEDKKHERHPIFGNIVDEVAYHEKYPTIYHLRKKLVDSTDKADLRLIYLALAHMIKFRGHFLIEGDLNPDNSDVDKLFIQLVQTYNQLFEENPINASGVDAKAILSARLSKSRRLENLIAQLPGEKKNGLFGNLIALSLGLTPNFKSNFDLAEDAKLQLSKDTYDDDLDNLLAQIGDQYADLFLAAKNLSDAILLSDILRVNTEITKAPLSASMIKRYDEHHQDLTLLKALVRQQLPEKYKEIFFDQSKNGYAGYIDGGASQEEFYKFIKPILEKMDGTEELLVKLNREDLLRKQRTFDNGSIPHQIHLGELHAILRRQEDFYPFLKDNREKIEKILTFRIPYYVGPLARGNSRFAWMTRKSEETITPWNFEEVVDKGASAQSFIERMTNFDKNLPNEKVLPKHSLLYEYFTVYNELTKVKYVTEGMRKPAFLSGEQKKAIVDLLFKTNRKVTVKQLKEDYFKKIECFDSVEISGVEDRFNASLGTYHDLLKIIKDKDFLDNEENEDILEDIVLTLTLFEDREMIEERLKTYAHLFDDKVMKQLKRRRYTGWGRLSRKLINGIRDKQSGKTILDFLKSDGFANRNFMQLIHDDSLTFKEDIQKAQVSGQGDSLHEHIANLAGSPAIKKGILQTVKVVDELVKVMGRHKPENIVIEMARENQTTQKGQKNSRERMKRIEEGIKELGSQILKEHPVENTQLQNEKLYLYYLQNGRDMYVDQELDINRLSDYDVDHIVPQSFLKDDSIDNKVLTRSDKARGKSDNVPSEEVVKKMKNYWRQLLNAKLITQRKFDNLTKAERGGLSELDKAGFIKRQLVETRQITKHVAQILDSRMNTKYDENDKLIREVKVITLKSKLVSDFRKDFQFYKVREINNYHHAHDAYLNAVVGTALIKKYPKLESEFVYGDYKVYDVRKMIAKSEQEIGKATAKYFFYSNIMNFFKTEITLANGEIRKRPLIETNGETGEIVWDKGRDFATVRKVLSMPQVNIVKKTEVQTGGFSKESILPKRNSDKLIARKKDWDPKKYGGFDSPTVAYSVLVVAKVEKGKSKKLKSVKELLGITIMERSSFEKNPIDFLEAKGYKEVKKDLIIKLPKYSLFELENGRKRMLASAGELQKGNELALPSKYVNFLYLASHYEKLKGSPEDNEQKQLFVEQHKHYLDEIIEQISEFSKRVILADANLDKVLSAYNKHRDKPIREQAENIIHLFTLTNLGAPAAFKYFDTTIDRKRYTSTKEVLDATLIHQSITGLYETRIDLSQLGGDGGGGSGGGEAAAKGGTVSLQDEHRLFDIPVTTSLPDVWLQDFPQAWAETGGLGRAKCQAPIIIDLKPTAVPVSIKQYPMSLEAHMGIRQHIIKFLELGVLRPCRSPWNTPLLPVKKPGTQDYRPVQDLREINKRTVDIHPTVPNPYNLLSTLKPDYSWYTVLDLKDAFFCLPLAPQSQELFAFEWKDPERGISGQLTWTRLPQGFKNSPTLFNEALHRDLTDFRTQHPEVTLLQYVDDLLLAAPTKKACTQGTRHLLQELGEKGYRASAKKAQICQTKVTYLGYILSEGKRWLTPGRIETVARIPPPRNPREVREFLGTAGFCRLWIPGFAELAAPLYALTKPSTPFTWQTEHQLAFEALKKALLSAPALGLPDTSKPFTLFLDERQGIAKGVLTQKLGPWKRPVAYLSKKLDPVAAGWPPCLRIMAATAMLVKDSAKLTLGQPLTVITPHTLEAIVRQPPDRWITNARLTHYQALLLDTDRVQFGPPVTLNPATLLPVPENQPSPHDCRQVLAETHGTREDLKDQELPDADHTWYTDGSSYLDSGTRRAGAAVVDGHNTIWAQSLPPGTSAQKAELIALTKALELSKGKKANIYTDSRYAFATAHTHGSIYERRGWLTSEGKEIKNKAEIIALLKALFLPQEVAIIHCPGHQKGQDPVAVGNRQADRVARQAAMAEVLTLATEPDNTSHITAGKRTADGSEFEKRTADGSEFESPKKKAKVE

SEQ ID NO: 6887 - protein, 2173 aa, synthetic construct
MPAAKRVKLDGGDKKYSIGLDIGTNSVGWAVITDEYKVPSKKFKVLGNTDRHSIKKNLIGALLFDSGETAEATRLKRTARRRYTRRKNRICYLQEIFSNEMAKVDDSFFHRLEESFLVEEDKKHERHPIFGNIVDEVAYHEKYPTIYHLRKKLVDSTDKADLRLIYLALAHMIKFRGHFLIEGDLNPDNSDVDKLFIQLVQTYNQLFEENPINASGVDAKAILSARLSKSRRLENLIAQLPGEKKNGLFGNLIALSLGLTPNFKSNFDLAEDAKLQLSKDTYDDDLDNLLAQIGDQYADLFLAAKNLSDAILLSDILRVNTEITKAPLSASMIKRYDEHHQDLTLLKALVRQQLPEKYKEIFFDQSKNGYAGYIDGGASQEEFYKFIKPILEKMDGTEELLVKLNREDLLRKQRTFDNGSIPHQIHLGELHAILRRQEDFYPFLKDNREKIEKILTFRIPYYVGPLARGNSRFAWMTRKSEETITPWNFEEVVDKGASAQSFIERMTNFDKNLPNEKVLPKHSLLYEYFTVYNELTKVKYVTEGMRKPAFLSGEQKKAIVDLLFKTNRKVTVKQLKEDYFKKIECFDSVEISGVEDRFNASLGTYHDLLKIIKDKDFLDNEENEDILEDIVLTLTLFEDREMIEERLKTYAHLFDDKVMKQLKRRRYTGWGRLSRKLINGIRDKQSGKTILDFLKSDGFANRNFMQLIHDDSLTFKEDIQKAQVSGQGDSLHEHIANLAGSPAIKKGILQTVKVVDELVKVMGRHKPENIVIEMARENQTTQKGQKNSRERMKRIEEGIKELGSQILKEHPVENTQLQNEKLYLYYLQNGRDMYVDQELDINRLSDYDVDHIVPQSFLKDDSIDNKVLTRSDKARGKSDNVPSEEVVKKMKNYWRQLLNAKLITQRKFDNLTKAERGGLSELDKAGFIKRQLVETRQITKHVAQILDSRMNTKYDENDKLIREVKVITLKSKLVSDFRKDFQFYKVREINNYHHAHDAYLNAVVGTALIKKYPKLESEFVYGDYKVYDVRKMIAKSEQEIGKATAKYFFYSNIMNFFKTEITLANGEIRKRPLIETNGETGEIVWDKGRDFATVRKVLSMPQVNIVKKTEVQTGGFSKESILPKRNSDKLIARKKDWDPKKYGGFDSPTVAYSVLVVAKVEKGKSKKLKSVKELLGITIMERSSFEKNPIDFLEAKGYKEVKKDLIIKLPKYSLFELENGRKRMLASAGELQKGNELALPSKYVNFLYLASHYEKLKGSPEDNEQKQLFVEQHKHYLDEIIEQISEFSKRVILADANLDKVLSAYNKHRDKPIREQAENIIHLFTLTNLGAPAAFKYFDTTIDRKRYTSTKEVLDATLIHQSITGLYETRIDLSQLGGDGGGGSGGGEAAAKGGMDLLKPLTVERKGVKIKGYWNSQADITCVPKDLLQGEEPVRQQNVTTIHGTQEGDVYYVNLKIDGRRINTEVIGTTLDYAIITPGDVPWILKKPLELTIKLDLEEQQGTLLNNSILSKKGKEELKQLFEKYSALWQSWENQVGHRRIRPHKIATGTVKPTPQKQYHINPKAKPDIQIVINDLLKQGVLIQKESTMNTPVYPVPKPNGRWRMVLDYRAVNKVTPLIAVQNQHSYGILGSLFKGRYKTTIDLSNGFWAHPIVPEDYWITAFTWQGKQYCWTVLPQGFLNSPGLFTGDVVDLLQGIPNVEVYVDDVYISHDSEKEHLEYLDILFNRLKEAGYIISLKKSNIANSIVDFLGFQITNEGRGLTDTFKEKLENITAPTTLKQLQSILGLLNFARNFIPDFTELIAPLYALIPKSTKNYVPWQIEHSTTLETLITKLNGAEYLQGRKGDKTLIMKVNASYTTGYIRYYNEGEKKPISYVSIVFSKTELKFTELEKLLTTVHKGLLKALDLSMGQNIHVYSPIVSMQNIQKTPQTAKKALASRWLSWLSYLEDPRIRFFYDPQMPALKDLPAVDTGKDNKKHPSNFQHIFYTDGSAITSPTKEGHLNAGMGIVYFINKDGNLQKQQEWSISLGNHTAQFAEIAAFEFALKKCLPLGGNILVVTDSNYVAKAYNEELDVWASNGFVNNRKKPLKHISKWKSVADLKRLRPDVVVTHEPGHQKLDSSPHAYGNNLADQLATQASFKVHAGKRTADGSEFEKRTADGSEFESPKKKAKVE

SEQ ID NO: 6888 - protein, 2173 aa, synthetic construct
MPAAKRVKLDGGDKKYSIGLDIGTNSVGWAVITDEYKVPSKKFKVLGNTDRHSIKKNLIGALLFDSGETAEATRLKRTARRRYTRRKNRICYLQEIFSNEMAKVDDSFFHRLEESFLVEEDKKHERHPIFGNIVDEVAYHEKYPTIYHLRKKLVDSTDKADLRLIYLALAHMIKFRGHFLIEGDLNPDNSDVDKLFIQLVQTYNQLFEENPINASGVDAKAILSARLSKSRRLENLIAQLPGEKKNGLFGNLIALSLGLTPNFKSNFDLAEDAKLQLSKDTYDDDLDNLLAQIGDQYADLFLAAKNLSDAILLSDILRVNTEITKAPLSASMIKRYDEHHQDLTLLKALVRQQLPEKYKEIFFDQSKNGYAGYIDGGASQEEFYKFIKPILEKMDGTEELLVKLNREDLLRKQRTFDNGSIPHQIHLGELHAILRRQEDFYPFLKDNREKIEKILTFRIPYYVGPLARGNSRFAWMTRKSEETITPWNFEEVVDKGASAQSFIERMTNFDKNLPNEKVLPKHSLLYEYFTVYNELTKVKYVTEGMRKPAFLSGEQKKAIVDLLFKTNRKVTVKQLKEDYFKKIECFDSVEISGVEDRFNASLGTYHDLLKIIKDKDFLDNEENEDILEDIVLTLTLFEDREMIEERLKTYAHLFDDKVMKQLKRRRYTGWGRLSRKLINGIRDKQSGKTILDFLKSDGFANRNFMQLIHDDSLTFKEDIQKAQVSGQGDSLHEHIANLAGSPAIKKGILQTVKVVDELVKVMGRHKPENIVIEMARENQTTQKGQKNSRERMKRIEEGIKELGSQILKEHPVENTQLQNEKLYLYYLQNGRDMYVDQELDINRLSDYDVDHIVPQSFLKDDSIDNKVLTRSDKARGKSDNVPSEEVVKKMKNYWRQLLNAKLITQRKFDNLTKAERGGLSELDKAGFIKRQLVETRQITKHVAQILDSRMNTKYDENDKLIREVKVITLKSKLVSDFRKDFQFYKVREINNYHHAHDAYLNAVVGTALIKKYPKLESEFVYGDYKVYDVRKMIAKSEQEIGKATAKYFFYSNIMNFFKTEITLANGEIRKRPLIETNGETGEIVWDKGRDFATVRKVLSMPQVNIVKKTEVQTGGFSKESILPKRNSDKLIARKKDWDPKKYGGFDSPTVAYSVLVVAKVEKGKSKKLKSVKELLGITIMERSSFEKNPIDFLEAKGYKEVKKDLIIKLPKYSLFELENGRKRMLASAGELQKGNELALPSKYVNFLYLASHYEKLKGSPEDNEQKQLFVEQHKHYLDEIIEQISEFSKRVILADANLDKVLSAYNKHRDKPIREQAENIIHLFTLTNLGAPAAFKYFDTTIDRKRYTSTKEVLDATLIHQSITGLYETRIDLSQLGGDGGGGSGGGEAAAKGGMDLLKPLTVERKGVKIKGYWNSQADITCVPKDLLQGEEPVRQQNVTTIHGTQEGDVYYVNLKIDGRRINTEVIGTTLDYAIITPGDVPWILKKPLELTIKLDLEEQQGTLLNNSILSKKGKEELKQLFEKYSALWQSWENQVGHRRIRPHKIATGTVKPTPQKQYHINPKAKPDIQIVINDLLKQGVLIQKESTMNTPVYPVPKPNGRWRMVLDYRAVNKVTPLIAVQNQHSYGILGSLFKGRYKTTIDLSNGFWAHPIVPEDYWITAFTWQGKQYCWTVLPQGFLNSPGLFNGDVVDLLQGIPNVEVYVDDVYISHDSEKEHLEYLDILFNRLKEAGYIISLKKSNIANSIVDFLGFQITNEGRGLTDTFKEKLENITAPTTLKQLQSILGLLNFARNFIPDFTELIAPLYALIPKSPKNYVPWQIEHSTTLETLITKLNGAEYLQGRKGDKTLIMKVNASYTTGYIRYYNEGEKKPISYVSIVFSKTELKFTELEKLLTTVHKGLLKALDLSMGQNIHVYSPIVSMQNIQKTPQTAKKALASRWLSWLSYLEDPRIRFFYDPQMPALKDLPAVDTGKDNKKHPSNFQHIFYTDGSAITSPTKEGHLNAGMGIVYFINKDGNLQKQQEWSISLGNHTAQFAEIAAFEFALKKCLPLGGNILVVTDSNYVAKAYNEELDVWASNGFVNNRKKPLKHISKWKSVADLKRLRPDVVVTHEPGHQKLDSSPHAYGNNLADQLATQASFKVHAGKRTADGSEFEKRTADGSEFESPKKKAKVE

SEQ ID NO: 6889 - protein, 2095 aa, synthetic construct
MPAAKRVKLDGGDKKYSIGLDIGTNSVGWAVITDEYKVPSKKFKVLGNTDRHSIKKNLIGALLFDSGETAEATRLKRTARRRYTRRKNRICYLQEIFSNEMAKVDDSFFHRLEESFLVEEDKKHERHPIFGNIVDEVAYHEKYPTIYHLRKKLVDSTDKADLRLIYLALAHMIKFRGHFLIEGDLNPDNSDVDKLFIQLVQTYNQLFEENPINASGVDAKAILSARLSKSRRLENLIAQLPGEKKNGLFGNLIALSLGLTPNFKSNFDLAEDAKLQLSKDTYDDDLDNLLAQIGDQYADLFLAAKNLSDAILLSDILRVNTEITKAPLSASMIKRYDEHHQDLTLLKALVRQQLPEKYKEIFFDQSKNGYAGYIDGGASQEEFYKFIKPILEKMDGTEELLVKLNREDLLRKQRTFDNGSIPHQIHLGELHAILRRQEDFYPFLKDNREKIEKILTFRIPYYVGPLARGNSRFAWMTRKSEETITPWNFEEVVDKGASAQSFIERMTNFDKNLPNEKVLPKHSLLYEYFTVYNELTKVKYVTEGMRKPAFLSGEQKKAIVDLLFKTNRKVTVKQLKEDYFKKIECFDSVEISGVEDRFNASLGTYHDLLKIIKDKDFLDNEENEDILEDIVLTLTLFEDREMIEERLKTYAHLFDDKVMKQLKRRRYTGWGRLSRKLINGIRDKQSGKTILDFLKSDGFANRNFMQLIHDDSLTFKEDIQKAQVSGQGDSLHEHIANLAGSPAIKKGILQTVKVVDELVKVMGRHKPENIVIEMARENQTTQKGQKNSRERMKRIEEGIKELGSQILKEHPVENTQLQNEKLYLYYLQNGRDMYVDQELDINRLSDYDVDHIVPQSFLKDDSIDNKVLTRSDKARGKSDNVPSEEVVKKMKNYWRQLLNAKLITQRKFDNLTKAERGGLSELDKAGFIKRQLVETRQITKHVAQILDSRMNTKYDENDKLIREVKVITLKSKLVSDFRKDFQFYKVREINNYHHAHDAYLNAVVGTALIKKYPKLESEFVYGDYKVYDVRKMIAKSEQEIGKATAKYFFYSNIMNFFKTEITLANGEIRKRPLIETNGETGEIVWDKGRDFATVRKVLSMPQVNIVKKTEVQTGGFSKESILPKRNSDKLIARKKDWDPKKYGGFDSPTVAYSVLVVAKVEKGKSKKLKSVKELLGITIMERSSFEKNPIDFLEAKGYKEVKKDLIIKLPKYSLFELENGRKRMLASAGELQKGNELALPSKYVNFLYLASHYEKLKGSPEDNEQKQLFVEQHKHYLDEIIEQISEFSKRVILADANLDKVLSAYNKHRDKPIREQAENIIHLFTLTNLGAPAAFKYFDTTIDRKRYTSTKEVLDATLIHQSITGLYETRIDLSQLGGDGGGGSGGGEAAAKGGTLQLEEEYRLFEPESTQKQEMDIWLKNFPQAWAETGGMGTAHCQAPVLIQLKATATPISIRQYPMPHEAYQGIKPHIRRMLDQGILKPCQSPWNTPLLPVKKPGTEDYRPVQDLREVNKRVEDIHPTVPNPYNLLSTLPPSHPWYTVLDLKDAFFCLRLHSESQLLFAFEWRDPEIGLSGQLTWTRLPQGFKNSPTLFNEALHSDLADFRVRYPALVLLQYVDDLLLAAATRTECLEGTKALLETLGNKGYRASAKKAQICLQEVTYLGYSLKDGQRWLTKARKEAILSIPVPKNSRQVREFLGTAGYCRLWIPGFAELAAPLYPLTRPGTLFQWGTEQQLAFEDIKKALLSSPALGLPDITKPFELFIDENSGFAKGVLVQKLGPWKRPVAYLSKKLDTVASGWPPCLRMVAAIAILVKDAGKLTLGQPLTILTSHPVEALVRQPPNKWLSNARMTHYQAMLLDAERVHFGPTVSLNPATLLPLPSGGNHHDCLQILAETHGTRPDLTDQPLPDADLTWYTDGSSFIRNGEREAGAAVTTESEVIWAAPLPPGTSAQRAELIALTQALKMAEGKKLTVYTDSRYAFATTHVHGEIYRRRGWLTSEGKEIKNKNEILALLEALFLPKRLSIIHCPGHQKGDSPQAKGNRLADDTAKKAATETHSSLTVLPAGKRTADGSEFEKRTADGSEFESPKKKAKVE

SEQ ID NO: 6890 - protein, 2127 aa, synthetic construct
MPAAKRVKLDGGDKKYSIGLDIGTNSVGWAVITDEYKVPSKKFKVLGNTDRHSIKKNLIGALLFDSGETAEATRLKRTARRRYTRRKNRICYLQEIFSNEMAKVDDSFFHRLEESFLVEEDKKHERHPIFGNIVDEVAYHEKYPTIYHLRKKLVDSTDKADLRLIYLALAHMIKFRGHFLIEGDLNPDNSDVDKLFIQLVQTYNQLFEENPINASGVDAKAILSARLSKSRRLENLIAQLPGEKKNGLFGNLIALSLGLTPNFKSNFDLAEDAKLQLSKDTYDDDLDNLLAQIGDQYADLFLAAKNLSDAILLSDILRVNTEITKAPLSASMIKRYDEHHQDLTLLKALVRQQLPEKYKEIFFDQSKNGYAGYIDGGASQEEFYKFIKPILEKMDGTEELLVKLNREDLLRKQRTFDNGSIPHQIHLGELHAILRRQEDFYPFLKDNREKIEKILTFRIPYYVGPLARGNSRFAWMTRKSEETITPWNFEEVVDKGASAQSFIERMTNFDKNLPNEKVLPKHSLLYEYFTVYNELTKVKYVTEGMRKPAFLSGEQKKAIVDLLFKTNRKVTVKQLKEDYFKKIECFDSVEISGVEDRFNASLGTYHDLLKIIKDKDFLDNEENEDILEDIVLTLTLFEDREMIEERLKTYAHLFDDKVMKQLKRRRYTGWGRLSRKLINGIRDKQSGKTILDFLKSDGFANRNFMQLIHDDSLTFKEDIQKAQVSGQGDSLHEHIANLAGSPAIKKGILQTVKVVDELVKVMGRHKPENIVIEMARENQTTQKGQKNSRERMKRIEEGIKELGSQILKEHPVENTQLQNEKLYLYYLQNGRDMYVDQELDINRLSDYDVDHIVPQSFLKDDSIDNKVLTRSDKARGKSDNVPSEEVVKKMKNYWRQLLNAKLITQRKFDNLTKAERGGLSELDKAGFIKRQLVETRQITKHVAQILDSRMNTKYDENDKLIREVKVITLKSKLVSDFRKDFQFYKVREINNYHHAHDAYLNAVVGTALIKKYPKLESEFVYGDYKVYDVRKMIAKSEQEIGKATAKYFFYSNIMNFFKTEITLANGEIRKRPLIETNGETGEIVWDKGRDFATVRKVLSMPQVNIVKKTEVQTGGFSKESILPKRNSDKLIARKKDWDPKKYGGFDSPTVAYSVLVVAKVEKGKSKKLKSVKELLGITIMERSSFEKNPIDFLEAKGYKEVKKDLIIKLPKYSLFELENGRKRMLASAGELQKGNELALPSKYVNFLYLASHYEKLKGSPEDNEQKQLFVEQHKHYLDEIIEQISEFSKRVILADANLDKVLSAYNKHRDKPIREQAENIIHLFTLTNLGAPAAFKYFDTTIDRKRYTSTKEVLDATLIHQSITGLYETRIDLSQLGGDGGGGSGGGEAAAKGGLLGRDLLTKLKAQIQFSTEGPQVTWEDRPAMCLVLNLEEEYRLHEKPVPPSIDPSWLQLFPMVWAEKAGMGLANQVPPVVVELKSDASPVAVRQYPMSKEAREGIRPHIQRFLDLGILVPCQSPWNTPLLPVKKPGTNDYRPVQDLREVNKRVQDIHPTVPNPYNLLSSLPPSHTWYSVLDLKDAFFCLKLHPNSQPLFAFEWRDPEKGNTGQLTWTRLPQGFKNSPTLFDEALHRDLASFRALNPQVVMLQYVDDLLVAAPTYRDCKEGTRRLLQELSKLGYRVSAKKAQLCREEVTYLGYLLKGGKRWLTPARKATVMKIPTPTTPRQVREFLGTAGFCRLWIPGFASLAAPLYPLTREKVPFTWTEAHQEAFGRIKEALLSAPALALPDLTKPFALYVDEKEGVARGVLTQTLGPWRRPVAYLSKKLDPVASGWPTCLKAIAAVALLLKDADKLTLGQNVLVIAPHNLESIVRQPPDRWMTNARMTHYQSLLLNERVSFAPPAILNPATLLPVESDDTPIHICSEILAEETGTRPDLRDQPLPGVPAWYTDGSSFIMDGRRQAGAAIVDNKRTVWASNLPEGTSAQKAELIALTQALRLAEGKSINIYTDSRYAFATAHVHGAIYKQRGLLTSAGKDIKNKEEILALLEAIHLPKRVAIIHCPGHQRGTDPVATGNRKADEAAKQAAQSTRILTETTKNAGKRTADGSEFEKRTADGSEFESPKKKAKVE

SEQ ID NO: 6891 - protein, 2218 aa, synthetic construct
MPAAKRVKLDGGDKKYSIGLDIGTNSVGWAVITDEYKVPSKKFKVLGNTDRHSIKKNLIGALLFDSGETAEATRLKRTARRRYTRRKNRICYLQEIFSNEMAKVDDSFFHRLEESFLVEEDKKHERHPIFGNIVDEVAYHEKYPTIYHLRKKLVDSTDKADLRLIYLALAHMIKFRGHFLIEGDLNPDNSDVDKLFIQLVQTYNQLFEENPINASGVDAKAILSARLSKSRRLENLIAQLPGEKKNGLFGNLIALSLGLTPNFKSNFDLAEDAKLQLSKDTYDDDLDNLLAQIGDQYADLFLAAKNLSDAILLSDILRVNTEITKAPLSASMIKRYDEHHQDLTLLKALVRQQLPEKYKEIFFDQSKNGYAGYIDGGASQEEFYKFIKPILEKMDGTEELLVKLNREDLLRKQRTFDNGSIPHQIHLGELHAILRRQEDFYPFLKDNREKIEKILTFRIPYYVGPLARGNSRFAWMTRKSEETITPWNFEEVVDKGASAQSFIERMTNFDKNLPNEKVLPKHSLLYEYFTVYNELTKVKYVTEGMRKPAFLSGEQKKAIVDLLFKTNRKVTVKQLKEDYFKKIECFDSVEISGVEDRFNASLGTYHDLLKIIKDKDFLDNEENEDILEDIVLTLTLFEDREMIEERLKTYAHLFDDKVMKQLKRRRYTGWGRLSRKLINGIRDKQSGKTILDFLKSDGFANRNFMQLIHDDSLTFKEDIQKAQVSGQGDSLHEHIANLAGSPAIKKGILQTVKVVDELVKVMGRHKPENIVIEMARENQTTQKGQKNSRERMKRIEEGIKELGSQILKEHPVENTQLQNEKLYLYYLQNGRDMYVDQELDINRLSDYDVDHIVPQSFLKDDSIDNKVLTRSDKARGKSDNVPSEEVVKKMKNYWRQLLNAKLITQRKFDNLTKAERGGLSELDKAGFIKRQLVETRQITKHVAQILDSRMNTKYDENDKLIREVKVITLKSKLVSDFRKDFQFYKVREINNYHHAHDAYLNAVVGTALIKKYPKLESEFVYGDYKVYDVRKMIAKSEQEIGKATAKYFFYSNIMNFFKTEITLANGEIRKRPLIETNGETGEIVWDKGRDFATVRKVLSMPQVNIVKKTEVQTGGFSKESILPKRNSDKLIARKKDWDPKKYGGFDSPTVAYSVLVVAKVEKGKSKKLKSVKELLGITIMERSSFEKNPIDFLEAKGYKEVKKDLIIKLPKYSLFELENGRKRMLASAGELQKGNELALPSKYVNFLYLASHYEKLKGSPEDNEQKQLFVEQHKHYLDEIIEQISEFSKRVILADANLDKVLSAYNKHRDKPIREQAENIIHLFTLTNLGAPAAFKYFDTTIDRKRYTSTKEVLDATLIHQSITGLYETRIDLSQLGGDGGGGSGGGEAAAKGGTLGDQGSRGSDPLPEPRVTLTVEGIPTEFLVNTGAEHSVLTKPMGKMGSKRTVVAGATGSKVYPWTTKRLLKIGQKQVTHSFLVIPECPAPLLGRDLLTKLKAQIQFSTEGPQVTWEDRPAMCLVLNLEEEYRLHEKPVPPSIDPSWLQLFPMVWAEKAGMGLANQVPPVVVELKSDASPVAVRQYPMSKEAREGIRPHIQRFLDLGILVPCQSPWNTPLLPVKKPGTNDYRPVQDLREVNKRVQDIHPTVPNPYNLLSSLPPSHTWYSVLDLKDAFFCLKLHPNSQPLFAFEWRDPEKGNTGQLTWTRLPQGFKNSPTLFNEALHRDLASFRALNPQVVMLQYVDDLLVAAPTYRDCKEGTRRLLQELSKLGYRVSAKKAQLCREEVTYLGYLLKGGKRWLTPARKATVMKIPTPTTPRQVREFLGKAGFCRLFIPGFASLAAPLYPLTRPKVPFTWTEAHQEAFGRIKEALLSAPALALPDLTKPFALYVDEKEGVARGVLTQTLGPWRRPVAYLSKKLDPVASGWPTCLKAIAAVALLLKDADKLTLGQNVLVIAPHNLESIVRQPPDRWMTNARMTHYQSLLLNERVSFAPPAILNPATLLPVESDDTPIHICSEILAEETGTRPDLRDQPLPGVPAWYTDGSSFIMDGRRQAGAAIVDNKRTVWASNLPEGTSAQKAELIALTQALRLAEGKSINIYTDSRYAFATAHVHGAIYKQRGWLTSAGKDIKNKEEILALLEAIHLPKRVAIIHCPGHQRGTDPVATGNRKADEAAKQAAQSTRILTETTKNAGKRTADGSEFEKRTADGSEFESPKKKAKVE

SEQ ID NO: 6892 - protein, 2096 aa, synthetic construct
MPAAKRVKLDGGDKKYSIGLDIGTNSVGWAVITDEYKVPSKKFKVLGNTDRHSIKKNLIGALLFDSGETAEATRLKRTARRRYTRRKNRICYLQEIFSNEMAKVDDSFFHRLEESFLVEEDKKHERHPIFGNIVDEVAYHEKYPTIYHLRKKLVDSTDKADLRLIYLALAHMIKFRGHFLIEGDLNPDNSDVDKLFIQLVQTYNQLFEENPINASGVDAKAILSARLSKSRRLENLIAQLPGEKKNGLFGNLIALSLGLTPNFKSNFDLAEDAKLQLSKDTYDDDLDNLLAQIGDQYADLFLAAKNLSDAILLSDILRVNTEITKAPLSASMIKRYDEHHQDLTLLKALVRQQLPEKYKEIFFDQSKNGYAGYIDGGASQEEFYKFIKPILEKMDGTEELLVKLNREDLLRKQRTFDNGSIPHQIHLGELHAILRRQEDFYPFLKDNREKIEKILTFRIPYYVGPLARGNSRFAWMTRKSEETITPWNFEEVVDKGASAQSFIERMTNFDKNLPNEKVLPKHSLLYEYFTVYNELTKVKYVTEGMRKPAFLSGEQKKAIVDLLFKTNRKVTVKQLKEDYFKKIECFDSVEISGVEDRFNASLGTYHDLLKIIKDKDFLDNEENEDILEDIVLTLTLFEDREMIEERLKTYAHLFDDKVMKQLKRRRYTGWGRLSRKLINGIRDKQSGKTILDFLKSDGFANRNFMQLIHDDSLTFKEDIQKAQVSGQGDSLHEHIANLAGSPAIKKGILQTVKVVDELVKVMGRHKPENIVIEMARENQTTQKGQKNSRERMKRIEEGIKELGSQILKEHPVENTQLQNEKLYLYYLQNGRDMYVDQELDINRLSDYDVDHIVPQSFLKDDSIDNKVLTRSDKARGKSDNVPSEEVVKKMKNYWRQLLNAKLITQRKFDNLTKAERGGLSELDKAGFIKRQLVETRQITKHVAQILDSRMNTKYDENDKLIREVKVITLKSKLVSDFRKDFQFYKVREINNYHHAHDAYLNAVVGTALIKKYPKLESEFVYGDYKVYDVRKMIAKSEQEIGKATAKYFFYSNIMNFFKTEITLANGEIRKRPLIETNGETGEIVWDKGRDFATVRKVLSMPQVNIVKKTEVQTGGFSKESILPKRNSDKLIARKKDWDPKKYGGFDSPTVAYSVLVVAKVEKGKSKKLKSVKELLGITIMERSSFEKNPIDFLEAKGYKEVKKDLIIKLPKYSLFELENGRKRMLASAGELQKGNELALPSKYVNFLYLASHYEKLKGSPEDNEQKQLFVEQHKHYLDEIIEQISEFSKRVILADANLDKVLSAYNKHRDKPIREQAENIIHLFTLTNLGAPAAFKYFDTTIDRKRYTSTKEVLDATLIHQSITGLYETRIDLSQLGGDGGGGSGGGEAAAKGGTLNLEDEYRLYETSAEPEVSPGSTWLSDFPQAWAETGGMGLAVRQAPLIIPLKATSTPVSIKQYPMSQEAKLGIKPHIQRLLDQGILVPCQSPWNTPLLPVKKPGTNDYRPVQDLREVNKRVEDIHPTVPNPYNLLSGLPPSHRWYTVLDLKDAFFCLRLHPTSQPLFAFEWRDPGMGISGQLTWTRLPQGFKNSPTLFNEALHRDLADFRIQHPDLILLQYVDDILLAATSELDCQQGTRALLLTLGNLGYRASAKKAQLCQKQVKYLGYLLKEGQRWLTEARKETVMGQPTPKTPRQLREFLGKAGFCRLFIPGFAEMAAPLYPLTKPGTLFNWGPDQQKAYQEIKQALLTAPALGLPDLTKPFELFVDEKQGYAKGVLTQKLGPWRRPVAYLSKKLDPVAAGWPPCLRMVAAIAVLRKDAGKLTMGQPLVILAPHAVEALVKQPPDRWLSNARMTHYQAMLLDTDRVQFGPVVALNPATLLPLPEEGAPHDCLEILAETHGTRPDLTDQPIPDADHTWYTDGSSFLQEGQRKAGAAVTTETEVIWARALPAGTSAQRAELIALTQALKMAEGKRLNVYTDSRYAFATAHIHGEIYRRRGWLTSEGREIKNKSEILALLKALFLPKRLSIIHCLGHQKGDSAEARGNRLADQAAREAAIKTPPDTSTLLAGKRTADGSEFEKRTADGSEFESPKKKAKVE

SEQ ID NO: 6893 - protein, 2096 aa, synthetic construct
MPAAKRVKLDGGDKKYSIGLDIGTNSVGWAVITDEYKVPSKKFKVLGNTDRHSIKKNLIGALLFDSGETAEATRLKRTARRRYTRRKNRICYLQEIFSNEMAKVDDSFFHRLEESFLVEEDKKHERHPIFGNIVDEVAYHEKYPTIYHLRKKLVDSTDKADLRLIYLALAHMIKFRGHFLIEGDLNPDNSDVDKLFIQLVQTYNQLFEENPINASGVDAKAILSARLSKSRRLENLIAQLPGEKKNGLFGNLIALSLGLTPNFKSNFDLAEDAKLQLSKDTYDDDLDNLLAQIGDQYADLFLAAKNLSDAILLSDILRVNTEITKAPLSASMIKRYDEHHQDLTLLKALVRQQLPEKYKEIFFDQSKNGYAGYIDGGASQEEFYKFIKPILEKMDGTEELLVKLNREDLLRKQRTFDNGSIPHQIHLGELHAILRRQEDFYPFLKDNREKIEKILTFRIPYYVGPLARGNSRFAWMTRKSEETITPWNFEEVVDKGASAQSFIERMTNFDKNLPNEKVLPKHSLLYEYFTVYNELTKVKYVTEGMRKPAFLSGEQKKAIVDLLFKTNRKVTVKQLKEDYFKKIECFDSVEISGVEDRFNASLGTYHDLLKIIKDKDFLDNEENEDILEDIVLTLTLFEDREMIEERLKTYAHLFDDKVMKQLKRRRYTGWGRLSRKLINGIRDKQSGKTILDFLKSDGFANRNFMQLIHDDSLTFKEDIQKAQVSGQGDSLHEHIANLAGSPAIKKGILQTVKVVDELVKVMGRHKPENIVIEMARENQTTQKGQKNSRERMKRIEEGIKELGSQILKEHPVENTQLQNEKLYLYYLQNGRDMYVDQELDINRLSDYDVDHIVPQSFLKDDSIDNKVLTRSDKARGKSDNVPSEEVVKKMKNYWRQLLNAKLITQRKFDNLTKAERGGLSELDKAGFIKRQLVETRQITKHVAQILDSRMNTKYDENDKLIREVKVITLKSKLVSDFRKDFQFYKVREINNYHHAHDAYLNAVVGTALIKKYPKLESEFVYGDYKVYDVRKMIAKSEQEIGKATAKYFFYSNIMNFFKTEITLANGEIRKRPLIETNGETGEIVWDKGRDFATVRKVLSMPQVNIVKKTEVQTGGFSKESILPKRNSDKLIARKKDWDPKKYGGFDSPTVAYSVLVVAKVEKGKSKKLKSVKELLGITIMERSSFEKNPIDFLEAKGYKEVKKDLIIKLPKYSLFELENGRKRMLASAGELQKGNELALPSKYVNFLYLASHYEKLKGSPEDNEQKQLFVEQHKHYLDEIIEQISEFSKRVILADANLDKVLSAYNKHRDKPIREQAENIIHLFTLTNLGAPAAFKYFDTTIDRKRYTSTKEVLDATLIHQSITGLYETRIDLSQLGGDGGGGSGGGEAAAKGGTLNIEDEYRLHEISTEPDVSPGSTWLSDFPQAWAETGGMGLAVRQAPLIIPLKATSTPVSIKQYPMSQEAKLGIKPHIQRLLDQGILVPCQSPWNTPLLPVKKPGTNDYRPVQGLREVNKRVEDIHPTVPNPYNLLSGLPTSHRWYTVLDLKDAFFCLRLHPTSQPLFASEWRDPGMGISGQLTWTRLPQGFKNSPTLFNEALHRGLADFRIQHPDLILLQYVDDLLLAATSELDCQQGTRALLKTLGNLGYRASAKKAQICQKQVKYLGYLLREGQRWLTEARKETVMGQPTPKTPRQLREFLGTAGFCRLWIPRFAEMAAPLYPLTKPGTLFNWGPDQQKAYHEIKQALLTAPALGLPDLTKPFELFVDEKQGYAKGVLTQKLGPWRRPVAYLSKKLDPVAAGWPPCLRMVAAIAVLTKDAGKLTMGQPLVILAPHAVEALVKQPPDRWLSNARMTHYQAMLLDTDRVQFGPVVALNPATLLPLPEEGAPHDCLEILAETHGTEPDLTDQPIPDADHTWYTDGSSFLQEGQRKAGAAVTTETEVIWARALPAGTSAQRAELIALTQALKMAEGKRLNVYTDSRYAFATAHIHGEIYKRRGWLTSEGREIKNKSEILALLKALFLPKRLSIIHCLGHQKGDSAEARGNRLADQAAREAAIKTPPDTSTLLAGKRTADGSEFEKRTADGSEFESPKKKAKVE

SEQ ID NO: 6894 - protein, 2087 aa, synthetic construct
MPAAKRVKLDGGDKKYSIGLDIGTNSVGWAVITDEYKVPSKKFKVLGNTDRHSIKKNLIGALLFDSGETAEATRLKRTARRRYTRRKNRICYLQEIFSNEMAKVDDSFFHRLEESFLVEEDKKHERHPIFGNIVDEVAYHEKYPTIYHLRKKLVDSTDKADLRLIYLALAHMIKFRGHFLIEGDLNPDNSDVDKLFIQLVQTYNQLFEENPINASGVDAKAILSARLSKSRRLENLIAQLPGEKKNGLFGNLIALSLGLTPNFKSNFDLAEDAKLQLSKDTYDDDLDNLLAQIGDQYADLFLAAKNLSDAILLSDILRVNTEITKAPLSASMIKRYDEHHQDLTLLKALVRQQLPEKYKEIFFDQSKNGYAGYIDGGASQEEFYKFIKPILEKMDGTEELLVKLNREDLLRKQRTFDNGSIPHQIHLGELHAILRRQEDFYPFLKDNREKIEKILTFRIPYYVGPLARGNSRFAWMTRKSEETITPWNFEEVVDKGASAQSFIERMTNFDKNLPNEKVLPKHSLLYEYFTVYNELTKVKYVTEGMRKPAFLSGEQKKAIVDLLFKTNRKVTVKQLKEDYFKKIECFDSVEISGVEDRFNASLGTYHDLLKIIKDKDFLDNEENEDILEDIVLTLTLFEDREMIEERLKTYAHLFDDKVMKQLKRRRYTGWGRLSRKLINGIRDKQSGKTILDFLKSDGFANRNFMQLIHDDSLTFKEDIQKAQVSGQGDSLHEHIANLAGSPAIKKGILQTVKVVDELVKVMGRHKPENIVIEMARENQTTQKGQKNSRERMKRIEEGIKELGSQILKEHPVENTQLQNEKLYLYYLQNGRDMYVDQELDINRLSDYDVDHIVPQSFLKDDSIDNKVLTRSDKARGKSDNVPSEEVVKKMKNYWRQLLNAKLITQRKFDNLTKAERGGLSELDKAGFIKRQLVETRQITKHVAQILDSRMNTKYDENDKLIREVKVITLKSKLVSDFRKDFQFYKVREINNYHHAHDAYLNAVVGTALIKKYPKLESEFVYGDYKVYDVRKMIAKSEQEIGKATAKYFFYSNIMNFFKTEITLANGEIRKRPLIETNGETGEIVWDKGRDFATVRKVLSMPQVNIVKKTEVQTGGFSKESILPKRNSDKLIARKKDWDPKKYGGFDSPTVAYSVLVVAKVEKGKSKKLKSVKELLGITIMERSSFEKNPIDFLEAKGYKEVKKDLIIKLPKYSLFELENGRKRMLASAGELQKGNELALPSKYVNFLYLASHYEKLKGSPEDNEQKQLFVEQHKHYLDEIIEQISEFSKRVILADANLDKVLSAYNKHRDKPIREQAENIIHLFTLTNLGAPAAFKYFDTTIDRKRYTSTKEVLDATLIHQSITGLYETRIDLSQLGGDGGGGSGGGEAAAKGGIPWLMKKPLQLTTLVPLQEYEERLLKQTMLTGSYKEKLQSLFLKYDALWQHWENQVGHRRIKPHHIATGTVNPRPQKQYPINPKAKASIQTVINDLLKQGVLIQQNSIMNTPVYPVPKPDGKWRMVLDYREVNKTIPLIAAQNQHSAGILSSIFRGKYKTTLDLSNGFWAHSITPESYWLTAFTWLGQQYCWTRLPQGFLNSPALFNADVVDLLKEVPNVQVYVDDIYISHDDPREHLEQLEKVFSLLLNAGYVVSLKKSEIAQHEVEFLGFNITKEGRGLTETFKQKLLNITPPRDLKQLQSILGLLNFARNFIPNFSELVKPLYNIIATAPGKYITWTTDNSQQLQNIISMLNSAENLEERNPEVRLIMKVNTSPSAGYIRFYNEFAKRPIMYLNYVYTKAEVKFTNTEKLLTTIHKGLIKALDLGMGQEILVYSPIVSMTKIQKTPLPERKALPIRWITWMSYLEDPRIQFHYDKTLPELQQVPTVTDDIIAKIKHPSEFSMVFYTDGSAIKHPNVNKSHNAGMGIAQVQFKPEFTVINTWSIPLGDHTAQLAEVAAVEFACKKALKIDGPVLIVTDSFYVAESVNKELPYWQSNGFFNNKKKPLKHVSKWKSIADCIQLKPDIIIIHEKGHQPTASTFHTEGNNLADKLATQGSYVVNAGKRTADGSEFEKRTADGSEFESPKKKAKVE

SEQ ID NO: 6895 - protein, 2176 aa, synthetic construct
MPAAKRVKLDGGDKKYSIGLDIGTNSVGWAVITDEYKVPSKKFKVLGNTDRHSIKKNLIGALLFDSGETAEATRLKRTARRRYTRRKNRICYLQEIFSNEMAKVDDSFFHRLEESFLVEEDKKHERHPIFGNIVDEVAYHEKYPTIYHLRKKLVDSTDKADLRLIYLALAHMIKFRGHFLIEGDLNPDNSDVDKLFIQLVQTYNQLFEENPINASGVDAKAILSARLSKSRRLENLIAQLPGEKKNGLFGNLIALSLGLTPNFKSNFDLAEDAKLQLSKDTYDDDLDNLLAQIGDQYADLFLAAKNLSDAILLSDILRVNTEITKAPLSASMIKRYDEHHQDLTLLKALVRQQLPEKYKEIFFDQSKNGYAGYIDGGASQEEFYKFIKPILEKMDGTEELLVKLNREDLLRKQRTFDNGSIPHQIHLGELHAILRRQEDFYPFLKDNREKIEKILTFRIPYYVGPLARGNSRFAWMTRKSEETITPWNFEEVVDKGASAQSFIERMTNFDKNLPNEKVLPKHSLLYEYFTVYNELTKVKYVTEGMRKPAFLSGEQKKAIVDLLFKTNRKVTVKQLKEDYFKKIECFDSVEISGVEDRFNASLGTYHDLLKIIKDKDFLDNEENEDILEDIVLTLTLFEDREMIEERLKTYAHLFDDKVMKQLKRRRYTGWGRLSRKLINGIRDKQSGKTILDFLKSDGFANRNFMQLIHDDSLTFKEDIQKAQVSGQGDSLHEHIANLAGSPAIKKGILQTVKVVDELVKVMGRHKPENIVIEMARENQTTQKGQKNSRERMKRIEEGIKELGSQILKEHPVENTQLQNEKLYLYYLQNGRDMYVDQELDINRLSDYDVDHIVPQSFLKDDSIDNKVLTRSDKARGKSDNVPSEEVVKKMKNYWRQLLNAKLITQRKFDNLTKAERGGLSELDKAGFIKRQLVETRQITKHVAQILDSRMNTKYDENDKLIREVKVITLKSKLVSDFRKDFQFYKVREINNYHHAHDAYLNAVVGTALIKKYPKLESEFVYGDYKVYDVRKMIAKSEQEIGKATAKYFFYSNIMNFFKTEITLANGEIRKRPLIETNGETGEIVWDKGRDFATVRKVLSMPQVNIVKKTEVQTGGFSKESILPKRNSDKLIARKKDWDPKKYGGFDSPTVAYSVLVVAKVEKGKSKKLKSVKELLGITIMERSSFEKNPIDFLEAKGYKEVKKDLIIKLPKYSLFELENGRKRMLASAGELQKGNELALPSKYVNFLYLASHYEKLKGSPEDNEQKQLFVEQHKHYLDEIIEQISEFSKRVILADANLDKVLSAYNKHRDKPIREQAENIIHLFTLTNLGAPAAFKYFDTTIDRKRYTSTKEVLDATLIHQSITGLYETRIDLSQLGGDGGGGSGGGEAAAKGGMDPLQLLQPLEAEIKGTKLKAHWNSGATITCVPQAFLEEEVPIKNIWIKTIHGEKEQPVYYLTFKIQGRKVEAEVISSPYDYILVSPSDIPWLMKKPLQLTTLVPLQEYEERLLKQTMLTGSYKEKLQSLFLKYDALWQHWENQVGHRRIKPHHIATGTVNPRPQKQYPINPKAKASIQTVINDLLKQGVLIQQNSIMNTPVYPVPKPDGKWRMVLDYREVNKTIPLIAAQNQHSAGILSSIFRGKYKTTLDLSNGFWAHSITPESYWLTAFTWLGQQYCWTRLPQGFLNSPALFNADVVDLLKEVPNVQVYVDDIYISHDDPREHLEQLEKVFSLLLNAGYVVSLKKSEIAQHEVEFLGFNITKEGRGLTETFKQKLLNITPPRDLKQLQSILGLLNFARNFIPNFSELVKPLYNIIATAPGKYITWTTDNSQQLQNIISMLNSAENLEERNPEVRLIMKVNTSPSAGYIRFYNEFAKRPIMYLNYVYTKAEVKFTNTEKLLTTIHKGLIKALDLGMGQEILVYSPIVSMTKIQKTPLPERKALPIRWITWMSYLEDPRIQFHYDKTLPELQQVPTVTDDIIAKIKHPSEFSMVFYTDGSAIKHPNVNKSHNAGMGIAQVQFKPEFTVINTWSIPLGDHTAQLAEVAAVEFACKKALKIDGPVLIVTDSFYVAESVNKELPYWQSNGFFNNKKKPLKHVSKWKSIADCIQLKPDIIIIHEKGHQPTASTFHTEGNNLADKLATQGSYVVNAGKRTADGSEFEKRTADGSEFESPKKKAKVE

SEQ ID NO: 6896 - protein, 2094 aa, synthetic construct
MPAAKRVKLDGGDKKYSIGLDIGTNSVGWAVITDEYKVPSKKFKVLGNTDRHSIKKNLIGALLFDSGETAEATRLKRTARRRYTRRKNRICYLQEIFSNEMAKVDDSFFHRLEESFLVEEDKKHERHPIFGNIVDEVAYHEKYPTIYHLRKKLVDSTDKADLRLIYLALAHMIKFRGHFLIEGDLNPDNSDVDKLFIQLVQTYNQLFEENPINASGVDAKAILSARLSKSRRLENLIAQLPGEKKNGLFGNLIALSLGLTPNFKSNFDLAEDAKLQLSKDTYDDDLDNLLAQIGDQYADLFLAAKNLSDAILLSDILRVNTEITKAPLSASMIKRYDEHHQDLTLLKALVRQQLPEKYKEIFFDQSKNGYAGYIDGGASQEEFYKFIKPILEKMDGTEELLVKLNREDLLRKQRTFDNGSIPHQIHLGELHAILRRQEDFYPFLKDNREKIEKILTFRIPYYVGPLARGNSRFAWMTRKSEETITPWNFEEVVDKGASAQSFIERMTNFDKNLPNEKVLPKHSLLYEYFTVYNELTKVKYVTEGMRKPAFLSGEQKKAIVDLLFKTNRKVTVKQLKEDYFKKIECFDSVEISGVEDRFNASLGTYHDLLKIIKDKDFLDNEENEDILEDIVLTLTLFEDREMIEERLKTYAHLFDDKVMKQLKRRRYTGWGRLSRKLINGIRDKQSGKTILDFLKSDGFANRNFMQLIHDDSLTFKEDIQKAQVSGQGDSLHEHIANLAGSPAIKKGILQTVKVVDELVKVMGRHKPENIVIEMARENQTTQKGQKNSRERMKRIEEGIKELGSQILKEHPVENTQLQNEKLYLYYLQNGRDMYVDQELDINRLSDYDVDHIVPQSFLKDDSIDNKVLTRSDKARGKSDNVPSEEVVKKMKNYWRQLLNAKLITQRKFDNLTKAERGGLSELDKAGFIKRQLVETRQITKHVAQILDSRMNTKYDENDKLIREVKVITLKSKLVSDFRKDFQFYKVREINNYHHAHDAYLNAVVGTALIKKYPKLESEFVYGDYKVYDVRKMIAKSEQEIGKATAKYFFYSNIMNFFKTEITLANGEIRKRPLIETNGETGEIVWDKGRDFATVRKVLSMPQVNIVKKTEVQTGGFSKESILPKRNSDKLIARKKDWDPKKYGGFDSPTVAYSVLVVAKVEKGKSKKLKSVKELLGITIMERSSFEKNPIDFLEAKGYKEVKKDLIIKLPKYSLFELENGRKRMLASAGELQKGNELALPSKYVNFLYLASHYEKLKGSPEDNEQKQLFVEQHKHYLDEIIEQISEFSKRVILADANLDKVLSAYNKHRDKPIREQAENIIHLFTLTNLGAPAAFKYFDTTIDRKRYTSTKEVLDATLIHQSITGLYETRIDLSQLGGDGGGGSGGGEAAAKGGVLNLEEEYRLHEKPVPSSIDPSWLQLFPTVWAERAGMGLANQVPPVVVELRSGASPVAVRQYPMSKEAREGIRPHIQRFLDLGVLVPCQSPWNTPLLPVKKPGTNDYRPVQDLREINKRVQDIHPTVPNPYNLLSSLPPSHTWYSVLDLKDAFFCLKLHPNSQPLFAFEWRDPEKGNTGQLTWTRLPQGFKNSPTLFNEALHRDLAPFRALNPQVVLLQYVDDLLVAAPTYRDCKEGTQKLLQELSKLGYRVSAKKAQLCQKEVTYLGYLLKEGKRWLTPARKATVMKIPPPTTPRQVREFLGKAGFCRLFIPGFASLAAPLYPLTKPSIPFIWTEEHQKAFDRIKEALLSAPALALPDLTKPFTLYVDERAGVARGVLTQTLGPWRRPVAYLSKKLDPVASGWPTCLKAVAAVALLLKDADKLTLGQNVTVIASHSLESIVRQPPDRWMTNARMTHYQSLLLNERVSFAPPAVLNPATLLPVESEATPVHRCSEILAEETGTRRDLKDQPLPGVPAWYTDGSSFIAEGKRRAGAAIVDGKRTVWASSLPEGTSAQKAELVALTQALRLAEGKDINIYTDSRYAFATAHIHGAIYKQRGWLTSAGKDIKNKEEILALLEAIHLPKRVAIIHCPGHQKGNDPVATGNRRADEAAKQAALSTRVLAETTKPAGKRTADGSEFEKRTADGSEFESPKKKAKVE

SEQ ID NO: 6897 - protein, 2096 aa, synthetic construct
MPAAKRVKLDGGDKKYSIGLDIGTNSVGWAVITDEYKVPSKKFKVLGNTDRHSIKKNLIGALLFDSGETAEATRLKRTARRRYTRRKNRICYLQEIFSNEMAKVDDSFFHRLEESFLVEEDKKHERHPIFGNIVDEVAYHEKYPTIYHLRKKLVDSTDKADLRLIYLALAHMIKFRGHFLIEGDLNPDNSDVDKLFIQLVQTYNQLFEENPINASGVDAKAILSARLSKSRRLENLIAQLPGEKKNGLFGNLIALSLGLTPNFKSNFDLAEDAKLQLSKDTYDDDLDNLLAQIGDQYADLFLAAKNLSDAILLSDILRVNTEITKAPLSASMIKRYDEHHQDLTLLKALVRQQLPEKYKEIFFDQSKNGYAGYIDGGASQEEFYKFIKPILEKMDGTEELLVKLNREDLLRKQRTFDNGSIPHQIHLGELHAILRRQEDFYPFLKDNREKIEKILTFRIPYYVGPLARGNSRFAWMTRKSEETITPWNFEEVVDKGASAQSFIERMTNFDKNLPNEKVLPKHSLLYEYFTVYNELTKVKYVTEGMRKPAFLSGEQKKAIVDLLFKTNRKVTVKQLKEDYFKKIECFDSVEISGVEDRFNASLGTYHDLLKIIKDKDFLDNEENEDILEDIVLTLTLFEDREMIEERLKTYAHLFDDKVMKQLKRRRYTGWGRLSRKLINGIRDKQSGKTILDFLKSDGFANRNFMQLIHDDSLTFKEDIQKAQVSGQGDSLHEHIANLAGSPAIKKGILQTVKVVDELVKVMGRHKPENIVIEMARENQTTQKGQKNSRERMKRIEEGIKELGSQILKEHPVENTQLQNEKLYLYYLQNGRDMYVDQELDINRLSDYDVDHIVPQSFLKDDSIDNKVLTRSDKARGKSDNVPSEEVVKKMKNYWRQLLNAKLITQRKFDNLTKAERGGLSELDKAGFIKRQLVETRQITKHVAQILDSRMNTKYDENDKLIREVKVITLKSKLVSDFRKDFQFYKVREINNYHHAHDAYLNAVVGTALIKKYPKLESEFVYGDYKVYDVRKMIAKSEQEIGKATAKYFFYSNIMNFFKTEITLANGEIRKRPLIETNGETGEIVWDKGRDFATVRKVLSMPQVNIVKKTEVQTGGFSKESILPKRNSDKLIARKKDWDPKKYGGFDSPTVAYSVLVVAKVEKGKSKKLKSVKELLGITIMERSSFEKNPIDFLEAKGYKEVKKDLIIKLPKYSLFELENGRKRMLASAGELQKGNELALPSKYVNFLYLASHYEKLKGSPEDNEQKQLFVEQHKHYLDEIIEQISEFSKRVILADANLDKVLSAYNKHRDKPIREQAENIIHLFTLTNLGAPAAFKYFDTTIDRKRYTSTKEVLDATLIHQSITGLYETRIDLSQLGGDGGGGSGGGEAAAKGGTLNIEDEYRLHETSKEPDVPLGSTWLSDFPQAWAETGGMGLAVRQAPLIIPLKATSTPVSIKQYPMSQEARLGIKPHIQRLLDQGILVPCQSPWNTPLLPVKKPGTNDYRPVQDLREVNKRVEDIHPTVPNPYNLLSGLPPSHQWYTVLDLKDAFFCLRLHPTSQPLFAFEWRDPEMGISGQLTWTRLPQGFKNSPTLFNEALHRDLADFRIQHPDLILLQYVDDLLLAATSEQDCQRGTRALLQTLGNLGYRASAKKAQICQKQVKYLGYLLKEGQRWLTEARKETVMGQPTPKTPRQLREFLGTAGFCRLWIPGFAEMAAPLYPLTKPGTLFNWGPDQQKAYQEIKQALLTAPALGLPDLTKPFELFVDEKQGYAKGVLTQKLGPWRRPVAYLSKKLDPVAAGWPPCLRMVAAIAVLTKDAGKLTMGQPLVILAPHAVEALVKQPPDRWLSNARMTHYQAMLLDTDRVQFGPVVALNPATLLPLPEKEAPHDCLEILAETHGTRPDLTDQPIPDADYTWYTDGSSFLQEGQRRAGAAVTTETEVIWARALPAGTSAQRAELIALTQALKMAEGKKLNVYTDSRYAFATAHVHGEIYRRRGWLTSEGREIKNKNEILALLKALFLPKRLSIIHCPGHQKGNSAEARGNRMADQAAREAAMKAVLETSTLLAGKRTADGSEFEKRTADGSEFESPKKKAKVE

SEQ ID NO: 6898 - protein, 2098 aa, synthetic construct
MPAAKRVKLDGGDKKYSIGLDIGTNSVGWAVITDEYKVPSKKFKVLGNTDRHSIKKNLIGALLFDSGETAEATRLKRTARRRYTRRKNRICYLQEIFSNEMAKVDDSFFHRLEESFLVEEDKKHERHPIFGNIVDEVAYHEKYPTIYHLRKKLVDSTDKADLRLIYLALAHMIKFRGHFLIEGDLNPDNSDVDKLFIQLVQTYNQLFEENPINASGVDAKAILSARLSKSRRLENLIAQLPGEKKNGLFGNLIALSLGLTPNFKSNFDLAEDAKLQLSKDTYDDDLDNLLAQIGDQYADLFLAAKNLSDAILLSDILRVNTEITKAPLSASMIKRYDEHHQDLTLLKALVRQQLPEKYKEIFFDQSKNGYAGYIDGGASQEEFYKFIKPILEKMDGTEELLVKLNREDLLRKQRTFDNGSIPHQIHLGELHAILRRQEDFYPFLKDNREKIEKILTFRIPYYVGPLARGNSRFAWMTRKSEETITPWNFEEVVDKGASAQSFIERMTNFDKNLPNEKVLPKHSLLYEYFTVYNELTKVKYVTEGMRKPAFLSGEQKKAIVDLLFKTNRKVTVKQLKEDYFKKIECFDSVEISGVEDRFNASLGTYHDLLKIIKDKDFLDNEENEDILEDIVLTLTLFEDREMIEERLKTYAHLFDDKVMKQLKRRRYTGWGRLSRKLINGIRDKQSGKTILDFLKSDGFANRNFMQLIHDDSLTFKEDIQKAQVSGQGDSLHEHIANLAGSPAIKKGILQTVKVVDELVKVMGRHKPENIVIEMARENQTTQKGQKNSRERMKRIEEGIKELGSQILKEHPVENTQLQNEKLYLYYLQNGRDMYVDQELDINRLSDYDVDHIVPQSFLKDDSIDNKVLTRSDKARGKSDNVPSEEVVKKMKNYWRQLLNAKLITQRKFDNLTKAERGGLSELDKAGFIKRQLVETRQITKHVAQILDSRMNTKYDENDKLIREVKVITLKSKLVSDFRKDFQFYKVREINNYHHAHDAYLNAVVGTALIKKYPKLESEFVYGDYKVYDVRKMIAKSEQEIGKATAKYFFYSNIMNFFKTEITLANGEIRKRPLIETNGETGEIVWDKGRDFATVRKVLSMPQVNIVKKTEVQTGGFSKESILPKRNSDKLIARKKDWDPKKYGGFDSPTVAYSVLVVAKVEKGKSKKLKSVKELLGITIMERSSFEKNPIDFLEAKGYKEVKKDLIIKLPKYSLFELENGRKRMLASAGELQKGNELALPSKYVNFLYLASHYEKLKGSPEDNEQKQLFVEQHKHYLDEIIEQISEFSKRVILADANLDKVLSAYNKHRDKPIREQAENIIHLFTLTNLGAPAAFKYFDTTIDRKRYTSTKEVLDATLIHQSITGLYETRIDLSQLGGDGGGGSEAAAKGGGGGTAPLEEEYRLFLEAPIQNVTLLEQWKREIPKVWAEINPPGLASTQAPIHVQLLSTALPVRVRQYPITLEAKRSLRETIRKFRAAGILRPVHSPWNTPLLPVRKSGTSEYRMVQDLREVNKRVETIHPTVPNPYTLLSLLPPDRIWYSVLDLKDAFFCIPLAPESQLIFAFEWADAEEGESGQLTWTRLPQGFKNSPTLFNEALNRDLQGFRLDHPSVSLLQYVDDLLIAADTQAACLSATRDLLMTLAELGYRVSGKKAQLCQEEVTYLGFKIHKGSRSLSNSRTQAILQIPVPKTKRQVREFLGTIGYCRLWIPGFAELAQPLYAATRPGNDPLVWGEKEEEAFQSLKLALTQPPALALPSLDKPFQLFVEETSGAAKGVLTQALGPWKRPVAYLSKRLDPVAAGWPRCLRAIAAAALLTREASKLTFGQDIEITSSHNLESLLRSPPDKWLTNARITQYQVLLLDPPRVRFKQTAALNPATLLPETDDTLPIHHCLDTLDSLTSTRPDLTDQPLAQAEATLFTDGSSYIRDGKRYAGAAVVTLDSVIWAEPLPIGTSAQKAELIALTKALEWSKDKSVNIYTDSRYAFATLHVHGMIYRERGWLTAGGKAIKNAPEILALLTAVWLPKRVAVMHCKGHQKDDAPTSTGNRRADEVAREVAIRPLSTQATISAGKRTADGSEFEKRTADGSEFESPKKKAKVE

SEQ ID NO: 6899 - protein, 2102 aa, synthetic construct
MPAAKRVKLDGGDKKYSIGLDIGTNSVGWAVITDEYKVPSKKFKVLGNTDRHSIKKNLIGALLFDSGETAEATRLKRTARRRYTRRKNRICYLQEIFSNEMAKVDDSFFHRLEESFLVEEDKKHERHPIFGNIVDEVAYHEKYPTIYHLRKKLVDSTDKADLRLIYLALAHMIKFRGHFLIEGDLNPDNSDVDKLFIQLVQTYNQLFEENPINASGVDAKAILSARLSKSRRLENLIAQLPGEKKNGLFGNLIALSLGLTPNFKSNFDLAEDAKLQLSKDTYDDDLDNLLAQIGDQYADLFLAAKNLSDAILLSDILRVNTEITKAPLSASMIKRYDEHHQDLTLLKALVRQQLPEKYKEIFFDQSKNGYAGYIDGGASQEEFYKFIKPILEKMDGTEELLVKLNREDLLRKQRTFDNGSIPHQIHLGELHAILRRQEDFYPFLKDNREKIEKILTFRIPYYVGPLARGNSRFAWMTRKSEETITPWNFEEVVDKGASAQSFIERMTNFDKNLPNEKVLPKHSLLYEYFTVYNELTKVKYVTEGMRKPAFLSGEQKKAIVDLLFKTNRKVTVKQLKEDYFKKIECFDSVEISGVEDRFNASLGTYHDLLKIIKDKDFLDNEENEDILEDIVLTLTLFEDREMIEERLKTYAHLFDDKVMKQLKRRRYTGWGRLSRKLINGIRDKQSGKTILDFLKSDGFANRNFMQLIHDDSLTFKEDIQKAQVSGQGDSLHEHIANLAGSPAIKKGILQTVKVVDELVKVMGRHKPENIVIEMARENQTTQKGQKNSRERMKRIEEGIKELGSQILKEHPVENTQLQNEKLYLYYLQNGRDMYVDQELDINRLSDYDVDHIVPQSFLKDDSIDNKVLTRSDKARGKSDNVPSEEVVKKMKNYWRQLLNAKLITQRKFDNLTKAERGGLSELDKAGFIKRQLVETRQITKHVAQILDSRMNTKYDENDKLIREVKVITLKSKLVSDFRKDFQFYKVREINNYHHAHDAYLNAVVGTALIKKYPKLESEFVYGDYKVYDVRKMIAKSEQEIGKATAKYFFYSNIMNFFKTEITLANGEIRKRPLIETNGETGEIVWDKGRDFATVRKVLSMPQVNIVKKTEVQTGGFSKESILPKRNSDKLIARKKDWDPKKYGGFDSPTVAYSVLVVAKVEKGKSKKLKSVKELLGITIMERSSFEKNPIDFLEAKGYKEVKKDLIIKLPKYSLFELENGRKRMLASAGELQKGNELALPSKYVNFLYLASHYEKLKGSPEDNEQKQLFVEQHKHYLDEIIEQISEFSKRVILADANLDKVLSAYNKHRDKPIREQAENIIHLFTLTNLGAPAAFKYFDTTIDRKRYTSTKEVLDATLIHQSITGLYETRIDLSQLGGDGGGGSEAAAKGGGGGTVSLQDEHRLFDIPVTTSLPDVWLQDFPQAWAETGGLGRAKCQAPIIIDLKPTAVPVSIKQYPMSLEAHMGIRQHIIKFLELGVLRPCRSPWNTPLLPVKKPGTQDYRPVQDLREINKRTVDIHPTVPNPYNLLSTLKPDYSWYTVLDLKDAFFCLPLAPQSQELFAFEWKDPERGISGQLTWTRLPQGFKNSPTLFNEALHRDLTDFRTQHPEVTLLQYVDDLLLAAPTKKACTQGTRHLLQELGEKGYRASAKKAQICQTKVTYLGYILSEGKRWLTPGRIETVARIPPPRNPREVREFLGTAGFCRLWIPGFAELAAPLYALTKPSTPFTWQTEHQLAFEALKKALLSAPALGLPDTSKPFTLFLDERQGIAKGVLTQKLGPWKRPVAYLSKKLDPVAAGWPPCLRIMAATAMLVKDSAKLTLGQPLTVITPHTLEAIVRQPPDRWITNARLTHYQALLLDTDRVQFGPPVTLNPATLLPVPENQPSPHDCRQVLAETHGTREDLKDQELPDADHTWYTDGSSYLDSGTRRAGAAVVDGHNTIWAQSLPPGTSAQKAELIALTKALELSKGKKANIYTDSRYAFATAHTHGSIYERRGWLTSEGKEIKNKAEIIALLKALFLPQEVAIIHCPGHQKGQDPVAVGNRQADRVARQAAMAEVLTLATEPDNTSHITAGKRTADGSEFEKRTADGSEFESPKKKAKVE

SEQ ID NO: 6900 - protein, 2087 aa, synthetic construct
MPAAKRVKLDGGDKKYSIGLDIGTNSVGWAVITDEYKVPSKKFKVLGNTDRHSIKKNLIGALLFDSGETAEATRLKRTARRRYTRRKNRICYLQEIFSNEMAKVDDSFFHRLEESFLVEEDKKHERHPIFGNIVDEVAYHEKYPTIYHLRKKLVDSTDKADLRLIYLALAHMIKFRGHFLIEGDLNPDNSDVDKLFIQLVQTYNQLFEENPINASGVDAKAILSARLSKSRRLENLIAQLPGEKKNGLFGNLIALSLGLTPNFKSNFDLAEDAKLQLSKDTYDDDLDNLLAQIGDQYADLFLAAKNLSDAILLSDILRVNTEITKAPLSASMIKRYDEHHQDLTLLKALVRQQLPEKYKEIFFDQSKNGYAGYIDGGASQEEFYKFIKPILEKMDGTEELLVKLNREDLLRKQRTFDNGSIPHQIHLGELHAILRRQEDFYPFLKDNREKIEKILTFRIPYYVGPLARGNSRFAWMTRKSEETITPWNFEEVVDKGASAQSFIERMTNFDKNLPNEKVLPKHSLLYEYFTVYNELTKVKYVTEGMRKPAFLSGEQKKAIVDLLFKTNRKVTVKQLKEDYFKKIECFDSVEISGVEDRFNASLGTYHDLLKIIKDKDFLDNEENEDILEDIVLTLTLFEDREMIEERLKTYAHLFDDKVMKQLKRRRYTGWGRLSRKLINGIRDKQSGKTILDFLKSDGFANRNFMQLIHDDSLTFKEDIQKAQVSGQGDSLHEHIANLAGSPAIKKGILQTVKVVDELVKVMGRHKPENIVIEMARENQTTQKGQKNSRERMKRIEEGIKELGSQILKEHPVENTQLQNEKLYLYYLQNGRDMYVDQELDINRLSDYDVDHIVPQSFLKDDSIDNKVLTRSDKARGKSDNVPSEEVVKKMKNYWRQLLNAKLITQRKFDNLTKAERGGLSELDKAGFIKRQLVETRQITKHVAQILDSRMNTKYDENDKLIREVKVITLKSKLVSDFRKDFQFYKVREINNYHHAHDAYLNAVVGTALIKKYPKLESEFVYGDYKVYDVRKMIAKSEQEIGKATAKYFFYSNIMNFFKTEITLANGEIRKRPLIETNGETGEIVWDKGRDFATVRKVLSMPQVNIVKKTEVQTGGFSKESILPKRNSDKLIARKKDWDPKKYGGFDSPTVAYSVLVVAKVEKGKSKKLKSVKELLGITIMERSSFEKNPIDFLEAKGYKEVKKDLIIKLPKYSLFELENGRKRMLASAGELQKGNELALPSKYVNFLYLASHYEKLKGSPEDNEQKQLFVEQHKHYLDEIIEQISEFSKRVILADANLDKVLSAYNKHRDKPIREQAENIIHLFTLTNLGAPAAFKYFDTTIDRKRYTSTKEVLDATLIHQSITGLYETRIDLSQLGGDGGGGSEAAAKGGGGGVPWILKKPLELTIKLDLEEQQGTLLNNSILSKKGKEELKQLFEKYSALWQSWENQVGHRRIRPHKIATGTVKPTPQKQYHINPKAKPDIQIVINDLLKQGVLIQKESTMNTPVYPVPKPNGRWRMVLDYRAVNKVTPLIAVQNQHSYGILGSLFKGRYKTTIDLSNGFWAHPIVPEDYWITAFTWQGKQYCWTVLPQGFLNSPGLFTGDVVDLLQGIPNVEVYVDDVYISHDSEKEHLEYLDILFNRLKEAGYIISLKKSNIANSIVDFLGFQITNEGRGLTDTFKEKLENITAPTTLKQLQSILGLLNFARNFIPDFTELIAPLYALIPKSTKNYVPWQIEHSTTLETLITKLNGAEYLQGRKGDKTLIMKVNASYTTGYIRYYNEGEKKPISYVSIVFSKTELKFTELEKLLTTVHKGLLKALDLSMGQNIHVYSPIVSMQNIQKTPQTAKKALASRWLSWLSYLEDPRIRFFYDPQMPALKDLPAVDTGKDNKKHPSNFQHIFYTDGSAITSPTKEGHLNAGMGIVYFINKDGNLQKQQEWSISLGNHTAQFAEIAAFEFALKKCLPLGGNILVVTDSNYVAKAYNEELDVWASNGFVNNRKKPLKHISKWKSVADLKRLRPDVVVTHEPGHQKLDSSPHAYGNNLADQLATQASFKVHAGKRTADGSEFEKRTADGSEFESPKKKAKVE

SEQ ID NO: 6901 - protein, 2096 aa, synthetic construct
MPAAKRVKLDGGDKKYSIGLDIGTNSVGWAVITDEYKVPSKKFKVLGNTDRHSIKKNLIGALLFDSGETAEATRLKRTARRRYTRRKNRICYLQEIFSNEMAKVDDSFFHRLEESFLVEEDKKHERHPIFGNIVDEVAYHEKYPTIYHLRKKLVDSTDKADLRLIYLALAHMIKFRGHFLIEGDLNPDNSDVDKLFIQLVQTYNQLFEENPINASGVDAKAILSARLSKSRRLENLIAQLPGEKKNGLFGNLIALSLGLTPNFKSNFDLAEDAKLQLSKDTYDDDLDNLLAQIGDQYADLFLAAKNLSDAILLSDILRVNTEITKAPLSASMIKRYDEHHQDLTLLKALVRQQLPEKYKEIFFDQSKNGYAGYIDGGASQEEFYKFIKPILEKMDGTEELLVKLNREDLLRKQRTFDNGSIPHQIHLGELHAILRRQEDFYPFLKDNREKIEKILTFRIPYYVGPLARGNSRFAWMTRKSEETITPWNFEEVVDKGASAQSFIERMTNFDKNLPNEKVLPKHSLLYEYFTVYNELTKVKYVTEGMRKPAFLSGEQKKAIVDLLFKTNRKVTVKQLKEDYFKKIECFDSVEISGVEDRFNASLGTYHDLLKIIKDKDFLDNEENEDILEDIVLTLTLFEDREMIEERLKTYAHLFDDKVMKQLKRRRYTGWGRLSRKLINGIRDKQSGKTILDFLKSDGFANRNFMQLIHDDSLTFKEDIQKAQVSGQGDSLHEHIANLAGSPAIKKGILQTVKVVDELVKVMGRHKPENIVIEMARENQTTQKGQKNSRERMKRIEEGIKELGSQILKEHPVENTQLQNEKLYLYYLQNGRDMYVDQELDINRLSDYDVDHIVPQSFLKDDSIDNKVLTRSDKARGKSDNVPSEEVVKKMKNYWRQLLNAKLITQRKFDNLTKAERGGLSELDKAGFIKRQLVETRQITKHVAQILDSRMNTKYDENDKLIREVKVITLKSKLVSDFRKDFQFYKVREINNYHHAHDAYLNAVVGTALIKKYPKLESEFVYGDYKVYDVRKMIAKSEQEIGKATAKYFFYSNIMNFFKTEITLANGEIRKRPLIETNGETGEIVWDKGRDFATVRKVLSMPQVNIVKKTEVQTGGFSKESILPKRNSDKLIARKKDWDPKKYGGFDSPTVAYSVLVVAKVEKGKSKKLKSVKELLGITIMERSSFEKNPIDFLEAKGYKEVKKDLIIKLPKYSLFELENGRKRMLASAGELQKGNELALPSKYVNFLYLASHYEKLKGSPEDNEQKQLFVEQHKHYLDEIIEQISEFSKRVILADANLDKVLSAYNKHRDKPIREQAENIIHLFTLTNLGAPAAFKYFDTTIDRKRYTSTKEVLDATLIHQSITGLYETRIDLSQLGGDGGGGSEAAAKGGGGGTLNLEDEYRLYETSAEPEVSPGSTWLSDFPQAWAETGGMGLAVRQAPLIIPLKATSTPVSIKQYPMSQEAKLGIKPHIQRLLDQGILVPCQSPWNTPLLPVKKPGTNDYRPVQDLREVNKRVEDIHPTVPNPYNLLSGLPPSHRWYTVLDLKDAFFCLRLHPTSQPLFAFEWRDPGMGISGQLTWTRLPQGFKNSPTLFNEALHRDLADFRIQHPDLILLQYVDDILLAATSELDCQQGTRALLLTLGNLGYRASAKKAQLCQKQVKYLGYLLKEGQRWLTEARKETVMGQPTPKTPRQLREFLGTAGFCRLWIPGFAEMAAPLYPLTKPGTLFNWGPDQQKAYQEIKQALLTAPALGLPDLTKPFELFVDEKQGYAKGVLTQKLGPWRRPVAYLSKKLDPVAAGWPPCLRMVAAIAVLRKDAGKLTMGQPLVILAPHAVEALVKQPPDRWLSNARMTHYQAMLLDTDRVQFGPVVALNPATLLPLPEEGAPHDCLEILAETHGTRPDLTDQPIPDADHTWYTDGSSFLQEGQRKAGAAVTTETEVIWARALPAGTSAQRAELIALTQALKMAEGKRLNVYTDSRYAFATAHIHGEIYRRRGWLTSEGREIKNKSEILALLKALFLPKRLSIIHCLGHQKGDSAEARGNRLADQAAREAAIKTPPDTSTLLAGKRTADGSEFEKRTADGSEFESPKKKAKVE

SEQ ID NO: 6902 - protein, 2096 aa, synthetic construct
MPAAKRVKLDGGDKKYSIGLDIGTNSVGWAVITDEYKVPSKKFKVLGNTDRHSIKKNLIGALLFDSGETAEATRLKRTARRRYTRRKNRICYLQEIFSNEMAKVDDSFFHRLEESFLVEEDKKHERHPIFGNIVDEVAYHEKYPTIYHLRKKLVDSTDKADLRLIYLALAHMIKFRGHFLIEGDLNPDNSDVDKLFIQLVQTYNQLFEENPINASGVDAKAILSARLSKSRRLENLIAQLPGEKKNGLFGNLIALSLGLTPNFKSNFDLAEDAKLQLSKDTYDDDLDNLLAQIGDQYADLFLAAKNLSDAILLSDILRVNTEITKAPLSASMIKRYDEHHQDLTLLKALVRQQLPEKYKEIFFDQSKNGYAGYIDGGASQEEFYKFIKPILEKMDGTEELLVKLNREDLLRKQRTFDNGSIPHQIHLGELHAILRRQEDFYPFLKDNREKIEKILTFRIPYYVGPLARGNSRFAWMTRKSEETITPWNFEEVVDKGASAQSFIERMTNFDKNLPNEKVLPKHSLLYEYFTVYNELTKVKYVTEGMRKPAFLSGEQKKAIVDLLFKTNRKVTVKQLKEDYFKKIECFDSVEISGVEDRFNASLGTYHDLLKIIKDKDFLDNEENEDILEDIVLTLTLFEDREMIEERLKTYAHLFDDKVMKQLKRRRYTGWGRLSRKLINGIRDKQSGKTILDFLKSDGFANRNFMQLIHDDSLTFKEDIQKAQVSGQGDSLHEHIANLAGSPAIKKGILQTVKVVDELVKVMGRHKPENIVIEMARENQTTQKGQKNSRERMKRIEEGIKELGSQILKEHPVENTQLQNEKLYLYYLQNGRDMYVDQELDINRLSDYDVDHIVPQSFLKDDSIDNKVLTRSDKARGKSDNVPSEEVVKKMKNYWRQLLNAKLITQRKFDNLTKAERGGLSELDKAGFIKRQLVETRQITKHVAQILDSRMNTKYDENDKLIREVKVITLKSKLVSDFRKDFQFYKVREINNYHHAHDAYLNAVVGTALIKKYPKLESEFVYGDYKVYDVRKMIAKSEQEIGKATAKYFFYSNIMNFFKTEITLANGEIRKRPLIETNGETGEIVWDKGRDFATVRKVLSMPQVNIVKKTEVQTGGFSKESILPKRNSDKLIARKKDWDPKKYGGFDSPTVAYSVLVVAKVEKGKSKKLKSVKELLGITIMERSSFEKNPIDFLEAKGYKEVKKDLIIKLPKYSLFELENGRKRMLASAGELQKGNELALPSKYVNFLYLASHYEKLKGSPEDNEQKQLFVEQHKHYLDEIIEQISEFSKRVILADANLDKVLSAYNKHRDKPIREQAENIIHLFTLTNLGAPAAFKYFDTTIDRKRYTSTKEVLDATLIHQSITGLYETRIDLSQLGGDGGGGSEAAAKGGGGGTLNIEDEYRLHETSKGPDVPLGSTWLSDFPQAWAETGGMGLAVRQAPLIIPLKATSTPVSIKQYPMSQEARLGIKPHIQRLLDQGILVPCQSPWNTPLLPVKKPGTNDYRPVQDLREVNKRVEDIHPTVPNPYNLLSGLPPSHQWYTVLDLKDAFFCLRLHPTSQSLFAFEWRDPEMGISGQLTWTRLPQGFKNSPTLFNEALHRDLADFRIQHPDLILLQYVDDLLLAATSELDCQQGTRALLQTLGDLGYRASAKKAQICQKQVKYLGYLLKEGQRWLTEARKETVMGQPTPKTPRQLREFLGTAGFCRLWIPGFAEMAAPLYPLTKPGTLFEWGPDQQKAYQEIKQALLTAPALGLPDLTKPFELFVDEKQGYAKGVLTQKLGPWRRPVAYLSKKLDPVAAGWPPCLRMVAAIAVLTKDAGKLTMGQPLVILAPHAVEALVKQPPDRWLSNARMTHYQALLLDTDRVQFGPIVALNPATLLPLPEEGLQHDCLDILAEAHGTRPDLTDQPLPDADHTWYTDGSSFLQEGQRKAGAAVTTETEVVWAKALPAGTSAQRAELIALTQALKMAEGKKLNVYTDSRYAFATAHIHGEIYRRRGWLTSEGKEIKNKDEILALLKALFLPKRLSIIHCPGHQKGNRAEARGNRMADQAAREVATRETPETSTLLAGKRTADGSEFEKRTADGSEFESPKKKAKVE

SEQ ID NO: 6903 - protein, 2096 aa, synthetic construct
MPAAKRVKLDGGDKKYSIGLDIGTNSVGWAVITDEYKVPSKKFKVLGNTDRHSIKKNLIGALLFDSGETAEATRLKRTARRRYTRRKNRICYLQEIFSNEMAKVDDSFFHRLEESFLVEEDKKHERHPIFGNIVDEVAYHEKYPTIYHLRKKLVDSTDKADLRLIYLALAHMIKFRGHFLIEGDLNPDNSDVDKLFIQLVQTYNQLFEENPINASGVDAKAILSARLSKSRRLENLIAQLPGEKKNGLFGNLIALSLGLTPNFKSNFDLAEDAKLQLSKDTYDDDLDNLLAQIGDQYADLFLAAKNLSDAILLSDILRVNTEITKAPLSASMIKRYDEHHQDLTLLKALVRQQLPEKYKEIFFDQSKNGYAGYIDGGASQEEFYKFIKPILEKMDGTEELLVKLNREDLLRKQRTFDNGSIPHQIHLGELHAILRRQEDFYPFLKDNREKIEKILTFRIPYYVGPLARGNSRFAWMTRKSEETITPWNFEEVVDKGASAQSFIERMTNFDKNLPNEKVLPKHSLLYEYFTVYNELTKVKYVTEGMRKPAFLSGEQKKAIVDLLFKTNRKVTVKQLKEDYFKKIECFDSVEISGVEDRFNASLGTYHDLLKIIKDKDFLDNEENEDILEDIVLTLTLFEDREMIEERLKTYAHLFDDKVMKQLKRRRYTGWGRLSRKLINGIRDKQSGKTILDFLKSDGFANRNFMQLIHDDSLTFKEDIQKAQVSGQGDSLHEHIANLAGSPAIKKGILQTVKVVDELVKVMGRHKPENIVIEMARENQTTQKGQKNSRERMKRIEEGIKELGSQILKEHPVENTQLQNEKLYLYYLQNGRDMYVDQELDINRLSDYDVDHIVPQSFLKDDSIDNKVLTRSDKARGKSDNVPSEEVVKKMKNYWRQLLNAKLITQRKFDNLTKAERGGLSELDKAGFIKRQLVETRQITKHVAQILDSRMNTKYDENDKLIREVKVITLKSKLVSDFRKDFQFYKVREINNYHHAHDAYLNAVVGTALIKKYPKLESEFVYGDYKVYDVRKMIAKSEQEIGKATAKYFFYSNIMNFFKTEITLANGEIRKRPLIETNGETGEIVWDKGRDFATVRKVLSMPQVNIVKKTEVQTGGFSKESILPKRNSDKLIARKKDWDPKKYGGFDSPTVAYSVLVVAKVEKGKSKKLKSVKELLGITIMERSSFEKNPIDFLEAKGYKEVKKDLIIKLPKYSLFELENGRKRMLASAGELQKGNELALPSKYVNFLYLASHYEKLKGSPEDNEQKQLFVEQHKHYLDEIIEQISEFSKRVILADANLDKVLSAYNKHRDKPIREQAENIIHLFTLTNLGAPAAFKYFDTTIDRKRYTSTKEVLDATLIHQSITGLYETRIDLSQLGGDGGGGSEAAAKGGGGGTLNIEDEYRLHEISTEPDVSPGSTWLSDFPQAWAETGGMGLAVRQAPLIIPLKATSTPVSIKQYPMSQEAKLGIKPHIQRLLDQGILVPCQSPWNTPLLPVKKPGTNDYRPVQGLREVNKRVEDIHPTVPNPYNLLSGLPTSHRWYTVLDLKDAFFCLRLHPTSQPLFASEWRDPGMGISGQLTWTRLPQGFKNSPTLFNEALHRGLADFRIQHPDLILLQYVDDLLLAATSELDCQQGTRALLKTLGNLGYRASAKKAQICQKQVKYLGYLLREGQRWLTEARKETVMGQPTPKTPRQLREFLGTAGFCRLWIPRFAEMAAPLYPLTKPGTLFNWGPDQQKAYHEIKQALLTAPALGLPDLTKPFELFVDEKQGYAKGVLTQKLGPWRRPVAYLSKKLDPVAAGWPPCLRMVAAIAVLTKDAGKLTMGQPLVILAPHAVEALVKQPPDRWLSNARMTHYQAMLLDTDRVQFGPVVALNPATLLPLPEEGAPHDCLEILAETHGTEPDLTDQPIPDADHTWYTDGSSFLQEGQRKAGAAVTTETEVIWARALPAGTSAQRAELIALTQALKMAEGKRLNVYTDSRYAFATAHIHGEIYKRRGWLTSEGREIKNKSEILALLKALFLPKRLSIIHCLGHQKGDSAEARGNRLADQAAREAAIKTPPDTSTLLAGKRTADGSEFEKRTADGSEFESPKKKAKVE
